(19) United States
(12) Patent Application Publication
(10) Pub. No.: US 2012/0017292 A1
(43) Pub. Date: Jan. 19, 2012

(54) ISOLATED NOVEL NUCLEIC ACID AND PROTEIN MOLECULES FROM CORN AND METHODS OF USING THOSE MOLECULES TO GENERATE TRANSGENE PLANTS WITH ENHANCED AGRONOMIC TRAITS

(76) Inventors: David K. Kovalic, Clayton, MO (US); Jack E. Tabaska, O'Fallon, MO (US); Bo-Xing Qiu, Chesterfield, MO (US); Wei Wu, Chesterfield, MO (US)

(21) Appl. No.: 13/138,180

(22) PCT Filed: Jan. 13, 2010
(86) PCT No.: PCT/US10/20833

§ 371 Date: Sep. 30, 2011

Related U.S. Application Data
(60) Provisional application No. 61/205,391, filed on Jan. 16, 2009.

(51) Int. Cl. A01H 1/02; A01H 5/10; C12N 5/04; A01H 5/00; C12N 15/29; C12N 15/82

(52) U.S. Cl. 800/260; 536/23.6; 435/320.1; 435/419; 800/298; 800/320.1; 800/312; 800/314; 800/320.3; 800/320.2

(57) ABSTRACT

This disclosure provides purified nucleic acids and polypeptides. Also provided are transgenic plants, seeds, and plant cells containing DNA for expression of the proteins that are useful for imparting enhanced agronomic trait(s) to transgenic crop plants, methods of making such plants and methods of making agricultural commodity including seeds and hybrid seeds from such plants.

### CROSS REFERENCE TO RELATED APPLICATIONS

[0001] This application claims benefit under 35 USC §119(e) of U.S. provisional application Ser. No. 61/205,391 filed on Jan. 16, 2009 which is incorporated herein by reference in its entirety.

### TECHNICAL FIELD OF THE INVENTION

[0002] Disclosed herein are inventions in the field of plant genetics and developmental biology. More specifically, this invention provides novel compositions of corn DNA and peptide molecules. Also disclosed are plants comprising recombinant DNA providing one or more enhanced traits in a transgenic plant, including cells, seed, and pollen derived from such a plant, as well as methods of making and using such plant.

### INCORPORATION-BY-REFERENCE OF MATERIALS FILED ON COMPACT DISC

[0003] A sequence listing having the file name “38-21(56219)A-PCT_SeqListing.txt” was created on Dec. 23, 2009 and has 86750 sequences and is herein incorporated by reference in its entirety. Per Box No. IX (g) of the PCT Request, form PCT/RO/101, the sequence listing will be filed separately on a physical data carrier, on the same day (Jan. 13, 2010), and in the form of an Annex C/ST.25 text file. The sequence listing will be sent to the United States Patent and Trademark Office by Express Mail No. EV736977066US.

### SUMMARY OF THE INVENTION

[0004] Certain embodiments of the disclosed invention provide recombinant DNA constructs having polynucleotides characterized by reference to SEQ ID NO:1-43375 and the cognate proteins with amino acid sequences having reference to SEQ ID NO:43376-86750. The recombinant DNA constructs are used in aspects of the various embodiments of the invention to provide enhanced traits when stably integrated into the chromosomes and expressed in the nuclei of transgenic plants cells. In many aspects of these embodiments, the recombinant DNA constructs, when expressed in a plant cell, provide for expression of cognate proteins. In particular aspects of the invention the recombinant DNA constructs for expressing cognate proteins are characterized by cognate amino acid sequence that have at least 95% identity over at least 95% of the length of a reference sequence selected from the group consisting of SEQ ID NOs: 43376-86750 when the amino acid sequence is aligned to the reference sequence. In some aspects of the invention, the recombinant DNA constructs are characterized as being constructed with sense-oriented and/or anti-sense-oriented polynucleotides from the group consisting of SEQ ID NOs: 1-43375 which, when expressed in a plant cell, provide for the suppression of cognate proteins having amino acid sequences that have at least 95% identity over at least 95% of the length of a reference sequence selected from the group consisting of SEQ ID NOs: 43376-86750.

[0005] In certain aspects of this invention the recombinant DNA constructs of the invention are stably integrated into the chromosome of a plant cell nucleus.

[0006] Certain aspects of this embodiment of the invention provide transgenic plant cells having stably integrated recombinant DNA constructs, transgenic plants and seeds comprising a plurality of such transgenic plant cells and transgenic pollen of such plants. Such transgenic plants can be selected from a population of transgenic plants regenerated from plant cells transformed with recombinant DNA constructs by screening transgenic plants for an enhanced trait as compared to control plants. The enhanced trait provided may include, but is not limited to, enhanced water use efficiency, enhanced cold tolerance, increased yield, enhanced nitrogen use efficiency, altered seed protein composition, altered seed oil composition, or any combinations thereof.

[0007] Other embodiments of the invention provide for plant cells, plants, seeds, and pollen that can further comprise DNA expressing a protein that provides tolerance from exposure to an herbicide applied at levels that are lethal to a wild type plant cell.

[0008] Embodiments of the invention also provide methods for manufacturing non-natural, transgenic seed that can be used to produce a crop of transgenic plants with an enhanced trait resulting from expression of a stably-integrated recombinant DNA construct. The methods may comprise one or more of the following steps: (a) screening a population of plants for an enhanced trait and a recombinant DNA construct, where individual plants in the population can exhibit the trait at a level less than, essentially the same as or greater than the level that the trait is exhibited in control plants, (b) selecting from the population one or more plants that exhibit the trait at a level greater than the level that said trait is exhibited in control plants, (c) collecting seed from a selected plant, (d) verifying that the recombinant DNA is stably integrated in said selected plants, (e) analyzing tissue of a selected plant to determine the production or suppression of a protein having the function of a protein encoded by nucleotides in at least one sequence selected from SEQ ID NOs:1-43375 or their complete complement thereof. In certain embodiments of the invention, the plants in the population further include DNA expressing a protein that provides tolerance to exposure to a herbicide applied at levels that are lethal to wild type plant cells and the selecting is affected by treating the population with the herbicide, e.g. a glyphosate, dicamba, or glufosinate compound. In another embodiment of the invention, the plants are selected by identifying plants with the enhanced trait. The methods can be used for the manufacturing corn, soybean, cotton, canola, alfalfa, wheat, rice, sugarcane or sugar beet seed. In other embodiments of the present invention, the methods can also be used for manufacture transgenic plants including, but are not limited to, millet, barley, peanut, pigeon pea, sorghum, vegetables (including but not limited to Broccoli, Cauliflower, Cabbage, Radish, Chinese cabbage, Melons, Watermelons, Cucumber, Gourds, Pumpkin, Squash, Pepper, Tomato, Eggplant, Onion, Carrot, Garden Bean, Sweet Corn, Pea, Dry Bean, Okra, Spinach, Leek, Lettuce, and Fennel), grape, berries (including blue, black, raspberry, mullberry, boisenberry, etc), cherry and related fruit trees (including but not limited to plum, peach, apricot, kiwi, pomegranate, mango, fig), fruit trees (including but not limited to orange, lemon, lime, blood orange, grapefruit, and the like), and nut trees (including but not limited to coconut, walnut (English and black), pecan, almond, hazelnut, brazil nut, hickory nut, acorn, and the like) and sunflower, other oilseed producing plants or any combinations thereof.

[0009] Other embodiments of the invention provide a methods for producing hybrid corn seed by acquiring hybrid corn seed from a herbicide tolerant corn plant which also has stably-integrated, recombinant DNA construct having a promoter that is (a) functional in plant cells and (b) is operably linked to DNA that encodes or suppresses a protein having the function of a protein encoded by nucleotides in at least one sequence selected from the group consisting of SEQ ID NOs:1-43375. The methods of these embodiments may further include producing corn plants from said hybrid corn seed, wherein a fraction of the plants produced from said hybrid corn seed is homozygous for said recombinant DNA, a fraction of the plants produced from said hybrid corn seed is hemizygous for said recombinant DNA, and a fraction of the plants produced from said hybrid corn seed has none of said recombinant DNA; selecting corn plants which are homozygous and hemizygous for said recombinant DNA by treating with an herbicide; collecting seed from herbicide-treated-surviving corn plants and planting said seed to produce further progeny corn plants; repeating the selecting and collecting steps at least once to produce an inbred corn line; and crossing the inbred corn line with a second corn line to produce hybrid seed.

[0010] Other embodiments of the invention provide methods for selecting a plant comprising plant cells of the invention by using an immunoreactive antibody to detect the presence or absence of protein expressed or suppressed by recombinant DNA in seed or plant tissue. Another embodiment of the invention provides anti-counterfeit milled seed having, as an indication of origin, plant cells of this invention.

[0011] Still other embodiments of this invention provide for transgenic plants with enhanced water use efficiency or enhanced nitrogen use efficiency. For example, this invention provides methods of growing a corn, cotton, soybean, or canola crop without irrigation water by planting seed having plant cells of the invention which are selected for enhanced water use efficiency. Alternatively embodiments of these methods include applying reduced irrigation water, e.g. providing up to 300 millimeters of ground water during the production of a corn crop. This invention also provides methods of growing a corn, cotton, soybean or canola crop without added nitrogen fertilizer by planting seed having plant cells of the invention which are selected for enhanced nitrogen use efficiency.

[0012] Other embodiments of the invention provide mixtures comprising plants cells and an antibody to a protein produced in the cells where the protein has an amino acid sequence that has at least 90% identity over at least 90% of the length of a reference sequence selected from the group consisting of SEQ ID NO: 43376-86750 when the sequence is aligned to the reference sequence.

[0013] In another aspect, the present invention includes a mixture having plant cells, and an antibody to a protein produced in said cells wherein said protein has an amino acid sequence that has at least 95% identity over at least 95% of the length of a reference sequence selected from the group consisting of SEQ ID NO: 43376-86750 when said amino acid sequence is aligned to said reference sequence.

[0014] In another aspect, the present invention includes a mixture having plant cells, and an antibody to a protein produced in said cells wherein said protein has an amino acid sequence that has at least 98% identity over at least 98% of the length of a reference sequence selected from the group consisting of SEQ ID NO: 43376-86750 when said amino acid sequence is aligned to said reference sequence.

[0015] In another aspect, the present invention includes a mixture having plant cells, and an antibody to a protein produced in said cells wherein said protein has an amino acid sequence that has at least 99% identity over at least 99% of the length of a reference sequence selected from the group consisting of SEQ ID NO: 43376-86750 when said amino acid sequence is aligned to said reference sequence.

[0016] In another aspect, the present invention includes a mixture having plant cells, and an antibody to a protein produced in said cells wherein said protein has an amino acid sequence that has at least 99.5% identity over at least 99.5% of the length of a reference sequence selected from the group consisting of SEQ ID NO: 43376-86750 when said amino acid sequence is aligned to said reference sequence.

[0017] Yet another aspect of the present invention includes a transgenic plant cell with stably integrated, recombinant DNA comprising a promoter that is functional in plant cells and that is operably linked to DNA from a plant, bacteria or yeast that encodes a protein having at least 90% sequence identity selected from the group consisting of SEQ ID NO: 43376-86750; wherein said plant cell is selected from a population of plant with said recombinant DNA by screening plants that are regenerated from plant cells in said population and that express said protein for an enhanced trait as compared to control plants that do not have said recombinant DNA; and wherein said enhanced trait includes, but are not limited to, enhanced water use efficiency, enhanced cold tolerance, increased yield, enhanced nitrogen use efficiency, enhanced seed protein or enhanced seed oil.

### ILLUSTRATIVE EMBODIMENTS OF THE INVENTION

[0018] While the making and using of various embodiments of the present invention are discussed in detail below, it should be appreciated that the present invention provides many applicable inventive concepts that can be embodied in a wide variety of specific contexts. The specific embodiments discussed herein are merely illustrative of specific ways to make and use the invention and do not delimit the scope of the invention.

[0019] To facilitate the understanding of this invention, a number of terms are defined below. Terms defined herein have meanings as commonly understood by a person of ordinary skill in the areas relevant to the present invention. Terms such as “a”, “an” and “the” are not intended to refer to only a singular entity, but include the general class of which a specific example may be used for illustration. The terminology herein is used to describe specific embodiments of the invention, but their usage does not delimit the invention, except as outlined in the claims.

In the attached sequence listing:

[0020] SEQ ID NO:1-43375 are nucleotide sequences of the coding strand of DNA for “genes” used in the recombinant DNA imparting an enhanced trait in plant cells, e.g. each comprises a coding sequence for a protein;

[0021] SEQ ID NO: 43376-86750 are amino acid sequences of the cognate protein of the “genes” with nucleotide coding sequences provided by SEQ ID NO: 1-43375;

[0022] As used herein, a “plant cell” means a plant cell that is transformed with stably-integrated, non-natural, recombinant DNA, e.g. by Agrobacterium-mediated transformation or by bombardment using microparticles coated with recombinant DNA or other means. A plant cell of this invention can be an originally-transformed plant cell that exists as a microorganism or as a progeny plant cell that is duplicated by regeneration into differentiated tissue, e.g. into a transgenic plant with stably-integrated, non-natural recombinant DNA, or seed or pollen derived from a progeny transgenic plant.

[0023] As used herein, a “transgenic plant” means a plant whose genome has been altered by the stable integration of recombinant DNA. A transgenic plant includes a plant regenerated from an originally-transformed plant cell and progeny transgenic plants from later generations or crosses of a transformed plant.

[0024] A “consensus amino acid sequence” means an artificial, amino acid sequence indicating conserved amino acids in the sequence of homologous proteins as determined by statistical analysis of an optimal alignment, e.g. CLUSTALW, of amino acid sequence of homolog proteins. The consensus sequences listed in the sequence listing were created by identifying the most frequent amino acid at each position in a set of aligned protein sequences. When there was 100% identity in an alignment the amino acid is indicated by a capital letter. When the occurrence of an amino acid is at least about 70% in an alignment, the amino acid is indicated by a lower case letter. When there is no amino acid occurrence of at least about 70%, e.g. due to diversity or gaps, the amino acid is indicated by an “x”. When used to defined embodiments of the invention, a consensus amino acid sequence will be aligned with a query protein amino acid sequence in an optimal alignment, e.g. CLUSTALW. An embodiment of the invention will have identity to the conserved amino acids indicated in the consensus amino acid sequence.

[0025] As used herein, “control plant” means a plant that does not contain the recombinant DNA that expressed a protein which imparts an enhanced trait. A control plant is to identify and select a transgenic plant that has an enhance trait. A suitable control plant can be a non-transgenic plant of the parental line used to generate a transgenic plant, e.g., devoid of recombinant DNA. A suitable control plant can in some cases be a progeny of a hemizygous transgenic plant line that is does not contain the recombinant DNA, known as a negative segregant.

[0026] As used herein, an “enhanced trait” means a characteristic of a transgenic plant that includes, but is not limited to, an enhance agronomic trait characterized by enhanced plant morphology, physiology, growth and development, yield, nutritional enhancement, disease or pest resistance, or environmental or chemical tolerance. In more specific aspects of this invention enhanced trait is selected from group of enhanced traits consisting of enhanced water use efficiency, enhanced cold tolerance, increased yield, enhanced nitrogen use efficiency, enhanced seed protein and enhanced seed oil. In an important aspect of the invention the enhanced trait is enhanced yield including increased yield under non-stress conditions and increased yield under environmental stress conditions. Stress conditions can include, for example, drought, shade, fungal disease, viral disease, bacterial disease, insect infestation, nematode infestation, cold temperature exposure, heat exposure, osmotic stress, reduced nitrogen nutrient availability, reduced phosphorus nutrient availability and high plant density. “Yield” can be affected by many properties including without limitation, plant height, pod number, pod position on the plant, number of internodes, incidence of pod shatter, grain size, efficiency of nodulation and nitrogen fixation, efficiency of nutrient assimilation, resistance to biotic and abiotic stress, carbon assimilation, plant architecture, resistance to lodging, percent seed germination, seedling vigor, and juvenile traits. Yield can also be affected by efficiency of germination (including germination in stressed conditions), growth rate (including growth rate in stressed conditions), ear number, seed number per ear, seed size, composition of seed (starch, oil, protein) and characteristics of seed fill.

[0027] Increased yield of a transgenic plant of the present invention can be measured in a number of ways, including test weight, seed number per plant, seed weight, seed number per unit area (e.g., seeds, or weight of seeds, per acre), bushels per acre, tonnes per acre, tons per acre, kilo per hectare. For example, maize yield can be measured as production of shelled corn kernels per unit of production area in bushels per acre or metric tons per hectare, often reported on a moisture adjusted basis at about 15.5 percent moisture. Increased yield can result from improved utilization of key biochemical compounds such as nitrogen, phosphorous and carbohydrate, or from improved responses to environmental stresses, such as cold, heat, drought, salt, and attack by pests or pathogens. Recombinant DNA used in this invention can also be used to provide plants having improved growth and development, and ultimately increased yield, as the result of modified expression of plant growth regulators or modification of cell cycle or photosynthesis pathways. Also of interest is the generation of transgenic plants that demonstrate enhanced yield with respect to a seed component that can correspond to an increase in overall plant yield. Such properties include enhancements in seed oil, seed molecules such as tocopherol, protein and starch, or oil, particular oil components as can be manifest by alterations in the ratios of seed components.

[0028] Seed according to the present invention may be planted, grown and harvested to produce a crop or terminal crop. As used herein, a “crop” is a plant or plant product that is grown and harvested, such plant or plant product including but not limited to plants or plant parts such as leaf, root, shoot, fruit, seed, grain, or the like. A “terminal crop” is a crop grown for uses other than for use as planting seed to produce subsequent generations of plants. In some crop plants, such as grain produced from hybrid corn, the crop is not very suitable for planting because it does not breed true and the crop can then be conveniently referred to as “hybrid grain.” In other crop plants, where the crop does breed true, such as soybean, whether a crop is planting seed or a terminal crop will depend on the uses and marketing channels of the crop. If used or marketed for planting, it will be a crop of planting seed; if used or marketed for other purposes it will be a terminal crop.

[0029] As used herein, “exogenous promoter region” refers to a sequence, capable of promoting mRNA transcription, that does not naturally occur in the plant at the same site and/or linked to the nucleic acids. The promoter can be from a different plant species or it can be from the same plant species, but naturally found in a different location in a non-genetically modified plant. Moreover, the promoter region can be found in the same genetic locus as is present a native plant, but linked to different sequence(s), than are native.

[0030] As used herein, “promoter” means regulatory DNA for initializing transcription. A “plant promoter” is a promoter capable of initiating transcription in plant cells whether or not its origin is a plant cell, e.g. is it well known that Agrobacterium promoters are functional in plant cells. Thus, plant promoters include promoter DNA obtained from plants, plant viruses and bacteria such as Agrobacterium and Bradyrhizobium bacteria. Examples of promoters under developmental control include promoters that preferentially initiate transcription in certain tissues, such as leaves, roots, or seeds. Such promoters are referred to as “tissue preferred”. Promoters that initiate transcription only in certain tissues are referred to as “tissue specific”. A “cell type” specific promoter primarily drives expression in certain cell types in one or more organs, for example, vascular cells in roots or leaves. An “inducible” or “repressible” promoter is a promoter which is under environmental control. Examples of environmental conditions that can effect transcription by inducible promoters include anaerobic conditions, or certain chemicals, or the presence of light. Tissue specific, tissue preferred, cell-type specific, and inducible promoters constitute the class of “non-constitutive” promoters. A “constitutive” promoter is a promoter which is active under most conditions.

[0031] As used herein, a “functional fragment” refers to a portion of a polypeptide provided herein which retains full or partial molecular, physiological or biochemical function of the full length polypeptide. A functional fragment often contains the domain(s), such as Pfam domain, identified in the polypeptide provided in the sequence listing. In some embodiment, a function fragment includes at least 1, 2, 3, 4, 5 or more starting coding codons and at least 1, 2, 3, 4, 5 or more stop codons.

[0032] Embodiments of the invention provide molecules of that include “fragments” of the disclosed recombinant DNA molecules; including oligonucleotides of at least 15, at least 16 or 17, at least 18 or 19, and at least 20, 21, 22, 23, 24, 25, 26, 27, 28, 29, 30, 31, 32, 33, 34, 35, 36, 37, 38, 39, 40, 41, 42, 43, 44, 45, 46, 47, 48, 49, 50, 51, 52, 53, 54, 55, 56, 57, 58, 59, 60, 61, 62, 63, 64, 65, 66, 67, 68, 69, 70, 71, 72, 73, 74, 75, 76, 77, 78, 79, 80, 81, 82, 83, 84, 85, 86, 87, 88, 89, 90, 91, 92, 93, 94, 95, 96, 97, 98, 99, 100 or more, consecutive nucleotides of any of the sequences provided. Such oligonucleotides are fragments of the larger molecules having a sequence selected from the group consisting of SEQ ID NO: 1 through SEQ ID NO: 43375, and find use, for example as probes and primers for detection of the polynucleotides of the present invention. Alternatively, these fragments can be used as RNAi for gene suppression purposes. In some embodiments, a fragment can contain one or more coding region. In another embodiment, a fragment can include non-coding regions only.

[0033] Aspects of the various embodiments of the invention also provide for nucleic acid fragments of SEQ ID NO: 1 through SEQ ID NO: 43375 that are at least about 125, 150, 175, 200, 225, 250, 300, 325, 350, 375, 400, 425, 450, 475, 500, 525, 550, 575, 600, 625, 650, 675, 700, 725, 750, 775, 800, 825, 850, 875, 900, 925, 950, 975, 1000, 1050, 1100, 1150, 1200, 1250, 1300, 1350, 1400, 1450, 1500, 1550, 1600, 1650, 1700, 1750, 1800, 1850, 1900, 1950, 2000, 2050, 2100, 2150, 2200, 2250, 2300, 2350, 2400, 2450, 2500, 2550, 2600, 2650, 2700, 2750, 2800, 2850, 2900, 2950, 3000 or more nucleotides in length. Some aspects of these embodiments provide for nucleic acid fragment molecules that encode functional fragment of any of the polypeptide sequences provided in SEQ ID NO: 43376 to SEQ ID NO: 86750.

[0034] Other embodiments of the present invention provide for one or more polypeptides having at least about 10 contiguous peptide residues of one or more of the peptide sequences provided in SEQ ID NO: 43376 to SEQ ID NO: 86750. In other aspects of these embodiment, the polypeptide(s) comprises at least 15, 20, 25, 30, 35, 40, 45, 50, 55, 60, 65, 70, 75, 80, 85, 90, 95, 100, 105, 110, 115, 120, 125, 130, 135, 140, 145, 150, 155, 160, 165, 170, 175, 180, 185, 190, 195, 200, 205, 210, 215, 220, 225, 230, 235, 240, 245, 250, 255, 260, 265, 270, 275, 280, 285, 290, 295, 300, 305, 310, 315, 320, 325, 330, 335, 340, 345, 350, 355, 360, 365, 370, 375, 380, 385, 390, 395, 400, 405, 410, 415, 420, 425, 430, 435, 440, 445, 450, 455, 460, 465, 470, 475, 480, 485, 490, 495, 500, 525, 550, 575, 600, 625, 650, 675, 700, 750, 800, 850, 900, 950, 1000 or more contiguous peptide residues from one or more of the sequences provided in SEQ ID NO: 43376 to SEQ ID NO: 86750. In particularly aspects, these embodiments the poly peptide includes a functional fragment of one or more of the polypeptides provided in the Sequence Listing.

[0035] The present invention also provides substantial, credible, and specific utility of each nucleic acid and amino acid molecules disclosed in the sequence listing. For example, SEQ ID No. 43378 is annotated as Nitrogen assimilation regulatory protein in the sequence listing. This correlation indicates SEQ ID No. 43378 has substantial, credible, and specific utility.

[0036] As used herein, “expressed” means produced, e.g. a protein is expressed in a plant cell when its cognate DNA is transcribed to mRNA that is translated to the protein.

[0037] As used herein, an “expression cassette of a DNA construct” is capable of integrating in a plant genome, expressing a functional polypeptide and providing a transgenic plant expressing polypeptides of the invention.

[0038] As used herein, “suppressed” means decreased, e.g. a protein is suppressed in a plant cell when there is a decrease in the amount and/or activity of the protein in the plant cell. The presence or activity of the protein can be decreased by any amount up to and including a total loss of protein expression and/or activity.

[0039] As used herein, a “functional fragment” refers to a portion of a polypeptide provided herein which retains full or partial molecular, physiological or biochemical function of the full length polypeptide. A functional fragment often contains the domain(s), such as Pfam domain, identified in the polypeptide provided in the sequence listing.

[0040] As used herein, a “homolog” means a protein in a group of proteins that perform the same biological function, e.g. proteins that belong to the same Pfam protein family and that provide a common enhanced trait in transgenic plants of this invention. Homologs are expressed by homologous genes. With reference to homologous genes, homologs include orthologs, e.g., genes expressed in different species that evolved from a common ancestral genes by speciation and encode proteins retain the same function, but do not include paralogs, e.g., genes that are related by duplication but have evolved to encode proteins with different functions. Homologous genes include naturally occurring alleles and artificially-created variants. Degeneracy of the genetic code provides the possibility to substitute at least one base of the protein encoding sequence of a gene with a different base without causing the amino acid sequence of the polypeptide produced from the gene to be changed. When optimally aligned, homolog proteins have typically at least about 60% identity, in some instances at least about 70%, at least about 75%, at least about bout 80%, about 85%, at least about 90%, at least about bout 92%, at least about bout 94%, at least about bout 95%, at least about 96%, at least about 97%, at least about 98%, at least about 99%, and even at least about 99.5% identity over the full length of a protein identified as being associated with imparting an enhanced trait when expressed in plant cells. In one aspect of the invention homolog proteins have an amino acid sequence that has at least about 80%, at least about 85%, at least about 90%, at least about 92.5%, at least about 95%, at least about 96%, at least about 97%, at least about 98%, at least about 99%, and at least about 99.5% identity to a consensus amino acid sequence of proteins and homologs that can be build from sequences disclosed herein.

[0041] Homologs can be identified by comparison of amino acid sequence, e.g. manually or by use of a computer-based tool using known homology-based search algorithms such as those commonly known and referred to as BLAST, FASTA, and Smith-Waterman. A local sequence alignment program, e.g. BLAST, can be used to search a database of sequences to find similar sequences, and the summary Expectation value (E-value) used to measure the sequence base similarity. Because a protein hit with the best E-value for a particular organism may not necessarily be an ortholog, e.g., have the same function, or be the only ortholog, a reciprocal query is used to filter hit sequences with significant E-values for ortholog identification. The reciprocal query entails search of the significant hits against a database of amino acid sequences from the base organism that are similar to the sequence of the query protein. A hit can be identified as an ortholog, when the reciprocal query's best hit is the query protein itself or a protein encoded by a duplicated gene after speciation. A further aspect of the homologs encoded by DNA useful in the transgenic plants of the invention are those proteins that differ from a disclosed protein as the result of deletion or insertion of one or more amino acids in a native sequence.

[0042] Other functional homolog proteins differ in one or more amino acids from those of a trait-improving protein disclosed herein as the result of one or more of the well-known conservative amino acid substitutions, e.g., valine is a conservative substitute for alanine and threonine is a conservative substitute for serine. Conservative substitutions for an amino acid within the native sequence can be selected from other members of a class to which the naturally occurring amino acid belongs. Representative amino acids within these various classes include, but are not limited to: (1) acidic (negatively charged) amino acids such as aspartic acid and glutamic acid; (2) basic (positively charged) amino acids such as arginine, histidine, and lysine; (3) neutral polar amino acids such as glycine, serine, threonine, cysteine, tyrosine, asparagine, and glutamine; and (4) neutral nonpolar (hydrophobic) amino acids such as alanine, leucine, isoleucine, valine, proline, phenylalanine, tryptophan, and methionine. Conserved substitutes for an amino acid within a native amino acid sequence can be selected from other members of the group to which the naturally occurring amino acid belongs. For example, a group of amino acids having aliphatic side chains is glycine, alanine, valine, leucine, and isoleucine; a group of amino acids having aliphatic-hydroxyl side chains is serine and threonine; a group of amino acids having amide-containing side chains is asparagine and glutamine; a group of amino acids having aromatic side chains is phenylalanine, tyrosine, and tryptophan; a group of amino acids having basic side chains is lysine, arginine, and histidine; and a group of amino acids having sulfur-containing side chains is cysteine and methionine. Naturally conservative amino acids substitution groups are: valine-leucine, valine-isoleucine, phenylalanine-tyrosine, lysine-arginine, alanine-valine, aspartic acid-glutamic acid, and asparagine-glutamine. A further aspect of the invention includes proteins that differ in one or more amino acids from those of a described protein sequence as the result of deletion or insertion of one or more amino acids in a native sequence.

[0043] Genes that are homologous to each other can be grouped into families and included in multiple sequence alignments. Then a consensus sequence for each group can be derived. This analysis enables the derivation of conserved and class-(family) specific residues or motifs that are functionally important. These conserved residues and motifs can be further validated with 3D protein structure if available. The consensus sequence can be used to define the full scope of the invention, e.g., to identify proteins with a homolog relationship. Thus, the present invention contemplates that protein homologs include proteins with an amino acid sequence that has at least 90% identity to such a consensus amino acid sequence sequences.

[0044] As used herein, “operably linked” refers to the association of two or more nucleic acid elements in a recombinant DNA construct, e.g. as when a promoter is operably linked with DNA that is transcribed to RNA whether for expressing or suppressing a protein. Recombinant DNA constructs can be designed to express a protein which can be an endogenous protein, an exogenous homologue of an endogenous protein or an exogenous protein with no native homologue. Alternatively, recombinant DNA constructs can be designed to suppress the level of an endogenous protein, e.g. by suppression of the native gene. Such gene suppression can be effectively employed through a native RNA interference (RNAi) mechanism in which recombinant DNA comprises both sense and anti-sense oriented DNA matched to the gene targeted for suppression where the recombinant DNA is transcribed into RNA that can form a double-strand to initiate an RNAi mechanism. Gene suppression can also be effected by recombinant DNA that comprises anti-sense oriented DNA matched to the gene targeted for suppression. Gene suppression can also be effected by recombinant DNA that comprises DNA that is transcribed to a microRNA matched to the gene targeted for suppression. In the examples illustrating the invention recombinant DNA for effecting gene suppression that imparts is identified by the term “antisense”. It will be understood by a person of ordinary skill in the art that any of the ways of effecting gene suppression are contemplated and enabled by a showing of one approach to gene suppression.

[0045] As used herein, “percent identity” means the extent to which two optimally aligned DNA or protein segments are invariant throughout a window of alignment of components, for example nucleotide sequence or amino acid sequence. An “identity fraction” for aligned segments of a test sequence and a reference sequence is the number of identical components that are shared by sequences of the two aligned segments divided by the total number of sequence components in the reference segment over a window of alignment which is the smaller of the full test sequence or the full reference sequence. “Percent identity” (“% identity”) is the identity fraction times 100. Such optimal alignment is understood to be deemed as local alignment of DNA sequences. For protein alignment, a local alignment of protein sequences should allow introduction of gaps to achieve optimal alignment. Percent identity is calculated over the aligned length not including the gaps introduced by the alignment per se.

[0046] As used herein, a “plant by-product” includes any product that is made from a plant or plant product, for example, by dehulling, crushing, milling, extraction, hydrogenation, and other processes. A plant by-products in accordance with the invention, therefore, will include such as, for example, dehulled soybeans, crushed corn, soybean meal, soy milk, paper made from corn stalks, and a wide range of other useful products of processing based on plant vitamins, minerals, lipids, proteins and carbohydrates and their constituents that can be characterized as being produced from crops or terminal crops in accordance with the invention.

[0047] As used herein, a “plant cell” means a plant cell that is transformed with stably-integrated, recombinant DNA, e.g. by Agrobacterium-mediated transformation or by bombardment using microparticles coated with recombinant DNA or other means. A plant cell of this invention can be an originally-transformed plant cell that exists as a microorganism or as a progeny plant cell that is regenerated into differentiated tissue, e.g. into a transgenic plant with stably-integrated, non-natural recombinant DNA, or seed or pollen derived from a progeny transgenic plant.

[0048] As used herein, the term “polypeptide” or “polypeptide molecule” means a chain of amino acids. Polypeptide is also commonly referred as “protein”.

[0049] As used herein, “polyadenylated ribonucleotides” refers to the series of adenosines at the 3′ end of a polyribonucleotide commonly referred to as a “poly-A tail”.

[0050] As used herein, “recombinant DNA” means DNA which has been a genetically engineered and constructed outside of a cell including DNA containing naturally occurring DNA or cDNA or synthetic DNA.

[0051] As used herein, the term “structural nucleic acid molecule” refers to a molecule having sequence that encodes a protein, functional peptide fragment, or any other molecule that has biological activity (including, but not limited to, mRNA and bioactive RNA molecules, including antisense RNA).

[0052] As used herein, the term “substantially purified nucleic acid” or polypeptide means nucleic acid or protein separated from substantially all other molecules normally associated with it in its native state. A substantially purified nucleic acid can be greater than about 60% free from the other molecules (exclusive of solvent) present in the natural mixture. The term “substantially purified” is not intended to encompass molecules present in their native state.

[0053] “Pfam” database is a large collection of multiple sequence alignments and hidden Markov models covering many common protein families, e.g. Pfam version 19.0 (December 2005) contains alignments and models for 8183 protein families and is based on the Swissprot 47.0 and SP-TrEMBL 30.0 protein sequence databases. See S.R. Eddy, “Profile Hidden Markov Models”, Bioinformatics 14:755-763, 1998. The Pfam database is currently maintained and updated by the Pfam Consortium. The alignments represent some evolutionary conserved structure that has implications for the protein's function. Profile hidden Markov models (profile HMMs) built from the protein family alignments are useful for automatically recognizing that a new protein belongs to an existing protein family even if the homology by alignment appears to be low.

[0054] The modulation of protein in transgenic plant cells (hereafter generally referred to as the “target protein”) can be achieved by a variety of approaches involving the use of recombinant DNA constructs. Examples of such recombinant DNA constructs include recombinant DNA constructs that produce messenger RNA for the target protein where native miRNA recognition sites in the mRNA for the target protein are modified or deleted, recombinant DNA constructs that produce an RNA gene suppression element such as a miRNA or a dsRNA comprising sense and anti-sense sequences from the gene encoding the target protein, recombinant DNA constructs that produce a transacting short interfering RNA (ta-siRNA) and recombinant DNA constructs that produce a miRNA element such as a decoy miRNA that is a target for native miRNA or RNA that sequesters target messenger RNA away from native miRNA.

[0055] Small RNAs that regulate protein expression include miRNAs and ta-siRNAs. A miRNA is a small (typically about 21 nucleotide) RNA that has the ability to modulate the expression of a target gene by binding to messenger RNA for the target protein leading to destabilization of the target protein messenger RNA or translational inhibition of the target protein messenger RNA, ultimately resulting in reduction of the target protein. The design and construction of ta-siRNA constructs and their use in the modulation of protein in transgenic plant cells is disclosed by Allen and Carrington in US Patent Application Publication US 2006/0174380 A1 which is incorporated herein by reference. The expression or suppression of such small RNAs are aspects of the invention that are conveniently illustrated by reference to use of miRNAs.

[0056] Recombinant DNA constructs can be used to modify the activity of native miRNAs by a variety of means. By increasing the expression of a miRNA, e.g. temporally or spatially, the modulation of expression of a native target gene can be enhanced. An alternative gene suppression approach for suppressing the expression of a target protein can include the use of a recombinant DNA construct that produces a synthetic miRNA that is designed to bind to a native or synthetic miRNA recognition site on messenger RNA for the target protein.

[0057] By reducing the expression of a miRNA, the modulation of a native target gene can be diminished resulting in enhanced expression of the target protein. More specifically, the expression of a target protein can be enhanced by suppression of the activity of the miRNA that binds to a recognition site in the messenger RNA that is transcribed from the native gene for the target protein. Several types of recombinant DNA constructs can be designed to suppress the activity of a miRNA.

[0058] For example, a recombinant DNA construct that produces an abundance of RNA with the miRNA recognition site can be used as a decoy for the native miRNA allowing endogenous messenger RNA with the miRNA recognition site to be translated to the target protein without interference from native miRNA. A recombinant DNA construct that produces RNA with a modified miRNA recognition site, e.g. with nucleotides at positions 10 and/or 11 in a 21mer miRNA recognition site which are unpaired with respect to the native miRNA, can be used to sequester natively expressed miRNA thereby reducing the cleavage that normally occurs when miRNA binds to a recognition site. The unpaired nucleotides can be produced e.g. through additional nucleotides between positions 10 and 11 or through substitutions of the nucleotides at positions 10 and 11.

[0059] Additionally, a recombinant DNA construct can be created that produces RNA that can be processed in plants into synthetic small RNA (miRNA-like) that can bind endogenous miRNA recognition sites but is unable to induce cleavage of mRNA because the small RNA is modified, for instance by having a modified nucleotide at positions 10 and/or 11 or a deletion that produces a bulge between positions 10 and 11 when the small RNA is paired with the miRNA recognition site. The resulting synthetic small RNA, a cleavage blocker, can reduce endogenous miRNA binding and thus block cleavage of a protected miRNA target site enhancing the expression of a target protein.

[0060] A recombinant DNA construct designed for producing a modified messenger RNA for the protein where the native miRNA recognition site is modified to be resistant to the binding of cognate miRNA which regulates the native gene can also be used to express protein from heterologous messenger RNA that is no longer modulated by the native miRNA.

[0061] The activity of a miRNA which down-regulates an endogenous protein is enhanced by enhancing the expression of the miRNA or by enhancing the ability of the miRNA to bind an RNA encoding the target protein. A recombinant DNA encoding an RNA encoding the miRNA or a miRNA-sensitive messenger RNA encoding the protein in which a miRNA binding site is added are designed to enhance miRNA activity resulting in enhanced suppression of the target mRNA and cognate protein. Recombinant DNA encoding an RNA encoding a miRNA, or a miRNA-sensitive RNA are designed using methods disclosed in US Patent Application Publication US 2009/0070898 A1.

[0062] Some, if not many, miRNAs modulate the expression of multiple proteins or biochemical pathways. Transgenic plants can be provided with enhanced traits not so much from the suppression or enhancement of the expression of a particular protein, as from change of enzyme activity in a pathway by modulating the level of a miRNA. Thus, aspects of this invention are achieved by enhanced miRNA activity resulting from use in transgenic plant cells of recombinant DNA constructs that produce an enhanced level of a miRNA. Other aspects of this invention are achieved by reduced miRNA activity resulting from use in transgenic plant cells of recombinant DNA constructs that produce a reduced level or activity of a miRNA.

### Recombinant DNA Constructs

[0063] Recombinant DNA constructs are assembled using methods well known to persons of ordinary skill in the art and typically comprise a promoter operably linked to DNA, the expression of which provides the enhanced agronomic trait. Other construct components can include additional regulatory elements, such as 5′ leaders and introns for enhancing transcription, 3′ untranslated regions (such as polyadenylation signals and sites), DNA for transit or signal peptides.

[0064] Numerous promoters that are active in plant cells have been described in the literature. These include promoters present in plant genomes as well as promoters from other sources, including nopaline synthase (NOS) promoter and octopine synthase (OCS) promoters carried on tumor-inducing plasmids of Agrobacterium tumefaciens and the CaMV35S promoters from the cauliflower mosaic virus as disclosed in U.S. Pat. Nos. 5,164, 316 and 5,322,938. Useful promoters derived from plant genes are found in U.S. Pat. No. 5,641,876 which discloses a rice actin promoter, U.S. Pat. No. 7,151,204 which discloses a maize chloroplast aldolase promoter and a maize aldolase (FDA) promoter, and US Patent Application Publication 2003/0131377 A1 which discloses a maize nicotianamine synthase promoter. These and numerous other promoters that function in plant cells are known to those skilled in the art and available for use in recombinant polynucleotides of the present invention to provide for expression of desired genes in transgenic plant cells.

[0065] Furthermore, the promoters can be altered to contain multiple “enhancer sequences” to assist in elevating gene expression. Such enhancers are known in the art. By including an enhancer sequence with such constructs, the expression of the selected protein can be enhanced. These enhancers often are found 5′ to the start of transcription in a promoter that functions in eukaryotic cells, but can often be inserted upstream (5′) or downstream (3′) to the coding sequence. In some instances, these 5′ enhancing elements are introns. Particularly useful as enhancers are the 5′ introns of the rice actin 1 (see U.S. Pat. No. 5,641,876) and rice actin 2 genes, the maize alcohol dehydrogenase gene intron, the maize heat shock protein 70 gene intron (U.S. Pat. No. 5,593,874) and the maize shrunken 1 gene. See also US Patent Application Publication 2002/0192813A1 which discloses 5′, 3′ and intron elements useful in the design of effective plant expression vectors.

[0066] In other aspects of the invention, sufficient expression in plant seed tissues is desired to affect improvements in seed composition. Exemplary promoters for use for seed composition modification include promoters from seed genes such as napin as disclosed in U.S. Pat. No. 5,420,034, maize L3 oleosin as disclosed in U.S. Pat. No. 6,433,252), zein Z27 as disclosed by Russell et al. (1997) Transgenic Res. 6(2):157-166), globulin 1 as disclosed by Belanger et al (1991) Genetics 129:863-872), glutelin 1 as disclosed by Russell (1997) supra), and peroxiredoxin antioxidant (Per1) as disclosed by Stacy et al. (1996) Plant Mol Biol. 31(6):1205-1216.

[0067] Recombinant DNA constructs in this invention will generally include a 3′ element that typically contains a polyadenylation signal and site. Well-known 3′ elements include those from Agrobacterium tumefaciens genes such as nos 3′, tml 3′, tmr 3′, tms 3′, ocs 3′, tr7 3′, for example disclosed in U.S. Pat. No. 6,090,627; 3′ elements from plant genes such as wheat (Triticum aesevitum) heat shock protein 17 (Hsp17 3′), a wheat ubiquitin gene, a wheat fructose-1,6-biphosphatase gene, a rice glutelin gene, a rice lactate dehydrogenase gene and a rice beta-tubulin gene, all of which are disclosed in US Patent Application Publication Number 2002/0192813 A1; and the pea (Pisum sativum) ribulose biphosphate carboxylase gene (rbs 3′), and 3′ elements from the genes within the host plant.

[0068] Constructs and vectors can also include a transit peptide for targeting of a gene to a plant organelle, particularly to a chloroplast, leucoplast or other plastid organelle. For descriptions of the use of chloroplast transit peptides see U.S. Pat. No. 5, 188,642 and U.S. Pat. No. 5,728,925. For description of the transit peptide region of an Arabidopsis EPSPS gene useful in the present invention, see Klee, H. J. et al (MGG (1987) 210:437-442).

[0069] Recombinant DNA constructs for gene suppression can be designed for any of a number the well-known methods for suppressing transcription of a gene, the accumulation of the mRNA corresponding to that gene or preventing translation of the transcript into protein. Posttranscriptional gene suppression can be practically effected by transcription of RNA that forms double-stranded RNA (dsRNA) having homology to mRNA produced from a gene targeted for suppression.

[0070] Gene suppression can also be achieved by insertion mutations created by transposable elements can also prevent gene function. For example, in many dicot plants, transformation with the T-DNA of Agrobacterium can be readily achieved and large numbers of transformants can be rapidly obtained. Also, some species have lines with active transposable elements that can efficiently be used for the generation of large numbers of insertion mutations, while some other species lack such options. Mutant plants produced by Agrobacterium or transposon mutagenesis and having altered expression of a polypeptide of interest can be identified using the polynucleotides of the present invention. For example, a large population of mutated plants can be screened with polynucleotides encoding the polypeptide of interest to detect mutated plants having an insertion in the gene encoding the polypeptide of interest.

[0071] Transgenic plants comprising or derived from plant cells of this invention transformed with recombinant DNA can be further enhanced with stacked traits, e.g. a crop plant having an enhanced trait resulting from expression of DNA disclosed herein in combination with other enhanced traits with various degree or amount of enhancement including, but not limited to enhanced water use efficiency, enhanced cold tolerance, increased yield, enhanced nitrogen use efficiency, enhanced seed protein and enhanced seed oil herbicide pest resistance traits, or any combinations thereof. For example, genes of the current invention can be stacked with other traits of agronomic interest, such as a trait providing herbicide resistance, or insect resistance, such as using a gene from Bacillus thuringensis to provide resistance against lepidopteran, coliopteran, homopteran, hemiopteran, and other insects. Herbicides for which transgenic plant tolerance has been demonstrated and the method of the present invention can be applied include, but are not limited to, glyphosate, dicamba, glufosinate, sulfonylurea, bromoxynil and norflurazon herbicides. Polynucleotide molecules encoding proteins involved in herbicide tolerance are well-known in the art and include, but are not limited to, a polynucleotide molecule encoding 5-enolpyruvylshikimate-3-phosphate synthase (EPSPS) disclosed in U.S. Pat. Nos. 5,094,945; 5,627,061; 5,633,435 and 6,040,497 for imparting glyphosate tolerance; polynucleotide molecules encoding a glyphosate oxidoreductase (GOX) disclosed in U.S. Pat. No. 5,463,175 and a glyphosate-N-acetyl transferase (GAT) disclosed in U.S. Patent Application Publication Number 2003/0083480 A1 also for imparting glyphosate tolerance; dicamba monooxygenase disclosed in U.S. Patent Application Publication Number 2003/0135879 A1 for imparting dicamba tolerance; a polynucleotide molecule encoding bromoxynil nitrilase (Bxn) disclosed in U.S. Pat. No. 4,810,648 for imparting bromoxynil tolerance; a polynucleotide molecule encoding phytoene desaturase (crtI) described in Misawa et al, (1993) Plant J. 4:833-840 and in Misawa et al, (1994) Plant J. 6:481-489 for norflurazon tolerance; a polynucleotide molecule encoding acetohydroxyacid synthase (AHAS, aka ALS) described in Sathasiivan et al. (1990) Nucl. Acids Res. 18:2188-2193 for imparting tolerance to sulfonylurea herbicides; polynucleotide molecules known as bar genes disclosed in DeBlock, et al. (1987) EMBO J. 6:2513-2519 for imparting glufosinate and bialaphos tolerance; polynucleotide molecules disclosed in U.S. Patent Application Publication Number 2003/010609 A1 for imparting N-amino methyl phosphonic acid tolerance; polynucleotide molecules disclosed in U.S. Pat. No. 6,107,549 for imparting pyridine herbicide resistance; molecules and methods for imparting tolerance to multiple herbicides such as glyphosate, atrazine, ALS inhibitors, isoxoflutole and glufosinate herbicides are disclosed in U.S. Pat. No. 6,376,754 and U.S. Patent Application Publication Number 2002/0112260. Molecules and methods for imparting insect/nematode/virus resistance are disclosed in U.S. Pat. Nos. 5,250,515; 5,880,275; 6,506,599; 5,986,175 and U.S. Patent Application Publication Number 2003/0150017 A1, each are herein incorporated by reference.

[0072] Another embodiment of the present invention provides methods for delivering transgenic crop plants comprising two or more genetic factors giving enhanced traits using haploid breeding approaches. One goal of transgenic trait integration is to deliver one or more transgenic traits to a inbred and the typical backcross process involved multiple generations with selection at each generation for the one or more transgenic traits coupled with selection for the elite inbred, referred to as the recurrent parent. As product concepts move to transgenic trait stacks, comprising two or more transgenic traits, the trait integration process becomes exponentially more complicated because an increasing number of progeny must be screened in order to recover progeny with both the transgenic traits and, as relevant, desired percent of the recurrent parent genome (i.e., 95% recurrent parent) and minimized percent of the donor parent genome (i.e., reduce linkage drag). The methods included herein provide an advantage over the art by reducing the time required to deliver a stacked transgenic trait hybrid to market as well as providing the potential for reducing the number of plots needed to generate an elite crop plant comprising two or more transgenic traits. These methods can be applied at any point in a breeding program, wherein the “recurrent” parent can be segregating. In other aspects, the recurrent parent comprises one or more genetic factors. Further, depending on the degree of segregating in the starting material, sister line generation can occur in parallel to trait integration. Examples of stacking two or more genetic factors using a haploid approach can be seen in U.S. Patent Application Publication Number 20090070891 and is herein incorporated by reference in its entirety.

[0073] Other aspects of the various embodiments of the invention includes, transgenic plants, transgenic plant seeds, transgenic crops, plant products and byproducts having any of the nucleic acid or protein fragments described above. The invention also provides for various methods that use such fragments.

[0074] Embodiments of the present invention also contemplate that the trait-improving recombinant DNA provided herein can be used in combination with other recombinant DNA to create plants with multiple desired traits or a further enhanced trait. The combinations generated can include multiple copies of any one or more of the recombinant DNA constructs. These stacked combinations can be created by any method, including but not limited to cross breeding of transgenic plants, or multiple genetic transformation.

[0075] DNA vectors containing gene(s) of interest or fragments of genes disclosed in the sequence listing can be delivered into plant cells via one of the several methods known to those skilled in the art, including but not limited to protoplast transformation, biolistic bombardment and Agrobacterium-mediated transformation. The delivered DNA can be integrated randomly into a plant genome or can also be present as part of the independently segregating genetic units such as artificial chromosome or mini-chromosome. One aspect of this embodiment, the construct further comprises regulatory sequences, including, for example, a promoter, operably linked to the sequence.

### Plant Cell Transformation Methods

[0076] Numerous methods for transforming chromosomes in a plant cell nucleus with recombinant DNA are known in the art and are used in methods of preparing a transgenic plant cell nucleus cell, and plant. Two effective methods for such transformation are Agrobacterium-mediated transformation and microprojectile bombardment. Microprojectile bombardment methods are illustrated in U.S. Pat. Nos. 5,015,580 (soybean); 5,550,318 (corn); 5,538,880 (corn); 5,914,451 (soybean); 6,160,208 (corn); 6,399,861 (corn); 6,153,812 (wheat) and 6,365,807 (rice) and Agrobacterium-mediated transformation is described in U.S. Pat. Nos. 5,159,135 (cotton); 5,824,877 (soybean); 5,463,174 (canola); 5,591,616 (corn); 5,846,797 (cotton); 6,384,301 (soybean), 7,026,528 (wheat) and 6,329,571 (rice), US Patent Application Publication 2004/0087030 A1 (cotton), and US Patent Application Publication 2001/0042257 A1 (sugar beet), all of which are incorporated herein by reference for enabling the production of transgenic plants. Transformation of plant material is practiced in tissue culture on a nutrient media, e.g., a mixture of nutrients that will allow cells to grow in vitro. Recipient cell targets include, but are not limited to, meristem cells, hypocotyls, calli, immature embryos and gametic cells such as microspores, pollen, sperm and egg cells. Callus can be initiated from tissue sources including, but not limited to, immature embryos, hypocotyls, seedling apical meristems, microspores and the like. Cells containing a transgenic nucleus are grown into transgenic plants.

[0077] In addition to direct transformation of a plant material with a recombinant DNA, a transgenic plant cell nucleus can be prepared by crossing a first plant having cells with a transgenic nucleus with recombinant DNA with a second plant lacking the transgenic nucleus. For example, recombinant DNA can be introduced into a nucleus from a first plant line that is amenable to transformation to transgenic nucleus in cells that are grown into a transgenic plant which can be crossed with a second plant line to introgress the recombinant DNA into the second plant line. A transgenic plant with recombinant DNA providing an enhanced trait, e.g. enhanced yield, can be crossed with transgenic plant line having other recombinant DNA that confers another trait, for example herbicide resistance or pest resistance, to produce progeny plants having recombinant DNA that confers both traits. Typically, in such breeding for combining traits the transgenic plant donating the additional trait is a male line and the transgenic plant carrying the base traits is the female line. The progeny of this cross will segregate such that some of the plants will carry the DNA for both parental traits and some will carry DNA for one parental trait; such plants can be identified by markers associated with parental recombinant DNA, e.g. marker identification by analysis for recombinant DNA or, in the case where a selectable marker is linked to the recombinant, by application of the selecting agent such as a herbicide for use with a herbicide tolerance marker, or by selection for the enhanced trait. Progeny plants carrying DNA for both parental traits can be crossed back into the female parent line multiple times, for example usually 6 to 8 generations, to produce a progeny plant with substantially the same genotype as one original transgenic parental line but for the recombinant DNA of the other transgenic parental line.

[0078] In certain embodiments of the invention the recombinant DNA insertion is “targeted” in order to achieve site-specific integration, for example to replace an existing gene in the genome, to use an existing promoter in the plant genome, or to insert a recombinant polynucleotide at a predetermined site known to be active for gene expression. Several site specific recombination systems exist which are known to function implants include cre-lox as disclosed in U.S. Pat. No. 4,959,317 and FLP-FRT as disclosed in U.S. Pat. No. 5,527,695, both incorporated herein by reference.

[0079] Transformation methods of this invention can be practiced in tissue culture on media and in a controlled environment. “Media” refers to the numerous nutrient mixtures that are used to grow cells in vitro, that is, outside of the intact living organism. Recipient cell targets include, but are not limited to, meristem cells, callus, immature embryos and gametic cells such as microspores, pollen, sperm and egg cells. It is contemplated that any cell from which a fertile plant can be regenerated is useful as a recipient cell. Callus can be initiated from tissue sources including, but not limited to, immature embryos, seedling apical meristems, microspores and the like. Cells capable of proliferating as callus are also recipient cells for genetic transformation. Practical transformation methods and materials for making transgenic plants of this invention, for example, various media and recipient target cells, transformation of immature embryo cells and subsequent regeneration of fertile transgenic plants are disclosed in U.S. Pat. Nos. 6,194,636 and 6,232,526, which are incorporated herein by reference.

[0080] The seeds of transgenic plants can be harvested from fertile transgenic plants and be used to grow progeny generations of transformed plants of this invention including hybrid plants line for selection of plants having an enhanced trait. In addition to direct transformation of a plant with a recombinant DNA, transgenic plants can be prepared by crossing a first plant having a recombinant DNA with a second plant lacking the DNA. For example, recombinant DNA can be introduced into first plant line that is amenable to transformation to produce a transgenic plant which can be crossed with a second plant line to introgress the recombinant DNA into the second plant line. A transgenic plant with recombinant DNA providing an enhanced trait, e.g. enhanced yield, can be crossed with transgenic plant line having other recombinant DNA that confers another trait, for example herbicide resistance or pest resistance, to produce progeny plants having recombinant DNA that confers both traits. Typically, in such breeding for combining traits the transgenic plant donating the additional trait is a male line and the transgenic plant carrying the base traits is the female line. The progeny of this cross will segregate such that some of the plants will carry the DNA for both parental traits and some will carry DNA for one parental trait; such plants can be identified by markers associated with parental recombinant DNA, e.g. marker identification by analysis for recombinant DNA or, in the case where a selectable marker is linked to the recombinant, by application of the selecting agent such as a herbicide for use with a herbicide tolerance marker, or by selection for the enhanced trait. Progeny plants carrying DNA for both parental traits can be crossed back into the female parent line multiple times, for example usually 6 to 8 generations, to produce a progeny plant with substantially the same genotype as one original transgenic parental line but for the recombinant DNA of the other transgenic parental line.

[0081] Descriptions of commonly used breeding terms such as “crossing”, “hybrids” and methods for crossing and producing hybrid that are used to describe present invention can be found in one of several reference books (Allard, “Principles of Plant Breeding,” John Wiley & Sons, NY, U. of CA, Davis, Calif., 50-98, 1960; Simmonds, “Principles of crop improvement,” Longman, Inc., NY, 369-399, 1979; Sneep and Hendriksen, “Plant breeding perspectives,” Wageningen (ed), Center for Agricultural Publishing and Documentation, 1979; Fehr, In: Soybeans: Improvement, Production and Uses, 2nd Edition, Monograph., 16:249, 1987; Fehr, “Principles of variety development,” Theory and Technique, (Vol. 1) and Crop Species Soybean (Vol. 2), Iowa State Univ., Macmillan Pub. Co., NY, 360-376, 1987).

[0082] In some embodiments of the invention, during transformation, DNA is introduced into only a small percentage of target plant cells in any one transformation. Marker genes are used to provide an efficient system for identification of those cells that are stably transformed by receiving and integrating a transgenic DNA construct into their genomes. Marker genes provide selective markers which confer resistance to a selective agent, such as an antibiotic or herbicide. Any of the herbicides to which plants of this invention can be resistant are useful agents for selective markers. Potentially transformed cells are exposed to the selective agent. In the population of surviving cells will be those cells where, generally, the resistance-conferring gene is integrated and expressed at sufficient levels to permit cell survival. Cells can be tested further to confirm stable integration of the exogenous DNA. Commonly used selective marker genes include those conferring resistance to antibiotics such as kanamycin and paromomycin (nptII), hygromycin B (aph IV) and gentamycin (aac3 and aacC4) or resistance to herbicides such as glufosinate (bar or pat) and glyphosate (aroA or EPSPS). Examples of such selectable are illustrated in U.S. Pat. Nos. 5,550,318; 5,633,435; 5,780,708 and 6,118,047, all of which are incorporated herein by reference. Selectable markers which provide an ability to visually identify transformants can also be employed, for example, a gene expressing a colored or fluorescent protein such as a luciferase or green fluorescent protein (GFP) or a gene expressing a beta glucuronidase or uidA gene (GUS) for which various chromogenic substrates are known.

[0083] Plant cells that survive exposure to the selective agent, or plant cells that have been scored positive in a screening assay, can be cultured in regeneration media and allowed to mature into plants. Developing plantlets regenerated from transformed plant cells can be transferred to plant growth mix, and hardened off, for example, in an environmentally controlled chamber at about 85% relative humidity, 600 ppm CO₂, and 25-250 microeinsteins m⁻²s⁻¹ of light, prior to transfer to a greenhouse or growth chamber for maturation. Plants are regenerated from about 6 weeks to 10 months after a transformant is identified, depending on the initial tissue. Plants can be pollinated using conventional plant breeding methods known to those of skill in the art and seed produced. The regenerated transformed plant or its progeny seed or plants can be tested for expression of the recombinant DNA and selected for the presence of enhanced agronomic trait.

[0084] Progeny can be recovered from transformed plants and tested for expression of the exogenous recombinant polynucleotide. Useful assays include, for example, “molecular biological” assays, such as Southern and Northern blotting and PCR; “biochemical” assays, such as detecting the presence of RNA, e.g., double stranded RNA, or a protein product, e.g., by immunological means (ELISAs and Western blots) or by enzymatic function; plant part assays, such as leaf or root assays; and also, by analyzing the phenotype of the whole regenerated plant.

### Transgenic Plants and Seeds

[0085] Transgenic plants derived from the plant cells of this invention are grown to generate transgenic plants having an enhanced trait as compared to a control plant and produce transgenic seed and haploid pollen of this invention. Such plants with enhanced traits are identified by selection of transformed plants or progeny seed for the enhanced trait. For efficiency a selection method is designed to evaluate multiple transgenic plants (events) including the recombinant DNA, for example multiple plants from 2 to 20 or more transgenic events. Transgenic plants grown from transgenic seed provided herein demonstrate improved agronomic traits that contribute to increased yield or other trait that provides increased plant value, including, for example, improved seed quality. Of particular interest are plants having enhanced water use efficiency, enhanced cold tolerance, increased yield, enhanced nitrogen use efficiency, enhanced seed protein and enhanced seed oil. Transgenic plants of the present invention include, but are not limited to, corn, soybean, cotton, canola, alfalfa, wheat, rice, sugarcane, sugar beet seed, millet, barley, peanut, pigeon pea, sorghum, vegetables (including but not limited to Broccoli, Cauliflower, Cabbage, Radish, Chinese cabbage, Melons, Watermelons, Cucumber, Gourds, Pumpkin, Squash, Pepper, Tomato, Eggplant, Onion, Carrot, Garden Bean, Sweet Corn, Pea, Dry Bean, Okra, Spinach, Leek, Lettuce, and Fennel), grape, berries (including blue, black, raspberry, mullberry, boysenberry . . . etc), cherry and related fruit trees (including but not limited to plum, peach, apricot, kiwi, pomegranate, mango, fig), fruit trees (including but not limited to orange, lemon, lime, blood orange, grapefruit, and the like), nut trees (including but not limited to coconut, walnut (English and black), pecan, almond, hazelnut, brazil nut, hickory nut, acorn, and the like), sunflower, other oilseed producing plants or any combinations thereof.

Selection Methods for Transgenic Plants with Enhanced Agronomic Trait

[0086] Within a population of transgenic plants each regenerated from a plant cell having a nucleus with recombinant DNA many plants that survive to fertile transgenic plants that produce seeds and progeny plants may not exhibit an enhanced agronomic trait. Selection from such population is necessary to identify one or more transgenic plant cells having a transgenic nucleus that can provide plants with the enhanced trait. Transgenic plants having enhanced traits are selected from populations of plants regenerated or derived from plant cells transformed as described herein by evaluating the plants in a variety of assays to detect an enhanced trait. These assays also can take many forms including, but not limited to, direct screening for the trait in a greenhouse or field trial or by screening for a surrogate trait. Such analyses can be directed to detecting changes in the chemical composition, biomass, physiological properties, morphology of the plant. Changes in chemical compositions such as nutritional composition of grain can be detected by analysis of the seed composition and content of protein, free amino acids, oil, free fatty acids, starch or tocopherols. Changes in biomass characteristics can be made on greenhouse or field grown plants and can include plant height, stem diameter, root and shoot dry weights; and, for corn plants, ear length and diameter. Changes in physiological properties can be identified by evaluating responses to stress conditions, for example assays using imposed stress conditions such as water deficit, nitrogen deficiency, cold growing conditions, pathogen or insect attack or light deficiency, or increased plant density. Changes in morphology can be measured by visual observation of tendency of a transformed plant with an enhanced agronomic trait to also appear to be a normal plant as compared to changes toward bushy, taller, thicker, narrower leaves, striped leaves, knotted trait, chlorosis, albino, anthocyanin production, or altered tassels, ears or roots. Other selection properties include days to pollen shed, days to silking, leaf extension rate, chlorophyll content, leaf temperature, stand, seedling vigor, internode length, plant height, leaf number, leaf area, tillering, brace roots, stay green, stalk lodging, root lodging, plant health, barreness/prolificacy, green snap, and pest resistance. In addition, phenotypic characteristics of harvested grain can be evaluated, including number of kernels per row on the ear, number of rows of kernels on the ear, kernel abortion, kernel weight, kernel size, kernel density and physical grain quality.

[0087] Assays for screening for a desired trait are readily designed by those practicing in the art. The following illustrates screening assays for corn traits using hybrid corn plants. The assays can be readily adapted for screening other plants such as canola, cotton and soybean either as hybrids or inbreds.

[0088] In certain embodiments of the invention transgenic corn plants having nitrogen use efficiency can be identified by screening in fields with three levels of nitrogen (N) fertilizer being applied, e.g. low level (0 N), medium level (80 lb/ac) and high level (180 lb/ac). Plants with enhanced nitrogen use efficiency provide higher yield as compared to control plants.

[0089] In some embodiments, the present invention discloses transgenic plant exhibiting increased yield under various stress conditions (e.g., drought, heat, limited nitrogen, or any combinations thereof disclosed herein, compare to control plant. For example, transgenic plants of the present invention can exhibit averaged, or similar yield received in the past, but higher yield as compared the control plants under similar stress conditions. The present invention is capable of maintaining yield under stress conditions as compared with plants that do not comprise the genes or miRNA disclosed herein.

[0090] In other embodiments, transgenic corn plants having enhanced yield can be identified by screening using progeny of the transgenic plants over multiple locations with plants grown under optimal production management practices and maximum weed and pest control. A useful target for improved yield is a 5% to 10% increase in yield as compared to yield produced by plants grown from seed for a control plant. Selection methods can be applied in multiple and diverse geographic locations, for example up to 16 or more locations, over one or more planting seasons, for example at least two planting seasons, to statistically distinguish yield improvement from natural environmental effects.

[0091] In other embodiments, transgenic corn plants having enhanced water use efficiency can be identified by screening plants in an assay where water is withheld for a period to induce stress followed by watering to revive the plants. For example, a useful selection process imposes 3 drought/re-water cycles on plants over a total period of 15 days after an initial stress free growth period of 11 days. Each cycle consists of 5 days, with no water being applied for the first four days and a water quenching on the 5th day of the cycle. The primary phenotypes analyzed by the selection method are the changes in plant growth rate as determined by height and biomass during a vegetative drought treatment.

[0092] In other embodiments, transgenic corn plants having enhanced cold tolerance can be identified by screening plants in a cold germination assay and/or a cold tolerance field trial. In a cold germination assay trays of transgenic and control seeds are placed in a growth chamber at 9.7° C. for 24 days (no light). For example, seeds having higher germination rates as compared to the control can be identified as having enhanced cold tolerance. In a cold tolerance field trial plants with enhanced cold tolerance can be identified from field planting at an earlier date than conventional Spring planting for the field location. For example, seeds are planted into the ground around two weeks before local farmers begin to plant corn so that a significant cold stress is exerted onto the crop, named as cold treatment. Seeds can be planted under local optimal planting conditions such that the crop has little or no exposure to cold condition, named as normal treatment. At each location, seeds may be can be planted under both cold and normal conditions preferably with multiple repetitions per treatment.

[0093] In other embodiments, transgenic corn plants having seeds with increased protein and/or oil levels can be identified by analyzing progeny seed for protein and/or oil. Near-infrared transmittance spectrometry is a non-destructive, high-throughput method that is useful to determine the composition of a bulk seed sample for properties listed in table 1.

TABLE 1

| | |
|---|---|
| Typical sample(s): | Whole grain corn and soybean seeds |
| Typical analytical range: | Corn - moisture 5-15%, oil 5-20%, |
| | protein 5-30%, starch 50-75%, and density |
| | 1.0-1.3%. |
| | Soybean - moisture 5-15%, oil 15-25%, |
| | and protein 35-50%. |

[0094] Although the plant cells and methods of this invention can be applied to any plant cell, plant, seed or pollen, e.g. any fruit, vegetable, grass, tree or ornamental plant, the various aspects of the invention are preferably applied to corn, soybean, cotton, canola, alfalfa, wheat, rice, sugarcane, and sugar beet plants. In many cases the invention is applied to corn plants that are inherently resistant to disease from the Mal de Rio Cuarto virus or the Puccina sorghi fungus or both.

### Homolog Identification

[0095] In certain embodiment, the present invention also includes identification of homologs of proteins encoded by the DNA identified in the sequence listing which is used to provide transgenic seed and plants having enhanced agronomic traits. From the sequence of the homologs, homologous DNA sequence are identified for preparing additional transgenic seeds and plants of this invention with enhanced agronomic traits.

[0096] An “All Protein Database” are constructed of known protein sequences using a proprietary sequence database and the National Center for Biotechnology Information (NCBI) non-redundant amino acid database (nr.aa). For each organism from which a polynucleotide sequence provided herein can be obtained, an “Organism Protein Database” are constructed of known protein sequences of the organism; it is a subset of the All Protein Database based on the NCBI taxonomy ID for the organism.

[0097] The All Protein Database are queried using amino acid sequences provided herein as SEQ ID NO: 43376 through SEQ ID NO: 86750 using NCBI “blastp” program with E-value cutoff of 1e⁻⁸. Up to 1000 top hits are kept, and separated by organism names. For each organism other than that of the query sequence, a list is kept for hits from the query organism itself with a more significant E-value than the best hit of the organism. The list contain likely duplicated genes of the polynucleotides provided herein, and is referred to as the Core List. Another list is kept for all the hits from each organism, sorted by E-value, and referred to as the Hit List.

[0098] The Organism Protein Database are queried using polypeptide sequences provided herein as SEQ ID NO: 43376 through SEQ ID NO: 86750 using NCBI “blastp” program with E-value cutoff of 1e⁻⁴. Up to 1000 top hits are kept. A BLAST searchable database is constructed based on these hits, and are referred to as “SubDB”. SubDB are queried with each sequence in the Hit List using NCBI “blastp” program with E-value cutoff of 1e⁸. The hit with the best E-value are compared with the Core List from the corresponding organism. The hit is deemed a likely ortholog if it belongs to the Core List, otherwise it is deemed not a likely ortholog and there is no further search of sequences in the Hit List for the same organism. Homologs from a large number of distinct organisms are identified and reported.

[0099] Recombinant DNA constructs can be prepared using the DNA encoding each of the identified homologs and the constructs can be used to prepare multiple events of transgenic corn, soybean, canola, cotton and other transgenic plants mentioned. Plants can be regenerated from the transformed plant cells and used to produce progeny plants and seed that are screened for enhanced water use efficiency, enhanced cold tolerance, increased yield, enhanced nitrogen use efficiency, enhanced seed protein and enhanced seed oil. From each group of multiple events of transgenic plants with a specific recombinant DNA for a homolog the event that produces the greatest enhancement in yield, water use efficiency, nitrogen use efficiency, enhanced cold tolerance, enhanced seed protein and enhanced seed oil is identified and progeny seed can be selected for commercial development.

### Pfam Module Annotation

[0100] The amino acid sequence of the expressed proteins shown to be associated with an enhanced trait are analyzed for Pfam protein family against the current Pfam collection of multiple sequence alignments and hidden Markov models using the HMMER software in the appended computer listing. The Pfam domain modules and individual protein domain for the proteins shown in the sequence listing. The Hidden Markov model databases for the identified patent families are known to a skilled artisan allowing identification of other homologous proteins and their cognate encoding DNA to enable the full breadth of the invention for a person of ordinary skill in the art. Certain proteins are identified by a single Pfam domain and others by multiple Pfam domains.

### Selectable Markers

[0101] The present invention include transgenic plants with and without selectable markers. As used herein the term “marker” refers to any transcribable polynucleotide molecule whose expression, or lack thereof, can be screened for or scored in some way. Marker genes for use in the practice of the present invention include, but are not limited to transcribable polynucleotide molecules encoding B-glucuronidase (GUS described in U.S. Pat. No. 5,599,670, which is incorporated herein by reference), green fluorescent protein and variants thereof (GFP described in U.S. Pat. No. 5,491,084 and U.S. Pat. No 6,146,826, RFP and the like), proteins that confer antibiotic resistance, or proteins that confer herbicide tolerance. Marker genes in genetically modified plants are generally of two types: genes conferring antibiotic resistance or genes conferring herbicide tolerance. Examples include, but are not limited to antibiotic resistance markers, including those encoding proteins conferring resistance to kanamycin (nptll), hygromycin B (aph IV), streptomycin or spectinomycin (aad, spec/strep) and gentamycin (aac3 and aacC4) are known in the art.

[0102] Included within the term “selectable markers” are also genes which encode a secretable marker whose secretion can be detected as a means of identifying or selecting for transformed cells. Examples include markers that encode a secretable antigen that can be identified by antibody interaction, or even secretable enzymes which can be detected catalytically. Selectable secreted marker proteins fall into a number of classes, including small, diffusible proteins which are detectable, (e.g., by ELISA), small active enzymes which are detectable in extracellular solution (e.g., alpha.-amylase, beta.-lactamase, phosphinothricin transferase), or proteins which are inserted or trapped in the cell wall (such as proteins which include a leader sequence such as that found in the expression unit of extension or tobacco PR-S). Other possible selectable marker genes will be apparent to those of skill in the art.

[0103] The selectable marker is preferably GUS, green fluorescent protein (GFP) or variants thereof, neomycin phosphotransferase II (nptII), luciferase (LUX), an antibiotic resistance protein, or a herbicide (e.g., glyphosate, bromoxynil, and the like) resistance or tolerance protein. The selectable marker is most preferably a kanamycin, hygromycin, or herbicide resistance marker.

[0104] In one aspect, the present invention includes recombinant DNA constructs having a polynucleotide encoding a protein that has an amino acid sequence having at least 95% identity over at least 95% of the length of a reference sequence selected from the group consisting of SEQ ID NO: 43376-86750 when said amino acid sequence is aligned with said reference sequence.

[0105] In another aspect, the present invention includes a mixture having plant cells, and an antibody to a protein produced in said cells wherein said protein has an amino acid sequence that has at least 95% identity over at least 95% of the length of a reference sequence selected from the group consisting of SEQ ID NO: 43376-86750 when said amino acid sequence is aligned to said reference sequence.

[0106] Yet another aspect of the present invention includes recombinant DNA constructs having a promoter that is functional in a plant cell and that is operably linked to a polynucleotide that: (a) encodes a protein having an amino acid sequence having at least 95% identity over at least 95% of the length of a reference sequence selected from the group consisting of SEQ ID NO: 43376-86750, when said amino acid sequence is aligned to said reference sequence; or is transcribed into an RNA molecule that suppresses the level of an endogenous protein that has an amino acid sequence that is at least 95% identical over at least 95% of the length of a reference sequence of SEQ ID NO: 43376-86750, when said amino acid sequence is aligned to said reference sequence; and wherein said construct is stably integrated into a chromosome in a plant cell nucleus. In some aspect, this invention includes a transgenic plant cell having the recombinant DNA construct wherein said DNA construct provides for an enhanced trait as compared to control plants; and wherein said enhanced trait is enhanced water use efficiency, enhanced cold tolerance, increased yield, enhanced nitrogen use efficiency, enhanced seed protein or enhanced seed oil. The DNA construct further can express a protein that provides tolerance from exposure to an herbicide (e.g., a glyphosate, dicamba, or glufosinate compound) having an agent applied at levels that are lethal to a wild type of said plant cell nucleus.

[0107] In some aspects, this invention provides transgenic plants (e.g., corn, soybean, cotton, canola, alfalfa, wheat, rice, sugarcane, or sugar beet plant), that is homozygous for said recombinant DNA and have a plurality of plant cells.

[0108] Yet in another aspect, this inventions includes transgenic pollen grains having a haploid derivative of a plant cell nucleus having a chromosome comprising the recombinant DNA construct.

[0109] In one aspect, this inventions provides a method for manufacturing non-natural, transgenic seed (e.g., corn, soybean, cotton, canola, alfalfa, wheat, rice, sugarcane, or sugar beet seed) that can be used to produce a crop of transgenic plants with an enhanced trait resulting from expression of a stably-integrated, recombinant DNA construct, said method includes (a) screening a population of plants for said enhanced trait and said recombinant DNA, wherein individual plants in said population exhibit said trait at a level less than, essentially the same as or greater than the level that said trait is exhibited in control plants which do not contain said recombinant DNA, wherein said enhanced trait is selected from the group of enhanced traits consisting of enhanced water use efficiency, enhanced cold tolerance, increased yield, enhanced nitrogen use efficiency, enhanced seed protein and enhanced seed oil; (b) selecting from said population one or more plants that exhibit said trait at a level greater than the level that said trait is exhibited in control plants, and (c) collecting seed from selected plant from step b.

[0110] Yet in another aspect, the method of this invention further includes: (a) verifying that said recombinant DNA is stably integrated in said selected plants, and (b) analyzing tissue of said selected plant to determine the expression or suppression of a protein having the function of a protein having an amino acid sequence selected from the group consisting of one of SEQ ID NOs: 43376-86750.

[0111] In one aspect, this invention provides a method of producing hybrid corn seed including: (a) acquiring hybrid corn seed from an herbicide tolerant corn plant which also has a stably-integrated, recombinant DNA construct; (b) producing corn plants from said hybrid corn seed, wherein a fraction of the plants produced from said hybrid corn seed is homozygous for said recombinant DNA, a fraction of the plants produced from said hybrid corn seed is hemizygous for said recombinant DNA, and a fraction of the plants produced from said hybrid corn seed has none of said recombinant DNA; (c) selecting corn plants which are homozygous and hemizygous for said recombinant DNA by treating with an herbicide; (d) collecting seed from herbicide-treated-surviving corn plants and planting said seed to produce further progeny corn plants; (e) repeating steps (c) and (d) at least once to produce an inbred corn line; and (f) crossing said inbred corn line with a second corn line to produce hybrid seed.

[0112] In some aspect, this invention provides substantially purified nucleic acid molecule having a nucleic acid sequence wherein said nucleic acid sequence exhibits 95% or greater identity to a nucleic acid sequence selected from the group consisting of SEQ ID NO: 1 through SEQ ID NO: 43375 and sequences complementary to SEQ ID NO: 1 through SEQ ID NO: 43375.

[0113] It is contemplated that any embodiment discussed in this specification can be implemented with respect to any method, kit, reagent, or composition of the invention, and vice versa. Furthermore, compositions of the invention can be used to achieve methods of the invention.

[0114] It will be understood that particular embodiments described herein are shown by way of illustration and not as limitations of the invention. The principal features of this invention can be employed in various embodiments without departing from the scope of the invention. Those skilled in the art will recognize, or be able to ascertain using no more than routine experimentation, numerous equivalents to the specific procedures described herein. Such equivalents are considered to be within the scope of this invention and are covered by the claims.

[0115] All publications and patent applications mentioned in the specification are indicative of the level of skill of those skilled in the art to which this invention pertains. All publications and patent applications are herein incorporated by reference to the same extent as if each individual publication or patent application was specifically and individually indicated to be incorporated by reference.

[0116] The use of the word “a” or “an” when used in conjunction with the term “comprising” in the claims and/or the specification may mean “one,” but it is also consistent with the meaning of “one or more,” “at least one,” and “one or more than one.” The use of the term “or” in the claims is used to mean “and/or” unless explicitly indicated to refer to alternatives only or the alternatives are mutually exclusive, although the disclosure supports a definition that refers to only alternatives and “and/or.” Throughout this application, the term “about” is used to indicate that a value includes the inherent variation of error for the device, the method being employed to determine the value, or the variation that exists among the study subjects.

[0117] As used in this specification and claim(s), the words “comprising” (and any form of comprising, such as “comprise” and “comprises”), “having” (and any form of having, such as “have” and “has”), “including” (and any form of including, such as “includes” and “include”) or “containing” (and any form of containing, such as “contains” and “contain”) are inclusive or open-ended and do not exclude additional, unrecited elements or method steps.

[0118] The term “or combinations thereof” as used herein refers to all permutations and combinations of the listed items preceding the term. For example, “A, B, C, or combinations thereof” is intended to include at least one of: A, B, C, AB, AC, BC, or ABC, and if order is important in a particular context, also BA, CA, CB, CBA, BCA, ACB, BAC, or CAB. Continuing with this example, expressly included are combinations that contain repeats of one or more item or term, such as BB, AAA, MB, BBC, AAABCCCC, CBBAAA, CABABB, and so forth. The skilled artisan will understand that typically there is no limit on the number of items or terms in any combination, unless otherwise apparent from the context.

[0119] All of the compositions and/or methods disclosed and claimed herein can be made and executed without undue experimentation in light of the present disclosure. While the compositions and methods of this invention have been described in terms of preferred embodiments, it will be apparent to those of skill in the art that variations may be applied to the compositions and/or methods and in the steps or in the sequence of steps of the method described herein without departing from the concept, spirit and scope of the invention. All such similar substitutes and modifications apparent to those skilled in the art are deemed to be within the spirit, scope and concept of the invention as defined by the appended claims.

What is claimed is:

1. A transgenic plant cell with stably integrated, recombinant DNA comprising a promoter that is functional in plant cells and that is operably linked to DNA from a plant, bacteria or yeast that encodes a protein having at least 90% sequence identity to SEQ ID No. 83845;
wherein said plant cell is selected from a population of plant with said recombinant DNA by screening plants that are regenerated from plant cells in said population and that express said protein for an enhanced trait as compared to control plants that do not have said recombinant DNA; and
wherein said enhanced trait is selected from group of enhanced traits consisting of enhanced water use efficiency, enhanced cold tolerance, increased yield, enhanced nitrogen use efficiency, enhanced seed protein and enhanced seed oil.

2. A recombinant DNA construct comprising a polynucleotide encoding a protein that has an amino acid sequence having at least 95% identity over at least 95% of the length of a reference sequence selected from the group consisting of SEQ ID NO: 43376-86750 when said amino acid sequence is aligned with said reference sequence.

3. A mixture comprising plant cells, and an antibody to a protein produced in said cells wherein said protein has an amino acid sequence that has at least 95% identity over at least 95% of the length of a reference sequence selected from the group consisting of SEQ ID NO: 43376-86750 when said amino acid sequence is aligned to said reference sequence.

4. A recombinant DNA construct comprising a promoter that is functional in a plant cell and that is operably linked to a polynucleotide that:
(a) encodes a protein having an amino acid sequence having at least 95% identity over at least 95% of the length of a reference sequence selected from the group consisting of SEQ ID NO: 43376-86750, when said amino acid sequence is aligned to said reference sequence; or
(b) is transcribed into an RNA molecule that suppresses the level of an endogenous protein that has an amino acid sequence that is at least 95% identical over at least 95% of the length of a reference sequence of SEQ ID NO: 43376-86750, when said amino acid sequence is aligned to said reference sequence; and
wherein said construct is stably integrated into a chromosome in a plant cell nucleus.

5. A transgenic plant cell comprising the recombinant DNA construct of claim 4 wherein said DNA construct provides for an enhanced trait as compared to control plants; and wherein said enhanced trait is enhanced water use efficiency, enhanced cold tolerance, increased yield, enhanced nitrogen use efficiency, enhanced seed protein or enhanced seed oil.

6. The plant cell of claim 5 further comprising DNA expressing a protein that provides tolerance from exposure to an herbicide comprising an agent applied at levels that are lethal to a wild type of said plant cell nucleus.

7. The plant cell of claim 6 wherein the agent of said herbicide is a glyphosate, dicamba, or glufosinate compound.

8. A transgenic plant comprising a plurality of plant cells of claim 5.

9. The transgenic plant of claim 8 which is homozygous for said recombinant DNA.

10. A transgenic seed comprising a plurality of plant cells of claim 5.

11. The transgenic seed of claim 10 from a corn, soybean, cotton, canola, alfalfa, wheat, rice, sugarcane, or sugar beet plant.

12. A transgenic pollen grain comprising a haploid derivative of a plant cell nucleus having a chromosome comprising the recombinant DNA construct of claim 4.

13. A method for manufacturing non-natural, transgenic seed that can be used to produce a crop of transgenic plants with an enhanced trait resulting from expression of a stably-integrated, recombinant DNA construct of claim 4, said method comprising:
(a) screening a population of plants for said enhanced trait and said recombinant DNA, wherein individual plants in said population exhibit said trait at a level less than, essentially the same as or greater than the level that said trait is exhibited in control plants which do not contain said recombinant DNA, wherein said enhanced trait is selected from the group of enhanced traits consisting of enhanced water use efficiency, enhanced cold tolerance, increased yield, enhanced nitrogen use efficiency, enhanced seed protein and enhanced seed oil;
(b) selecting from said population one or more plants that exhibit said trait at a level greater than the level that said trait is exhibited in control plants, and
(c) collecting seed from selected plant from step b.

14. The method of claim 13 wherein said method for manufacturing said transgenic seed further comprises:
(a) verifying that said recombinant DNA is stably integrated in said selected plants, and
(b) analyzing tissue of said selected plant to determine the expression or suppression of a protein having the function of a protein having an amino acid sequence selected from the group consisting of one of SEQ ID NOs:43376-86750.

15. The method of claim 14 wherein said seed is corn, soybean, cotton, canola, alfalfa, wheat, rice, sugarcane, or sugar beet seed.

16. A method of producing hybrid corn seed comprising:
(a) acquiring hybrid corn seed from an herbicide tolerant corn plant which also has a stably-integrated, recombinant DNA construct of claim 4;
(b) producing corn plants from said hybrid corn seed, wherein a fraction of the plants produced from said hybrid corn seed is homozygous for said recombinant DNA, a fraction of the plants produced from said hybrid corn seed is hemizygous for said recombinant DNA, and a fraction of the plants produced from said hybrid corn seed has none of said recombinant DNA;
(c) selecting corn plants which are homozygous and hemizygous for said recombinant DNA by treating with an herbicide;
(d) collecting seed from herbicide-treated-surviving corn plants and planting said seed to produce further progeny corn plants;
(e) repeating steps (c) and (d) at least once to produce an inbred corn line; and
(f) crossing said inbred corn line with a second corn line to produce hybrid seed.

17. A substantially purified nucleic acid molecule comprising a nucleic acid sequence wherein said nucleic acid sequence exhibits 95% or greater identity to a nucleic acid sequence selected from the group consisting of SEQ ID NO: 1 through SEQ ID NO: 43375 and sequences complementary to SEQ ID NO: 1 through SEQ ID NO: 43375.

18. A transgenic plant cell with stably integrated, recombinant DNA comprising a promoter that is functional in plant cells and that is operably linked to DNA from a plant, bacteria or yeast that encodes a protein having at least 90% sequence identity selected from the group consisting of SEQ ID No. 43376-86750;
wherein said plant cell is selected from a population of plant with said recombinant DNA by screening plants that are regenerated from plant cells in said population and that express said protein for an enhanced trait as compared to control plants that do not have said recombinant DNA; and
wherein said enhanced trait is selected from group of enhanced traits consisting of enhanced water use efficiency, enhanced cold tolerance, increased yield, enhanced nitrogen use efficiency, enhanced seed protein and enhanced seed oil.

The application's sequence listing, which the Patent Office published only in electronic form, follows.

SEQUENCE LISTING (86750 sequences)

SEQ ID NO: 1 - DNA, 276 bp, Zea mays
  Peptide Sequence Number=SeqID_43376
atgaacacgaaggccgcaggattcccacctctctcacgccggtctccagccgcctcgctccttccccccttcgcgctcgccctcgcgctcgacccatctgggctggggcacacggcgacactcactcgtcggcccaagggaccccccggtctcggaacgccgacaattgtgatccgtttccgagcttcaagggatcgaagatcaagcattggtgaccaagtgatcaaactctctgagttctatgaggctgaagatcttgagcatctgtttgtgtag

SEQ ID NO: 2 - DNA, 283 bp, Zea mays
  Peptide Sequence Number=SeqID_43377
ttgattcatacctgccccttgtcccctgtcaaatgcttgacggctcgccctaattctctaaattgtatttctagagttggcgaggttttgaacagccccctctctgaccccggtttattccatcttacttgtataagatttgcgaaggatgtcgaagcatggaaaagggtactgttaagtggttcaacaatgccaaagggtttggtttcatctgccctgaaggcggcggcgaagattattttcgctcattattccaccattcagatggatggttacagaacgc

SEQ ID NO: 3 - DNA, 156 bp, Zea mays
  Peptide Sequence Number=SeqID_43378
catcaaaatctgctttccgaagcgcagccagagctggagcggacgttactgacgaccgcgttgcgacatacgcaggggcataaacaggaagcggcgcggctactcggctggggccgcaacaccctgacgcgtaagttaaaagagctggggatggag

SEQ ID NO: 4 - DNA, 351 bp, Zea mays
  Peptide Sequence Number=SeqID_43379
atggcggatctggtctacaccggacggtttgatctcaatcctgcgcgtaacacccgtgaaaaattattgctgccgctgggcgatatcaaaccgcttcagcaggcgggcgtgtatctggctgtgatgaatcaggctggacgttacgattacagtaatcccgcgacgctgtttacgttaagtgatatcggcgtttcagctcaccgttatcacaatcgtctggatatctttacccaaagtctggaaaacggcgcggcccagcaaggaattgaagtctctttattaaatgagaaagggcagactctgactcaggcaaccagtgacgctcaggggcatgtgcagctaggaaaatga

SEQ ID NO: 5 - DNA, 822 bp, Zea mays
  Peptide Sequence Number=SeqID_43380
atggacgagtctggtgtgaaaaaggagatcgaaaattcagatggaggttcgttgccaaaaccagctttttgcgagaatgaagatggtttccccaagttgttgagagcatgcacagtccgcctcagaatcaggagccagccagagtatgatggtcgtgaattcatcgagcatggcacagagaagtatgtcgtgacagtatacatgggatccagtccgcaccatgtggaatggagtgtcactgctgctgggcacagattcaaagacacctaccaagtcgtcgcccacaaggcattgagggccctgtgtcagatctatgaagaagaagtggccgacacaccgctcagattctttccgccctttcagagaaaccgtccagtttggatggccaggatgcgtgcattggaaggtcaacagttgcttgaggacgaccccttagtcgtgtacctcaccgcatacctgctcaccctagatgcacggtatgatttcttggctcggcaccaccgtcggatgattgcccgagtagaagatgtagagaatctcaaccccctgaagcaagctaaggatgagcacgtccagaagttgatggaggcctacttggtcacccataaccaacaaggagccatagtcttggaagaaattccagtcttccctcaggctatggataagcaagagcaccctaaatcctcccaagatcccccgccagagttgtttgagcccctcaccatgaagaagattctagcaccctcccttgaggtcaaggaagaagctgcaagcaccccgccagcactaccgccctctgaggagctacaagagctagtctag

SEQ ID NO: 6 - DNA, 624 bp, Zea mays
  Peptide Sequence Number=SeqID_43381
cagttaccggacaaaacgcccgcgccggtggggagcctcggccccggctggaaaatgcctgcggatatccgcttacagctgcgcgataacacactgatactcagtgataacggcggcagaagcctgtattttgagcacctgtttcccggtgaggacggttacagccgcagcgagtcactgtggctggtgcgcggcggcgtggcgaaactggatgaaggtcaccggctggccgcactctggcaggcgctgccggaagaactccgcttaagtccgcatcgttatctggcgacaaacagtccgcaggggccgtggtggctgctcggttggtgtgagcgggtgccggaagcggatgaggtgctgcctgcgccgctgccgccgtaccgggcgcagcgggcagaagaagcccggcagcaggccatttccggcgggacggaaccgtccgcttttcctgataccctgccgggttacaccgaatatggccgggacaacggcatccgtctgtctgccgtgtggctgacgcacgacccggaatacccggagaatttacctgccgcgccgctggtgcgctatggctggacgccccgcggcgaactggcggtggtgtatgaccgtagtggcaaacag

SEQ ID NO: 7 - DNA, 333 bp, Zea mays
  Peptide Sequence Number=SeqID_43382
atggatagaaaccacacacacttggtcaaacaaaggaggaatatcaataatgtcatctttgtatcaaagttacttctttgtttagtgaaaaatcatggcatcgtttacatcactaacaagggagcaagaagcacaatcttcctcaaggaggcttatgaaaactgcatcttcggagtcaggttgcgggtgtacaagagcatggtcaagacgaagcttgactggggcggaaagcgaccacagcgaaggataagacgatcacgaagctacgtgcagaaaagcttcggcatgacggcagaaaggaggaaccgacttaaagataaaaagtcaagttaa

SEQ ID NO: 8 - DNA, 534 bp, Zea mays
  Peptide Sequence Number=SeqID_43383
atggcaattggatcgagtacatttccagatatcatcgtcaaggagtttgaagaagggaaggaaactttgcaggcaaagcgcagacgcatgttgcagttctgtccagaaaatgttgagatgacacgttctatgactgaagaggggcttttggaaagtcttcaggagatggatttttcagcacatcagaatgcttcgcctagtcaacagtctatcgtagtcaacaacaatcgtgcacaggctagacctacaccgctgaaagctggcaagagcatcatcggggcaaagaaggcgaggacatccgtggccttccctttcgagctcatcaagccgagcagcatccgcggcgacgtcaccctgagcgacataaacgagaagctccacgcgcccccgccgtacaagatcaggcacaagagcgacgaggagcccagctcgctccaggcctcggccatctcggggaagcctgtggtccacaagacgaagatccacaccgaggggggcaaggggagcatcacgatcaccagaaccagaggctaa

SEQ ID NO: 9 - DNA, 165 bp, Zea mays
  Peptide Sequence Number=SeqID_43384
atggggtttctctttcagcgccagaaagtcaaaaaagagggtctgatccgggttctaccagcgtcgcagccagttttgccgcccggcgtttttcttccaccaggcgggatttttgatcgcttaacagcagctgcccgatacgctcttcgcgacgtgtttccataa

SEQ ID NO: 10 - DNA, 260 bp, Zea mays
  Peptide Sequence Number=SeqID_43385
gcacagtgggcaaaagaggttgatgtcagtgataaagaggcgcgctgcggtgtgcgttgtgccacccgcgatcatctgccaatggtaggcaatgttcccgattatgaggcaacactcgtggaatatgcgtcgttggcggagcagaaagatgaggcgatgagcgacgaaccgattccgatggatgccagtacgctggcggcgttaaacccgaatcggttatgggtgcggaaattgttgaagggtaaagcggttaaggcggg

SEQ ID NO: 11 - DNA, 355 bp, Zea mays
  Peptide Sequence Number=SeqID_43386
ttaccacttagcgccaacggcaagctggatcgcaaagccttaccgttgcctgaactgaaggcacaagcgccagggcgtgcgccgaaagcgggcagtgaaacgattatcgccgcggcattctcgtcgttgctggggtgtgacgtgcaggatgccgatgctgatttcttcgcgcttggcggtcattcgctactggcaatgaaactggcagcgcagttaagtcggcaggttgcccgccaggtgacgccggggcaagtgatggtcgcgtcaactgtcgccaaactggcaacgattattgatgctgaagaagacagcacccggcgtatgggattcgaaaccattctgccgttgcgtgaag

SEQ ID NO: 12 - DNA, 405 bp, Zea mays
  Peptide Sequence Number=SeqID_43387
atgttacgtctggcaaaagagcgtgaagaattagcggttattaacgatcagtttggtgcgccaacaggtgctgaactgctggctgattgtacagcacatgccattcgtgtcgcactgaataaaccggatgtcgcaggcttgtaccatttggtagccagtggtaccacaacctggtacgattatgctgcgctggtttttgaagaggcgcgcaaagcaggcattccccttgcactcaacaagctcaacgcagtaccaacaacagcctatcctacaccagctcgtcgtccacataactctcgccttaatacagaaaaatttcagcagaactttgcgcttgtcttgcctgactggcaggttggcgtgaaacgaatgctcaatgaattatttacgactacagcaatttaa

SEQ ID NO: 13 - DNA, 504 bp, Zea mays
  Peptide Sequence Number=SeqID_43388
atgttgcagcttaacgagaataaacagtttgcatttttccaaagactggcatttccgctgcgtatctttttgctgattctggtgttctcaatatttgtcattgcagccctggcgcaatattttacggccagttttgaggactatttaacgcttcatgtacgcgacatggcaatgaatcaggcgaaaattattgcctccaatgacagtgtcatctctgcggtgaaaacgcgtgactacaaacggctggcgaccatcgctaacaaattacaaagagataccgattttgattatgtggtgattggggaccggcactcgatccgcctttaccatcctaatccggagaaaattggttatcctatgcagttcaccaaacagggcgcgctggagaaaggggagagctacttcattaccgggaaagggtcaatggggatggcgatgcgcgccaaaacgccaatctttgatgacgatggaaaagtcatcggcgtggtgtcgattggctacctg

SEQ ID NO: 14 - DNA, 403 bp, Zea mays
  Peptide Sequence Number=SeqID_43389
atgggtcataaaattatcacgttgtccggcgcggcgacggatgttctgtatgcgctgtttttccgtggcgcgttgctgtctggtgatctgccttctaaatctggcacagccgaattgcgcgagcttggttttgctgaaaccagacacacagcaactgaataccagaaagaaaatcactttacctttctgacatcagaagggcagaaatttgccgttgaacacctggtcaatacgcgttttggtgagcagcaatattgcgcttcgatgacgcttggcgttgagattgatacctctgctgcacaaaaggcaatcgacgagctggaccagcgcattcgtgacaccgtctccttcgaacttattcgcaatggagtgtcattcatcaaggacgccgctatcgcaaatg

SEQ ID NO: 15 - DNA, 511 bp, Zea mays
  Peptide Sequence Number=SeqID_43390
atgactgatctgaaagcaagcagcctgcgtgcactgaaattgatggacctgaccaccctgaatgacgacgacaccgacgagaaagtgatcgccctgtgtcatcaggccaaaactccggtcggcaataccgccgctatctgtatctatcctcgctttatcccgattgctcgcaaaactctgaaagagcagggcaccccggaaatccgtatcgctacggtaaccaacttcccacacggtaacgacgacatcgacatcgcgctggcagaaacccgtgcggcaatcgcctacggtgctgatgaagttgacgttgtgttcccgtaccgcgcgctgatggcgggtaacgagcaggttggttttgacctggtgaaagcctgtaaagaggcttgcgcggcagcgaatgtactgctgaaagtgatcatcgaaaccggcgaactgaaagacgaagcgctgatccgtaaagcgtctgaaatctccatcaaagcgggtgcggacttcatcaaaacctctaccg

SEQ ID NO: 16 - DNA, 186 bp, Zea mays
  Peptide Sequence Number=SeqID_43391
atgactctcggacagaaccaatgcaaaaatacaagtttccactacggactgtccggaggaaaagctaagaccgtccgagccctcgcacggaccgtccggcctcaggcgcggaccgtccggtcggggcggaccgtccggacctggctcgcggaccgtccgcgctcggcagaatggcccaacggctag

SEQ ID NO: 17 - DNA, 1074 bp, Zea mays
  Peptide Sequence Number=SeqID_43392
atgccgacctcttcttcttctgctgccgctacgccgccggccgacgcgtcgtctgaggagatgctgagtactgtggcggcggaggagctacgcgccgacgacacggtggatttcgtgatgaacaaggatcgtcagggagctgcgcagaagcgccaggcggtcgtcaggctgcctgaggctaggccgaagaggtcgcgagggactgcgaaggctgctgcctctagcggcagccagccgacgctggcggcgaagtctgtcgtccctgggtccagcagggtgccggaggccgtgaaggcggccagtgccggcggaaccaagcctgccccggccggagctgcgaaggcccgagaattgcctccgccgggcaagcgcgttgccgacttcgccaccgagattagcgtggacgattatctcgttgggtcgggcgaagggcaacttgttgttgttccgcctgtggtggcgactgcggcggctgccgtggtgcctggggagaggggtagcgctctcagcgccggtggcgagattccggcgctcactgccgtcaaggacgaggcgggcgctgtgtcccgccggctgaaggaggcattgagtcaggcggctgacttcgctgaccgcgtggcgtcgggggcccttacggcggttgtgtctgccgaagtcgagagacttcgggcgcaacatgctgacgtcgtacgggaaaagtcggtcgtcgacagcaagtgctgtaagctggcggagaaggtggccgcgctggagggcgagaggactgacctccggcgccaactggcggaggagagaagggaggctaatgaggccttcgccaaggcgcagtctgcgcaggcggaggccaatttggcgcgggtggagggtagccttgccagacagcgcgccgaggaatgggaggagcggttcaacgctctgcagacccgtgtggagagggccgaggcttcgacgcgctcggaggctgagcggacgcgcaaacagcttatggactcataccacgagctgggcgcgcggaccactgacttcgaagtgccagaccaagagcccggacttcgctgcctcgagtggctgtag

SEQ ID NO: 18 - DNA, 509 bp, Zea mays
  Peptide Sequence Number=SeqID_43393
cggtgaagcggataacgcgacgctggtttatggtggcaatccgcaactcttcccctataaacacaacgaaggtcagtttgaagtgctggtgccgctgcgcaacgcgaagtttgccttccagccggactggcctgcattaactaaccttgatattgaactggactttattaacgacggtttatggatgaaaaccgatggcgttaatctgggcggcgtgcgcgcgagtaatcttaccgcagtgatccctgactactcaaaagaaaaactgctgattgacgctgacattaaaggtccgggtaaagccgttggcccttactttgatgagacaccgctgaaagattctctgggtgcgaccctgcaagaactccagctcgacggcgatgtgaatgctcgcttacatcttgatatcccgctgaacggcgaactggtaaccgcgaaaggtgaagtgacgctgcgtaataacagtctgtttatcaaaccactcgacagcaccctgaaaaatttgagcg

SEQ ID NO: 19 - DNA, 461 bp, Zea mays
  Peptide Sequence Number=SeqID_43394
atggcggaaatcgcccaattcctgcatgaaaatgatttgagcgttgacaccacagtcgaagtatttattaccgtaacccgcgatgaaaagcttatcgcgtgcggtggaattgccggaaatattattaaatgcgttgctatcagtgaatccgtccgcggtgaaggactggcgctgacattagccactgaattgataaacctcgcctatgagcggcacagcacgcatctgtttatttataccaaaaccgaatacgaggcgctgttccgccagtgcggtttttccacgctgaccagcgtacccggcgtgatggtgctgatggaaaacagcgccacgcgactgaaacgctatgccgaatcgctgaaaaaatttcgtcatccagggaacaagattggctgcattgtgatgaacgccaatccctttacgaatggtcaccgttatctgattcaacaggctgcggcaca

SEQ ID NO: 20 - DNA, 481 bp, Zea mays
  Peptide Sequence Number=SeqID_43395
atggcgaccagagctatgcgcgtctgggcaaacaacactgaatcttcaaaaaaccagtcatggacccgtctcgcttttgccgggttgaaatataaagatttgggttctttcgattatggtcgtaacctgggggcgttgtatgacgtggaagcctggaccgatatgttcccggaatttggtggcgattcctcggcgcagaccgacaactttatgaccaaacgcgccagcggtctggcgacgtatcggaacaccgacttcttcggcgttatcgatggcctgaacttaaccctgcaatatcaagggaaaaacgaaaaccgcgacgttaaaaagcaaaacggcgatggcttcggcacgtcattgacatatgactttggcggcagcgatttcgccattagtggggcctataccaactcagatcgcaccaacgagcagaacctgcaaagccgtggcacaggcaagcgtgcagaagcatgggcaacag

SEQ ID NO: 21 - DNA, 749 bp, Zea mays
  Peptide Sequence Number=SeqID_43396
aggccttctcagagcactattctattactgagagggatactgtcaaggcagccatgcaagatgcagcacgacgggcactttctcagtattgctcgttgttcagcggggtagctgacggccttgacctgaagtactaccctcgccgttcgatcggcagtgctggaggtgtgattgtctcgccagttagtgagggcaatcccaggctgaacagtatggtcaacctggccgccgtgctcaacatagagctggaccacgcccttgacgagttgggcaaggttcgggcgaaggttgtggaattgcgtgctgagtgcgcagcacgccactatctagatggtggttctcccgcccctatcgggattcagcatccttactgctcaccgccccatggtcgcttcgactatggtacccccagacagcaggacccggatagatttggatccattgatcgacagagtcaaaagtcagatttgatgtgtgtgtgctttctacagatgtctgagaacatacgcagaggtgcaaggcgtgctcagccagaacaacgggcaccccaagaagatgcagcccagcagcagcagttgccactgccacccccgatgacagttgagcagatgttcatgatgcaaactcaggcagtccaagcatttggtcagacactagcagcaatgcagcaggtgcagcagcagccacccctacctcaacctctagtgcaagttcagatgccacaagtgcccagagacaagcgggcataa

SEQ ID NO: 22 - DNA, 525 bp, Zea mays
  Peptide Sequence Number=SeqID_43397
gaagaaataagcttgaattcgtcctcctatacacaagatttagtccaccgccaccgcctgggtttcatagagaagttgtcacattatgatacggaggttggtaaggcgtgttcagttattaaacagactcttcagcagattgttgagaaacaatacaatatatctgatatttttggtgagttaattgatgaggtcctccgtgctgagtcgggggacaatgaagatggttatgatgtgcagaaaacaactacaaaatcagatgatattcaaggatgtacctgtccggccccccaaactatacccgatatgtctactctagcatcccagcaggatacgcagttgacagacactcaggtacatgaattactgttaaggcaacaacatattcgtgtactattagaaagttgccccgatgaagctgatattcatccactgtctactagcggcgtccaacaagcggcagaaacagatctccccgacagtggtccatgctttgatcagactccatctgaatatgtcagctca

SEQ ID NO: 23 - DNA, 261 bp, Zea mays
  Peptide Sequence Number=SeqID_43398
atgaagaaaggcgacgtgactataattcaccggactgtccggtggtgcatcggactgtccggtgagccaacggttgccaactccaacggtcggccgcgcaatctgcgggcgacacgtggactgctccaacggtcagctggtgcaccggactgtccgggcgagaggctccaaactgtggagattcctcgcacacgggaaaagactataaaggagaagaccatggtattcaagttgatcatcggatcacttgaaaggggttga

SEQ ID NO: 24 - DNA, 558 bp, Zea mays
  Peptide Sequence Number=SeqID_43399
atggcccttatcccggttaaaaacgtggcaacagagcgcgaagccctgctgcgcaagccggaatggatgaaaatcaagcttccagcggactctacacgtatccagggcatcaaagccgcaatgcgcaaaaatggcctgcattctgtctgcgaggaagcctcctgccctaacctggcggaatgcttcaaccacggcacagcaacgtttatgatcctcggcgctatttgtacccgccgttgtccgttctgtgatgttgcccacggtcgcccggtagctcctgatgccaatgaaccagtgaaactggcgcagaccattgccgatatggcgctgcgttatgtggttatcacctccgttgaccgtgatgacctgcgcgatggcggtgcccagcactttgcggattgcattactgccattcgggaaaaaagcccgcaaatcaaaattgaaactctggtgccggatttccgcggtcgtatggatcgtgctctggatattctgactgcaacgccaccagatgtgttcaaccataacctggaaaacgtaccgcgtatttaccgtcag

SEQ ID NO: 25 - DNA, 559 bp, Zea mays
  Peptide Sequence Number=SeqID_43400
aacaaaaagcagctggctgacattttcggtgcgagtatccgtaccattcagaactggcaggaacagggaatgcccgttctgcgaggcggtggcaagggtaatgaggtgctttatgactctgccgccgtcataaaatggtatgccgaaagggatgctgaaattgagaacgaaaagctgcgccgggaggttgaagaactgctgcaggccagcgagacagatctccagccagggactattgagtacgaacgccatcgacttacgcgtgcgcaggccgatgcacaggagctgaaaaatgccagagactccgctgaagtggtggaaaccgcatttctgtactttcgtgctgtcgcggatcgcaggtgaaattgccagtattctcgacgggatccccctgtcggtgcagcggcgttttccggaactggaaaaccgacatgttgatttcctgaaacgggatatcatcaaagccatgaacaaagcagccgcgctggatgaacctgataccggggttgctgagtgaatatatcgaacagtcaggttaacaggctgcggcattttgtcc

SEQ ID NO: 26 - DNA, 315 bp, Zea mays
  Peptide Sequence Number=SeqID_43401
atgcacctgataactcaaaaagcattgaaagatgctgcggaaaaatacccgcaacataaaacggagttggtggctctggggaacacgattgctaagggatatttcaaaaaacctgagtcattaaaagcagtattcccatctctggataacttcaaatatctggataagcattatgttttcaatgttgggggcaatgaattacgtgttgtagcaatggtcttttttgaatcgcaaaagtgctacatacgtgaagttatgacgcataaagaatacgatttctttaccgctgttcatcgtactaaggggaaaaaatga

SEQ ID NO: 27 - DNA, 537 bp, Zea mays
  Peptide Sequence Number=SeqID_43402
atggcgctggtcggtggctttgatttcaatcagagcaagtttaaccgcgccacccaggcactgcgtcaggtgggttccaacatcaaaccgttcctctacaccgcggcgatggataaaggtctgacgctggcaagtatgttgaacgatgtgccaatttctcgctgggatgcaagtgccggttctgactggcagccgaagaactcaccaccgcagtatgctggtccaattcgcttacgtcaggggctgggtcagtcgaaaaacgtggtgatggtacgcgcaatgcgggcgatgggcgtcgactacgctgcagaatatctgcaacgcttcggcttcccggcacaaaacattgtccacaccgaatcgctggcgctgggttcagcgtccttcaccccaatgcaggtggcgcgcggctacgcggtcatggcgaacggcggcttcctggtggacccgtggtttatcagcaaaattgaaaacgatcagggcggcgtgattttcgaagcgaaaccgaaagtagcctgcccggaatgcgatattccg

SEQ ID NO: 28 - DNA, 444 bp, Zea mays
  Peptide Sequence Number=SeqID_43403
atggcgacatattttcatgtcgccttgtctgggcctgcccggacttggctcatgaaccttgccccaggatcaatctactcctggggagagctctgcgcgtggttcacagcgaactttgtcagtgcttaccaacaacacggagtggaggcccacctccacgcagcgagacaggagcctagagaaactctccggacgtttatctcctgcttcactagggtgcgagccttccgccagggagtatgtgatgaaaagatgttggagaagttggccatgcatgacgtggaaattgtctccactctcttcgctctggccgacaagtgcgccagggctgccaagggccgtgcgtggcactcggcgccgcagaccagggctgcccagacgggtggctcaggtgccgtcgctcaggacggcaaaaagaagaagaaaaatgaaccgcggccatga

SEQ ID NO: 29 - DNA, 423 bp, Zea mays
  Peptide Sequence Number=SeqID_43404
atggggccaaccgccggggtgattgcgctggtggcctgctttttgatcatggtcattatccttgcagtgctggcgatgatcgtggtgaaagccctgactcatagcccgtggggaacatataccgttgcgttcaccattccgctggcgctgtttatggggatctacctgcgctatctgcgtccggggcgtattggcgaagtgtcggtcatcggtctggtattcctgattttcgccattatctctggcggctgggtggcagaaagtccgacctgggcaccgtactttgactttaccggcgtgcagttgacctggatgctggtgggttacggttttgtggcggcggtgctgccggtgtggttactgctggccccgcgtgactacctctctaccttcctgaaaatcgggactatcgtcggtctggcg

SEQ ID NO: 30 - DNA, 447 bp, Zea mays
  Peptide Sequence Number=SeqID_43405
atgagggttgtccgcattgtaaccactgctccggagaaggcgaagccgtggaaggagacttccaggagttccaagactacgacgaattctagatggctcgtcttagacacactgcacttggaggcgccccctgcaccaccgcgggacgccccggctgttggaggagctactggaggaggtcctggaggagaccccgacgacgacgactcagaccacagcacggagtcctctgagccgcaggaggcggaaggatgggtcgcccgacccatcacccgtgacgccgctcgcggttgccacttccacgacgcactcgacaccttgctgcgccaggctttcgaccggcacacctggtcgatcgagtatcgttgtgtagtctaccagcacagtcgcgggaggtacccggacccgctgggaggctacctgcctagttcgccgtccggaggatga

SEQ ID NO: 31 - DNA, 441 bp, Zea mays
  Peptide Sequence Number=SeqID_43406
atgggcaagagcaagaagggtggtagttcttcgcatcactccggcgacaagcggaagcgcgagccgactcctccctcggaggatttcggcgactcagagtactcggaggaggagttctcctccgagtcagagggctctccggtccatgcctctcccccggcgtcgtctgataactcagacgattcccaggggatcgccgcggaggtgtggacctacatccgggccgtcgagcgcgccgggctcgagggctcggatgagtcggagtactcctcggacgaggagaactcctcggactcgtccgaggagggcggcggcgacgacgacggaggcgatggtgacggcggcagcgacgacggcgagggcggtgacggcagcggcaagggtggcagcggcgacggtagcaaaggcagcagcaggggcggcaacaaggccagtggctag

SEQ ID NO: 32 - DNA, 666 bp, Zea mays
  Peptide Sequence Number=SeqID_43407
atggaacagcctaaatggtcggtggtcaagacggaggccgacgtgttccaagaccagtactacccggccgtccacctcaatggcgctggcggcggcgccatcggctcccacttccacggcaaggagcagaagcacttcccgttcctgaccagccacagcaacggcggcggcggcggcgacgtggcgaccgccgcggccctgggctgccagccattcaccatcaccaccacggcgtcctcagagagcgacagcaagcagagcaacggcaactgtgctctctctcttctgtcagacaacccgacatcagcacagacggccatgatccctactaccgcgcagtccctcgccgcggcgatgcagtacggcggcagactccctggcagcgtcagcgtcagcggcggcggcggcggcgacgtctccctcaccgggatgtcgtacatgagggtgggagacagcaggcaggcgtccattctgacggcgtcgtcacccggccacgctgcggtcgcttcccctgtcccggccaccaccgcagccgcaacgccgccgccgccgccgcagctgctgcagtaccaccatggctatggctactaccatgtgacggcggcgagcagggcaacaaccccgacggcgccgccgttcaccgcccttcccttctcgtcgtggtag

SEQ ID NO: 33 - DNA, 326 bp, Zea mays
  Peptide Sequence Number=SeqID_43408
atgcacagcctgttgccattccgcttcctgtttcactgggagatgcaggccatcggagtagctgaaatgagtatgttggtagtggtcactgaaaatgtacctccgcgcttacgaggcagattagccatctggttgttggaggtacgtgcaggggtatatgtaggtgatgtatccgcaaaaattcgtgaaatgatctgggaacaaatagctggactggcggaagaaggcaatgtagtgatggcatgggcaacgaatacggaaacgggatttgagttccagacatttgggttaaacaggcgtaccccggtagatttggatggtttaag

SEQ ID NO: 34 - DNA, 481 bp, Zea mays
  Peptide Sequence Number=SeqID_43409
ttctctctcttacaacagggaccgggaaagggggataccccgaaaaggacccttctccgtgaaggaaacaggcttcgagcctccctactgatcagaggttcgaaggctggcccctcggaggggtttaacagccgcctcagagcgcgtgggctccacacccacttctggtcagaggttcgaaggccggcccctcggaagggttcaacggccgcctcaggccacacagagcgagggatgaccctgggtacgttcgatacataaccaaggctcgggctacgctcccgaggtaccctaggacattttcgagaccagcgggaatgatcttgtaacggaatcccatcagagggaggcatcgagccctcggaccccgtcaaaaggggaccgggtccggcagatcacccgcaggaaactccgcatcgcccgaccccagggctcggactcgggctcagccccggaagacgacgaactccgcttcgcccaa

SEQ ID NO: 35 - DNA, 559 bp, Zea mays
  Peptide Sequence Number=SeqID_43410
cacgccagcccgcgcattctcaaactgatgaagcgtccgggttctgtagatcgccaactggcgcgcatcaaacagtggcgcgaaatctgcccggaactgaccctacgctcaacctttattgtcggcttccctggcgagacagaagaagatttccagatgctactcgacttcctgaaagaagcgcgtctggatcgcgttggctgctttaaatacagcccggttgaaggtgcagacgccaatgccctgcctgaccaggttccggaagaagttaaagaagaacgctggaaccgtttcatgcagctgcagcagcagatttccgccgagcgcctgcaagagaaagtgggccgtgaaattctggtgattatcgacgaagtggacgaagaaggcgcgattggtcgcagcatggcagatgcaccggaaatcgacggcgcggtttatctcaatggtgaaaccaacgttaagccgggtgatatcctgcgtgtgaaagtcgagcacgccgatgagtacgatttgtggggtagccggccgctcatccgccagcattttcaagcgttcgacg

SEQ ID NO: 36 - DNA, 361 bp, Zea mays
  Peptide Sequence Number=SeqID_43411
atgactggcccatcctacgccagcgttcttagcgctggcgtattgttgtgcgccttttccgcccacgcggatgagcgtgaccaactcaaatctattcaggctgacatcgccgcaaaagagcgcgcggtacgccaaaagcaacaacaacgcgcaagcctgctcgcacaattgaaaaagcaggaagaagcgatctctgaagccacccgtaagctgcgcgaaacgcaaaacacgctcaatcaactcaataaacagattgatgagatgaacgcgtcgattgccaaactggagcagcaaaaagccgcccaggagcgcagcctcgccgcacaactggatgccgcattccgtcagggcgagcataccg

SEQ ID NO: 37 - DNA, 531 bp, Zea mays
  Peptide Sequence Number=SeqID_43412
atgcagacggcatgcaaccgcgccaagtggacgcgcttctccgactcccgacacgcccagcatggaggcccaggcccacgcgtcacacaaccggcgcgccagatgcttcatgcaagcaactgcaccgccacttgcgccaccaccacgcctcctcggttgcggaaccaataccgcggctcgaggcgacccagcagcgccagcctggcgcggcggagaagcgggcgacgcttcgccttcgccataatgaccgcgtcagtaaagggaccgggaaagggggataccccgaaaaggatccttccccgtgaaggaaccaggctccgagcctccctactgatcagaggttcgaaggctggccccccgaagggttcgacagccgcctcagatcgcgtgggccctacacccactactggtcagggttcgaaggccggccccccgaagggttccacggccgcctcaggctactcgagctccgtgcccattactgatcaggggttcgaaggctggcccccaaagggttcacagccgccttag

SEQ ID NO: 38 - DNA, 1109 bp, Zea mays
  Peptide Sequence Number=SeqID_43413
atggcgccttggccgcggcggcccgtgctgacgctggtgctgctcctgctgctcgcgctcctgtgctcccatgtcgcgctctgctcctccgccgaaccggggaaacccaagcccaagcccaaggtctccggcagccgcaaggcgctgcttgcggacaacgacggcgacgaggtgcccgccgccaagccgggcaagtcggccgcggcggggaagaccaaaaagaagctgctcgccggcgacgccacttccaagaaccagaccaaggttgccaaggctaagaagccagagtcagctgccgcggcgaaaggggccgccaagaagcccgctggcaaagcggctgcggctgcgggtggtgacgccgccattgccaaggtctccaaggcccccaagacccccaaggcggacaaggccaaggtgccgaagccggacaaggcggcgactgcggcggcggctggtgccaagaccaagggcgccgattcggccaagcctgccaaggtttccaagacgggcgccaaggcggtgaagccgcccaagacggccaaatctgaggctgccaccgcggttgggaaggcaaagaaaccgccgccggcaaattcgaccgtggatgccggtgccaagacggccaaatccggcaagaaggctccggtggtcgtcgacgccgaggtgaaggcgaatgcgaccgtcgtgagcaaggagaagtcagcggcgacggagacggtggagatggaggatgaggaggaggtggtgttggccaaggaggcgggggagggcacggacgatctcatctccgaattccgggacctacccagtcggctgcaggagacgctgatgccggacctggcgcgcctctcgcaccactccaaggcgtacctgtccgcggcgaacgccgggatcgccgacggcgtgcgcccgatcctgggcggccggtgggcggcggtggccgcctccgcggcgtcggtggcggtgctgctgctgccgctcttcatgctcaccgcgctggtgcgccggatgggcccgtacctgccgctcctccaccgcgcgctgctgctggcgcaggcgtacctcgccatctactttgccacgctcgcgctcgccgcggccgctctaga

SEQ ID NO: 39 - DNA, 642 bp, Zea mays
  Peptide Sequence Number=SeqID_43414
atgggtgtccaggtgaaatctgaggatggtgatcgtcttccggttactctgcgaggccccaagacccccacgccaatcacgtacagggttccgatggcgtcagcacaggtcaagtcagcggagatgggtgctgacatcgaggttatcaatcctaggttggcaggtggagaggatgtggccgatctgcgcgtgcgttctagtacactcaaaggcgtgaccgtccctgaggatcgcgctccatccatgatcgacgagtaccccattctcgccgttgctgctgcgtttgccgagggcgcaactgtaatgaacggccttgaggagttgagggttaaggagagtgacaggctgtccgcggtggcgaatggcctgaagctaaacggcgtggactgcgacgaaggtgaaacgtcccttgtagtccgtggtcgcccagacgggaaggggttggggaatgcttcgggagctgctgtggcgacgcaccttgatcatagaatcgccatgtcatttctggtgatgggacttgtctccgagaatccggtgaccgttgacgatgctaccatgatcgccacctcctttcctgagttcatggacctcatggcaggcttgggggccaagatcgagctgtctgatactaaggccgcttga

SEQ ID NO: 40 - DNA, 753 bp, Zea mays
  Peptide Sequence Number=SeqID_43415
atggacattgcaaaagtgatactcggatgcgtagctcggaaacaactgatcaagccaaggacggaggcaagaagagcttcgaggtaccaagtgcacgggagaaggtcaaggagactgaggaacccaaagccaagggatgttggagctaagaaatgtcaatctagatcaagtcaagccaacttgatgatttataagtccaacatcaaagctcaagcatgtgaaatgctccgagactcagctcagtctggcacaccggactgtccggtggtgcaccggacagtgtccggtggcgcaccggacagtgtccggtgcgccaggctgacgctggtgaaaaggccgctctcgggaattcgtcggcgatgtacggctaaaattcaccggactgtccggtgtgcaccggactgtccggtgagccaacggtcggccgggccaacggtcggccgcgcgatctgcgcgggacacgtggccgagccaacggtcatatgggggcaccggactgtccggtgtgcaccggacagtgtccggtgcgccaacggctccaagacagcaacggtcgactgcgccacttatggaaggagatcggcaccggacagtgtccggtgcgccaacggctccaagacagcaacggtcgactgcgccacttatggaaggagatcggcaccggacagtgtccggtggtgcaccggactgtccggtgcgccacccgacagaaagaaagtattgccttccaaatgggattccaacggctcctag

SEQ ID NO: 41 - DNA, 1383 bp, Zea mays
  Peptide Sequence Number=SeqID_43416
atgacgagggagaagaaaatgttcacctcctacgtcaaaaacaaggattcccaggattcgatcatttttggagatgggaatcaaggcaaggtcaaaggattgggaaaaatagccatcacatccgagcattcaatctctaatgtgtttttagttgaatcactcaggtataatttggtatctgtgagtcaattatgtaacatgggttataattgtttattcacaaatgtagatgtgtcagtctttagaaggagtgatggttcattagcttttaagggtgtattagacgacaagctctatttagttgatttttcgaaagagaatgtcgatctagatgcatgcttaatcgctaagaccaatatgggctggctgtggcatcaccgtctagcacatgttgggatgaaaaaccttcataagcttctaaagggagatcatgtgttaggactaaccgatgtctgtttcgagaaagacaaaccttgtgcagcatgtcaagcaggaaaacaggtgggaagcactaatcacagcaagaatgtgatgacaacatcaagaccaatggagcttcttcacatggacctcttcggacccgttgcctacctcaacatagggggaagtaagtatggtcttgtaattgttgatgatttttcccacttcatttgggtattctttttacaggataagtcggaaacccaagggaccctaaagcgcttcttaagtagagctcaaaatgagtttgagcttaaggtgaagaagataaggagcgataataggcccgagttcaagaatctacaagttgaagagtttcttgaggaggaaggcatcaagcacgagttctctgccccctacacaccacagcaaaacagtgtggtagagaggaagaacaggacgctaatcgacatggcgagaatgatgcttggagagttcaagacgcccgagcggttttggtcggaagctgtgaacacagcctgccacgctataaatcggctctatctacatcgcctcctcaaaaagacctcctacgaacttcttaacggctgtagaagggttttactaggatatgactcaaatacaaaggcgtatagggtcttcaacaaatcattgggattagttgaagtctctagcgatgttgtatttgatgagacgaatggctctccaagagagcaagttgatcttgatgatatagatgaagatgaagttccgacgggcgcaatgcgaacgatggcgataggagatgtgcaaccacaggaactacaggaacaagatcaaccttcttcctcgacactggtgcatcccccaactcaagacgatgtacagggtagaagaggccttacaggatctggactgagtgttggccatgcaggaagagctcaacaacttcaaaaggaatga

SEQ ID NO: 42 - DNA, 411 bp, Zea mays
  Peptide Sequence Number=SeqID_43417
atgcccacgccgtctctcatttccccattgtccaaaccaagccccacaaccgcttcaccgtctcatgtgcccgtctcggcacctctttcccgagccgaggacgactggagcaccaccgttgacgccaccactcctcggtccccgccggcgcgcgtggaccggacatctccatccgcgacccaccgagccaagaccactgtcaagctcgccttcgtcgatcgcacttgtctgccacctcgcctagccatcttcactgccagccaagtagggtataggaaaaatatggaggaagtactggtggggattgtcaaggagctgccaggaattcttgtggaagagggtgaacccgaggctgaagctcaggagtgtcctgaccacagtcccagttccttcgagaaaggcgagtcctga

SEQ ID NO: 43 - DNA, 105 bp, Zea mays
  Peptide Sequence Number=SeqID_43418
atggcgagctgcctgcctgtcttgccgtccatggaaagtgccatgtctaatagtgctaacgttattgccatgtcggacggctcgtttgacaatctatactcgtga

SEQ ID NO: 44 - DNA, 474 bp, Zea mays
  Peptide Sequence Number=SeqID_43419
atgcaagatgccgcacggcgtgcactttcgcactactgcttagtgctcggtggggtagccgatggtcttaacctgaagtattacccacgccgtccatctggcagcacaagaggcgtggttgtctcgcctgttgatgaggacaatcctaggttgagcagcacagtcaacctagccgccgtgctaaacacggagctagaccatgctttagatgagctgagtagggctcgtgctgagatcgcccagatgcgggctgagcgcggagcatcgtcacctagggatggttctcccgcccccgtcgggactcagcacctgtaccactcacctcagcgtggacaccatgcttatgagtgtgggtatcccctacaccttggtttacttgttaatgttaataaaattagttatttagttgatgtcaaacaacaggcacagaggaggaaggtgtgctcaacaggagcaggcagcaccgcaggatga

SEQ ID NO: 45 - DNA, 652 bp, Zea mays
  Peptide Sequence Number=SeqID_43420
atggggcacaaagtgttaccgtccagccaggcttcaacaggctacagcgccacggatatcgttgaatacgttaaaatattactaatgagccgcggcggcgacctcggcatgatgattatgatgctgtgtggatttgccgcttacatgacccatatcggcgcgaatgatatggtggtcaagctggcgtcaaaaccattgcagtatattaactccccttacctgctgatgattgccgcctattttgtcgcctgtctgatgtctctggccgtctcttccgcaaccggtctgggtgttttgctgatggcaaccctatttccggtgatggtaaacgttggtatcagtcgtggcgcagctgctgccatttgtgcctccccggcggcgattattctcgcaccgacttcaggggatgtggtgctggcggcgcaagcttccgaaatgtcgctgattgacttcgccttcaaaacgacgctgcctatctcaattgctgcaattatcggcatggcgatcgcccacttcttctggcaacgttatctggataaaaaagagcacatctctcatgaaatgttagatgtcagtgaaatcaccaccactgctcctgcgttttatgccattttgccgttcacgccgatcatcggtgtactgatttttgacg

SEQ ID NO: 46 - DNA, 499 bp, Zea mays
  Peptide Sequence Number=SeqID_43421
atggagaagcaaagctgctcactcactcaccccgaccgcggaccacccgaaccggacaagagggagaagacgatacggcttggtgtgggggcgtggctgcggcttctgcgaggcgagcaggcggtggcaggcctaattatagcgttcccggctgagacgtggaggcatgaagtttgtcgattgcgcgccgcgattcgtgcggaggaggcggagcatgcggacaggggaggtgggcgtgaacatgggccccacggcgtggcgggagcgaggtgtcgtggtatctggacgataatgcgggcgggtgggatccagccagcgtcagcgtgggcgtggccccgcctcgggagaaccagggaggacgacgcacgcacgggaaacggaacggagagcgaagccggcgggaacgacacgccgcgcgacgggacgccgtgcgcgatgtgctggcataacacaagcccgcgtgagcaaggccctatggctgccggcaaccaatcaagag

SEQ ID NO: 47 - DNA, 1230 bp, Zea mays
  Peptide Sequence Number=SeqID_43422
atggacgtgaagagtgccttcctcaatggaccaatcaaggaagaggtctacgttgagcaacctcccggctttgaagacagtgagtaccctaaccatgtctataggctctctaaggcgctttatgggctcaagcaagccccaagagcatggtatgaatgcctaggagatttccttattgctaatggcttcaaagtcggcaaggccgatcctactttatttaccaaaactcttgacaatgatttgtttgtatgccaaatttatgttgatgatattatatttgggtctactaacgaatctacttgtgaagaatttagtaggatcatgacacagaaattcgagatgtcaatgatgggggagttgaagtatttctttggatttcaagtaaagcaactccaagagggcaccttcatttgccaaacgaagtatactcaagacattctaaacaagtttgggatgaaggatgccaagcccatcaagactcccatgggaacaaatgggcatctcgacctcgacacagaaggtaaatccgtcgatcaaaaggtgccaaaggttcacaataagccaataaaaagaccaagaatgggttcaataaaagagaacaaagggacaaccgaaggcaccctggtctggcacaccggactgtccggtgtgccaccggacagtgtccggagatgcgactctgaactcgccagcttcgggaatccgctccgctataattcaccggacatgtccggtgcacaccggactgtccgaagtcagatggaagtccactaccaaaccagcttttgccagaatgaagatggtttccctaagttgctcagagcatgcacagtccgcctcggaatcaggagccagccagagtatgatggtcgtgaattcgccgagcatggcacagagaagtctgcagctcaaagcagcaaggctccaagcagcaagcctccactcgatcacctgccacctggtaggctagtactagcagcaaggaaaaatccaattggaaatgtcttggctcgagcagccaagactctgctcagtctgggagcaccggactgtccggtgcgccaggctggctcgagcgaagtggctgctctcgggaattcaccggcgacgtacggctataattcaccggactgtcaggtgtgcaccggactgtccggtgagccaacggtcggccgggccaacggtcggccgcgcgatctacgcgggacacgtggccgagccaacggctag

SEQ ID NO: 48 - DNA, 396 bp, Zea mays
  Peptide Sequence Number=SeqID_43423
atggccttgcgaggtaactggcccgaggccccgcacgaggccctttcgccttctagtggacccgggggatatctgtctcccacagcgcacgcccagggctgggctaggccgaatatggagatgctgcatcaacaggtgcaaaggaagaaagaaaagatggcccggttagctgacctacaaaggcagatagacgaagcctctgaagaggttcgtcatctcatgcaagatgaacagaaccggaggccccagtacagagagcttcaccaagagggcttcgtcaacgaggatgactggtatgatgattttcatcatggaaattttgcttttgatgatgcttctcctctgtcagttgaactgcaggctacaccttggcccccatcttacaaaccaccctag

SEQ ID NO: 49 - DNA, 762 bp, Zea mays
  Peptide Sequence Number=SeqID_43424
gctgacggagaagacggaccgcatcccggcgggtgtgatacggacggacgacgagcggacccaccactaccactacgacagccagcaccgcctggtgttctacacgcggatacagcatggcgagccactggtcgagagccgctacctctacgacccgctgggacggcgaatggcaaaacgggtctggcggcgggagcgtgacctgacggggtggatgtcgctgtcgcgtaaaccggaggtgacgtggtatggctgggacggagacaggctgacgacggtgcagactgacaccacacgtatccagacggtatacgagccgggaagcttcacgccgctcatccgggtcgagacagagaacggcgagcgggaaaaagcgcagcggcgcagcctggcagagacgctccagcaggaaagggagctggaggaagaaatccgggcagaccgcgtgagcagtgaaagccgggcgtggcttgcgcagtgcgggctgacggtggagcaactggccagacaggtggagccggaatacacaccggcgcgaaaagctcatctttatcactgcgaccaccggggactgccgctggcgcttatcagcgaagacggcaatacggcgtggagcggggagtatgatgaatggggcaacctgctgaatgaagagaacccgcatcagctgcagcagcttatccgcctgccggggcagcagtatgatgaggagtccggcctgtattacaaccgccaccgctattatgacccgctgcaggggcg

SEQ ID NO: 50 - DNA, 513 bp, Zea mays
  Peptide Sequence Number=SeqID_43425
atgtccggtgcaccagaggactcaggtttcaaactcgtcaccttcgggaatttccaggggccactccgctataattcaccggactgtccggtgtgcaccggacatgtccggtgctccaaggaagggcggccccaggaactcgccagcctcgggttttcattccagccgctccgctataattcaccggactgtccggtgtgcaccggactgtccggtgcatctggggagcaatggctacttcaggcgccaacggctacctgcagcgcatttattgcgcgccagcgcgcgcagaggtcaggcacgcccatgctggcgcaccggacactctacagtacatgtccggtgcgccaccggacatcaaggcgggcccagaagtcagaactccaacggtcgatttccaacggcacctgtgacgtggcgggggcaccggactgtctggtgtgcaccggactgtccgagagggaaagggttgaaaaagacccgtccttaagtggactcctcaacggggactag

SEQ ID NO: 51 - DNA, 2022 bp, Zea mays
  Peptide Sequence Number=SeqID_43426
atgtcgggagctcacgccaagaaggagatggtgaccagcgagaagcccaccacaagccacgggaaagctccatcgggagagtccgacaacaaaagggaggaatcacctccccgtgtcaagtcacaccggagtggcgacaagaagaagaaaatgaagaagttggtcaactatgagaccgactcttcgttgccttccacctccggctctgacacgtcgtccgtcacttctaagcgccatgagcgcaagaagtttagcaaaccaccggtttttgacggtgaagattattgtatgtggagtgataaaatgaggcaccatctaacctcactccacgctagcatttgggacattgttgaatttggagcgcaggaaccatccgtaggggatgaaggctatgactcggacgaggagtataataaggtgcaagggttgaagagtgccaaagagatttgggacgtgctcaagaccacgcacgaaggagatgaggtgaccaagaccaccaagcgggaaacgatcaagggggagctcggtcgatttatgctcaaccaaggagaggagccacaagccatgtacaaccggctcaagaccttggtgaaccaactgcgcaacctcgggagcaccaaatgggatgaccatgaaatggtcaaggttattctaagatcactcgtttttcttaaccctacacaagttcaattaattcatggtgatcctagatataagctaatgtctcccgaggaagttataggaaagtttgtgagctttgaattaatgatcaaagactccaaacaaatcatcgagcgaggcgccacctccacacccgaggtgcaacccatcacattcaaagcgacggaggagaaagaagagtctacatcaagtaggcttcccatcgacgcctccaagctcgacaatgaggaaatgacgctcatcatcaagagcttccaccaaatcctcaagcaaaggagggagaaggattacaagccccactctaagaaagtttgctacaagtgtggtaagcccggtcattttattgctaaatgtccattatctagtgatagtgacaagggcgacgacaagaagggaaagagaagagaaaagaagagatgctacaagaagaagggcggcaatgcccatgtatgctgggagtgggactccgacgagagctccaccgactcctcctccgacgaggacgccgccaacatcgccatcaacaagggtttcctcttccccaacgtcggccacaaatgcctcatggcaaaggacggcaaaaagaaggatgaactcttggatagccaagatgacttccttattaaggaaaataagaagcatgctaaggttaaaaatgcttacgctcaggagatagaaaaatgtgaaaatttgactagtgagctaagcacttgccatgatgttatctcaaaccttagaaatgaaaatgcaaaattatttgctaaggttgagaaatgtagagacattaatgttgatgctattcatgatcacctagctttaattaaacaacaaaatgatcacatagctgaacttagtgctaatatcaatgagcatgacttagaaaataaaaaatttaaatttgctagaagtatgctctatagtgggagacgcccaggcattaaggatgacattggcttccaacaaggagacaatgtcaagctcaatgctactaaaagattgtctaattttgttaagggcaaggctcccatgcctcaggataacgagggctatgttttatatcctgctggttatcctgaggataagattaggagaattcatgctaagaagactcattctgtttctcaccatgcttttatttataagaatgagacttctagctctaggcgttctacccatgttaaaatgcctaaaaataaatctcctattgcatcaaatgatcataacatttcatttaagacttttgatgcttcatatgttttaactaacaaatcaaacaaagtagttgccaaatatgttggggccaaacacaagggctcaaagacttgtgttttggtacccaag

SEQ ID NO: 52 - DNA, 264 bp, Zea mays
  Peptide Sequence Number=SeqID_43427
atggctgctataacaaagatggagatgagccgccgtgacaccgatttccccctttctctgtctccggcgaacgtgaagccctacgctccgtggcccgccctctctgaacacgaggaagaagtggaagccactgaagagcaagtaccaccacctttggaaacacaggctgagaactgtttctacttcgatatttgtggatcggagcctgactcacccataaacaaaggcaagcctcggtgcattcgccacccccttgtgttttaa

SEQ ID NO: 53 - DNA, 579 bp, Zea mays
  Peptide Sequence Number=SeqID_43428
atggctgaaaggtaccaacttccacgaagttgcgttcctccaacgacaaggcgaaaggattgcgggcgtcccccatccgggggctcggaaggtggaaagacacggtgcataagggagcgcggagacatggtcgcctctcaaggaggtcaccctccttttaaaggcgactctccctacttgcgtcctcagccgatgcgggctgagtcttctccatcacgctccaaggtcctccccctacgacacgggggctgggccccatgcgtcatgcaagctggtccagggcagaaggagccaaaccgccgcgcgcagggcatgcaactgcccagcgttacaagcattcccccacttttgcccagaccagcaggtggcgcctcaggcaggagaagcaagcgacgcttcgccttcgccataatgactgcgtcgaaaaagggaccgggaaagggggataccccgaaaaggatccttctccgtgaaggaaacaggccccgagcctccctactgatcagaggttcaaaggctggcccctctaaggggttcaacggccgcctcagagcgcttgggttttgcgcccactactag

SEQ ID NO: 54 - DNA, 567 bp, Zea mays
  Peptide Sequence Number=SeqID_43429
atggagagtcatgatctccgggcagaatgggaatcacgacttgtgggtaaagtgtacaacctctgcagagtgttaaaaactggtatatcagccgagctcacgatggctcgtcttaggtgcactgcacgtaagtctgtgatcccctttttgccttctcgcctggcggaccgtcccctgcgtcgcacagtgctaggtcagtccagtcaccaagagagactgcatcgtcgcctgcacgaggagcaggagcgccgacaccaggagcaggagcagcaggactcttccccctcgcctcagcaggaggtggagtttgagaggccaccttcccctgcacctcagccagagatgccccctgcaccacctcagggcatctcgtttgctggaggagaccctgacggagacggagacagagacgacgacgatgccggtggcagtttgagccacggcacggagctttcggaggagctggagccggatggatggatccctagacccatcactcgtgacgctgctcgcgggtgtcacttccacgacgctcttgataccctattgcatcgggccttcgaatga

SEQ ID NO: 55 - DNA, 724 bp, Zea mays
  Peptide Sequence Number=SeqID_43430
gttaccgatacccagtggcaggggctgatgagtcagttacgtttgcaaggcttcgatacccttgttttgcaatggacccgttacggcgatgcatttacccagccagaacagcgcacgttattgtttaagcgggccgcagctgcgcaacaggctggtctgaagcttattgtcgggctgaacgccgatccggaattttttatgcaccagaaacagtcgtccgcagcgctggaaagctatcttaatcgcctgctggctgccgatctccagcaagccagattatggagcgccgcgcctggcataacgccggatggctggtacatcagcgcggaaattgacgacctgaactggcgcagcgaagccgcccgtcagcctttgctaacatggttaaacaacgcgcagcggctgattagcgatgtttcagcaaaaccggtttatatcagtagttttttcgccggaaacatgtcgcccgatggctatcgccaactgctggaacacgttaaagcaaccggcgttaatgtctgggtacaggatggcagcggcgtggataaactgaccgctgaacagcgtgaacgttatttacaggccagcgccgattgccaaagtcccgcccctgccagcggcgttgtttatgaactttttgtcgccggcaaaggcaaaacctttacagcgaaaccgaaaccggacgcagaaattgcctcgctgttagcgaaacgttcctcttgcg

SEQ ID NO: 56 - DNA, 251 bp, Zea mays
  Peptide Sequence Number=SeqID_43431
gaataacggttctgaatgggatactacaggtcgttccatcgttgataccttgacagttaataatggttctcaggttaatgtttcggaatctaaattaacttcagatactatcgatttaactaacggttcttcgctgaacattggtgaagatggctacgttgataccgatcatctgactattaactcctacagtactgttgcgttgaccgaatctactgggtggggggctgattgatcctacccacgtaata

SEQ ID NO: 57 - DNA, 1764 bp, Zea mays
  Peptide Sequence Number=SeqID_43432
atggcggacccgaggtgtgaggcaaagagagcgtgggggagcacgaaggctgcaaaaccggccacgcctgggtccagcaagccgtcggcgggcgcgaagacagctaccgctggcgtgaccaagtctcccttggccgaagctgcgaagggacgggagctgccctcgccggggaaacgtgttaccgacttcagcacgaacatcagcatggaggactattttgtcaggtccagcgagggacagatggttgttgtcccgccttcggtggcaaccgctttgccatcggcggaggtaagggcgagggggaccacgcaggacccgtgggccgccttctacgtgagcggcgagattctgacagccgctgccgctaaggacgtggcaggcaccatgtcccagtggctgagggaggcatcgcagcggatgtcgcagcagctgtcgcagcagctaagtcaagcggctgacttcgccgaccgcgttgcgtctggtgtcctgactgcggacgtggctgccgaagtcgagagacttcgggcacagcacgcggatgccgtccgagagaagtcggtcgcggagagcaaaagccaccagttggcggagaaggtggccgccttagaggccgagaagacggaccttcggcgccagatggcagaagagaggagggaggctgaggccaaggtggtgcaggcggagggaagtctcgccagccaacgcgctgaggagtgggaggcgaggttcaacgctctgcgcggccgcgtggataaggctgaggcctctacgcgctctgaggttaagcggacgcttgcacagttcgtgagttcatatcgcgagctgggcgcgcgtactgctgacttcaaagtgcctgaccgggaggcgggccttcgcttcctcgaatggttgcgggaggagttgctggcagacgagagctttgagcgcgagatcttcaaggccgaagaccctattgtgaagcagtcagcggggggcctttttgataggatgtggggggcacatggtcgggaggctgtcagggagcgatccgaccgggcgagggagcagatggagcgtgccgaggacgttgaggactttggaagtctggtcggcgcgccgcccgaggctgtggaggccaatccggtgctgcccttggacgtcggcgaaggcccctcggccgtggccgttcctgccatgaccggcggcgaagaccctctgtcggcccctacgccgacaatcgaaggtgccctggaggtggcggacgagccgccagccgaagaccccacggccgcggccgggccctcgcaggttcaaggttttgggcctgcgcacgcaaccgctactgacactgctaattttgtgacggcttcgaccgtggttgatggagatgtttcagatgattctgtgtctaagttttttgagtctggtgattctgggggttcggttgtgtcgacggaggagtcttcggatgaggacttggattattttgcggcgctggatgtggctgcggtgggagcttctctgcgcgtggtaggtgctgaagttattcctagtgcgagtgctaggcgtaggcggcgaagggcggtcgcgaagcgaagggttagtgaagtggagggaagtcatcttcgtgtggacggggctggtaagcgagagttgttgtcctcgccggctgggacgagtgtaggtgagggggagttgcgaaatctttttgagggtcaggagctgaggataatgctgttcaactacagggagataggcattatccctaaggttgagccaatgtaa

SEQ ID NO: 58 - DNA, 306 bp, Zea mays
  Peptide Sequence Number=SeqID_43433
atgcccaccggcgtgcgtgacgaccaccgcctgggcgcctggtacaggatgtattggatggcagcagcatgttatgttgtgtcgtcgtcgccagcaaggactggagagctatggctcttctctgccagcaatcttgggtggctggtgcgagcatccatggatgatgcctgcccacacacgggccacagccacagacgctctcttttccgaggcgaaaggcggcctgctgcaagggttgcttgcgccctttcccaacgccaaatccgtccatcccatcacgggctcgtcgtcagccgtcccgtctga

SEQ ID NO: 59 - DNA, 832 bp, Zea mays
  Peptide Sequence Number=SeqID_43434
atgagggaagcggtgatcgccgaagtatcgactcaactatcagaggtagttggcgtcatcgagcgccatctcgaaccgacgttgctggccgtacatttgtacggctccgcagtggatggcggcctgaagccacacagtgatattgatttgctggttacggtgaccgtaaggcttgatgaaacaacgcggcgagctttgatcaacgaccttttggaaacttcggcttcccctggagagagcgagattctccgcgctgtagaagtcaccattgttgtgcacgacgacatcattccgtggcgttatccagctaagcgcgaactgcaatttggagaatggcagcgcaatgacattcttgcaggtatcttcgagccagccacgatcgacattgatctggctatcttgctgacaaaagcaagagaacatagcgttgccttggtaggtccagcggcggaggaactctttgatccggttcctgaacaggatctatttgaggcgctaaatgaaaccttaacgctatggaactcgccgcccgactgggctggcgatgagcgaaatgtagtgcttacgttgtcccgcatttggtacagcgcagtaaccggcaaaatcgcgccgaaggatgtcgctgccgactgggcaatggagcgcctgccggcccagtatcagcccgtcatacttgaagctaggcaggcttatcttggacaagaagatcgcttggcctcgcgcgcagatcagttggaagaatttgttcactacgtgaaaggcgagatcaccaagctccggttcccaacgatcaaggcgagttacatgatcccccatgttgtgcaaaaaagcg

SEQ ID NO: 60 - DNA, 339 bp, Zea mays
  Peptide Sequence Number=SeqID_43435
atggcaacaacgttgcgcaaactattaactggcgaactacttactctagcttcccggcaacaattaatagactggatggaggcggataaagttgcaggaccacttctgcgctcggcccttccggctggctggtttattgctgataaatctggagccggtgagcgtgggtctcgcggtatcattgcagcactggggccagatggggggcggagcctatggaaaaacgccagcaacgcggcctttttacggttcctggccttttgctggccttttgctcacatgttctttcctgcgttatcccctgattctgtggataaccgtattaccgcctttgagtga

SEQ ID NO: 61 - DNA, 50 bp, Zea mays
  Peptide Sequence Number=SeqID_43436
atggaagacgtcccgggtggtgataggtggatcccgggaattccggaccg

SEQ ID NO: 62 - DNA, 654 bp, Zea mays
  Peptide Sequence Number=SeqID_43437
atgcccccgctcgccccctcccctgcgcgcaacaaccgtcgtctatacctcgtcccgaggcgaccccaacccttggcaacgccccccgttccaacagtggccatccacggcggctgcgctacccccgctcgggtccacgacctcggtcaccaacccaccgcctcccccgttcccggcgcgtccgacattgttgccgccgacgaggtctgcaccatcttcatggacctgcctgcagatgtcaaggaaagggagctacacaacctattgtgctggctcttgggattcgagacgtctgagatgaacttcaagggcaaccagcccatgggctttgcgctcttctccactgtgcaccaggccatcactgcaaaggctatgttccaggatacagtgttcgatgctgagactaaggtggcgctgcaaactgatatggccaagaagaacctcttcgtcaagagatccagtgagaaaactaaggctgagaagatacaccagatcaagagagccgaaggagaggaagaatccaagcaccacgccaagggcatcatggacatgatcctggtcacccagtactttggcaccatgagattggggcctcctccaagtcatcttttcatcccccatggtcttggagctgtcaaggatgtcttggcgtag

SEQ ID NO: 63 - DNA, 491 bp, Zea mays
  Peptide Sequence Number=SeqID_43438
ttgatttgtgctttcctgtcctacaagcttgtcctcggatatgcaaacccgggctatgaatgctacaagatggtggggctgaacgggtaagaggtcaagcgactacggttctagtgtcagtattggtttgtagccgcgtttctcaccgtactggagagagttggggaaagtatagtgtcatggttgctaatgtgcagtgaagcaaagttggtatttattgtgtacttgtggtatccaaagacataagggaccgcctatgtatacaagtgattcttcaagccatacatggcaaaacatgaaattgagattgaacgaaatatgcttgagttgaaggcaagagtcgttgacatgacagttctttacttctagagggttgcaaactatgcgcagacaaagtgttatcattggctttctcccattttacttggtgcaactagcgtgccaaagaggtgggaatcccgcgaccttcgtgttcgtcccgcgtccaggtc

SEQ ID NO: 64 - DNA, 231 bp, Zea mays
  Peptide Sequence Number=SeqID_43439
atgtcaagaccaggcggtcgacttaacgcgttagctccggaagccacgcctcaagggcacaacctccaagtcgacatcgtttacggcgtggactaccaggtcttcgtccagggggccgccttcgccaccggtattcctccagatctctacgcatttcaccgctacacctggaattctacccccctctacgagactcaagcttgccagtatcagatgcagttcccaggttga

SEQ ID NO: 65 - DNA, 768 bp, Zea mays
  Peptide Sequence Number=SeqID_43440
atggcgtcggcaatggtgctggtatggcacagaaagctcgaaggcgaaagggcgcagcgagaggagaaaatgcgaaagcgtaactgctgcacgcggggtgaatcccttttcaaggaagactctcccgcttgcgcccatctcgcccaagcgcacaccaaagcaacccagcctctgacacggggcccaggcccacaagtcatacagctggtgtgcgggtctctgagtgctgagaaggcgaaccgccacgtgagaagcgaaccgccgcccgtagtagtgcgcctctccatctccaccggaagcaaaggcccagtctctgacatgggggcccgggcccatgagtcatcctccttgggcgccggttcctgggtgctgggaagtcgagccaccactcacgccagtactgcgctgcctcggggccaccgcagaagacagagaaggcacggtgcccacgcgactatctctagtggcgtggagaacagcacccgtcgccaccacgtggacggctccaaggccaccacatggccagagaagacaatatcctccgaggtatcaacggcgggtctggacccccatgagaaagtgtcgccccatgcatatacggaccggacctcggggcagggtccgaacctctgcgggtacagaccggacccccgggacgggtcccagatctctctgtgtggggtccgggccaccctcagtagagtcccgagattctgggacaaagagtacccggaccttactcaaggccaggcgggggtccggagctga

SEQ ID NO: 66 - DNA, 1041 bp, Zea mays
  Peptide Sequence Number=SeqID_43441
atgacgcaggctggggaaactgctgcaaatagcgcagggaaagtgactaaggcaacagaagatgagaagaacgcgctcgcaaaattaaaagcagctattgatccagttggtgccgcaattgatactgtcggtcgacgctattctgaattaaagaaatttttcgataaagggcttattgataaagaagaatatgaatttcttgtccgtaaacttaatgaaaccacagaggaattgagcggggttgcgcaagcgcagagagaagccgagaaggccggaaaacttgctgccgctcagcaggaagcgcaggctcaggcctttcaaagaatgctggacaagatcgaccctctggctgcggcgctaagaaatcttgaacaacagcatgatgaacttaatgctgcgtttgcatccgggaaaataaatggttctcagtttgagaattatagccgaaaaatacaggaaacacggcgagagcttaccggagaggctcaggcagagcgagaagcagcaaaagcgcatgatgaacaggttgttgctttgcaacgtctgattgctcaacttgatcctgtcggaactgcttttaatcgtctggtagaacaacagaaacagctcaatgaagcaaaagctaaggggatgctttctcctgaaatgtatgaggagctttctggaaaacttcgtgctatgcggagtgagcttgaggttactcaatcacaattaagcaaaaccggaatgtcggcaaaacaaacggcttttgctatgcgcatgttgcctgcacaaatgacggatattgttgttgggttgtccactgcagggcggccattcagctatgcaggagacaagaatcgccagcttacccgttacagcgatacccgctggcatgaagattccgtgcgtaaccgctggttcagcgtgatggtggggccgtctgtgcgcgtgaatgaatggttcagcgcgtatgcgatggcgggtatggcttacagccgtgtgtcgactttctccggggattatctccgcgtaactgacaacaagggaaggtgcgaataa

SEQ ID NO: 67 - DNA, 648 bp, Zea mays
  Peptide Sequence Number=SeqID_43442
cgagtggtggcaattgtcaccgcggtgcaagaacgttatccccttgcgctggctgtggtcgcttgcaacactgccagtaccgtttcacttcctgcattacgcgaaaagttcgacttcccggttgttggtgtcgtgccggcgattaaacctgctgcacgtctgacggcaaatggcattgtcggattactggcaacccgcggaacagttaaacgttcttatactcatgagctgatcgcgcgtttcgctaatgaatgccagatagaaatgctgggctcggcagagatggttgagttggctgaagcgaagctacatggcgaagatgtttctctggatgcactaaaacgtatcctacgcccgtggttaagaatgaaagagccgccagataccgttgtattgggttgcacccatttccctctactacaagaagaactgttacaagtgctgccagagggaacccggctggtggattctggcgcagcgattgctcgccgaacggcctggttgttagaacatgaagccccggatgcaaaatctgccgatgcgaatattgccttttgtatggcaatgacgccaggagctgaacaattattgcccgttttacagcgttacggcttcgaaacgctcgaaaaactggcagttttaggctga

SEQ ID NO: 68 - DNA, 234 bp, Zea mays
  Peptide Sequence Number=SeqID_43443
atggagaatgttaaggtgactgaggaacctaaatccaaggtgaagaagaggctatgcagaagtcaagaaagagaagtatcaaagttagaacctagaagtgacccaaaagaggaggagaatttatgcattaaagctgacctcaacctgggaggaaagcttgtcttaagggtgaaggtgttttgtgtgctaaagagctcaaagcccaaccttgtaatgatgatgagatcaacttaa

SEQ ID NO: 69 - DNA, 192 bp, Zea mays
  Peptide Sequence Number=SeqID_43444
atgaaggcacgagatcttcgaggcaatagagcaagggagaaggtcaaggtgactgaggaacataaagccaatgtgaagaagaggctcacagaagtcaagtttgatcagctgaggaaggtcatgtgcattgaggattgcttggaaccatttgagcctgtttgggagcaaggggtatgtttgatagtgaagtaa

SEQ ID NO: 70 - DNA, 4069 bp, Zea mays
  Peptide Sequence Number=SeqID_43445
tgccactgctctaattaaaatagtggaaggatctatgaatgcagacttagtgaagacaaatcttgagcgtatgatacctatgaagtgggattgggtggtaaggcaacacaatgaaaattcatttatatttccttttccctcaaaggtggagctacaaagaatggttgcaattcatcgcatcccatagatcacaatgaaggcatcatgtcgttcgaggaatggaactccaaaatcaaaccaaagaaacgacttgatcaggtttgagtttttgtacatggtgtcccttatgagagtagagactttctttctttatgggctttaggatctattcttagggccacacagaaagtggacatgatttacctcaagaagactagagtgctaaggattctagtgccctgtcttgatgcttgtggcattttagaatcgcaagatctggtggtagatgattgtatgtatgagtcatcgttcctaattgatgaagttgtgaggtgggaggactcaaatcatgagaatttcgataaggttgacaatcttgatgaggatcactcaaatgatgatgtggctaagaaggaggctgaggatgaaggaaacaggtgacacttaagaggagggggtgaattaggacttctaaaactttctctaaactaggccacaaataaatccctagagcaaaatctatacaaacaaacaatctagaatgtgcaaactaggttttgtctaagtgttgctatctctacctcaatgtctaagtttcaatcctaaacaatataagtataaagacagacacaaactcggttgtcacggtctcgcaagactctcgcctcactcgatacaattacaacggctcatgcaagagctgaggggttgtgtggttttctaaactaactcaactaactagggttcacctagagcaagcgctaaagcagtctaactaacctaagcacttcacaaagcacctacgctaatcaccgagtgattctattaagcacttgggtgtatgagcacttgggaatgtctatacaatgccttggtatgttgcttgggctcccataccttgaaatggccggttggggtggttgttgctctgcgacacaccggacagtctggtgcacctgtccggtgcgccaagccgttggatctaacatgcaggtgatcgtcggcgctgcaggcttttacaccggacggtccagatagtccagtggcttctctccaccagtgccaccaggaactagccattgggctacagttccttagtgcaccgtgtttgatatcttttttattgcttcagtccctaaaacttctccccctttggcatcaaccaccaaaaaggaagacatttaaaagcatgtaggaagcaaataagacatgccctcataaaagatttacgatgataccgattgaaacagcaaaaattattactcccaggcgaagaaatactccctctgatagagatcttctacttaggaaaaagcatgtgagaaacagaggtgcaggacatgcccataatatacatcccaaatttgccaagtctccaaaacttaatcttaggaggtatcattttaggtccatttccaaaggggacttttatatcaagttcaccttaggttttaaaaatgatggattcaagtgggttctatacacagtgtatggacctgcacaacaggacaacaaggaagctttttctaaaataattggcttattcttgttctcatgaaacactaccatacattgtagggggtgatttcaatattacgagatatccagaagaaaataacaaggacaaattttcaatactagatgaccgaatttatttaatgcaattattgaagtgcttgatcttaaagagattggaatgtcagtccactaatttacgtgggatgggcctagggatgacccgatttatgaaaaactagatggagctctagttagtacaaattgggaagagaagtttcccctatcaataatggaagcaagggacaggagccaatcagatcatacccttattctcttaagcattggtacaattgataaaaggcagagatctctagccttaatgacaatgagataaatttcaagcattatctcaaagaacatttagttcttttgttgtgggaagaagagattaaatggtatgagagagcaaaggttaagactttgcttgaaggggatagtaacacaaaattattcctatctagtggctaacagtaatcactgtaaacaacacatttttaaactagaagaagaggaaggtgctatagtaggtgatgaacagttaaaatcatatatcacaacgtactataaaggtacacttgaggagactaattttgctttgtgtgaacatcaaattgatgatatcccgcaagtgataattgcagaaaattagattcttgtttctccattcttagaagaggaagttaaatttgttgtcttttagatggagtataataaagctctaggaccagatgggttcctagcagaattttatcaagtgtttgggaaattacaaaggatgacctattaagactcttcaaagatttccatgacgagcatctaccactttttagtcttaactttgggattataacccttttaccgaagactacagaagctaatcaaatcaatagtaccgtctgattttcctacgcaatgttaggtttaaaattttcactaaagttggcactaatagaattatcaaagtggaaagtatagtagtaagcccttcagcaagtagcctttatgccaggtaggaatatcacggagggtgccataattctgcacgagacatacatgaattacatataaaaaacataatggagtcatttttaagattgactttgaagaactatgataaagttaaatggtcctttctccaatagacacttcgtacaaattgtttctcttccaagtggtgtcgatggattgataactatgttaaagaaggtagtgtcagaataaaggtcaatgatgatattggccactactttcagactaataagggtttgcgccaaggagacttaatgcccccgattttgttcaatattgtggctgatatgctcgcaattttaatcaagcgagctaaagccgatggccaaattaacagaactaatccacacttggtggaagatggtttgtcgattttgcaatatgtagatgataccatactttttcatggaccatgatttagaacaagacaaaaaacatgaagctcttgttgattgtttttaacagatgtccggactgaaaataaactttcataagaatgagattttctgctatggggcgacaaaagattttgagtttcactatactgaacttttcagatgtaatctaggattgtatccttttaggtacttggggatacctatgcatcatagaaaaattcagaacaatgattggagggtaatagaagatagatttggaaaaaagctcaactattggaaggcaaaatacttgtcttatagtggatggcttatattacttaattcagtcttaagtagcctctctatgttcatggtatctatttttgaaatactaaagggtgtcataaagaaattagatcaatatagatcctattttttcgcaaggagggaatgataagaaaaaatattgctaggctaaatgggacatactgtgtcgccctaaagaccaaggaggtcttggtattgccgatctagctattaagaataagtgcatgttaagtaaatggttattcaatttgcttaatggggatggaatgtggcaaacgttaatcagaaacaagtacctagcttcaaaaccgttgtcgcaagttgagatcaaacctcatggttcacaattctataaaggtcttctaaaagtgaaagatcaataattaaaatgtggatattttattatgaacaatggatcacaagctagattctcggaagacatctggttagcaatgagtggcaagcattggtgacaaatgtggctcatgttaaaaaataagtcacatgaatttaaacttatagaaaagatagatcaaaatatggagtgattgctaaagtcagtcatcaataaaaactggatgcacttcgtataaattatg

SEQ ID NO: 71 - DNA, 573 bp, Zea mays
  Peptide Sequence Number=SeqID_43446
gctggtaccggtccggaattcccgggatcgcggctacgccaggcgccgaggccttcgtcggcattttcgtcggcaagcactcaccagagatgtcatggaatgtgttgatctcacctagccagctggaccgcaagggcctcctgctccgcaaggctatcattgtgcgtcttctggaggatgtcacaaacaggagggcttcgaaagagcatggctactacattgctgttaatcagctgaaggcaatatctgaagggaaagtgcgtgagctaactggagatgttctgttcccagtttcatttacttgcattacacagaagcctatgaagggagaggtcatggttgggcacgtggacaggatcctcaagcatggcgtgttcctcaaatccggacccgtggagagcatcttcctggctgagaagtcgatgagtaattacaagtacataggtggggagaatgcgatgttcatgaacgaccactcgaagctggagaaggacaccgccgtgcgcttcaaggtcctagggttccgctggatggaggctgaccgccaattccagctccttgctacgatcgctg

SEQ ID NO: 72 - DNA, 466 bp, Zea mays
  Peptide Sequence Number=SeqID_43447
atggcgcttcttgttgacgtggctggcctgtgccctaggttgggcgacgtggaggctcctccgaagccgaggtcgagtctgtcttccatggccgaggccgagtctgagcccctgggtcgggcgaggcggaggtcgtcggcagaggccagggcgcccgagtccgagccctgggtcgggcggagcggagttcgccgtcttccgggtcttagcccgagtccgagccctggggtcgggcggagcggagttcgccgtcttccgggtcttagcccgagtccgagccctgggtcgggcggagcttcctatggtgcctttggcaaggactggcttcctgtcagcatcactctgtcaagtggcgctgcagtcggagtggcgcaggcggcgctgtccttctgtcagaccggtcagtggagcggcgaagtgacgacggtcacttcggctctgccggagggcgcgtgtcaggataaag

SEQ ID NO: 73 - DNA, 766 bp, Zea mays
  Peptide Sequence Number=SeqID_43448
atgagcacaaaaccactcttcctgttacggaaagcgaaaaaatcatccggtgaacctgacgtcgtcctgtgggcaagcaacgattttgaatcgacctgtgccactctggactacctgatcgttaagtcaggtaaaaaactgagcagctattttaaagctgttgccacgaattttcctgtcgttaatgacctgcccgctgaaggtgagatcgattttacctggagtgaacgctatcaactcagcaaagactccatgacatgggaactaaaaccgggagcagcaccagacaacgctcactatcaaggcaataccaacgtcaacggcgaagacatgactgagattgaggagaatatgctactcccaatttctggccaggaactgcccattcgttggcttgctcaacacggcagcgaaaaaccggtaacgcacgtttcacgcgacggactccaggcattacacattgctcgggctgaagaactaccggctgttactgccctggctgtttcccacaaaaccagcctgctcgacccgctggaaattcgcgaactccacaaactggttcgtgacactgacaaagttttccctaatcctggtaattcaaacctgggactgataactgcttttttcgaagcatacctgaacgctgactacaccgatcgaggactgctgacaaaagagtggatgaagggtaatcgtgtttcacacatcactcgcacggcttccggtgctaatgctggcggcggaaacctcaccgatcgcggcgaag

SEQ ID NO: 74 - DNA, 477 bp, Zea mays
  Peptide Sequence Number=SeqID_43449
atgcttagtggtaaagacttaggccgagcgatagagcaggccattaacaaaaaaatcgcatcgggatccgtcaaatcaaaggcggaggtcgcacgccactttaaagtccaaccaccatcaatttatgactggattaagaaaggctctataagtaaagataaacttccagaattatggcgtttcttttctgatgttgttggtccagagcattgggggcttaacgaataccccataccaacccccaccaattcagatacaaaaagtgaacttttagatataaacaacctttatcaagcagcctctgatgaaataagagcgattgtagctttcctgttatctggaaatgctacagaaccagattgggttgaccacgatgttcgcgcctacatagcagcgatggaaatgaaagtgggtaagtatctgaaagctcttgaatctgaacggaaaagccagaacatcacaaaaactggaacttaa

SEQ ID NO: 75 - DNA, 480 bp, Zea mays
  Peptide Sequence Number=SeqID_43450
atggctaggcttttaggtgtatcacctccaagcgtaaatcaatggatcaaaggggtacgtcaattgcctgccgagagatgtccagcaattgaacgtgcaacaagagccgaaaaagggcaggcatgggtagccaatgcaattactgaagaatatctgcgccaggggggcggcgaattgcccctggttccaggcaaggactggaacaatcagcagaatatctatcaccgttggttgaaaggtgaaacgaaaacgcaaagagaaaaaattcagaagctgatcccagcaattctggcaatccttccgcgcgagctgcgtcaccgactctgcatcttcgataccctggaacgccgtgcattactggcggcgcaggaagcgttaagtacggcaattgatgcgcatgatgatgcagtccaagccgtttaccggaaagcgcatttcagcggcggcggttcttccgacgattctgtcattgttcattaa

SEQ ID NO: 76 - DNA, 471 bp, Zea mays
  Peptide Sequence Number=SeqID_43451
atgcagtcggcatgcaaccgtgccaagtgggcgcacccctccgactccaacgcgcccagcatggaggcccaggccctcacgtcatgcaaccggcgcgctggtcgctacgtgcgagcaactgcaccgcccctcgcgccactaccgcgcctcctcgactgcggaaccagtaccgcgactcgaggcaaccctacgtatgacccaacagtgccagccaggcgcatcggtcatgggccagtcagccgcgggagaaggcgcgacggtcgatgcggccaaaaatgggccggcagtaatggcggcggcaggcgggcagaagcagcggtcacgtcgtcagccaagctcacgcaccctcggaccgggaaagggggataccccgaaagggatccttctccgcgaaggaaacgggccccgagccctcctactgatcagatgttcgaaggctgtaacacccactttgtaaattgctacaaataa

SEQ ID NO: 77 - DNA, 390 bp, Zea mays
  Peptide Sequence Number=SeqID_43452
gtgatgcatatattccgcctcatacaggtctgccagcaaacagtaccgatattgcaccgccagatattccggctggcttcgtggctgttttcaacagtgatgagtcatcgtggcatctcgttgaagatcatcgggaagtggaacggcacagcctgggtgaaggatacggaagcagaaaaactgttccggatccgggaggcggaagaaacaaaaaacaacctgatgcaggtagccagtgagcatattgcgccgcttcaggatgctgcagatctggaaattgcaacggaggaagaaatctcgttgctggaagcatggaaaaagtatcgggtattgctgaaccgtgttgatacgtcaactgcacaggatattgaatggccagcactgccgtag

SEQ ID NO: 78 - DNA, 448 bp, Zea mays
  Peptide Sequence Number=SeqID_43453
atggggctgttcctgattaactttaacaatcagtacgactccaaccagaccaacgacaccgtcactgcacgtggcaaaacgcgccataccgggctggaaacgcaggcacgttacgatctgggtacgctaacgccaacgcttgataacgtttccatctacgccagctatgcgtatgtgaacgcggaaatccgcgagaaaggcgacacctacggcaatctggtaccattctccccgaaacataaaggcacgctgggcgtggactacaagccaggaaactggacgttcaatctgaacagcgatttccagtccagccagtttgcggataacgccaatacggtgaaagagagcgccgacggcagtaccggccgcattcccggcttcatgctctggggcgcacgcgtggcgtatgactttggcccgcagatggcagatctgaacctggcattcg

SEQ ID NO: 79 - DNA, 559 bp, Zea mays
  Peptide Sequence Number=SeqID_43454
ctgatgacaagtcctacttacgaccagacctacttgagtggttcaagcagcgtgtcgaagatgaccaatctcggtcaggccgcaaaatctacgtcaaacgggacttaccccacatccttacgccatttagagcgcctatggcttcggtctgcgctaagcgtaaaggccaggttctacatcagcagtactcacttaagaaataccgctacaagcacatcgcggataacgtctgtcaatggttggatgaggtttttctccgaccaaaagaaatgtctgatattcataaactgacattcattgaaaagcgagaacgactaaagaattccgtcttcaaatcgctccatgacgtcagcgaattttgggtcgagtgctgttgcacgcaacgatccggcagcaccacgaaagccagcctattccttgcatgctatacgtggaaaaagcaggggccgaaaaaattcttgaaaacgtgcatatcgttcgccgcgatccagaaggtgatcagctttggattggcttcagcgagttggtgactgatattaacattgccgtcagattgccg

SEQ ID NO: 80 - DNA, 323 bp, Zea mays
  Peptide Sequence Number=SeqID_43455
ccactctgccaccaccgcgcccgatccgctggtaaaattttccgatgttaccgtcgatttagccgcccgcgtgattcaccggggtgaggaagaggtgcatctcacaccaattgagttccgcctgctggcggtgctgctcaacaatgccggaaaagtactcacccagcgccagctccttaaccaggtgtgggggccaaacgcggtcgaacacagtcactatttgcgtaatttatatggggcatctgcgacaaaaactggaacaggatccggcccggcctcgccattttattactgaaaccggtattgggtatcggtttatgctt

SEQ ID NO: 81 - DNA, 513 bp, Zea mays
  Peptide Sequence Number=SeqID_43456
acagcggtaagaaagatgcaaatggtcgtgcggttctggtgaaacaggaagaggtgattaacatcgccaacatccagtctcgtctgggtaacagcttccgtatcaccggcatcaacaacccgaacgaagcccgtcagctgtcactgctgctgcgtgccggtgcgttgatcgcgccgattcagattgttgaagaacgtaccattggcccaaccctgggtatgcagaacattgaacaggggctggaggcttgccttgccggtctgctggtttctattctgttcatgatcatcttctataagaagtttggtctgattgcgaccagtgctctgattgccaacttgatcttaatcgtcggcattatgtcgctgttgccaggcgcaacgctgagtatgccaggtatcgcgggtatcgtcttaacccttgcggtggcggtcgatgcgaacgtactgatcaacgaacgtattaaagaagagttgagcaacggacgtactgttcaacaggcaattgatgaag

SEQ ID NO: 82 - DNA, 382 bp, Zea mays
  Peptide Sequence Number=SeqID_43457
atgctggcgtttgagggtaataccgcgccatacatgcagtatgcatacacgcgtgtattgtccgtgttccgtaaagcagaaattgacgaagagcaactggctgcagctccggttatcatccgtgaagatcgtgaagcgcaactggcagctcgcctgctgcagtttgaagaaaccctcaccgtggttgcccgtgaaggcacgccgcatgtaatgtgtgcttacctgtacgatctggccggtctgttctctggcttctacgagcactgcccgatcctcagcgcagaaaacgaagaagtgcgtaacagccgtctaaaactggcacaactgacggcgaagacgctgaagctgggtctggatacgctgggtattgagactgtagagc

SEQ ID NO: 83 - DNA, 282 bp, Zea mays
  Peptide Sequence Number=SeqID_43458
atggagagagggtggcgcgcgggagccgaaaaatttacaagtcccctggcgccagttcacttcaagacgccgtcaggctgctggatttcgaccccgagggtttcgccggcgatcgtccccacgcccgtccccacgccgccatctccgccccgcgcccccgcaccgccgtcaggtttctttctctttctatttcccctctgccgtaccgccgccgtcaaccgcgccggcaccgccgccgtcaaccacgccggcaccgccgccgccgcgtttagtaaaccctag

SEQ ID NO: 84 - DNA, 670 bp, Zea mays
  Peptide Sequence Number=SeqID_43459
gaaactgaaaagtcatttgagtgggctaatcttcgccgttacactcaaaggcggcgcggtgggaacgatatttcacagtatcggtcaaatgactatctccagaaatacaggatagaggttatgttcaggcagttgaaaaaaaacctggttgcaaccctcattgctgctatgaccattggtcaggtagccccggcgtttgccgacagcgcagacaccttgccggatatgggaacctccgcaggaagcacgctttccattggtcaggaaatgcagatgggcgactattatgtccgccagctacgcggcagcgcgccgttaattaatgacccgctgttaacgcaatatattaattcgctggggatgcgtctggtttcgcatgccaattcggttaagacaccgtttcatttttttctgatcaacaacgacgaaattaacgcctttgctttctttggcggcaacgtggtgctgcactctgccctgttccgttattccgataacgaaagtcaactggcttcagttatggcgcacgaaatctcccacgtcacccaacgtcacctggcgcgagcgatggaagatcagcagcgcagcgcgccgctgacctgggtcggcgcgttaggttctattttactggcgatggccagtccgcaggcggggatggcggcgctgaccg

SEQ ID NO: 85 - DNA, 264 bp, Zea mays
  Peptide Sequence Number=SeqID_43460
atggacaaaaacctgtatgacctgccgccagaagaagcgaaagagatcccacaggttgcaggctctctggaagaagcactgaacgaactggatctggaccgcgagttcctgaaagccggtggcgtgttcactgacgaagcaattgatgcgtacatcgctctgcgtcgcgaagaagatgaccgcgcctgggatcggtggcaagcacatcacgccggatgcgacgcaaatgcgtcttatccggcctacacggtgatgatgtggtag

SEQ ID NO: 86 - DNA, 720 bp, Zea mays
  Peptide Sequence Number=SeqID_43461
atggtggcacacaggaatattaataattatggcatagccacaggcaccaatatcaacagcggaacgcaaaatatcaaaagcggcgggaaagctgacacaacaattatatcctccgggagccggcaggttgttgagaaagatggtacggcaattggcagcaatattagcgccggaggctcgctgattgtctataccggcggtattgcacatggggttaaccaggagacgggcagtgctttagttgccaacacgggtgcagggactgatatcgaaggatacaacaagctctctcacttcactattaccggaggggaggctaattatgttgtgctggaaaataccggcgaactgacggtagtggctaaaacctcggcgaaaaatactaccattgatactggcggtaagctgattgtccagaaggaggctaaaacagatagcaccagacttaataatggcggcgttctggaggttcaggacggtggtgaggctaagcatgttgagcaacaatccggcggcgcattaattgcttccacgacctccggaacacttatcgaaggaaccaacagttatggtgatgctttctacatcaggaattcagaagctaaaaatgtagtgctggaaaacgctggctcattaacagtcgtcactggttcccgcgcagttgacacgattattaatgccaacggcaaaatggatgtttatggaaaagatgttggcact

SEQ ID NO: 87 - DNA, 1665 bp, Zea mays
  Peptide Sequence Number=SeqID_43462
atgatcgaagcaatcgcaattgccattgctgtgctcggtgcggttctgttgctcatcctctttgcccgcatccgggctgtcgatgccgagctgaagctcaagaagcatcgcgccaaggatgccggcctggccgatctgctcaattacgccgccgtggtcgatgacggcgtgatcgtgggcaagaacggctcctttatggccgcctggctgtacaagggtgatgacaacgccagcagcaccgaggaacagcgggaaatggtgtcgttccgcatcaaccaggccctggcgggcctggggaacggctggatggtgcatgtcgatgctgtgcgtcggcctgcgccgaactactcggagcggggcgtgtcatcgttccccgactccgtttccttcgccattgacgaggaacgccggcgcttgttcgagggcctgggcgcgatgttcgagggctactttgtcctgaccgtcacgtggttcccgccagtgctggcccagcgcaagtttgtcgaactcatgttcgatgacgatgcggtggctcccgaccatacggcgcgcactacgggcctgattgcgcagttcaagcgcgagatcaccagcctggaatcgcgcctgtcctcggcggtcaagatgacgcgcctgcgcggccaaaaagtcgtgtcggaagagggcagggaagtcacgcacgatgacttcctgagctggttgcagttctgcgtgacgggcctccatcacccggtcatgctgcccagcaatccgatgtacctcgatgcggtaatcggcgggcaagagctgtggggcggcgtcgtgcccaagatcgggcgcaagttcatccaggtggtcgccatcgaaggcttccccttggagtcaacgcctggggtgctctcggccctggccgagctgcccagcgaataccgctggtcgagccgcttcatcttcatggatcagcacgagtccttgaagcacctggacaagttccgcaagaagtggaagcagaagattcgcggcttcttcgatcaggtgttcaacacgaataccggctcgatcaaccaggacgcggccgcgatggtcggcgacgccgaggcggccatcgccgaggtcaacagcggcttggtggcggccggctactacaccagcgtagtcgtgctgatggacgaggatcgggagcgcctggcggcctccgcgctcctggtcgagaaggccgtcaaccgcctggccttcgcggcccgtatcgagacgatcaacacgctcgatgcgtacctgggcagcttgcccggccacggcgtcgagaacgtgcgccggccgctcatcaacacgatgaacctggccgacctgctgccgacaagctcgatctggacgggcagcgccacggctccgtgcccgatgtacccgccgctgtcgccggcgctcatgcactgcgtgacggtgggcgctacgccgttccgcctgaacctgcacgtgcgcgacctgggccacaccttcatgttcggcccgaccggcgcaggcaaatcgacgcacctgggcatcatcgccgcgcagctccgtcgctacgccggcatgtcgatctacgccttcgacaagggcatgtcgatgtacccactcgcggccggcatcccgcgcggccacgaagggcaagagcggcctgcatttcacggtggccgccgacgatga

SEQ ID NO: 88 - DNA, 938 bp, Zea mays
  Peptide Sequence Number=SeqID_43463
atgcccatgtacatcctcggcggcgtcctgctgtcgttcgtgctggtcatggccctggtcgcggcggatcgcgcggccaagcagaacgcgccggcggacggccccaaggagaaggccggcaacacgtcgatgttcgccaaggagatcgcaggcgacaagaccggcggcttgatcgagccggcaagcccgctcaaggtgcccgacatgccgaccggcccggcgtcggctccgctggagatcgcgcggccgtccaacccggacgcgccgccggccccgccggccaaccccggcaacccgggccagccggtgaacgacgacgaggcccagcgcatccgcatggcgaagatgcagatgttcggcgaagccgtgaaggccaagaccaccgtgcgcgtggatgccccgcgtagcaacggctccgcgccgggtggcccgagcacctacaccggcacgccgcagacgcgcgatgaaatgctgaaccgcatcgcagcggtgcagcagcaaatcgacgcgcagcgcagcaacgatccgaccgccgcctatcaagcacgcctggcgcagattcgcggcatgggcgtcggtggtggcggcgcggctccggccgccggcggcatgggcgcgggcggtgcgccgcagctcctgcaaacctcgaccagcggcggcgggcgcaacagcatggcgcagttcggccaaggtgggcagggcgaccgctggaagctggattcgcagccggaagcgccgcgcacaccgttcgagctgcgcgcgggcttcgtcgtgccggccacgctcatttcgggcatcaactccgatctgccgggccaaatcatggcccaggtcgcgcaggacgtgtacgacacaccgaccggcaagcacctgttgatcccgcagggatcgcgcctagtcgtctctattcgagcgacgtggcctacggccaagcgcgc

SEQ ID NO: 89 - DNA, 720 bp, Zea mays
  Peptide Sequence Number=SeqID_43464
atggcgcgaggcgacttctggtgctgcaatgccaagctcgttgccaaggtggcgccacaaggctactggaattacccgaaaggcaccgagcaaacgcccactcatgcgcaggaaaccaatatggagcgccagaccaagcttgtgggaatcacctcggcgtgcattgattgcgtcgcgctcggcaccatcgaaggagaccccgagagagtcacgttcgaaacccagaagcaagcccaagccgtccgtcaggagctggagcaagcgacggccctggccaatacccaggcgaaggtggtcgacgcagagcgtcaggtgtccatctcggagttcaacgctcgggcggcggtgaagcaggccgagggtgaagcgcaagctaagacgatcaacgcggaagcggacgccaaggtggtcaggctggtgggtgaagcggaggccgcgaaggtcgaggccatcggtaccgcggaggccagcgtcatcaagcagaagatcgactcgatggagagcggcaactacgccgtcgtccaggtcgcggaggcgcttgccggctccgggatgaagctggtgccggatgtcgttgcaaccggcggcagcggtagtggtggcggtactctcgtggaagtgctgctggccaatctgattcgcgatggcatgcacaagggaagtggtctgcccttgaatggcgagtcagcggtcaagcccgaagccctcccggccccctaa

SEQ ID NO: 90 - DNA, 700 bp, Zea mays
  misc_feature (5)..(6): n is a, c, g, or t
  Peptide Sequence Number=SeqID_43465
ctcgnnatgcccattttattccactcttgcatccttacacagccttcaaggttgcccagtcctttatgtcatcggtttacaaattacatggaatgccggaagctataatatcagatcgtgatcgtattttcaccagttctctgtggcaggaactgttcaagctggcaggaacacatttgcaaatgggatcggcctatcatcctcagtccgacggctagaccgagcgcgtcaaccagtgtctggagacctatttacgctgttttgtacatttttgtcccaacaaatggagtctgtggctgtcactggcagagttctggtacaatactagctttcactcggcacttggtcgttctccatttgaagtgctctatggtcggcctcccagacacttcggcctggctcctgaagattcagttactgatgtggacctggcaacctggttgtccaaccgagaactaatgactagagtggttcgacatcaccttcatcgcgcccagtcacgtatgaaataccaggcggacaagtccaggtcggaccgggagtttgcagttggtgatcgcgtgtacctcaagctccagccgtatattcaaacgtcagtagctcatcgggccaaccacaagttatcattcaaatattttggtcccttcaatgtgctgaagcgtgtgggattagtaagcatacaaattggagttacccagtt

SEQ ID NO: 91 - DNA, 566 bp, Zea mays
  Peptide Sequence Number=SeqID_43466
atggcaattggacatgttagatattcaactgccggttcctccatgttaaaaaatgtgcagccttttgttgctggataccggtttgggtctgttggggttgcacacaatgggaacttggtgaactacagagctctgagggctatgcttgaagataatggttcaattttcaatactagttctgatactgaggtgctgcttcatttgatcgctatatcaaaggcgaggcctttccttttgaggattgttgatgcttgtgagaagcttgaaggggcatattcaatggtgtttgtgactggggacaagcttgttgcggtgcgggacccatatggattcaggcctttggtaatgggaaggaggagtaatggtgctgttgtgtttgcctctgagacttgtgctcttgatttgattgaggcgacgtatgagagagaggtctaccctggtgaagtactggtggtggataaaaaagatggggttcaatcactgtgcttgatgccccaccctgaaccaaagcaatgcattttcgagcatatctattttgcacttcctaattcccttgtttttggacg

SEQ ID NO: 92 - DNA, 296 bp, Zea mays
  Peptide Sequence Number=SeqID_43467
gctggtaccggtccggaattcccgggatcactgcctcacgcaaccacctcagcccggtccacctctaccaccggccacccactgcctccacccccgccctagatcaccaccgcactctcaggcgcaagaacgagctcaccaggcaaagtcacggcggcgacctccgccttccagtccggtcgctggccgaccgccagcgcggctccgggccctgctttccgcacgcccaagcctgcgcgctccggacgcacctctcctgctcttctgggcttgggaaagagaagaaaccagcataa

SEQ ID NO: 93 - DNA, 207 bp, Zea mays
  Peptide Sequence Number=SeqID_43468
atggggaactgcgtggacaaagcggtgccgggggacaacacctcctatcaatcgaaagcggggagcaaatcaatttcatcgtccaacccttcgacggtcaagactggttcgactcggtcgacatggactaactgcgtcgaggaacttcagatcagacagtcttcttggggaaggaggatttggctatgtgttcaaaggctggattga

SEQ ID NO: 94 - DNA, 267 bp, Zea mays
  Peptide Sequence Number=SeqID_43469
gtttcggatctggttgcggcgtgggttttggctcaggttttggatctggttgcggcgtgggttttggctcaggttgaggcgctggcttgggtttcggctctgggcctggttgtggctgtggcgctggcttgggttttggctctgggtctggttgtggtgaaggttttgggtctggctgtgcgtcggtttgagttgcggttcgatgtcgattaccctactacgagcaaggccaggaacacttgcagccagtgtgatggccagggctag

SEQ ID NO: 95 - DNA, 79 bp, Zea mays
  Peptide Sequence Number=SeqID_43470
atggcgagagggcaagcacagaaagaggcggcggctatggcttgtgaggagggaggtggatcccgggaattccggaccg

SEQ ID NO: 96 - DNA, 414 bp, Zea mays
  Peptide Sequence Number=SeqID_43471
atgtcgactttccctcctccaccccccagcgccgctaggagccccgtcgccagggtgcgcctcgaccacctggtcccgttcgacggcgccttcaccccggcctacgcgcgcgcagtcgaagccgtcgctgcttccctcacgcgccacggcgccgccgccgtcgacctccctgcagcggacgccgctgtcgtccggtgcgccctcgagtccgcgcgcgccttcttctgcgaccgctccggcctctacgtctaccgcgccgggagggctctggatgatggagagttgtcacctgcttgcatgtctgatgctttcagatgtttgggtttcagcttcagaattgatggtgtcattttctcatgggcacccccaaagcagccaggcacctatggtgggcctcaggccatcaatggctga

SEQ ID NO: 97 - DNA, 83 bp, Zea mays
  Peptide Sequence Number=SeqID_43472
atgccgaaactgaatgtgctgaactggaaggtgatcatcccgatcatcagcccaataacaaagaaggcgcagaatgccagcag

SEQ ID NO: 98 - DNA, 390 bp, Zea mays
  Peptide Sequence Number=SeqID_43473
atggcggtcatcgtgacggtaatggctggcaacacaacggcgacaacatcaatatcgacgtcaacaatttcaaccgtatcaccggatatggcaaagcggtttcatcaaaccgatgtcaacggcggaatgagcgccacgcaattacctgccccaacgcgcgacagccagcgtcaggcggcagcaaatcagtttcagcaacgaacacacgccgcaccagtcattacacgagatacccaacgtcaggcagcggcacagcggtttaatgaagctgaacactatgggagctatgacgacttccacgacttcagccgtcgccaaccactgacccagcaacaaaaggacgccgctcgtcagcgttatcagtccgcctcgcctgagcagcgccaggca

SEQ ID NO: 99 - DNA, 549 bp, Zea mays
  Peptide Sequence Number=SeqID_43474
tcggtaacggacgcattctggcgaaggtggaatctcgtaaccccagcttcagcgttaagtgccgtatcggtgccaacatgatttgggatgccgaaaagcgcggcgtgctgaaaccaggcgttgaactggttgaaaccgaccagcggtaataccgggattgcactggcctatgtagctgccgctcgcggttacaaactcaccctgaccatgccagaaaccatgagtattgaacgccgcaagctgctgaaagcgttaggtgcaaacctggtgctgacggaaggtgctaaaggcatgaaaggcgcaatccaaaaagcagaagaaattgtcgccagcaatccagagaaatacctgctgctgcaacaattcagcaatccggcaaaccctgaaattcacgaaaagaccaccggtccggagatatgggaagataccgacggtcaggttgatgtatttattgctggcgttgggactggcggtacgctgactggcgtcagccgctacattaaaggcaccaaaggcaagaccgatcttatctctgtcgccgttgagcca

SEQ ID NO: 100 - DNA, 442 bp, Zea mays
  Peptide Sequence Number=SeqID_43475
atgatctacaaaagcattgcggagcggttaagaattcgacttaactccgcagatttcacgctaaacagccttcttcccggtgaaaaaaagctggcggaagagtttgcggtatcgcggatgaccatccgtaaagccattgacctgctggtagcgtgggggcctggtggtccgccgccacggtagtggcacttacctggtgcgcaaagatgtactgcatcaaaccgccagtctgaccgggctggtggaggtgttaaaacggcagggaaaaacggtcaccagccaggtgctgatttttgaaatcatgcctgcgcctccggccattgccagccagttacggattcaaatcaacgagcagatctacttctcccgtcgcgttcgttttgtggaagggaaaccgctgatgctggaagacagctatatgccggtaaaactgttccgtaat

SEQ ID NO: 101 - DNA, 390 bp, Zea mays
  Peptide Sequence Number=SeqID_43476
gctggtaccggtccggaattcccgggatcgctggtgctcctcctgctgctggcggtggcggcgtccgcgggggccggcgccggcgcgagccacctcgatctggggttgggcttcctctcctccggggaccgccggcgggagtgccgcggcacgggggccgagtgcctggacgagtcagagggcctggacctgggggcggggcccgcgtccgtggagtcccaccgccgcgcgctctacgggggggggggggggtacatcatctacggcgcgctgcggcgggacaacgtgccgtgctcccgccgcggcgccagctactacaagtgccgccccgggggccaggccaacccgtaccaccgcgggtgctcccgcatcacccggtgccgcgggtga

SEQ ID NO: 102 - DNA, 375 bp, Zea mays
  Peptide Sequence Number=SeqID_43477
atgaagtgggactggattttctttgatgccgatgaaacgctgtttacctttgactcattcaccggcctgcagcggatgtttcttgattacagcgtcacctttaccgctgaagattttcaggactatcaggccgttaacaagccactgtgggtggattatcaaaacggcgcgatcacttcattacagcttcagcacgggcggtttgagagctgggccgaacggctgaacgtcgagccaggtaaactcaacgaagcctttattaatgcgatggcggaaatctgcacgccgctgccgggcgcggtttctctgcttaacgccattcgtggcaacgccaaaatcggcatcatcaccaacggctttagtgccttgcaacag

SEQ ID NO: 103 - DNA, 528 bp, Zea mays
  Peptide Sequence Number=SeqID_43478
gcgtggtgaaacagatgggaccggcgatccttggcgtctctgtgagccagatctccttaatcatcaacaccatttttgcctcgtttcttgcttccggttcggtgtcttggatgtattacgccgaccgcttaatggagtttccgtccggtgtgctgggcgtggcgcttggcaccattttgctgccgtcgctgtcgaaaagttttgccagtggcaatcatgatgaatacaaccgtttgatggactgggggttgcgtctttgtttcctgttggcgctgccgagtgcggttgcgttgggcattctttccggtccgttgaccgtttcgctgttccagtacggtaaatttaccgcgtttgatgcgctgatgacccagcgggcgttaattgcctactcggtgggtttgattggcctgattgtagtgaaagtgttggctcctggcttttattcccgccaggacattaaaacgccagtgaaaattgccatcgttacgctgattttaacgcaattgatgaacctggcgtttattggtc

SEQ ID NO: 104 - DNA, 541 bp, Zea mays
  Peptide Sequence Number=SeqID_43479
cgggcaaaggggccgttcattaaagtcaactgcgcggcgctgccggaatcgttgctcgaaagtgaactgtttggtcatgaaaaaggtgcatttactggtgcacaaaccttgcgtcagggattatttgaacgagccaacgaaggtactctgctcctcgacgaaattggcgaaatgccgctggtactacaagccaaattactacgcattctacaggaacgggaatttgaacggattggcggccatcagaccataaaagttgatatccgcatcattgctgccaccaaccgcgacttgcaggcaatggtaaaagaaggcaccttccgtgaagatctcttttatcgccttaacgttattcatttaatactgccgcctctgcgcgatcgccgggaagatatttccctgttagctaatcactttttgcaaaaattcagtagtgagaatcagcgcgatattatcgacatcgatccgatggcaatgtcactgcttaccgcctggtcatggccgggaaatattcgagagctttccaacgttattgaacgcg

SEQ ID NO: 105 - DNA, 399 bp, Zea mays
  Peptide Sequence Number=SeqID_43480
atggacgagcgcgtgcagtgggcattgaccaaagccgcattgtggaacgaaaccaaagataaattgcaccagagcggttactctctctctggtggtcagcaacagcgtctgtgtattgcgcgtggtatcgccattcgcccggaagtgctgctgctcgacgaaccgtgttcggcgctcgaccctatctctaccgggcgtattgaagagctgatcaccgaactgaagcaggattacaccgtggtgatcgtcacccacaacatgcagcaggctgcgcgttgttccgaccacacggcgtttatgtacctgggcgaattgattgagttcagcaacacggacgatctgttcaccaagccagcgaagaaacaaacagaagactacatcaccggtcgttacggttga

SEQ ID NO: 106 - DNA, 354 bp, Zea mays
  Peptide Sequence Number=SeqID_43481
atgaaggcaaaagcgatattactcgcctctgtcctgctcgtgggttgccagagtaccggcaacgttcaacagcacgcacagagcctttctgcagctggtcaaggggaagcagcaaagtttacaagtcaggcacgatggatggacgatgggacgtctatcgcgccagatggtgacttgtgggctttcattggcgacgagctaaagatgggaattccggaaaatgaccggattcgcgaacagaaacagaaatatttacgcaataagagctatctccacgatgtaactttacgggcagagccgtatatgtactggatagcagggcaagttaaaaaacgtaacatgcctatggaactg

SEQ ID NO: 107 - DNA, 711 bp, Zea mays
  Peptide Sequence Number=SeqID_43482
atggtgaacaaaatattttcggagaatgcatttgatgttgttatgcactttgttactgttgcttatgttggtgtcatggaagctcggtgcatgactaaagcaaggaggcttggtgttcctaccccagtactttatgatgtggatccagttctgcatactttgacctttgagcatgtggatggcttgtctgtcaatgatatacttcttaggtttggttcaaatggggtcaatgaggaacgcctgaatgatattgccacacagataggaaatgccatggcaaactacatgatggaggccttgttcatgcaaacttatatgggtaacaacactgatcttgatgatgaaccagatggagaaaatccttgcggcgtacagaaaggcttcgaagcaatggtgctctacccggaacaagttggctcaagccctgcctctacatggacgccggcctcacttccgcggtcaccgcgctccagacctgcaccgatgtcgcgcacccgcgcacgtgctccagcagttttgcctcgcctggtgcggcatgctcgtccaggatgcccgcgccgttgctccgtcaagggcctcggcttcgacctcttcatcattaggggtggaaacagtgctttcaatgcatgctggcgatgtgatcgatattatccatgcttgataaatgatgacaaggttgatagccatgatatatggtcaatattgtattga

SEQ ID NO: 108 - DNA, 270 bp, Zea mays
  Peptide Sequence Number=SeqID_43483
atggagcaccgtcccgggttggagaggttggtggagactgcctatctggagcttgacgggaagctgttcgtcaacacgcagcaggcccctacctggcgcgccaactgtcggcgttccgagaccggggggtcccttgggccgacgagtgagtgtcgccgcgtgccccagcccagatgggtcgagcacgagggcgagcgcgaaggggggaaggagcgtaaggagaggatccaggtgtacaatggggggtgtagcagagtgctacgtgtctag

SEQ ID NO: 109 - DNA, 942 bp, Zea mays
  Peptide Sequence Number=SeqID_43484
atggtcttggggttcatcatctccaagcggggcatcgaagccaacccggagaagaccccgaccatcgcacagcaccccgagcccttgctgggggcacccgggggctacacgcacccccgggaaaggccgcttgtcaacgccgaagttctggagcccggaacgtacaagctggccaacagtcaaggcgagccaaggctgaccgagccgagggactcctacgcctccgggatacggatacctcactcatcaccttctgcgataagtaactcgcgttcggataaagtgattccgcggaccgaacaagtcttcacgttcggaagctcttctgccgaagagatccttcgagccttcccgactgagtcggtgacagggcctcatggacgggtgaaagtgcgcgtaagcggcaaggccgaccgagccgagggactcccacgcctccgggatacggatacctcactcatcaccttccgcgagaagcaactctcgctcgcacaaacatccataaggcacacgctacaagacactctgatcctgcaggctcgggtcttgacgctggaagggggcagtagcaccctcggcatcgacgacaccttcagcgaggtccgacctagcctcggacggcgacgcggcggctcggccggttacccctgggacctcggccaaccatcttccaagggcgccagcccgacccgaggcctcggctggtcaactccggcgtcggtcccgctaacggacaacccggctaggctccggccaaccaggtctcattttcgagccaactccgcctctgttcatgctgatatcgctgcccctggccccggcttgtcgaagagcggccaaggggtccctttaactaagctagaggagcctcagacaacaaggccgaccgagccgagggactattacgcctccgggatacagatacctcactcgtcgccttga

SEQ ID NO: 110 - DNA, 303 bp, Zea mays
  Peptide Sequence Number=SeqID_43485
atggcggtggcggtgcgcccccggaccccggtgggtgcgtgcgcgtgcgcgtctgcgtctgcgtctgcgtccgtccccgtccctgtccccgcccctctgcactgcggcgtgctctctcgcgtcccctcgccatcagacgcgcgcgcatccaacgtcaccgaaacgtcgagcacagtgtgctcacgccagtatgtcacggagggacggggtgcagtgcagccaaaggaaccagggcgcgaaagagatcgagggggagaggagttgttttgttttccttcctccagctccacgatatctaaatga

SEQ ID NO: 111 - DNA, 906 bp, Zea mays
  Peptide Sequence Number=SeqID_43486
atccgcttctactgcctgggcagccgcagcggcggcgcgggcaaacaaacgagggcggccgtcggcgggcacgcggcggcgctctactcgctggcggtcatccagttcaacggcagcggcggggccaagtcggaccgcgacctgcgcgcgggggctgccctgtgcgcgcgcgcggcctcgctgggccacgtcgacgcgctccgcgagctcgggcactgcctccaggacggctacggcgtgcggcgggaccccgccgagggccggcgcctgctggtcgcggcgaacgcccgcgagctcacgctcgcgctctccgcggccgcctcgcgccacgccgtcgccgcgctgcccttcgccgcggccgccggcgtcgtcggcggcggcggggggtgccccctcctgtccgacttcgggtggagcctccccgaggcggagccccacgcggcgaaccagttcatggtggactggtgggcctcccgctgcgccgcccaggcgggcgggaagaaggacggcgacggcagcggcgtggacggcgacggagacggcgcggagctccgtctttgctcccacgtgcggtgcgggcggcgcgagacgcggcggcacgagttccggcggtgctccgtgtgcggcgcggccaactactgctcccgcgcgtgccaggcgctggactggaagcgcgcgcacaaggcgcagtgcgtgcccatggaccggtggctcctcgccggcgttgccgttggcggcggcgtcgaggcgcagcagcaccagcagtcgctctcgctgctcgtcctacagagcttgctgctggcttctccggggccggaggagccttgcctggaactggagctgtacgccgcggcggagcggagcaaatggcaccagcaagcagccaggcagccagccaggcagctg

SEQ ID NO: 112 - DNA, 282 bp, Zea mays
  Peptide Sequence Number=SeqID_43487
atgcggttcggcctgacacccggagtcaccccaattatctcggccaaggggtcaagtaccccctcggcccgcctccgctcctcggaccaggaccccggcatcccggccccgaacgttggtggcgccagcccacctagaagctggtttgatgacctctggcccagcctcggatccggactgaggccaagccgggccgccatgtcatcgtcttcgtcatcatcatcgtcaggcgtgtccggcgacggctccaacaggagtccatcccttgctgagagcacctag

SEQ ID NO: 113 - DNA, 402 bp, Zea mays
  Peptide Sequence Number=SeqID_43488
gtgccaaaggttcacactaagccaataaaaagaccaagaaaagggttcaacaaaagagagcaagggataaccgaaggctgccctggtctggcgcaccggactgtccggtgtgccaccggacagtgtccggtgcaccacaggacattgtccggtgcaccagggaactcgacgcccaactcttcaccttcgggaattttcagagggctccgctataattcacctgactgtccggtgcaccaccggacagtgcccagtgctccaagggagagcgactctgaactcgccagcttcgggaattcgctccgctataattcaccggactgtccggtgagccagcggagcaacggttacttcgccccaacggtcgtctgcaacgcattaaatgcgcgcctgcgcgcgtag

SEQ ID NO: 114 - DNA, 553 bp, Zea mays
  Peptide Sequence Number=SeqID_43489
atgccagggtgtattatgttcaaaatagccccgcttgagaatgaggacgaccttaagattatgtttggacccattgtgtgcaccaatgagacaacccttgttcctggagttgaggatgctaattcatcgtctgatggtcacgaagaagaaattttaggtggcggtgacaacagcacacctgaccccagctcaattgtgaaaggtaagcgtaaggtgttgcatgattctcctaaacctaagaagaaaagggatgtaaaggaagaatacatgaaacgccttgtcaaagcttatgagtctaggtccttgtgctctaacatgtccataacctcatttgagaacgaccccgttcgtaaagaggttgctgctcaattgcaacaagtcattgaagatggttcaccggaaggaagcgacttacatttctttgcgactcatttgttgatggaaaaacgttacagagatatgtctgagcctgatacagactcatatgatgatgagagggatggagaattgctagttgcactttttgctgtggacatatgggggagctcgccaa

SEQ ID NO: 115 - DNA, 267 bp, Zea mays
  Peptide Sequence Number=SeqID_43490
atggacgagagttgcactcaactcctctcaagtgatccaatgatcaacttgaataccacggtgttcttctttgtttactctttcccgtttgcgaggaatctccacaacttggagtctctcgcccttacaataaggatcaaggtgaaagcactagatgtccggtgcaccaagggacttcaagctgaactcaacaccttcggaaattctcagaggcgctccgctataattcaccggactgtccggtgctccaaggaagagcgactctaa

SEQ ID NO: 116 - DNA, 840 bp, Zea mays
  Peptide Sequence Number=SeqID_43491
atgctccaaggtcctccccctacgacatgggggctgggtcccacacgtcatgcaagctggcccaggacagaaggagccaaaccgccgcgcgcggagcgcgtaactgcccagcggttagaagcacttctccactttcgcccagaccagcgggtgaaagggcggaccgccatgcaggcggcatgcaaccgcaccaagggggcacaccctttcgacttcgatgcgtccagcatggaggcccaggcccacacgtcatgtaactggcgcgccggttactacgtgcgagaaactgcaccgccacttgcgccagtaccgcgccttcttgactgcggaaccggtgccgcgactcgaggcaacactgcacatggcccaacagtgccaaccgagcacatcggtcacgggtcagtcagccgcgggagaaggcgcgacggtcgatatggccaaaagtgggccggcagcaatggcgggggcaggcggacagaagcagcggtcaagtcgtctgcaggctcacggaccgagaaaggggatactccgaaagggatccttctccgtgaaggaagcaggccccgagccctcctactgatgagaggttcgaaggctggcccctcggaagggttcgacaaccgcctcagagcactcgggctccgcgcccactactggctggcccctgaagggatcgacagccgcctcagagcacgcagagcgagggatgactctgggtacgtccgatacatggccgaggttcgggctacgctcccgaggctcgggggctactctcgcaaacccgactccggccaaaccgttgacagcgtcaacataccagcccgagaacttggaacctga

SEQ ID NO: 117 - DNA, 69 bp, Zea mays
  Peptide Sequence Number=SeqID_43492
atggagctgggtcccgtttgtaagggaatgtcgggaaagccgtcgagggtgctgccgacatctacgtag

SEQ ID NO: 118 - DNA, 114 bp, Zea mays
  Peptide Sequence Number=SeqID_43493
atggcgaaccgctgcacaggaggcatgcaaccgcccggcggggatcaggaagggggatattttagaaaaggatccttctcagtgaaggaaatgggcctcgagccctcctactga

SEQ ID NO: 119 - DNA, 1050 bp, Zea mays
  Peptide Sequence Number=SeqID_43494
atgaacaaaagaccggcattcaaggtgccattacaaacggaactccggttccatccccgcaggacggacgcggccaccggaaggctctcgttcgcgtccccgctcaagggacgcgaaccagacatcaaagccaaagagccggaggccggccccaatagttcgccttccccggcatggctggaggacgcctcctccgcagagctggaggatggtttccaccaccagaagctggaagaggaggtggctagccgactcgtgcgggaggtagagccccagctcgcctcgctctccgccccagcaaggatggggctggtggtcaccgtcttaggtgaccaccggcgagggggtgcagccaggccccgtcgtgggctgagtcttctccaacacgctccaaggtcctccccctacggcgcggaggctgggtcccacgcgtcatgcaaactggcccagggcagaagaagccaaaccgccgcgcgcggtgcatgcaaccgcccagcggttacaagcattcctccactttcgcccagaccaacgggtgaaagggcggacagccgtgcaggcgacatgcaactgcgacaagtgggcgcgcccctccgacttccaacgcacccagcatggaggcccgggcccacgcgtcatgcaaccggcgcgccggttgctacgtgcgagcaactgcaccgccactcgcaccaccaccacgcctcctcgactgcggaaccagtaccgcgactcgaggcaaccctgcgtacgacccagcagtgccagccaggcgtgacggtcaatacggccaaaaatgggccggcagtaatggcggtggcaggcgggcaggagcagcggtcacgtcgtcagccaagctcacgtcacctcgtgggacagcgagagaaccctctctcacagcgtgaagactgcgcgcccatgttccgttcctcgaacggctcgcgcatgcgcaacggccgcctcgtgaaccactcgccctgtcgcattaactccacggcgggacaggcggcgcctcaggcacgagaagcaagcgacgcttcgccttcgccataa

SEQ ID NO: 120 - DNA, 93 bp, Zea mays
  Peptide Sequence Number=SeqID_43495
atgagcagaaccgaaggcctcaacaaaaagaccttcatcaggagggcttcttcaatgaagatgactggctacaccttggcctccgtcctataa

SEQ ID NO: 121 - DNA, 1374 bp, Zea mays
  Peptide Sequence Number=SeqID_43496
atgtcttcttcctcccttaagcgtcgggtcttcccgtcttccaagcccccggatggggggtatccgccgcctttccgcctcctcgttggaggaacgcaactccatgggagctggtacctctcagccatcgttcggcttcaaggattttcatcagccggcccggccgtacccccatgccgacgatcacccaggatggtgactgtcggtttctgggtggggaagagcaagccaggctgcgatcttggtcccaccctcagcttcaaggatgttcatcatccccgctggggcgggagccacgctgagccggcgctctaccttccgcgtgggtccgcgggtcgccctttcccgtggcgcttgggggtagaggcgttcgctggccctgcggacggcgcggacttcgataacgtggggttgaacgacggcgagcgtcgtcacctccagcgtgtcggagtcgtcggccgggcttccggcggcccctcctgccggagggcggccgccgcatcggttccacgcgccattagggcggcgttcgtgttctggggtggtcctgcttttgcactggaacgacgcccttgcacagaggccggcgccccactcatctgggaggatttgagtggggatctgccggggggctggtgtcccctgccatcggcgctgatgcagaggcggcttgagaagtcctcgtcaccgacgggatcactgccatcaccggcgcctcgggctaccgcgccggtgtgcttgtcctcgccccctcgagcgtcggcgagggcgagggcaagatcgcagcagcgccgacccactgttgtcgtagtcgggacgagcggcggtgagccggccatcggccttccgtggttccgtcgaggcctcggatcgggctggcgcccttgggagccggttgaccgaggccccaggggtaaccggttgagccgcctgctcgggccggattcccggaggagcccctggaccgcggcgccgcccgaggctgggtcgggctttgctgaagacgtcgtcgatgccgagggtgctacggctcccttcggcgtgaagacccgagcctgcaggatccgatcatcttgtagcgtgtgcttcctgcggccgccgaggccagaagaaaacaccctcgctgcacttgcgaagctgcgccttttttcctcctgtttcgagcatctggacttcgtcggtaacagggatgtttgtgtgagcaagagctgcttttcgcggaagggacgagtgagcgttgccgtagatctcgccttgattgctggccagcttgtatgttccgggcttcagaactttggcgatgacgaatggcccttcccaggggggcgtgagcttgtgcctccctcgggcgtcttgtcgcagccgaagcaccag

SEQ ID NO: 122 - DNA, 1806 bp, Zea mays
  Peptide Sequence Number=SeqID_43497
atggggatgatccgcaagattaatctaatgggtgtgcccctgcaagtcgaagatcttctcttcaacattgacaggaaaaaacaaaagaagagaggatgcttcgcatgtggggagaagggccacttcagggacaactgtccaaatatggccgaacccaaaaaggggaggagcaaaggcaaggcgctaacaagtgttagaacttgggatgattcttcaagtgaagatgaacctccaaggacgcgcagcaactggtcctcatcacgctcatcacggtcatcacacaaatgccttatggcaagaggtaaaatgagcattccatcctctagtgatgaaagtagtagtgatgatgaaggtgagggaaagccctccatagatgaacttgaggaagacgttaaatttttccaggatgtttgcactaagcaaaaagctcaacttaaaacattgaaaaataagttgattagctctcaaaatgattataaaggtttgctagaaaaatttgaaacttttgcaaacttaaatagtgagctatcaactaaaattgagctattagagtctagtgttccatccactgctaccgatgatggccttattaaaaagaatgaaaaacttaaggctaagttagctagctcccaagaagctattgaaaatttgctagagaaaatggaaattcttagcatacacaataatgagctaactactaagctagaaaacattggtagcaccccagcagcatctttagttgaaatacctgaaattattaagaaagatgcttctacttcttgctttgatttaattgatgattctaacccctgcaaccaagttcttgttgagaatattgttgtagaaacatgtttgcatgaggttgcaaaggaaaatgaacaattaaagcaagaagtggctcgccttggcaagactttgtatgacaagaaaggcaaagccaaacaaatccgacctccacaggataacaccactccaggagtgaacaagcctatggagggagaaactgtgatttgtaggctatgccacatggaaggccataagtctttccaatgcaaggcgatgactggggataagcaaaggcataaacacaagcaaaagccaacaagcaaaatctccaacacctacattaaaaaggtggacaaaaaggatgctacaccatatgtcggtaccctaaaactagggtaccccttactgctgtataaacgcagtatccacgtggctatttttagtcatgtggtaaaagagttgtatgtgggaccaggccatgactcaccccagcctcgggcgactactctgggccagcaacagcacctgaccccaccacatgggcgggtctggtaccgccacatcatcgagcaccactacttgtctcccgaggacttcctgatggaggaaggggtagcatcatccgtgccacgaggctctaaccgccctgcgcctggtgctgctgctatgcacgctgcgcagcagcacacgcccgcggagacatccagggctccatcgagggctgctcctagtggggtgttgtctgcagccagggagttactgcgtaaccctctaagttccacggcctcaccgggggtcatgaggcagtggcgcgaagatgttgtccgtctcctcggtatggcccatcctggctctgccaggtctaggcctcgatcattccggcatcaacacgaggcgtcagcatctgtgcgctcaccctcagtgaggggtgcacggactgacgacctgcaggcagagctcaaccacaggcgtgcgggcaaggatgctcgaatctctctggagagggctgacgacctgtag

SEQ ID NO: 123 - DNA, 307 bp, Zea mays
  Peptide Sequence Number=SeqID_43498
ggccgccacgtggccagagaagacaatatcctccaaggtatcaacggtgggtccggacccccacgggaaggtgtcagacccctgcatacacggcccggacctcagggctgggtccaggacctccgcaggcggagacccgatgctgccacgtgggcctactacccgtgacgcgatgtaccgcctcagtattaaaatgagccctgtccactccactggcagagatcttgtgggcgacactggcattggatactttatatgtagtcccgccgttttgcccctgagcccacatgtcggcgccagcgccctg

SEQ ID NO: 124 - DNA, 642 bp, Zea mays
  Peptide Sequence Number=SeqID_43499
atgcagcagcggcggctggagctcggccaggtcctcggcgagctggaccaatcttggagccaagctgcggaggctgtgagtcgggctgaggcccttaagggtcagctggctgaggctgcggggcggctagccgaggcgtctgctcggaccgaagggttggagacggctcttagcgagtccgtcaaggattgcaaggcgcttgcccaggcggctgagcagaaggaggtcgaccgcgtggccatgtccgaggctatctcggccttttgccgggccttcggcctcgatgacgtcccctcaggtagctccccccggagtcacctgcgggccttgggtggccatgtgcgcagcagactccgcggggcgctacaccatggtgttaggcgggccttcgccgtgctcgcttcccactacgacgtggatctagagcgggtcagcgaggggtattgcttacccgacgaagatgaggctgccttagccgaggtccagaggctcgacgcggccgtcgcgggcccaagcgcggtgctggcgtcctccttcgaggtggagatcctctcgcccgagtcgccgtctgaggccaggccaaattccaccgagggtggaaacgacgccgcgggcgccgctcctccccctgccgatgcctga

SEQ ID NO: 125 - DNA, 1107 bp, Zea mays
  Peptide Sequence Number=SeqID_43500
atggtcgtctgcataaacagggagcagcattacagcgatgacagaaaaaaggtgtctccatctagatccagaactgttggtcaggtggtttcactggccgaccttgaaaggttagttgtctgtcctgaagctgatgcccgttacatcaggggtgctcctggggtagtgtatggatccggagaaaagaattcgcatctgcccatcaatcagcactaccttcttgtcgtaagccacaacgcattcaacggcggccaccagaacgaacagcgccactacgcagcccagcaggacagccgggcaccacctcctcatggccaacctccccgctccaagaagggcgacgcaaatgaaggtgggccagagggcggcgccccagaaggtggcaaaggagaggacattggaacaagaggaccgagggagaaagatgggggttttagagccagaagcttaccacgaaggcccatcgcggagcctggaaggcttggagcagggaacgccagcgaccgcgagccaagaagggggaagcgaaaggcggtggcgtgggagggagaaagggacaggaaggagaggagacaaggaccaggatggcgtgggagagttttcggcgttgagtcgtcagaacagtccttcgacgttgaagcaccccgccgtcaaacatcttcgcgcggaccgttctgtctgttcttcgtccaagctgcactcgccgaacagcatcctcctcgtcgcgctcagaagccgtcacctgactcatttttccatgctctggtgcgtcgtcgcgtggagctgttgaacgtcgacgtctccagcttctgtatcgccgtgtcgacgctcgtctcccccaacaccgctgttgcctactgcgcctactactcgctctacagcagctcgccgtctccctggaaattccccagtcatcgcccggcttccttgcttcgccggttcgtcgtcgttgtcgttatttgtttaaagctgccgatcgaaattcttagctttgttcggcatcacctcatgcagttcgtcgcgtcgtcatccctactgtctcacggcgttgcgctcctcacactccgttttctcctggtcaacgacgcttgtggaaatcccaagtaa

SEQ ID NO: 126 - DNA, 294 bp, Zea mays
  Peptide Sequence Number=SeqID_43501
atgtcgtgcgcgttcgacgaatactatattaaggactatggcgtcatctcggtgctggaggtgacgcagaggaagaccgacgacaatgaccagttcgtcatcctcgccactgttggggatagcttttgtgtcggcagtcctacgttgtcgcatgtaggatgcgtcgctgtggatgacaagctccggcacagccgccgcttggacgcggtccagagcggctgcaccgcgctgtccattgtcaaccaggggacctcatggttgtcgctaacttcggcgactcccgggttgttctag

SEQ ID NO: 127 - DNA, 75 bp, Zea mays
  Peptide Sequence Number=SeqID_43502
atggcgtcccgctaccatgcgcgtggccaacattttgcaccatacaacatagcgggtctaattggcgtcctataa

SEQ ID NO: 128 - DNA, 128 bp, Zea mays
  Peptide Sequence Number=SeqID_43503
ctgccgaccaaccggcctccatgcgctcttatagttgacacgggaagggcgaggaacgtgctccacgccaccacgagcctcacccccttccccctctcaacctcaaatgacgtcgcgccgccaggagc

SEQ ID NO: 129 - DNA, 903 bp, Zea mays
  Peptide Sequence Number=SeqID_43504
atggtaaaatttgttaatgaaagtgaagaggaagaagagtttgggattggagaaggcacaactgaccctagtgaaagtgattgtggcaacgatgatgatggtatccatggggactgtgatggtagccacgaggatggtggaggtgatgctggagcacatggtgctgggggtagccatgctggaacatatggtgctaaaagtgaagcatatggtgatggagcatatggtgttggggacaaccattcctcccaatattcaggttatggagcaccttatttgcaacgacgtcatttggtttgcagacctgttgatgatggtagctacagctcagtcaactccacttacagctatctgcctcgacgtgaccacaacttatatggtgcatgggcaccatcacccgatccaatgccacaatcaggcatgtatgggtatgaacaaccatctcctccacccgcatatacatattcgcatatggcacccgatccgacatatggacaaccattttatggtgtcataaacttgaatccatatgtttctaggctgcaactcttcaaattttctccatcccgccagcacaaccactcgttagatttgctcctagcttctcatgtggttgttcttcaagagtccgacgcccacgagcttccaccctctgactcccacgctgcccgccctaccatctcatggaggctagcaacaagcagcgacgagatgggtggaggcgctggcactgttcctgcgatgttgtgggacgcggacagcgaagatgaagtgcacgtggttgaccatcctactaagcatcatgctgctactcacgcagagaaaggaaagaccatggctgatgccaacacatcttctagtggtgctgatgttgtcggcgtttcgagaccggggggtccctag

SEQ ID NO: 130 - DNA, 868 bp, Zea mays
  Peptide Sequence Number=SeqID_43505
atggctgaaaggtaccaactcccacagagttgcgttcctccaacgacgaggcggaaagacggcggatatcccccatccgggggcttggaaggtggaaagacacgatgcataagggagcgcgaagacatggtcgccttccaagggggtcaccctccttttaaaggcggctctccctacttgcgtccccagccgtcaggggctgagtcttctccaacacactccaaggtcctcccctacggcgcgggggctgggtcccacacgtcatgcaagccggctcagagcagaagaagccaaactgccgtgcgcggtgcgtacaaccgcccagcggttacaagcgactctccacttttgcccagaccaacgggcgaaaggggcgggcagccatgcaggcggcatgcaaccgcaccaagtgggcgcacttctccgactcccaacacgcccagcatagaggcccaggcccacgcgtcatgcaaccggcgcaccgaatgcttcgtgcatacgactgcaccgccacttgcgccactaccgcgcctcctcgactgcggaaccaataccgcgggcaggagcagcggtcacgtcgataggcaagcctacatcccatccaggggcgacgagagaaccctctctcacggcgtgaagacaacgcgcccgagaagcgggcgacgcttcgcctttgccataatgaccgcgtcaaaaaaggctggcccctcggaagggttcgacagccgcctcagatcgcgtgggctctacacccactactggtcagaggttcgaaggccggcctctcggaagggttcaacggccgcctcaggctactcgggctccgcgcccattactgatcaggggttcgaaggctggcccccgaagg

SEQ ID NO: 131 - DNA, 615 bp, Zea mays
  Peptide Sequence Number=SeqID_43506
atgcagatccaacgcgaaggctggacttcgcacacgctgcccgcccagggagggcatctcgcgaaggcatacttcgcccagcgcccagccatgcgccaagcgccataccccatacccgataaaatcctcaactacatcgtgcccgctactcatgcggcccgcgcaccgaagggctccttcgtcttcatcatcctctgccacctcaaattgcgggacctccgccacaaagcgatgtgcaggcagacgaaggtcagcggtggaaaacgcctcaaaaacgaccaattcgccctcgggctcgggaacctcctccgccccgggacacgacccactccgctgccaaaatatccaagctgctgcatatcctgcacgtggaccgaggaaatccgcgagacgccaaactccaccgtatcacctggacgtagatcctccgctgccacgttgctcaaggtatcctcggacgacgcgtcggctggcggcgtatttgcagcagacgaggaagaagacggcatggctacgtatcgtcggcggcggcgagcggtctgcttgacgcgggccagatctccgacgagcaagagcaaggagggcaggcaagcgggcgagcggtttcaaaagtag

SEQ ID NO: 132 - DNA, 2934 bp, Zea mays
  Peptide Sequence Number=SeqID_43507
atggtggccctggcgaagtatgtctgggcaatgacctcgtatggtggtcagccttctgtggaggtcttcgccaaacattactgtctgcattggcagaaaaggaaaattggacataagattgcacagttcggatcgtgcacgtttactctgaggaccggaaagacttcgatcaaagtcgtcgagttagttccctgtgcccgcaataagtggggcaactggtgggatttctggttttatgtttccgaaggtgaagttgaagaccacccagggctccccgtggccatgatgtgctcccattattatgtggcgtacccgcaatttgaggtggcagaggatgatgaagacgaaggagcccttcggtgcgcgggccgcatgagtagcgggcacgatgtagttgaggattttatcgggtatggggtatggcgcttggcgcatggctgggcgctgggcgaagtatgccttcgcgagatgccctccctgggcgggcagcgtgtgcgaagtccagccttcgcgttggatctgcatggtcgggatcccgccgcattcgtgcgtgaagcgaaagacggtgcggcgaggattgtggggcgctatgtgccgaggaccgagggcctgcggagttgggatatccgagggtccaatgttagattgaatcgggtcttcgaattgaactgcttgccatacggtggttatcccggggaggacgctgccgaccgccacgggaagaaaccggtggacgtgaccgaggaagggccttcgcaggaggctgccccggccactaagaagagaaaatttggtattgcagtgggggtgggggtctctgaaagttttgttgtggatttgatggggacgtgcgcagccctcgggggaaggatgtcttcgcccgagctccgggagtcttcgacgcgaatgatggaggttatcgagggtcgatggcccaagaatgttatgatcccccgcgcggctggcaaagacttctttacgtcccacatggcacgcgacttgaaggtttttccttacgggcggaatattgctgctgttgtatcggcagtgatggagaaggaccgtcaagatgttgcgcagaagcgccgggcgatcgtaaggatcgcggatccaatgcgcgaggcgaagcgggcgcgggggagcgcgaaggcggctgcctctggcggtagcaagccggtgccggctgcgaaaacggtcgcccccgggcacggccaggcgccgacgagtacgaaggctgccgcctctggcgggagcaagccacccccgggcggggtcgtgaaagggcgaaggccgctttcgccggcgcgacgcattaccgactttggcacggacatcagtgtcgatgattatcttgttggttcgggcaaggggcaactggctgttgtcccgcctccggtggtcaccacttcgccaacggcgatggtggggacgaagggtgccgcgcggggcccgtgggccactttctgcgcgagcggcgagattctgtcggccgctgccgctaaggacgtggcgggctccatgtctcagcgactgagggaagcgtcacagcagctgaagcaagcggccgacttcgccgatctcgtcgcgtcgggtgccctgactgcggacgttgctgccgaggtcgaatgtctccgggcacagcatgcggatgttgtgcgggagaagtcggctgcggagagcaagaaccgcaggatgatggagaaggccgaagctaaagtggcgcgggcggagggcagtctcgcccgccaacacgccgaggagctggaggcgaggttcaacgccctgcgcagccgcgtggacaaagccgagtcctcgacgcgcgcggaggtcgagcggacgcacgcgcagtttgtggacgtgtactacgagctgggtgcgcggactgctgacttcgaggtgcttggccaagaagcgggccttcgcttcctcgaatggttgcaggaggagctgctggtgctcccgaccattgtgacgggcttcatgtccttcgcctccctcgtcacctgcgagggggccatgaatgctttgtcccgcgaggggtgcagacattacgaggtcttcgaccaagcggacgaaaactttgaacgtgaaatcttcaaggtcgaagaccctgtggtgaagcagtcagcgggggcactttttgatatgatgtggggtccacacggccgagaggctgtcagggatcggtccgaccggacgatagagcagatggcttatgccgaagacgtcgaggaccttgttggtctggacggcgcgctgcccgaggccgcgaaggtcggtccgatgccgccgttggatgctggtgaaggcacctcggtgatttctgcgcccgttgcggccggcgaagaccccgcaccggcctctgcgacgacgggcgaagccgccccgaaggttcttgggtctgggcctgcgcacgcaaccgctactgacgatgatatttttgtggcggcttcaaccgtggctgctgatgacgattcgtttgactctgtgtctaaatgttttgagtctgatgattctgggagttcgattgcgtggacggaggagtcttcagatgaggacttggattattttgcggcgctggatgtggctgcagcggattattttgcagcgctggatgtggctgcagcggagccttcgccgcgcgcggagggttccgaggaactcccaggcgggagtactgggtataggtggcggagggcggtggcgaagtggagagtgggtgaattgtcgcgaagtggtaggcgttgtcgaagcgaggtggagaggggtcgtcttcgcgtggatgggactggtaagcgagaattgttgtcctcgccgattggggtgagtgtgggtgagggggagctacgaaatctgtttgagggtgaggaactgaggataatgctgttcaactaccgggagattggtatcatcccgaaggttgagccaatgtaa

SEQ ID NO: 133 - DNA, 261 bp, Zea mays
  Peptide Sequence Number=SeqID_43508
atggacttcgacggcgccattggcgatcagggtgagctgtgggaatggcaaagtcaggagtatggtctgcagaaagatttgttagctgccggtttggcagctccatgtagcagcttgtgggctgaagcacccaacaatatgggtgatgattggagcatgtttgatgagcaaacaccaattaaacattgtacagacttcgaatttcagttctgtgatataggaggtaaagtcttgttctcgtggttttgaaatctacagtca

SEQ ID NO: 134 - DNA, 637 bp, Zea mays
  Peptide Sequence Number=SeqID_43509
gcgaacagagattcgtctcaaccttctgtttgctttttattagatacgggctggaaaactgtggtcacaggtccaagatacattcaagcagatggacactgccgcaacagagctcgaatgcttccaagagctgcagaaacaggaacatctcgctgcttcatatcgaatccaaaatttgtctgaagaagtgagtaaacagaaggcactagaaaggaccctccagagccgctacggcgagctggtttctggtttccagaggatccaagaacaggtcgaggagcacaagaggcaactcaaggtacaagaggcggtagaagccgaaagtcacgctcaggaagaggaagctgcggcatcaaatcatgctgctgctgaggaagaggatgaaaggaaggaagatgatgaaaggaaggaagaggatggaaggaagtctctcagctctgaagagaaaccacagcagacaagtacggctaccgatgaagaacctgcaggaagcaaaggaaccaccgaggatcagatggacgtggacagcgggaatggagagggtggagttgtaggccctgtcccaccagcaccagacactgaagggggtaatgatgaagtatcagttcaagagatcagtgaagcccagcccttgcct

SEQ ID NO: 135 - DNA, 576 bp, Zea mays
  Peptide Sequence Number=SeqID_43510
atgcaggcggcatgcaaccgtgccaagtgggtgcgcttctccgactcccaacatgcccagcttggaggcctaggcccacgcgtcatgcaactggcgcgccgaatgcttcgtgcatgcaactgcacctccacttgcgccaccaccgcgcctcctcgactgcggaaccagtaccgcgacttaaggcgacccagcgcacgacccagcagcgctagcctgacgcggcggcggcgcctctggcaggagaagcaggcgacgcttcgccttataatgatcgcgtcaaaaaagggactgggaaagggggataccccaaaaaggatccttccctgtgaaggaaccaggcttcgagcctccctactgatcagaggttcgaaggctggccccccggaagggttcgacagccgcctcagatcgcgtgggccctacacccactactggtcagaggttcgaaggtcggcccctcggaagggttccacggccgcctcaggctactcgggctccgcgctcattactgatcaggggttcgaaggctggcccccaacgggttctgatagtcgcctagagggggggggtgaatag

SEQ ID NO: 136 - DNA, 470 bp, Zea mays
  Peptide Sequence Number=SeqID_43511
cattcacggcttgggccgcagtcctcgtgggggctgagagccgccgtcgtcacagagtacgcggggcgccatcattgcctatctagcagagctagccagatgggacgccggtcttgttccctgcggcccgagtcagctcggggtagggtgatgatggcgcctcctgttgacgtggctggtctgcgccctaggttgggcgatgtggaagctcctccgaagccgaggtcgagtctgtcttccgtggccgaggtcgagtccgagcccctgggtcgggcgaggcggagttcgtcgtcttctagggctgagcccaagtccgagccctgggtcgggcggagcggagttcgccgtcttccgggacttagcccgagtccgagccctgggtcgggcggagcggagttcgccgtcttccgggacttagcccgagtccgagccctgggtcgggcggagcggagttcgtcgtcttctgggac

SEQ ID NO: 137 - DNA, 384 bp, Zea mays
  Peptide Sequence Number=SeqID_43512
atgaacaaaaacactggcattcaaagtgccattacaaacggaactccggttccacctccgcaggtgctaaaggttcactctcagccaataaaaagatcaagttttggattcaaccaaggagcaaagggccaaccgaaggcacctctggtctggcgcaccggactgtccggtgtgccaccggacagtgtccggtgcaccaccggacatgtccggtgcaccagaggactccaactcgaactcgccaccttcgggaatttccagaggcactcacgctataattcaccggactgtccggtgtacaccggacagtgtccggtgcaccaaggagaagcggcctcaggaactcgccagcttcgggaatctccaacggctagtccgctataa

SEQ ID NO: 138 - DNA, 345 bp, Zea mays
  Peptide Sequence Number=SeqID_43513
atgcaggctgaaacagatcgtgaggcaggtggtaacaaaggtgtatcggataggcagatacggttgaagatcttttctccgaatgtccttaacattactttagtcgatttgcctggaatcactaaggtgccagttggtgaccagccaactgatattgaagccagaataaggactatgataatgtcatacatcaggcacaagacatgcatcatcttagctgtttcgccagcaaatgcagatttagcaaactctgatgctcttcaaatggctcgggttgctgatcctgatggttctcgaacaattggtgttatcacaaaggttttttctttctttccttcaccttaa

SEQ ID NO: 139 - DNA, 1164 bp, Zea mays
  Peptide Sequence Number=SeqID_43514
atggatgtgaagagcgctttcctcaacgggccgatcaaagaggaggtgtacgtggagcaaccccctggcttcgaggatgaacggtaccccgaccacgtgtgtaagctctctaaggcgctatatggacttaagcaagccccaagagcatggtatgaatgccttagagactttttaattgctaatgctttcaaggttgggaaagccgatccaactctttttaccaagacttgcgatggtgatctttttgtgtgccaaatttatgtcgatgacataatatttggttctactaatcaaaagtcttgtgaagagtttagcagggttatgacgcagaaattcgagatgtcgatgatgggcgaggttaactacttccttgggttccaagtgaagcaactcaaggacgacactttcatctcccaaacgaagtacacgcaagacttgctaaagcggtttgggatgaaggacgccaagcccgcaaagacgccgatgggaactgacggacacaccgacctcaacaaaggagtcgctacgccttgcttcgggatctggtatccaaaggggtctaactttgacttgattgggtactcagattccgactatgctggatgtaaggtcgataggaagagtacatcgaggacgtgccaattcttaggaaggtccctggtgtcatggaattctaaaaaacaaacttccgttgccctatccaccgctgaggtcgagtacgttgccgcaggacagtgttgcgcgcaactactttggatgaggcaaaccctccgggactttggctacaatctgagcaaagttccactcctatgtgataatgagagtgctatccgaatagcggaaaatcctgttgagcacagccgcacaaagcacattgacatccggcatcactttttgagagaccaccagcaaaagggagatatcgaagtgttccattctccaaggagaattgaaagggaaaaggtggacttggaccatgcaagacttccactgcactccgatgaaaagagcgaactcgtcgctctcgggaattcatcgtcgacgtacggctataattcaccggactgtccggtgtgcaccggactgtccggtgagccaacggtcggcagggccaacggtcggccgcgcgatctgcgcgggacacgtggccgagccaacggctag

SEQ ID NO: 140 - DNA, 411 bp, Zea mays
  Peptide Sequence Number=SeqID_43515
ggcagcggttacaccttaatcgacacgactctcggcaacggatatctcggctctcgcatcgatgaagaacgtagcaaaatgcgatacctggtcgtcccggcgcgcggccggccattcggccctaaggacccatcgagcgaccgagcttgccctcggaccgcgaccccagagggcgtcctcagcgacggaccggggctccaagttctctggaaagggacgcctgggagggtgagagccccgtccggcccggaccctgtcgcaccacgaggcgccgtcaacgagtcgggttgtttgggaatgcagcccaaatcgggcggcgagagaccgatagcgtacaagttccgcgaggagatagatgtaaaaggacttttgaaaaatagaggcaagagtgcttggatattcgccgggagg

SEQ ID NO: 141 - DNA, 393 bp, Zea mays
  Peptide Sequence Number=SeqID_43516
atggctaagctgaacttcaacttcaactggggtccaggcaggttcaaccggggtccagggcaagttcaaccggggtccagagaggttcaaccggtgtccagggaaagttcagccggggtattttccccggacctcactgctgaacttcaacttcaactggggtccaggcaggttcaacagggttccagggcaagttcaaccggggtccagagaggttcaaccggtgtccagggaaagttcagctggggtattttccccggacctcactggtcaaaaccggttgaaccggtcataggggaggttcaaccggtgtcagggtcacctgaccagtctgacctcctgactggcagactgactgccagtgtgacccccaggcggttgaaccggccctag

SEQ ID NO: 142 - DNA, 411 bp, Zea mays
  Peptide Sequence Number=SeqID_43517
atgggcgcaccagacagtccggtgcgccagccacgtcacccaaccgttagggttttgacgcagacgaccgttggagcgctgacttttggtggcaccggacagtccggtgccgcaccggataggcactgttcactgtctggtgtgcctctgacctctactctgacttccgccgtgaactgtagctctgtcagggaaaccttggagaggaccagcaaggacttgggaaaggccgaggtgttgaggaggagcagcaagggtgtccacaacaggaaggagatcaagtccgactcagatgcgtctccatctcgggttccagtaccagtctacactaaaatgggagtccaagatgcatccggactcccgattgcaatggaccatgatatggttgtaaagaataaagagatcatctaa

SEQ ID NO: 143 - DNA, 121 bp, Zea mays
  Peptide Sequence Number=SeqID_43518
cagcggtggtaagaaaggtatgaatgttattgtcaaccgttataataacaatctgtatgcagatgcaaggcgtccaaggcgccttagacctaagactaaagcgtccgctttgcccaaagag

SEQ ID NO: 144 - DNA, 270 bp, Zea mays
  Peptide Sequence Number=SeqID_43519
atgtccgtctcccgtccgaaggaaacggatcgggaacccgttcggtcccttggcgtgctctcctcgcccacgacggccccacctttgggtacaggtcaatgcgcatgcgagaaagctcagctcagcgtcaagccgtcaacgtcagagctccctaggcccccatggctctctgccgcgatcacgggctcgctcgccccgcccgccggccctccgggcaacatcaggcgatccaccagcaaccacaggcagcacctccagatagcgagagcg

SEQ ID NO: 145 - DNA, 1392 bp, Zea mays
  Peptide Sequence Number=SeqID_43520
atggacgacgccggaaggccaccaccacacgctcccgtggcggtgaccgcctccgcctccgcctccgccaccgccgcgcccgcccctccccaaccctcagccactgctgccgtcgacaggtcctcccccgaccccgacgcgctctatgaagaggggatgtggcaacaaatggccatggacagcggtgccactatgcaacctgggtcatatcctgagcgaccaggtgaacccgactgcacttactatctcaggactggattgtgtcgatttggcatgagctgccgattcaatcatcctccggataggaatctggctattgcctctgccagaatgaagggagaatatcctgagagagcgggacagccagagtgtcagtattatctgaagactggaacatgcaagtttggccctacatgcaaatttcaccatcccagggaaaaggctggaattgcagggagggtgcagctaaacacatcaggatatccactccgcccgaatgaaaaggagtgtgcatattatttaaaaacaggacactgtaaatatgcaaatacttgtaaattccaccatccggaacttttcaatgtggtgccttcgtcacgtggttctcctatttatacctctgtacattcctctgcgagtgctggtccgcagtcctatactggaactatgccaagctgggcttttccacgagcttcttttataccaagccctaggtggcaaagtccttcaaattatgcgccgatgattgtacctcagggccttgttcaaatgcagagctggaattcatatactggtcagctgcagtcacctggggctcaacaaacttatggaagttcacaacaaggagaagctagtacaggaaatcagggaatgctgtcaccatacagacccagttcgtttcccgtgcctcaatatgcgctgcagagagagaatgtatttcctgagagacctgatgaaccagaatgccaatattacatgaagacaggagattgtaaattcggtgcagtgtgcaagttccatcatccccgggtgagatcactgccccctccagattgtgtcttaagtccaatgggtcttccactacgtccaagggctgtgcaacaaatctcactgtggcttgcaggcatcgttgttgatacctggacactgattagagcaatgtcaaaagttacaaatttgctaggacagggtgaagaactgtgcaaattctattctcgttacggcatctgcaagttcggcgccaactgtaaattcgaccatcctacagtggttgctccaatggtctatgcgtatggtttctccgcgtctgcttcccctgcatccgcttcgactaatgtacctatggcgcgacgccttctgggatccccaccggggtctggatatacatcttag

SEQ ID NO: 146 - DNA, 788 bp, Zea mays
  Peptide Sequence Number=SeqID_43521
tggtcccaccaatttcatcccctcctgtaccattgaaggaggcaccaaagaagtcatatgcttcaattgtaaaagtcatgaaagaacatcggccattagcacctgcagttccttccagacctgcacccccaataacagagaagcaagcctctcctgcccccactccagttactgaggctccagctttctcccctaatcctcagagcggcggctttcaagatccagaagttgatgcacatgccatatatgtgcgaagtctgccattaaatgccacaccacaacaattagaggaagagttcaagagatttggaaccattaaacatgaaggcatccaagttagaagcaacaagatccaagggttttgctatggctttgtagaatttgaggatgccagtgcagttcaagctgcaatagaggcttctcctgttactattggtgagcggcaatgctttgtcgaagagaaaaggactactggttctcgtggcggtggtagcaggggaggaaggtttccaccaggtagaggtggtaatttccgaggtgaaggcattagaggccgtggtacatacaatggaggcagagggtacggaaggggcgagttcagttaccgatccgattatggaggccgaggtggcggcaggggtggctcattacacggaggtgatgttggctatcagcgggtcgactactctggcacatccagtggacgtggtgcccgggcaccatcagcggccatcccgggaattccggaccggtaccagcctgcttttttgtacaaacttgttctatag

SEQ ID NO: 147 - DNA, 114 bp, Zea mays
  Peptide Sequence Number=SeqID_43522
atggaggaagatgacttgcaagaagaagacatggcgccgctagcgaccttcgccgcccctgcgcacgcgcagaccatctggcacgtcaggcagggaaccctagccctgcgccag

SEQ ID NO: 148 - DNA, 384 bp, Zea mays
  Peptide Sequence Number=SeqID_43523
atgaaagagaacgcaattgcttcaaacccagatcagacgacaactataaaggaactcctgcagcagaaagaagctgagcctgatcttgacaaatccaaaaattccagtgatcccattcctgctacagtagaagataattccgagaatactacaatatcagagagcacccacaatgatgagagcattgtagtgggagcaaacaccgaaaatgcaacttctgaaaccgtgaaaaaaaaatcaagcaacactaatgcatcagatagcagccaccagaatgagaacattatagtggaagcaaaagaagataatgcaacttctgaccttgtggtactcgacaaatctgaaagcaacaatggttctgtacctgttactgcagaagaataa

SEQ ID NO: 149 - DNA, 423 bp, Zea mays
  Peptide Sequence Number=SeqID_43524
tatgaagacactgtggacgcaagaaaatggtaaaataaaatgtgtaatttcaatcttcaggtaccaaggtagaaaacaagcacaagcacaaccaaacttgagagatttccgccgcctcatctggacgcgtcgattggttatagtctagattcatcagtggatggagccacagaagagttcttctcgtcgtcggtcgttgagctaaagaaaatgccaagcctcatatttggtcacgtgaaatcttacctgaatagcccaaagaagggcatgcacagcaaggcaaggccaagcctcaacatggcgcctcccaccgttctcattggcgcattccggccttactcctttgggcagccaatggaggtgagaagaaagaatagagagcaattcagaagcaaaggaagaaatgcagtaggtgcagtcaag

SEQ ID NO: 150 - DNA, 537 bp, Zea mays
  Peptide Sequence Number=SeqID_43525
atggggtgcgcggcgtcggccgccgacggggccgagctccggcggcgggggtgggcgcgggcgggggagccggggcacagcgaggcgtccacctcgggtctgctggcgccgccgcaccagcaggaagggcaggaggccgagtcgtcgtccgggggcaggaggcgagggtgcaaggtggcgccggagcccaaggagctggaggaggggaccgccgcgctcccgtcgatgcccggctcgccgagcttcaggtactactgccagaagaagacggcggccgtcgataggatcgtggctgatgccatcgacgccgataccaccgtcaaggatcagaggtctctcaacctaaaggggggaccaaatggcttaggttcagtggcttgtcgatcgtcgctgccgcttggcacaagcacaacttgttcagccgccaaagaagcaagccttcgccgcctcctgctgccgcttcagatgcaagctcccaaccctgatcaggcagcgctatatgggatcttctacattttactacgtctcagcttataa

SEQ ID NO: 151 - DNA, 285 bp, Zea mays
  Peptide Sequence Number=SeqID_43526
atgtccggtgcacaccggacagtccggtgtccccttctagccgttggctcggccacgtgtcacgcgcagatcgcgcggccgaccgttggcccggccgacagttggctcaccggacagtccgctagtccacttcagccaaacgggacatttgctgagtacgttgatgtgtactcatccttgctttaccacaaaacaccaggttgtccgcattgtaaccactgctccggagaaggcgaagccgtggaaggagacttccaggagttccaagactacgacgaattctag

SEQ ID NO: 152 - DNA, 553 bp, Zea mays
  misc_feature (11)..(11): n is a, c, g, or t
  Peptide Sequence Number=SeqID_43527
gtgacactatnagaacaagtttgtacaaaaaagcaggctggtaccggtccggaattcccgggatccgccagctgccctggtcgcagttgccatccgctgggcgtcggcgtcggcgtcccaaaagaggggcctgctgctgacgacggcgaggggcggcggagtcctcgcgccggtgaggtcgagcgggatcgagacgacgacgacctcggtgggagctgaggccgtcaccgggcaggtcacggaggtcaacaaggacaccttctggcccatcgtcgaggccgccggcgacaaggtcgtcgtcctcgacatgtacaccgaatggtgcgggccttgcaaagtgatggctcccaagttccaggagatgtccgagaagaacctggacgtcgtgttcctcaagctggactgcaaccaggacaacaagcctctcgcgaaggagctgggcataaaggttgtgccgacgttcaagatcctcaagggcgggaaggtcgtgaaggaggtcaccggcgccaagatcgacgagctagcggaagccatcgagatagccaacaagaag

SEQ ID NO: 153 - DNA, 309 bp, Zea mays
  Peptide Sequence Number=SeqID_43528
ccgaggccgagtccgagccctggggtcgagcgaggcggagttcgtcatcttccggggccgaggccgagtccgagccctggggtcaggcgaggcggagttcgtcgtcttccggggccgagtccgagccctggggtcgagcgaggcggtgttcgtcgtcttccggggccaaggccgagtccgagccctggggtcgagcaaggcagagcttcctatggcgcccgaggccggacttggctgctgtcagcctcactctatcgagtggcacgacagtcggagcgacgcaggcggcgctgtcctcttgtcaggctg

SEQ ID NO: 154 - DNA, 315 bp, Zea mays
  Peptide Sequence Number=SeqID_43529
atgaaagaagcgatagcgcagcgtaaaccactggttaccaccgctgggccgcgtagtctgattttccgtggggccattaccggtgtagataccagcaaagaagggctgcaattctatgaagtggttcctgttgcattagtggttgcggggacgcaaatggctacaggccaccgtaccatggatactcgcctcattttgaagggcgaaggtaaagacctgaataacgaaagtacgccaatggctttcgaaaatattaaacaagttattgatgacatggcgaccgatgccaccatgtttgacgttaacaaaaagtag

SEQ ID NO: 155 - DNA, 1023 bp, Zea mays
  Peptide Sequence Number=SeqID_43530
atgatgaccgcgtcaaaaaaggtgtgccacgtcgttcaatttcgtatccttttcctcttcccatttctctctcttgctacagggatcgggaaagggggatactccgaaagggatccttctccgcgaaggaagtgggccccgagcccccctactgatcagaggttcgaaggctggcccctcggaagggttcgacagctgcctcagagcactcgggctccgcgcccactactggtcagaggttcgaaggctggcccctcggaagggttcgacagccgcctcaggccactcgggctccgcgcccactactggtcagaggttcgaaggttggcccctcggaagggttcgacagccgcctcaggccactcgggctccgcgcccactactgatcaggggttcgtaggctggccccccgacgggttcgatagtcgccctagagcacgcagagtgagggatgactctgggtacgttcgatacataaccaaggctcgggctacgctcccgagaggctcgggggctactcttgcaaacccggctccggtcaaaccgttgacagcgtcaacataccagctcgagaactcggaacctgactatgcacccgggcaacgaccagaaaacagcgccgcatgcgctgctctgactgctgtgccacccgccagggtgagactggtagcagccaagtccagcctcgggcgccatagaaatctccgcctcgcccgaccctcggactcggactcaacctcgactccggaaggcggcctccgcctcgcccgaccccagggttcgaactcaacctcgactcggaagacggtctccgcctcgcccgacccccaggctcagactcaacctcgacctccggatgacggtctccgcctcgcccgacccccgggctcggactcgacctccggacgacggtctccgcctcgaccgacccccgggctcggactcagcctcgacctaggaggagtcaccacctcgctcgggccgaccatgccacaagggggaccatcattaccctacccctag

SEQ ID NO: 156 - DNA, 459 bp, Zea mays
  Peptide Sequence Number=SeqID_43531
tgtgtcgccttttttggcacggcctttgtaaacagcctgaactgggcactggtaccagataccgtagattacggtgaatggaaaaccggtattcgtgccgaaggttctgtttataccggttataccttctttcgtaaaatttctgccgcacttgctggcttcttgccaggcattatgctgacgcaaattggttatgttcccaacatcgcgcaaagcgatgcgacattacagggtttgcgtcagctcatttttatctggccttgtgcactggcaattattgctgcattgacgatgggattctttttacacactcaatgaaaaacggtttgcattgattattgaggaaatcaaccaacgcaaaaataaagagatggcgacagaagaaaaaacggcttccgtaacgttataaatgtcaatagccgctatttccatcctggtgggtggcggcctccctacgtt

SEQ ID NO: 157 - DNA, 356 bp, Zea mays
  Peptide Sequence Number=SeqID_43532
atgcacctgcttcctgaactcgccagccaccatgcggtatcaattcccgagctgctcgtcagccgggatgaaaggcaagcacggcaacacgtctggctcaagcgccatcctgttccactggtctcctttaccgtggttgcgcctgggccgattaaagacagcgaggtcacacgccgaatttttaatcatggcgtgacagccttgcgtgccttagccgcaaaacagggctggcaaattcaggagcaggctgcactggtttccgccagcgggccggagggcatgttgagcattgccgccccggctcgcgacctcaagctcgccaccattgagcttgaacatagtcatcctctcgggcg

SEQ ID NO: 158 - DNA, 1290 bp, Zea mays
  Peptide Sequence Number=SeqID_43533
atggcccggagcgacaagcggaggcacggttcgaccggtctggctccccggaaggtcctcaagacgacggcgacttctgcagctagtgccgcgccgggcctcggaggccaactgaccccaccgcaagacgccccaaagcggggggctcaggcggcaccagtttcagtggggctagctcccgaggccgactcccctgtcgaggcggtcgtcgcgtcgggggaggctgctggcgcggcagtggccttgggcccaccagacgtattgccgacgctggcaccggcttccgccaagtccgttgccgttctggccgtggagccacccgtcgccgccgatgttcagatggccgaggcgtcgctgcctgttgcctcggaggagggggtgtggaaccgcgacccattctggggggcggggcgttcccaagatcctccaggtaatgagttcaagcataactttcgcgtgatcaaggcattctttgtgacgccccgcttcctttcctcaggatctgacggatctgagcgccgccaagttgtcgttcatccatcgcaaggccgatgtctgggctcgctgcggtccctgaggaccacgcttgccggggctaccgagcgcctctcccaacggagcgccgaggtggcggaccttcggttgctctgtgtcgatctgggagcagaggcagcggcggcacgcgtggaggcgcagcggcagcggtcggagcttggccagttagccgaggtgtctgctcgggccggagcccttgcggcagacctagtcgtggctcaagccgcatcctcggagcagcgtgcccgagccgaagagctcgagtctgcccttgatgagtccaccaaggcactcgcccaggcggccgagcagagggaggccgaccacgcggctatgtccgaggccatctttgccttctttcgggtctttggttccgacgatgtcccctcaggaagctcccctcagagtcgcctgcaggccttgggtgaccacgcgcgcggcagacttcgcgaggcgatgcatcacggtgtcaggcgggccttcgccgtgctcgcttcccactacgacgtggatctggagcgagtcagcgaggggtattgccttcccgacgaagatgaagctgccctggccgaagtccaaaggctcgacgcggccaccgcgggcccaagcgcggtgctggcaaccaccttcgaggcagagatccttctgcttgcgccgtcgtccgaggccggggcagatcttgccgagggtggggacgaagccgagggcgcgactccttctccaggcgacacctga

SEQ ID NO: 159 - DNA, 74 bp, Zea mays
  Peptide Sequence Number=SeqID_43534
atggctcgctcagctcaatggacggacgacaagtgcgcagacagcacacaggagatcccgggaattccggaccg

SEQ ID NO: 160 - DNA, 277 bp, Zea mays
  Peptide Sequence Number=SeqID_43535
atggatggtgggcaagcatggaaagtaatacctggaataccattcatgataataaaaaggaaaaatgccgcactcaatgatgttcaggttgaagttaattacgcgattaaacttgatgatcaatggacggtgcgcccgggaatgttaacgcattttagcagcaacggcacacgctacggaccctacgtaaaactgtcctgggacgcgacaaaagatcttaattttggcattcgctatcgttacgactggaaagcttaccgacaacaagacttatccg

SEQ ID NO: 161 - DNA, 431 bp, Zea mays
  Peptide Sequence Number=SeqID_43536
aataaggaaataactatgcaacgtcgtgatttcttaaaatattccgtcgcgctgggtgtggcttcggctttgccgctgtggagccgcgcagtatttgcggcagaacgcccaacgttaccgatccctgatttgctcacgaccgatgcccgtaatcgcattcagttaactattggcgcaggccagtccacctttggcgggaaaactgcaactacctggggctataacggcaatctgctggggccggcggtgaaattacagcgcggcaaagcggtaacggttgatatctacaaccaactgacggaagagacaacgttgcactggcacgggctggaagtaccgggtgaagtcgacggcggcccgcagggaattattccgccaggtggcaagcgctcggtgacgttgaacgttgatcaacctgccgctacctgctg

SEQ ID NO: 162 - DNA, 1418 bp, Zea mays
  Peptide Sequence Number=SeqID_43537
atggcgtcctccacggggagcttggagcacggggggttcacgttcacgccgccgcccttcatcacctccttcaccgagctgctctccagcgcaggggacatgctaggagccggcgccgatcaggagcggtcgtcgccgagggggctgttccaccgcggcgccaggggcgtgcccaagttcaagtcggcgcagcctcccagcctgcccatctcgccgccgcccatgtcgccttcctcctacttcgccatcccgccggggctcagccccgccgagctgctcgactcgcccgtcctgctccactcgtcctccaacatcctggcgtctcccaccaccggcgccatcccggcgcagaggttcgactggaagaaggccgccgacctgatcgcgtctcagtctcagcaagacggcgacagccgggctgccgccggcggcttcgacgacttctccttccacacggctacctccaacgccgtgcgcgcgcacacgacgacgacgtccttaccttccttcgaggaggagcagcagcagcaagtcgaaaaagccgccgtcccgtcgagcaacagggcgagcggcggcgggaacggcaacactaagctggaggacgggtacaactggcgcaagtacgggcagaagcaggtgaaggggagcgagaacccgcgcagctactacaagtgcacgtaccacagctgctccatgaagaagaaggtggagagggccctggccgacggccgcatcacgcagatcgtgtacaagggcgcgcacaaccaccccaagccgctgtccacgcgccgcaactcatccggcggcggtgcggcggaggagctgcaggccggcaacagcagcctctcggccgtagcggcggccggctgtactggaccggagcactccggcgccaccgccgagaactcgtctgtcaccttcggcgacgacgaggcagagaacgggtcgcagcggagcgacggcgacgagcccgacgccaagcgctggaagcaggaggacggcgagaacgagggcagctctgcaggcggcggcggcaagccggtccgcgagccccggctggtggtccagacgatgagcgacatcgacatcctggacgacgggttccggtggcgcaagtacgggcagaaggtggtgaaggggaacccgaacccgcggagctactacaagtgcaccacggcggggtgcccggtgcggaagcacgtggagcgcgcgtcccacgacaagcgcgccgtgatcaccacgtacgagggcaagcacaaccacgacgtgcccgtgggccgcggcgccgccagccgagctgctgctgctgctgcggcggcgggttccggggccttgatggccaccggcggcggccagctcggctatcatcatcagcagcagcagcagccatacaccctggagatgctgagcagcggatc

SEQ ID NO: 163 - DNA, 424 bp, Zea mays
  Peptide Sequence Number=SeqID_43538
atgcagacggacctttccgtctggggtatgtatcagcacgccgatattgtcgttaagtgcgtgatgattgggcttattttggcctccgtagtcacctgggcaatcttcttcagtaagagcgtagagttcttcaatcagaagcgtcgccttaagcgcgagcagcaactgctggctgaagcgcgttccttaaaccaggccaacgatatcgccgctgattttggtagcaaaagcttaagcctgcatttgctcaatgaagcgcagaatgagctggaactgtcagaaggcagcgacgataacgaaggtattaaagaacgtaccagcttccgtctggagcgtcgggtcgccgcagtgggtcgtcaaatgggccgcggtaacggctatctggcaaccatcggcgcgatttctccgttcgttggtctgtttg

SEQ ID NO: 164 - DNA, 697 bp, Zea mays
  Peptide Sequence Number=SeqID_43539
gcaggaggcactcgcgttgtcgtcgctcatcgatgacgagaagaagcttagcgactgtcagtccgacctctaaaagcagtcttacgtggtcgcatgcgctgctgtgtacgacaagcttccgtgaagccgccgcttggacgcggtccacagcagctgcaccgcgttgtccatcgttaagcaggggggcctcatggttgtcgccaacgtcgatgactctcgggttgtggacaccgcatccaacgacgacgtcatcacgccgtctagctcatcgtccacctaaagcccaacctgccacgtaagtcgctacgcatccggtggtgcaacggccaggggtactacctcgctgatgagcccggggtgcacttcgtttggcagcccaaccaagagtcatcggtactcgtcatgtcgcgtgcgttcgatgactactatatcgaggattgtggcgtcatcttggcgccggaggtgacacagaagaggatcgacaatagtgaccagttcgtcatcctcgccacccggcatgtgtggaacatgctctccaatgatgagaccatacaaatcgtggcatatatcgaagagagagagagagagagagagagagagagagagagagagagagagagagagagagagagagatgagaggtgttttggttggagcatgcatgcgcgtcctcttcttttttcacaaacatccgtca

SEQ ID NO: 165 - DNA, 690 bp, Zea mays
  Peptide Sequence Number=SeqID_43540
atggctatcaatggcgtacgcagtacatcaaagatatcccggaaaccaacaccaatatcgctgtcagctactatcgctataccaacgatggctattttagttttaatgaagccaatacccgcaattgggactataacagtcgccaaaaaagtgaaattcaattcaacatcagccagacaatatttgatgggtattccgttagaacgctggttaccgcgtagccgggtttcctatcagatgaccagccagaaagatcgcccaacccaacatgaaatgcgtcttgatggctcactgctggatgatggtcgcctgagctatagcctggaacaaagtctggatgacgataacaaccataacagtagcctgaacgccagttaccgttcaccttatggcaccttcagtgccggatacagctacggtaatgacagcagccaatacaattacggcgttaccggcggcgtggttatccatcctcatggcgtgacgctctcgcaatatctgggcaacgcttttgcgcttatcgatgctaacggagcatctggcgtgaggatacaaaactatccggggattgctaccgatccttttggctatgcagtggttccttatctcacaacttatcaggaaaaccgtctctcggtagatactacgcagctgcccgataacgtcgatcttgaacaaacaacacagttt

SEQ ID NO: 166 - DNA, 195 bp, Zea mays
  Peptide Sequence Number=SeqID_43541
atgtccttctccgacaacgaacagaatgtaacccctgagaaggctgaagggactgctttgatatatagcgttgttgcaaattcaccacacaagagtttcttcaaccactatttgtcacacccggattttggggcaccaagacccgggtgcgaacataatcaccaggtgtgctgggaccaagtctcacacatatga

SEQ ID NO: 167 - DNA, 475 bp, Zea mays
  Peptide Sequence Number=SeqID_43542
atggtcactaaaaaacaatctcgcgttccaggtcgtcccagacgtttcgctcctgagcaggcaatctctgcggcaaaagtgctttttcaccaaaaaggtttcgatgctgtcagtgttgctgaagttactgattatcttggtattaaccccccgagcctctacgcggcttttggcagtaaagctgggttatttagccgtgtactcaatgaatacgtcggtacggaagctattccgcttgccgatattcttcgtgatgatcgtccggtaggcgagtgcctggttgaggtatttaaaagaaagcggcgcgcagatatagccaaaacggcggctgcgctggctgtatggttcttagaaggtattcatagtcatgatccacaagcgcgtgatattgccgttcaatattatcacgccgcagaaacgaccatttatgactacatcgccaggcggcatccacaacgcgcacaatgtgtgactg

SEQ ID NO: 168 - DNA, 333 bp, Zea mays
  Peptide Sequence Number=SeqID_43543
atggataaagaacgcatcattcaggaatttgtgcccggcaaacaggtcacactggcgcatctcatcgcgcatcccggtgaggaactggcgaagaaaatcggcgttccggatgcgggcgcaattggcattatgacgctaactcccggcgaaacggcgatgatcgccggtgatttagcgctgaaagccgctgatgtgcatatcggttttctcgaccgattcagcggtgcattggtgatttatggctcggtgggcgcagtagaagaagcgttatcacaaaccgtcagcggtttaggtcgcttattaaattatacgctttgtgaaatgaccaaaagt

SEQ ID NO: 169 - DNA, 309 bp, Zea mays
  Peptide Sequence Number=SeqID_43544
atggccaccacggctgcggcgacgatcgttggagcgctgccgactgccaggggacgctgtggagccttctggttcccctggcgtggcgtggaggagggcacaggcaggccgaacgcggctggctattatggcgtcgtgacgagagccgtgggcggcgacggaggtcgggcgtcgatctccatctcttctagcaggagatgggccacggagcagggtaaggaccatctggcgatcaccgattggatcgccgaattcggcgagagacgctgccattgtctcaagacgacgacaaaaatcggtgatcgatag

SEQ ID NO: 170 - DNA, 391 bp, Zea mays
  Peptide Sequence Number=SeqID_43545
catcggtatctccgctctggttatctgcatcgtcgtctgcctgtcatggggtgttaatcattaccgtgataacgccatcgcctacaaagaacagcgcgacaaaaatgccagagaactgaagctggcgaacgcggcaattactgagatgcagatgcgtcagcgtgatgttgctgcgctcgatgcaaaatacacgaaggagttagctgatgcgaaagctgaaaatgatgctctgcgtgatgatgttgccgctggtcgtcgtcggttgcacatcaaagcagtctgtcagtcagtgcgtgaagccaccacggcctccggcgtggataatgcagcctcccccccgacctggcagacaccgctgaacgggattatttcaccctcagagagaggctga

SEQ ID NO: 171 - DNA, 500 bp, Zea mays
  Peptide Sequence Number=SeqID_43546
cgtggcgtgaaaaagtgatcgaacgtccggtggtacataaagattacgatgaacagccgcgcgggccgtttattgtctgtgtggatacttccggctcaatgggcggctttaatgaacagtgtgcgaaagcgttctgcctggccttgatgcgcattgctctcgcagaaaaccggcgctgctatattatgctattttccaccgagatcgtccgttatgagctttcaggcccacaaggcatcgaacaagcaatccgttttttaagccagcagtttcgtggcggcaccgatcttgccagttgttttcgcgccattatggaacgcttgcaaagcagggaatggtttgatgccgatgcggtggtgatttctgattttatcgctcagcggttgcctgacgacgtgacgagtaaagtgaaagagctgcagcgggtacatcagcatcgctttcatgccgtggcgatgtcggcacacggcaaacccggcatcatgcgcattttcgatcat

SEQ ID NO: 172 - DNA, 501 bp, Zea mays
  Peptide Sequence Number=SeqID_43547
cctgaattacttgggcagtactttaattccggtgtcgtttatttagacttaaaaaaatgggctgacgcaaaactaacagaaaaagcgttgtctattcttatgagtaaagataatgtttataaataccctgatcaggatgttatgaatgtcttactgaaagggatgacattatttttgcctcgtgagtacaatacaatttatacaattaaaagtgaattaaaagacaaaacacatcaaaactataaaaagctgattacagaaagtactcttcttattcattatacaggtgcaactaaaccgtggcacaaatgggcaatttatccatcggtaaaatactataaaatagctttagaaaattccccctggaaagatgactctccacgagatgcgaaatcaattattgaatttaaaaaaagatataaacatcttttagtgcaacatcattatatctcaggaattatagcaggagtctgttatctttgccgaaaatattaccgtaaa

SEQ ID NO: 173 - DNA, 453 bp, Zea mays
  Peptide Sequence Number=SeqID_43548
gagcgtcggcgagtctagactggtcggatcacgcaaagaccggcgttctcgagcggcagacaccaaatcggatccctcctaaccatttcccctcaatcaatttcaccaatggagcggcgtaaccgtcgcacaggaaggacagagaaagcgcggatctgggaagtgacggacagaacggtcaggacctggattggggaggcggttgccgccgctgctgctgacggtgtgacgttctctgttccggtcacaccacatacgttccgccattcctatgcgatgcacatgctgtatgccggtataccgctgaaagttctgcaaagcctgatgggacataagtccatcagttcaacggaagtctacacgaaggtttttgcgctggatgtggctgcccggcaccgggtgcagtttgcgatgccggagtctgatgcggttgcgatgctgaaacaattatcc

SEQ ID NO: 174 - DNA, 717 bp, Zea mays
  Peptide Sequence Number=SeqID_43549
atggaaccgcgctcccccgtcaactggtccatcaacttcggcagccaccacagaggcagaggcggcgaccagcaagagtggcatgcgctcctcaggccagcctcttctcaaccaaccacagcttggggcatgaagctatataataaaaattaccttttgctttctacttacatgatatctattaaatacaagaatgtgtactacaatttcatgccaggacaagctcagctcctccaaacttggatgaacaaaaacgtaatcagattgttaccgcaggccatacacaaaacggggacagataaaagaaaaccacatttgcttttgattctgaattggaagcattacacaacttcggagatcaaggccaaggtagccacatttggatttggaggaccaactgaggtactcctggtggcaacgtacgccttcaagttgtatgcttctgcttgcttgaacatcaggcgtattggtctggtaaagaaaggcgaaaagcttttgaatgatgattccttccatttgcacacaataggtagtcaaattgttgtgaagattgtaaaaaacaagcatgcccaacccttcaagacttcacaatttgagcttgaatttggaaaatggatatgccacagtccagagctttttgaacagaatttctggagcagttgttcctgtaaaacaatatcttgggtcctgaagccaccaccatttggatcgacatga

SEQ ID NO: 175 - DNA, 127 bp, Zea mays
  Peptide Sequence Number=SeqID_43550
atgacgatgaggggagcggcagttgtggtgccgaggccggtgggaacgggggatgggggcgtgatgaattgtccaacacaagtgcctaagtgtaaaaaggtggacaaagtacaaatcaagaatcaag

SEQ ID NO: 176 - DNA, 320 bp, Zea mays
  Peptide Sequence Number=SeqID_43551
agcatctgcaacatgaagcacaagaacgtctgcaaacgatggtcagccacttcaccatcgatccttcccgcattaaacaacatgtccgttttggtagcgtgcgggatgaagtcaatgagttggcagaagaactgggggctgatgttgtagttattggttctcgcaacccatcgatttcgacccatctgttaggttctaacgcctcgagcgtgatccgccacgccaatctgccggtgctggttttttggtgcgaatcaggtagtcaaaagcactcagagagggcctttggcaccttcgccagtggcgatgatgatctgctt

SEQ ID NO: 177 - DNA, 345 bp, Zea mays
  Peptide Sequence Number=SeqID_43552
ggtaacccgtgggatccgaagcgtcagttgctgaaatgggacggcactaagtggaccggctgggatattccggactacagcgcagcgcctccgggtagcggcgtcgggccgtttatcatgcagcaggaaggcatggggcgtctgtttgccctcgataagatggcggaaggtccgttcccggaacactacgagccgtttgaaacgccgctgggaactaacccgctgcatccaaacccggaacagtttgtggaaatcagcgaaacgctggcggcggcgaaaggcattaataatggcgatcgtgtcactgtctccagcaagcgtggctttatccgcgcggtggctgtg

SEQ ID NO: 178 - DNA, 612 bp, Zea mays
  Peptide Sequence Number=SeqID_43553
atgaagaagcttgaggaaggagaaaccgctgaaagggtcaaactccttgagaaagatgttcttaaagcaataagtgaagcaatcaacatgagacaagaaaaaggtaatgattcaattagtcatgttatttgcactaataatctctctatgtcatccaaaagcaaaaagagaagaggaaaaaggaggtgcttcaagtgcaagagattaggtcacctcattgcttcttgtccatacaaagacaaggacgaagggataaggagatgttttgaatgcaatgaaaaggaccacatgatcacctcatgtccggtcataaagaatcaaggacgtgcaccctccaagatgaccctcaccaaggaaaatgataaacaacaagcgtcatgtcgggttgagcgacgtttctgcaacatgtgtggtgagcatggtcatccacctgagtcgcaaggtggaaaaggaaagatgagcaagaaatggagcaatcaggacctgggtacctccatgtcccttgacatcatcctatgttcttgctggaatatggttttggtgtttgatgtcaaagggggagaaatttgtgcattaaagcttatctcaactgagaggaaaagctatccctaa

SEQ ID NO: 179 - DNA, 450 bp, Zea mays
  Peptide Sequence Number=SeqID_43554
agaagtgaacttaaactaaccgaatcatctgacaatatcagagctaattatgaaaatacccactactacggatattccgcagagaatggcacatccgttgctgatttatcgcgctttgagagaggtaatcatcaacctgcgggcgtgtatcgggtggatctctggcgtaatgatgagttcattggttcgcaggatatcgtatttgaatcgacaacagaaaatacaggtgataaatcagcgatgcgcctgaacatcactattcctcagatagcgttgttgagtagcgctcacggttacattccgcctgaagagtgggatgaagcgggattaatattggcccgtggcgtttacgcaacaatggttcctggaactattttcgcggaaatggatatcattcagaacagtggaataatattggcacctgggtacagcgcgccattattccgctga

SEQ ID NO: 180 - DNA, 360 bp, Zea mays
  Peptide Sequence Number=SeqID_43555
atgagattgatggttcttggtattgactctggtaatgtcgattgtaaaggacataaatgtaattttacacaggctgcacccaacagtaccctgacactgttcacggaatcttgtaatcgctatcacattgcgctggaattattgctttctgccaagacaaaggttgtcatcattgcaaccactgctcaggagaagatgaagccgtggaaggagactttcaagagttccaagattacgacgagttctaggcgtgggttagcggcaacccccagtcggctgcctatgaaggccgcgtttatctatgtttcattttcgcactttgattattgtaaagactatgtggatgtctcagacgtatga

SEQ ID NO: 181 - DNA, 408 bp, Zea mays
  Peptide Sequence Number=SeqID_43556
atgggcaatgcgcgcaccgcttacgccgaactggcgaaacaatttggcgtcagtccggggacgattcacgttcgagtagagaaaatgaagcaggcggggatcattaccggggcgcgtattgatgtcagcccgaagcagctcggttatgacgtaggctgctttatcggcattatattaaagagcgccaaagactacccttccgcgctggcaaagctggaaagccttgatgaagtcactgaagcctattacacaaccggccactacagcatctttataaaagtgatgtgccgttcgatcgacgctctccagcatgtacttatcaacaagatccaaacaattgatgaaattcagtccaccgagacattgatcgtcctgcaaaacccgatcatgcgtaccatcaagccctga

SEQ ID NO: 182 - DNA, 370 bp, Zea mays
  Peptide Sequence Number=SeqID_43557
atgggcgtggaagccattaacttcctgctgatgatggttagtggcctgctggcactggcgttggtcaaacgcaactggcgtccgttggtgggcgatattccgcaatcgctgaaatgggacgaaggccagcttcttaatacgctgaagatttactacaacgcaacggcaccgctgatgggcaaatcatcgttgattatctggccggagtcggcgataaccgatctggaaattaatcagcaaccgttcctcaaagcactggacggtgagttgcgtgataaaggtagctcgctggtaaccgggattgtcgacgcgcgtctcaataagcagaaccgctacgatacctacaacaccatcatcacgctgggtaaag

SEQ ID NO: 183 - DNA, 399 bp, Zea mays
  Peptide Sequence Number=SeqID_43558
atggacagctttcagatatcctgtttattagcctcaacgatcggcttaatgatatttcagcggtcctggcaggatgcgagcgcattgcctatacgccaattccctttggcctacaccctgattttgcatcgtaccgtttatctgttttgtatcatgctgccgttcgcgctggtcgtggacctgcattacatgacgccttttatctctgtgctgatttcctacacttttatttcgctggattgtctggcggaagaactggaagatccgttcggtactgaaaacaatgatttaccactggatgccatctgcaacgctattgaaattgacctgttacagatgaacgatgaagccgaaattccagcaaaaattcttcccgatcgtcattaccagctgacgtga

SEQ ID NO: 184 - DNA, 408 bp, Zea mays
  Peptide Sequence Number=SeqID_43559
atggagaagaaaatgccgtggatatcgggcttgaccaaggggactaaccacgtcggggcagcgctggtcgaccggcaagagcagagcgccggctgcctattcgcgcgagggagcaggggccccgacgcctgggcccacgggcgagccgccgcgcggctgccggctgcttatcgcgtcgcgctgggcaagctgtgctggctgccatgcacgctggccgccgcgctggctggctgccgcgctggctgcgccgagctcgcgcgcacccgcgccgagacgccgcgcccggggacgtcgagcctggccacaccgcgccgccggccgaggaaaacagagggagcacgcaggggaggcagccatggattgaagacgccctgccgcatgggacatggccacggcacagcagcctga

SEQ ID NO: 185 - DNA, 297 bp, Zea mays
  Peptide Sequence Number=SeqID_43560
atgggctttggcgcttgcaaaacttacgacctggaagtatggatcccggcacagaacacctaccgtgagatctcttcctgctccaacgtttgggatttccaggcacgtcgtatgcaggcacgttgccgcagcaagtcggacaagaaaacccgtctggttcataccctgaacggttctggtctggctgttggtcgtacgctggttgcagtaatggaaaactatcagcaggctgatggtcgtattgaagtaccagaagttctgcgtccgtatatgaacggactggaatatattggctaa

SEQ ID NO: 186 - DNA, 572 bp, Zea mays
  Peptide Sequence Number=SeqID_43561
atgcaagagcaataccgcccggaagagatagaatccaaagtacagcttcattgggatgagaagcgcacatttgaagtaaccgaagacgagagcaaagagaagtattactgcctgtctatgcttccctatccttctggtcgactacacatgggccacgtacgtaactacaccatcggtgacgtgatcgcccgctaccagcgtatgctgggcaaaaacgtcctgcagccgatcggctgggacgcgtttggtctgcctgcggaaggcgcggcggtgaaaaacaacaccgctccggcaccgtggacgtacgacaacatcgcgtatatgaaaaaccagctcaaaatgctgggctttggttatgactggagccgcgagctggcaacctgtacgccggaatactaccgttgggaacagaaattcttcaccgagctgtataaaaaaggcctggtatataagaagacttctgcggtcaactggtgcccgaacgaccagaccgtactggcgaacgaacaagttatcgacggctgctgctggcgctgcgataccaaagttgaacgtaaagagatcccgcagtg

SEQ ID NO: 187 - DNA, 285 bp, Zea mays
  Peptide Sequence Number=SeqID_43562
atgttgatgattacctcttttgctaacccccgcgtggcgcaggcgtttgttgattacatggcgacgcagggtgttatcctcacgattcaacaacataaccaaagcgatgtctggctggcggatgagtcccaggccgagcgcgtacgggcggagctggcgcgttttctcgaaaacccggcagatccgcgttatctggcggcgagctggcaggcaggccataccggcagtggcctgcattatcgccgttatcctttctttgccgccttgcgtgaacgcgcaggtccg

SEQ ID NO: 188 - DNA, 189 bp, Zea mays
  Peptide Sequence Number=SeqID_43563
atgaggttagcttccagaatcatcaagccggaatgcagcatacagaaccaggtaaagatcagcgccgccattgaccagaaaaaccacgccccggacatgaccactggcagagaaaacatccctgcgccaataatggtgccgccgataatcaccacgccgccaagcagcgacggtgacgtttgggtggtg

SEQ ID NO: 189 - DNA, 356 bp, Zea mays
  Peptide Sequence Number=SeqID_43564
gcggcgtgttgtcgttaatgttctacaatgcgcatggtttgttgatgcataacatggtcgccgggaattttgattacgtgcaggcgggaatgccgaaaaagaaaaaacggacgctttcgccagattatccacgcgacccggcgcaggtttatctgtggctggaagaagctggttggcaaattatgggtaagacaggcgttcgcgtgtttcatgattatctgcgcgagaaacaccagcagcgcgactgctatgaagcattacttgaattagaaacgcgttattgccgtcaggaaccgtatattaccctggggcgttatattcatgtcaccgcgcgcaaaccgcagagcaaggataaa

SEQ ID NO: 190 - DNA, 306 bp, Zea mays
  Peptide Sequence Number=SeqID_43565
gcatggtttcctggctggatatggctcgtattgtgcgtgggcaaacccctgagtctgaagcgcaaagagtttattgaggcggcacaagttggcggtgtatcgacatcgggcattgttattcgccacattgtgccgaatgtactcggtgtggtggtggtctacgcatcacttctggtgcccagcatgatcctctttgaatctttccttagcttcctggggttggcgggattcctcgtggtgacgctgttttgtttcaactttatcggcgatggcttgcgtgatgccctcgacccgaaagatcgttaa

SEQ ID NO: 191 - DNA, 308 bp, Zea mays
  Peptide Sequence Number=SeqID_43566
atgctggcggcagtcacgaccggttcaggcaatgcgccgttttatgcgtttgttgagatgatcccgaaactggcgcactcttccggcattaacccggcgtatttgactatcccgatgctgcaggcgtcaaaccttggccgtaccctttcgcccgtttctggcgtagtcgttgcggttgccgggatggcgaagatctcgccgtttgaagtcgtaaaacgcacctcggtaccggtgcttgttggtttggtgattgttatcgttgctacagagctgatggtgccaggaacggcagcagcggtcacaggcaa

SEQ ID NO: 192 - DNA, 410 bp, Zea mays
  Peptide Sequence Number=SeqID_43567
atggaagtagatattaaaatggttgttgatgaggatgatgatgagaccctggatgacttaattgatgttttggacccaaagctcggcgccataagctatggcgccgagccaacacggttcggcgccacatgtcttggcgctgagcttgctgacgcagcagccgacgtggcatcctatttaagccaaaccgtcgtcttctttcttcttttttctccttgcccgcccttgctttcccatgcctcctcacccgcccctgctttctccgccgccgcgctcggccactcaacgccagccgccgcgactccgaccaccacgtccgcccgcgccactccgcccaccgctcactcgacttcggccgccgcctgctctcctccgcctgccactctccctccggccttccagctcacaag

SEQ ID NO: 193 - DNA, 489 bp, Zea mays
  Peptide Sequence Number=SeqID_43568
atgttctgccagcaaaccggttttggtgatgggcaaatttaccgtcgcattctcgatctcatctgggaaacgctgaccgttaaagacgcaaaagtaaatttcgacagccaactggagaaatttgaagaagcgattccttcagccgacgatttcgatctgtacggcgtttatccggcaatcgatgcctgcgtggcgttaagtgaactggtccattcgcgtttgagtggtgaaacgctcgaacacgcggtggaagtgagtaagacctccatcacgaccgttgcgatgctggaaatgactcaggctggtcgcgaaatgagcgatgaagagcttaaagaaaacccagctgtagagcaagaatgggacattcagtgggaaatattccgacttttagctgagtgcgaagaacgcgatatcgagctgataaaaggccttagggcagacctgcgtgaggcgggtgagagcaatattggtataatttttcagcaataa

SEQ ID NO: 194 - DNA, 150 bp, Zea mays
  Peptide Sequence Number=SeqID_43569
atggttgttctcacgctccagctcttcgcgctgatgctgggcattttgaacttcctgcgacatttctcaaacacttctaatgacattgtcatacctctcctgaattgcaaggcgttgatggataaaaatcctcgtcccgattaccggtga

SEQ ID NO: 195 - DNA, 1326 bp, Zea mays
  Peptide Sequence Number=SeqID_43570
atgcagggttcttgcctgaccgccatcgcagcaaaatcaaccaaggacctccctacactgaccactcccctactgcccttgcccctttcgggacgcgtgggacccagcccccgtgtcgtaggggaggaccttggagcgtgttggagaagactcagcccgcgatggctgaggacgcaagtggggagagtcgcctttaaaaggagggtgacccccttgaaaggcgaccatgtcttcgcgctcccttatgcatcgcgtctttccaccttccgagccccggatggggaacacccgcaatccttccgtcttgtcgttggaggaacgcaacttcgtggaagttggtacctttcagccatcgttcggcttcaaggattttcatcaggcagcccggcccgcatcccctcgccggtggtcacccaagacggtgaccaccagctcctgggtggggagaagcaagccgggctgcggtctctgcccctccctcagcttcaaggatgttcatcatcagtgctggggaggggagtgcgccgagttggggtcggtctccgcgcgggcagtggcccgctccttccctcagcgatcgaggggaagggcgttcgccgttcgtggcgctggcagctgtcgcatgtctggctctctagtctaggtggcttcggcgctgcttccggtgccaccttccgtcgcggcagccggaagagcatccgccctgaggtcatcgctgctgctgttcggcccctcagagcagaagtcgtcgtcgtcgtcgttggaacgggcggcggcgagccacccgtcggccttctattgctccgcatgccctccaatcactcgcctgtcggctatctgaaccgcttcaccaagcgtgagtcgcctcgtgtgaaggtgacgagtgaggtatccgtatcccggagggaccctcggccgctcttcgatgagccgaagccagaggtagcgatgtcagcacggacagaggcggagttggctcgaaaagaagacttggtcagccggagcctggccgggccgtccactggcgggaccgacgccggagtcgagttgccgaggccacgagcctggctgatgtcctcgggggacagttggatgaggctttggggtggccggccgagccgtctgctcgagccggattcctggagaagaccctggcggcgatggcccgggcgtggtgctgatgtcgtccttcggagtggagatcctccgaccgcgtcgctgtccgaggctaggccggaccttgccaaaggtgtagttgacgccgagggtgctgctgctcccttcaactgtcaagatccgagcctgcaggatcgagttatcttgtag

SEQ ID NO: 196 - DNA, 505 bp, Zea mays
  Peptide Sequence Number=SeqID_43571
atgaaaacttgcataacaaagggaattgtgaccgtaagtttaacggcaatattactcagctgctcatccgcatgggcggcaggtaaaggcgggattggacttgcagcaacacgtcttgtttattcagaaggtgaagagcaaatttcactgggtgtacgtaacaccagtccggatgttccttatcttattcagtcatgggtgatgaccccagataataaaaaatcagcagactttattattacaccaccgctatttgtgctgaatccggcaaatgagaatctgttacgcattatgtacattggagcgccgttggcgaaagacagagaaacccttttcttcactagcgtacgggcagtcccttcaacaacgaagcggaaagagggaaataccctgaagattgccacacaaagcgtcatcaaacttttctggcgaccaaaaggtttagcgtatcccttaggcgaggctccggcgaaactgcgttgcacttcgtcagctgacatggtta

SEQ ID NO: 197 - DNA, 261 bp, Zea mays
  Peptide Sequence Number=SeqID_43572
atgccggtttacgatgcattgtatgacggcggcgtggagcacttgctatgccgacatgagcagggtgcggcaatggcggctatcggttatgctcgtgctaccggcaaaactggctcgctggaagagttgccgcgcatcatggctgaagcattcgacgttgcctgctcaggtcgtcctggtccggttctggtcgatatcccaaaagatatccagttagccagcggtgacctggaaccgtggttcaccaccgttgaaaacgaa

SEQ ID NO: 198 - DNA, 729 bp, Zea mays
  Peptide Sequence Number=SeqID_43573
ggctggcgtgggcagtcgaacaggcggcggcatcacaagtaatgctggcggtggagattatggataccgcgtttatgaactccatcagcaaatggaaaaaatgggacgagatgctcgcctcaccgtggttcaccgtctacccggacgtcggcaacctcagcgcctggggcaatgatgttcccgccgaactgaaactgggcattgaccgtatcgccgcgatccacctgaaagacacccagccagtcaccgggcaaagtcccggacagttccgcgacgtgccgtttggcgaaggctgcgtcgatttcgttggcatcttcaaaacgctgcataaactgaactatcgcggaggctggatttatatgttagagcaactgaaagccgacgtgctggcggcgaatctggcgcttcccgctcaccatctggtgacgttcacctggggcaatgtcagcgcggtagacgaaacgcggcaatggatggtaatcaaaccttccggcgtcgagtacgacgtgatgaccgccgacgatatggtggtggttgagatagccagcggtaaggtggtggaaggcagcaaaaaaccctcttccgatacaccaacgcatctggcgctctaccgtcgctatgccgaaattggcggtattgtgcatacccactcgcgccacgccaccatctggtcacaggccgggctggatctccccgcctggggcaccacccacgccgattatttttacg

SEQ ID NO: 199 - DNA, 416 bp, Zea mays
  Peptide Sequence Number=SeqID_43574
atgtagcgctaataagaagaaaagatcaactaaaccatcaaagagcatgggatatattatctgatacttatgaagatatgaagagattaaatttaggtgggactgatcaatttttccattgtatggcattttgtcgagtgtctaaattaaatgacgctggtgttagccgatcggcgaaagggctgggttatgaaaaagagattagagattacgggttaaatctgttcggtatgtacggcagaaaagtaaagctatcccattctgaaatgattgaagataataaaaaagacttggctgtaaatgaccatgggttgacatgtccatcaacaacagattgctcagatagatgtagtgattatattaatccagagcataaaaaaacgataaaggctttacaagatgctggctatctcaag

SEQ ID NO: 200 - DNA, 459 bp, Zea mays
  Peptide Sequence Number=SeqID_43575
atgggcaagaacaacaagcgcaagcgtgagccgactcctccatcggaggagtttggtgactcggaatactcggaggaggagttctcctccgagcccgaggggtctctggctcccgcctctcccccggcgtcgtccgatgactcggacgactcccaggggatagccgcggaggtctggacatacatccgggccgtcgagcgcgccgggctcgaaggctcggatgagtcggagtactcctcggatgaggaggactcggacggcggcgacgagggtgaagacgacgacgacgacgacggcgacggcagtggcaggggcggcggcgacggcagcagggacagcaccaagggcgacagcagcaggggcagcaccaagggcagcagcagcaggggcagcaccaagggcagcagcaggggcagcaccaagggcggcggcggcggcaggggcagggccagtggctag

SEQ ID NO: 201 - DNA, 159 bp, Zea mays
  Peptide Sequence Number=SeqID_43576
atggcgcccaagaggaagaccgcgaactcgtctgctgcagtgatccccgccatcgaccccaacagccagttacccttcgcagaacattcagccgctgaaggacagggcctatccggcatatctttaccgagggctggccgactcaacccgagttactaa

SEQ ID NO: 202 - DNA, 1191 bp, Zea mays
  Peptide Sequence Number=SeqID_43577
atgtcttcgtgctcccttatgcatcgtgtctttccaccttccgagcccccggatgggggacacccgcaatccttccgcctcgtcgttggaggaacgcaactccgtgggagttggtacctttcagccatcgttcggcttcaaggattttcatcagtcagcccgactgcatcccctcgccggtggtcacccaagacggtgaccaccagcccctgggtggggagaagcaagccgggctgcgatcttggtcccaccctcagcttcaaggatgttcatcatcctcgctggggtggaggccgggctgagccagagctctacctctgcgcgggttcgtgggtcagcctctccctcagcgttcgacaacgcggggctggtcgacggcgggcgtcgtcagcttcagcgcgttgggttcgccggcttggctcccagagccccctcctgccgcaagggcggttatcgcgccgtgcgcacgggaggaccgcccaagacgtcgcgcgctgccagggcggtgttcgtgttttgaggcggccctacctttgcaccggtacggcgcctccgcgcggaggtcggtgccccgctcgtctgggaggatccgagtggggatctgctggtgggctgacggcccctgtcgtcggtgccaaggcggaggcggctcgagaagtccccgtcgccgacgggatcaccgccaccatccgcgcttcgggcctccggctctttgtacttgtcctcgcccctcgagcgtcggcgtgggcgagggcagggttgcagcggcgaacccctcggccgctcttcgatgagccgaagccagtggtagcagtgtcagcacggacagaggcagagttggctcgaaaagaagacttggtcggccggagcctggccgggtcgtccgttagcgggaccgacgccggagttgaactgccgaggcctcgggctgggctgatgtcttcgggggacagctggctgaggcctcggggtgaccagccgagccacctgctcgagccagattcttggaggagaccctggcggcgatggcccgggcgagatgatgacgtcgtccttcagagtggagatcctcggaccgcgtcgccgtccgaggctaggtcggacctcgtcgaaggtgtagtcgacgctgagggtgctgctgctcccttcagccatcaagatccgagcctacgggatcggattatcttgtag

SEQ ID NO: 203 - DNA, 432 bp, Zea mays
  Peptide Sequence Number=SeqID_43578
atggctaggagcgccatgggtcataggatgttgctgaatgacctgcacataatcttgatagtgaaagttatccaagaaatcaaggacacgctcaaccttgccattttgctgcgaggtgtaggggcacgacatgcggagggcaacaccatgcgtgagaaagaaggtgcgagcggtggaattgtcaaactcacgaccgttgtcgcattgtacacttttgatggtggtgccgaattgggtggcaacaaaagcgaaaaattgtgcaatagtggagaatgtatcggatttaagacggagaggaaaagtccacaagaggtgagagcagtcatcaagaatagcaagctcgagattgcgaaagggaaaaagggagacggacatggcgaccgagttgacaggcattacagaggtcgacatgtgagtcattattacaggtaa

SEQ ID NO: 204 - DNA, 654 bp, Zea mays
  Peptide Sequence Number=SeqID_43579
atgtcttcgcgctcccttatgcatcgtgtctttccaccttccaagcccccggatgggggatacccgccgtctttccgcctcatcgttggaggaacgcaactccgtgggagttggtacctttcagccatcgttcggcttcaaggattttcatcatgcagcccggtcgcaccccccccccccccgccggcggtcacccaagatggtgacctccagtttgatggtgggggaaagcgagccgggctgcggcctctacccctccctcagcctcaaggattttcatcaccagggatggggaggggagtgtgccgagatagggtcggcccccgcgtgggcggtggcccgctccttccctcagtgatcggggggaagggcggttgtcgtccgtggcgccgacagctgcagcgtgcctggctctcggacccgagtggcttcggagccgctctcggcgccggcttccgccacggcagctggaagaggttcttccgccgacgagatagccagggccgcccacggaccgacctccaactctacggccttctgcccgtccttgctgtggcagaaccacccgaattattccagcttaagtgcctaagtcacgcctcaggggccgtaacacacttaaatcggaataacccgtcagtccttcagatctag

SEQ ID NO: 205 - DNA, 726 bp, Zea mays
  Peptide Sequence Number=SeqID_43580
atggtgagagaacgaagaacacaaacaaacacaatgagcaagaacacaagagacacaagatttatcccgaggttcggtcacaccaccaaggtgccctacttcctcgttgaggcgcccacaaagagccgggtctctttcaaccctaatcctccctttgccgaccacaaagttcaagcccacacaataatctttgctcaaacgagcggtaatatggtcaagccaattcacgattcctcatatcttattcactttggcttgaccaatcctcttaatcacttcaacctctaccagtaccatgcagatatatgccacgatttgcatggtctcatcattgaagagcacgtgtcacacctgccagtagaagttccatcgtacattgtcagtcatcagaacaacccgagagtcgccggcgttggcgacgaccatgaggtccccctatttgaagatggacaacgcggtgcagccactctggaccgtgtccaagcggcggctgcaccggagcttgccgaacacagcgacgcatgcggtcacgtagtactgcttccagaggtcgaactggcagtcgccaagcttcttttcgtcgtcgatgagcgacgccaatgcgagcgcctcctgccagtggtgtttgttcggggtttccaagtaagaaacatggattcatttttggcgttggtttatgaaaacgactcacaagtaagagccatggaaaaatattacggaaaataa

SEQ ID NO: 206 - DNA, 519 bp, Zea mays
  Peptide Sequence Number=SeqID_43581
atggagcctggcggagggacagctgtcggagcggttgagtccttgctgacgtcctcttgcttccgtaagggggttgagagccgccgtcgtcacagagtatgcagggcgccatcattgcctatctggcagagcgagccagatgggacgccggtcttgttccctgcggcccgagtcagctcggggttgggcgatgtggaagctcctccgaagccgaggtcgagtctgtcttccgtggccgaggtcgagtccgagcccctgggtcgggtgaggcggaggctgccggctgaggccagggcggagtccgagccctggggtcgggcggagcggagttcgccgtcttctggggctgagcccaagtccgagcccttggtcgggcggagcggagttcgccatcttctgggacttagcccgagtccgagccctgggtcgggcggagcggagttcgccgtcttccgggacttagcccgagtccgagccctgggtcgggcggagcggagttcgccgtcttctgggacttag

SEQ ID NO: 207 - DNA, 528 bp, Zea mays
  Peptide Sequence Number=SeqID_43582
atggctgaaaggtaccaactcccacggagttgcgttcctccaacgatgaggcggaaagacggcgggtatcccccatccgggggcttggaaggtggaaagacacgatgcataagggagcgcgaagacatggtcgccttccaaagggggacaggcggcgcctctggcaggagaagcgggcgatgcttcgcctttgccataatgaccgcgtcaaaaaagggaccgggaaagggggataccccgaaaaggatccttccctgtgaaggaaccaggctccgagcctccctactgatcagaggttcgaaggctggccccccggaagggttcgacagccgcctcagattgcgtgggctctacacccactactggtcagagaggctcggggctgctctcgcaaacccggctccggccgaaccgttgatagcgtcaacataccagcccgagaacttgggacccgaccgtacacccgggctatggccagctcgcatgagggaacgaccagaacagccgaagcattacgcgaggcattaa

SEQ ID NO: 208 - DNA, 129 bp, Zea mays
  Peptide Sequence Number=SeqID_43583
atggcgggcggaaataagctcgccggagctaaggaaaggtggctggccggtgaggagatatggagccaggaaatctggtctgtctccctacccaaacccgaggcaaatccaaggttttgtcatgtctag

SEQ ID NO: 209 - DNA, 519 bp, Zea mays
  Peptide Sequence Number=SeqID_43584
atggagcctggcggagggacaactgtcggagcgattgagtccttgctgacgtcctcttgcttccgtaagggggctgagagccgccgtcgtcatagagtatgcggggcgccatcattgcctatctggcggagcgagccagatgggacgccggtcttgttccctgcggcccgagtcagctcggggttgggcgatgtggaagctcctccgaagccgaggtcgagtctgtcttccgtggccgaggtcgattccgagcccctgggtcgggcgaggcggaggctgtcggctgaggccagggcggagtccgagccctggggtcgggcggagcggagttcgctgtcttctggggctaagcccaagtccgagccctgggtcgggtggagcggagttcaccgtcttccgggacttagcccgagtccgagccctgggtcgggcggagcggagttcgccgtcttccgggacttagcccgagtccgagccctgggtcgggcggagcggagttcgccgtcttccgggacttag

SEQ ID NO: 210 - DNA, 867 bp, Zea mays
  Peptide Sequence Number=SeqID_43585
atggcggcgctggatgccggcctccctgccgaggccgtgcgccatttcaccaagatcctggaggcgcggcgcggcgtgctgccgcacccgttcgccgccgcgttccaggccggtggccgtccggccgacgccatcgcggactgcaaccgctcgctggctctggaccctgcctacatcccgacgctccatgcccgcgccgacctcctccagtccgtgggcgcggtcgccgactacctccgtgacctcgaccacctgaagctcctgcagggcggcgtgcgcggactaccagttcctcccgatcttgggtttgaggaggccccgagccgagcgtcaggcatggagcactgctatttgaggcagccgatctcgagggccgaggcagtgcccgagaggaggtccaggttgtggcagatggacgcgctgccgctgccgccccgggcggaggtcctctgcccccagcctcgccgcgccgcccggatccccttcgccgtttcagtaaacaaggccatccccaggtcgaattgtgcgcttccgccgtacagaccagcctccgcctgcgacatactcgatgatcttatcctcagcaagaatgacttctcagatggagcagattcgagcagcggccaggcgggttttttatgcggctcgcctccagtgcgcgctaacaaccctgtcgtccatgacccgcagttcggtaaaagagcgctgccatccatgtctcccctagggagcagctcccacgtcaagcttaaggttgaggcaggctcgccatcctgcggcgttagcagcagcccgaaagtgaggatcgaaggctttgcctgtggcaactcggagacccactacgcagttacgccgctccttgtgtga

SEQ ID NO: 211 - DNA, 258 bp, Zea mays
  Peptide Sequence Number=SeqID_43586
atggatcctccgtcggaaccagcagacattgaatcaggagttggtgatgttacgtcacctgaacgaggcagaccaaccatgaaggagaaatatgacaaggcagattggtcatccatgaatactagaactttttgtgaaatatgtgttgaagaggttgaagctgggactgtgattgcaagtgatgaatactggaagaaaaatacaaagaggcatcctgattggaagaaactgaaatatggctgtcacacccggttttag

SEQ ID NO: 212 - DNA, 109 bp, Zea mays
  Peptide Sequence Number=SeqID_43587
acattggggtccaggtggttatgagattgatggttcgggttatgattatggcgaagatgaagctgtggaaggagacttccaggagttccaagactacgacgagttctag

SEQ ID NO: 213 - DNA, 159 bp, Zea mays
  Peptide Sequence Number=SeqID_43588
atgccccttataaaagtttacaacaatgactcagacccttatggactaaaagacaacgagcagtccgatgttcctgagtgtgttgttggagacctccctgagcaacaacctggtgaaggcaagtgtcctctgacctattatgtcctacatactctataa

SEQ ID NO: 214 - DNA, 447 bp, Zea mays
  Peptide Sequence Number=SeqID_43589
atggcccgtatcaggtgcactacacgtaagtatgtgatcccctttttgccttcttgcctggcggagcatccactgcgtcgcacggtgccaggtcagtccagtcacctggagagactacatcgtcacctgcatgaggagcaggagcgccgatgccaggagcagaaggaggagcagcaagactcttccccctcgcctcaacgggaggtggagtctgagaggccgccttcccctgcacctcagccagagatgccccttgcaccaccacaaggcaccccggctgctggaggagaccctgacggagacgacgacgacgccggtggcagttcgagccacggcacggagctctcggaggagccggaaccggagggatggatcgctagacccatcactcgcgacgccgctcgcgggtgtcacttccacgatgctctcgacaccctgctgcattag

SEQ ID NO: 215 - DNA, 465 bp, Zea mays
  Peptide Sequence Number=SeqID_43590
atgggcaagaacaacaagcgcaagcgtgagccgactcctccatcggaggagtttggtgattcggaatactcagaggaggagttctcctctgagtctgaggggtctccggctcccgtctctcccccggcgtcgtccgatgactcggacgactcccaggggatagccgcggaggtctggacgtacatccgggccgtcgagcgcgccgggctcgaaggctcggatgagtcggagtactcctcggatgaggaggactcggacggcggcgacgagggtgaagacgacgacgacgacgacgacgacgacgacgacgacgacggcgacggtgacggcagcggcagtggcaggggcggcggcgacggcagcagggacagcaccaagggcgacagcagcaggggtagcaccaagggcagcagcaggggcagcaccaagggcggcggcggcggcaggggcagggccagtggctag

SEQ ID NO: 216 - DNA, 561 bp, Zea mays
  Peptide Sequence Number=SeqID_43591
atgacaagggaagctggacaaggatctggatcatcagagcgcatgggagggggtctctgcacaaaacgcacagcgtgggcgcaggcagccggcgcggggctggtttccctgtgctcgtgggccgggccgagtcaacaaaattgtatagttcctataaaatttagttgtaagatttgtgcagcagcaaaacacctagaagaagagtttaaagtggaagtgaaagaggagccatttcctcaatctgaagcttctccaattgaaggtgtgcctgaaggtccttacaaaggtgctccaaaaggccggccgcaattggagtggagaaatggcaagagtatcgtgtatccacctggcaagaggctagatggtggggtactgagctctcggatggcggggacccgttctggtcttgagaaacctaggtgtgagttgacatatgcaaggtttaagtgctacatatgtcgtgtggttagagatccccagctgggtattaatcgattcaggtcattgtacttcttggatatgaagactggatctttgactctcattgtagataagaaatga

SEQ ID NO: 217 - DNA, 1680 bp, Zea mays
  Peptide Sequence Number=SeqID_43592
atgagcgagcagcatgcagttgcagcagtccatggtgtggtggcccatgcagtgcagaaagctagcattagtatggacggcgccgtagcgatagcggcggcggcggtcctgctgctctgcgccttcatctacgcggcgtggctggcaccggccgcagccaggcgccgcctccgcggggcgggcttcgacgggccacgcccgtccttccccttcggcaacctccccgagatcacggcctcgctgcaggcccaggcccaggccaacaacaacaagtcctccgccgtcgccagcggcgacatccacgccgccgtcttcccctacttcgcccgctggcgcgagtccttcggcaaggtcttcgtctactggctgggcacggagccgttcctgtacgtggcccacccggagttcctcaaggccgccaccgccggcgcgctgggcaagcgctgggggaagcccgacgtgttccgccgcgaccgcatgcccatgttcggccggggcctcgtcatggccgagggcgaagagtggacccggcaccgacacatcatcgcgccagccttctccgccacaaacctcaacgacatgatcgggctcatgcaggagaccaccgccaagatgctggccgagtggggcgacgcggtggcggcgtccggcgaccagcaggacggcgccgtcgtcgacgtggagcggggcgtggtccggaacgccgccgagatcatcgccaaggcgagctttggggtgaccgacgacgaggccggcgcgcgggtgttccggaagctgcaggccatgcaggcgatgctgttccagtccaaccgcctcgtcggggtgccgctggcgcgcctgctgcacgtgcggaaaacctacgacgcgtggcgcctgggacgccagatcgacgcgctgctcatggacatcatccacgacgcgcgccgccgccgccgccaggggaaggacctcctgtcgctgctgctggccgggacggaggaagccaccgaccggcggctcaccacgagggagctggtggacgagtgcaagaccttcttcttcggcgggcacgagaccacggcgctggcgctgtcgtggacgctgctcatgctcgccgcgcacccggactggcaggacgcgctgcgggaggaggtggagcgcgagctcggcaataaggacgaccaaggccagaagctcgacgccgccgcgcttggccgcctcaccaagatggggtgggtcatgagcgaggtgctgcgcctctacccgccgtcgcccaacgtgcagcggcaggctctggaggacgtgcaggtggcggagggcaagggggccgctgtcgtcatcccgcgtggcaccaacatgtgggtggacgtggtggccatgcaccacgacgtggacctgtggggcgacgacgcgcacgagttccggccggagcggttcgctcgtgaccccatgcagggcgggtgccgccaccgcatgggcttcctccccttcggcttcggcggccgcatctgcgtcggacgcaacctcaccgccatggagtaccgcgtcgtgctggccatgctgctgcgccgcttcagggtgtcggtggcgccggagtaccggcacgcgcccaagatcatgctctcgctcaggccctctaacggcatccagctccgtctcacaccactggtcactgccgatgccaagtcatcgtcggcctaa

SEQ ID NO: 218 - DNA, 357 bp, Zea mays
  Peptide Sequence Number=SeqID_43593
atggaggagacaaagttggaggagcgcaccaaggcggcgtcccgcctgttcgcctccgagcggtccaagcttgagcgggatagcaaggactacaaaaaggacctccagaaggtgtacgcccgaaagctggaggcgagccggaaggagaagaggttggccaagaaggaggagcacttgaaccagagggaggaggtcatcacagagctccaggccaagctgaacgcctttaacaaaatcctggaggagcagcgagtcgagcagaccgtggctgtggagaatctgcaaaggctgcagcgagagcttgagggcaaggcccgcgacgccgcccttgccgaggagaagcttaaagagagatga

SEQ ID NO: 219 - DNA, 1239 bp, Zea mays
  Peptide Sequence Number=SeqID_43594
atggacgggagggagtccacggtggcgtcggggcccaacttctcatcgttctacacgcagcaccggggcatcggggcgccgggtgtccccggccactcggcggtgctccatgacccgccgcccgccgggtaccggcagcatcttgatgctgtctctgctgggtacgcattccagaccccgcaggttgggggttcccacattggacaggggtaccaccatgtcgaggcctcaccccatgtggcgcaatacagctccggtggcggcaccagctccggcggtgatatggacattggcatgggttcggctgtgtgcaccaatgttaagggggagctggggagcgggcctgcccaagatgagcaggtgaagaagaagcggggtaggccaaggaagtataagcctgatggggcggtgactctcgggttatcaccctcttcatcattaacacctcactcggccagcttggggatgggaaccatgattagtgctccaggttctggatttgggtcggagggatcaggggcttcaggcttgggtgcgccatcagagaagcgtggcagggggcggccacctggctctggaaagatgcaacagttggcttcgcttggaaagtggtttcttggctctgttggaactggttttactcctcatgtgattattattcagccaggagaggacgttgctgccagaataatggccttctcacaacaaggcccaagggcagtgtgcatcatttcagcaactggagctgtttctgcagcaacccttcaccaggattcagaatctggcagtgtggttacatatgagtacaaacatttgcccactatgcaaattaaacaaaagggtcggtttgagatcctgtgcctttctgggtcatacttggtggtagatgaaggtggcggcgcacggacccgaagtggagggctttgcatagctttgtgtggtcctgacaacagggttattggtgggagtgtaggtggagtcctgatggcagctggagcggttcaggtgatagtggggagcttcatgtacggaggaggttcaaagaagaacaaggtgaaagccgagttggacgcggagcctgaggaggcgaacgccggcgaccaagaggtggcacttgcggagcacagcagcatggcccctcatcctgccatgagtggtggtggcgggtgggcatctggcatgatgaggcagatggagtcgagaactcccaacatcgatatcaactccatccgcgagtag

SEQ ID NO: 220 - DNA, 411 bp, Zea mays
  Peptide Sequence Number=SeqID_43595
atggcgcccgaggccggacttggctgctgtcagcctcactctgtcgagtggcacagcagtcggagcaacacaagcggcgctgtcttcttgtcagtcggcgtggcgatctggccaaggttgcttctcggggaagactgggcctcgagcgagccgaagcaacagggcatgacaacaaatattccaccgccaccacaatggagccagtttgcattcacaccagctccgccaccacagttcaacacccctccgacatatatacctacacctggagatagggttacgcccgacgcgggtggtagtgggtctgatcccgcagcagggactggatttgttgactccctcttcgcgttccctcctcctggtggcggtagtggtcaaagctctaaccacccaagtggtagttatctctaa

SEQ ID NO: 221 - DNA, 1065 bp, Zea mays
  Peptide Sequence Number=SeqID_43596
atggaaggtgccactcttgatttcttgccgcagatggaaggcggccgggaggagcagcgagaggcggcggcgggcgggctgtggcagtgggagctaaagctgggcggcgagctgaagctggtggtcggcccgcacaagggctggggcgcggacgcggtgacattcctgttgctggggcaggcgtgccaccggtaccgggacgagctggagcgatacataaactacacggtgggaggggagtgcccctccgacaaggcgtcggcgcagcggctgatgctcaaggggtgcgagccgctgccgcggcggcggtgccggccgcgcacccccgcagagtacgtggaacccacgccgctgccggcgagcctgtgggcggtcccgccggacaccagcatcatgtgggatgcgtacacgtgcaagagctacggctgcctcgcgcggcacggcaaggccaagggcagctacgattgcaaggactgcttcgacctcggcgggcgggagaaggaccgctgggtgcgccacgacaaggagaagggcgacgagtgcaactcgctcaactatagcatcgatgacgtgctagggtccctacccaggggcagtgtgcgcatcgggctggacatcggcggcgggtccgggacgttcgcggcgcggatgcgggagcgcggcgtcacggtggtgaccacgtccatgaacttcgatgggccgttcaatagcttcatcgtgtcacgtgggctggtgcccatgcacctcagcgtggccagtcggctgcccttctttgacggcacgctggacgtggtgcactccatgcacgtgctcagcagctggatccccgacggcatgctcgagtcggcgctcttcgacgtcaaccgggtgctgcgccccggtggcgtgttctggctcgaccacttcttctgcctcggcacgcagctggacgccacgtacctgcccatgtttgaccggatcgacttcaagaagctacggtggaacgctgacaggaagctcgacaggggcatccacatggacgagtggtacatctccgtgctgctccagatttggtacaattactag

SEQ ID NO: 222 - DNA, 693 bp, Zea mays
  Peptide Sequence Number=SeqID_43597
atggccgttggtgagggcttctgtcgtatggcgcaccggacactgtccggtgcgctagccacgtcacccagccgttggggttcgaccgttggagcttctgacatgtgggccatcggacagtccggtggtgcaccggacaggtcctgttcactgtccgaagcagtcctacgtggctgcatgtgccgctatgtacgacaagctccggtgcagccgccacttggacgcggtgcagagcggctgctccgcgctgtctaccgtcaagcagggggaccttatggtcgtcggcgactctcgggttgttctgggcaccacattcgacgacgacgccatcacgtcgtccagctcatcgtccacctgaagcccaacctgccacgtaagtcgctactgactggccatgaattcttgtacgctgagacgatggtcgttgctgacgttcccagccaagagtcatcagtactcggtatgtcgcgcgcgttcaacgactactatattgaggactatggcgtcatcttggcgccagaggtgatgcagaggaggaccgacaacaatgaccagtttatcatcctcggcatcgttggggtgcaatcggtcataaatgagggccgattgagctttccaaaaatgcaggttgacaagcaacccttacatgtcaacatgatagatttaaatgacgaccgtgttgagaataaataa

SEQ ID NO: 223 - DNA, 363 bp, Zea mays
  Peptide Sequence Number=SeqID_43598
atggttggtttacaggtggctatgagaatgatggttttgattatgattatggtaatggttgtcagcattgcaaccactgctcaggcgaagaagaagttgtggaaggagacttccaggagttccaagactacgacgagttctaggtgtgggttagcggcaacccccagtcggctgcctgtgaaggccgcgtttatctacgtttcttttccgcactttgatttattatttgaactgcaagtcactcgaaaaatgaaaaaccatgaatgcaaaaatgatatccatgttaggatatcatatggaggctatgataaaaatttgagaatgtttcgagaagggtgtgacacattatgtgtagaaacgtag

SEQ ID NO: 224 - DNA, 1191 bp, Zea mays
  Peptide Sequence Number=SeqID_43599
atgagggtggttgtccccattgcaaccactgctcaggagaatacgacaacaacgcggaggacttttaggagaatacggcaagttcttagtattaaaccatgtactcatgtatatgagttatttgatcgtttagctatcttcataaatcatgcaaaacgtgacgagctgcttcagtttgctcagggtgcgatcttagggctaaagataaatgctgacattgcaaggttctgtcttttctgttgggcggttgaaggtgtttgtagttccatttttattgagactgaaaagctgctagcccagttagttgagactgagatgaacagacgtttgctgccggattggatggataacggatacatggctacagtgagaaatcttaagaatccagtgaacaagtggcgatgtggtgtgactcctatttcgtattactactttattcgtttgatgggacacaaggcttctcatgtggcattggaatgtgctcttcaatcacatccaaacatgctaatattttgtgagtcatttcatggctccacgccgctcgtgccctggccggccgacgacgccagcggcaggtggcagcctactagctgcttccattcaaccaatgccaccgagtccaaggtattctacctcaagatgaagggcgactaccacaggaaggatgctgcggggagcaccatgaatccctacaaagctgctcaggtttcctctgactgttcaccattattggaagcagggcaggcagagagccttggaaccgaactcttggagatggtgcctagcagggaagaggagattaagttgaaagaatacagggaggatgctgtgtcgacttttgtagttgatgattatgtgagacttcagtttaagggcacaacttttaccggttcttggaagtcatttagtagccctaagatttcatcaacattcttagtagtaattgctatagtatcaaatgggattgtgatctatgtttggatgatgaaaacagtgctactcgatgtgaagtccaccaatactatagttcaaattaagtataagatcggtgctttagagggaattgttgattcaccaatttttctcgtcaatgatgcatatcaacggatgtttgagaggaagattggtcgtcttagtacattgttcatggccatggaggaaggcttcctcgtgctcgtgtcaagcctgtga

SEQ ID NO: 225 - DNA, 1083 bp, Zea mays
  Peptide Sequence Number=SeqID_43600
atgcgggacccagcccccgagtcgcaggggagggccttggagcgtgttggagaagacccggcccgcggcgcctgggggcgcacgaacgcaactccatgggagttggtacctctcagccatcgctcggcttcaaggattttcatcacgcagcccggtcgcaccccttcaccggcggtcacccaagatggcgacctccagcttgatggtgggggaaagcgagccgggctgcggcctctgccccttcctcagcctcaaggattttcatcaccaaggctggggaggggagagtgccgagttggggtcggcccctgcgtgggcggtggcccgctccttcactcagtgatggggggagaagcgggcattgcccatggcgtccggcagctgcagcgtgcctggtcttcagccgcgagtggcttcggggccacttgcggcgtcggcgtctgccacggcagccggaagaggttcttccgccggcgcggcggccgggaccggccacgggctgacctccaacttctacggccttctgcccgtccttgcctcacgagttttggcatgggcgggggcctcctggcagcggcatccaccctgaggtcagcgttgccgctgttcggccccccggagcagaagtcgtcgtcgttgccactgctggagggtaaccggttgagccgcctgctcgggccggattcccggaggagcccctggaccgcggcgccgcccgaggctgggtcgggctttgctgaagacgtcgtcgatgccgagggtgctacagctcccttcggcgtgaagacccgagcctgcaggatccgatcatcttgtagcgtgtgctttctgcggccgccgaggccagaagaaaacaccctcgctgcacttgcgaagctgcgccttttttcctcctgtttcgagcatctggactctgtcggtaacagggatgatctgctttccgaagtagtcaagaagcacgaaagaaatcctgctaaaaagagatcctttttcgaggaaaaattcgacgcagagggggtctccccccttttagcccccgagggagggtcgggctttgccgaggctaggccgacccttccttga

SEQ ID NO: 226 - DNA, 747 bp, Zea mays
  Peptide Sequence Number=SeqID_43601
atggcagcctcgggagcttgctcctggtcttcctcgtggacagctccttgctcagcgatgagcacgtactctccgtcagcgagattgcaatctaatgaatgcaataatggcttcttactggtgtataagtctctgtctcaaaatttggagcttaacaagcagggcgacgtggggtttcctccgaagccgaggttgagtctgccttctgttgccgtggccgagcccgagccaaggggtcgggtgaggcggaagtcgttcagccgaggccagggcggagtccgagccctggggtcgggcgaggcggagttcgagccctggggtcgggcgaggcggagtttcgtcgtcttccgggtcttagcccgagtccgagccctggggtcgggcggagcggagttcgccgtcttccgggtcttagcccgagtccgagccctggggtcgggcggagcggagttcgccgtcttccgggtcttagcccgagtccgagccctggggtcgggcggagcggagttcgccgtcttccgggtcttagcccgagtccgagccctggggtcgggcggagcggagttcgccgtcttccgggtcttagcccgagtccgagccctggggtcgggcggagcggagttcgccgtggcgcctttggcaaggcctgattgcctgtcagactcactctgtcgagtggcactgcagtcggagtggcgcaggcggcgctgtccttctgtcagactggccagtggggcggtggagtga

SEQ ID NO: 227 - DNA, 81 bp, Zea mays
  Peptide Sequence Number=SeqID_43602
atgcagcttcatacccttagagatgatgtggttttataccctcaaaggtgcttgttgcttatcaaggggagtgggaagtag

SEQ ID NO: 228 - DNA, 2166 bp, Zea mays
  Peptide Sequence Number=SeqID_43603
atgaagatcagtgcgcttctcacctccgcgggcatcaacattggcctctgtgttctcttcctgtcactctactccgttctcagaaagcagccggccaatgtcagggtctacttcggccgcaggatcgctgaggaacacgatcggctccgaggggcatttatcttggagagcatacgcatcttctcccttgccgcagttttgtgtgttttcgggattcttccactcaattattttggacaggatatacaccatgttcgaattccttcagaatcactagatatatttacaattggcaatgtagaagtgaaatcaagatggctctgggtccattgtgtaaccctgtacataatttctgcagtagcttgcattcttctatacattgagtacaagcacattgccaggttgaagctccttcatcttacaagcgcaacaccaaaaccaaaccattttacagttcttgttcgtggaataccaaaggcagataaagaatcatgcagtgatgttgttgataatttcttcacaaagtatcactcatctagttatctcttccatcaagtagtttacaaagtcgggaaagttcagaagataatgactggcgcaaagaaggcatataagaagttcaaacatttcacagatgaaactgtcgatcaaggttgcaggacagttacctaccgctgttgtctgtgtggagcttcttcaaattctttcaagttgttgaacactgagtgtgagcagaacaaggggaaagcggacaataaatccatcttggacttagacgatgaggaatgcacaactgcttttgtatttttcaaaactcggtatgcagcacttattgcgtcagaaatacttcaaacatctaaccctatgaaatgggttgctaatcttgctccagaaccagaagacgtgtattggtccaatctttggctaccctataagcaactttgggctcgccgtattgctacactcctaggctctatctttttcatgttcatatttctgataccggtgacatttatacaaggactatctcagctagagcagttgcagcagaggcttcctttcctaagaggaatattgaagaagaaatactacatgactcagctagtaactgggtaccttcccagtgtcatactgcaaatcttcctgtacattgttgctccaattatgatgctgttttctacattggagggccctacatctcacagtgaaaggaagagaagtgcttgctgtaaagtgctgtactttacagtttggaacatattctttgctaatgtattatctggtactgtcattagtcaattgaatgtgttatcaagcccaaaggacatacctgtccagcttgctaaagctgtacctggacaggccactttcttcatcacctatgtcctgacctcaggatgggctagtttgtcatctgaagttatgcaactctttggtctgatatggaactttataatcaaatacgttctgagaatgagagaagatacagaattcgttccctcgtttccttaccacacagaagtaccaaaagttctgttgtttggactattgggcttcacattttctgtgctggctcctctgatcttaccttttctgctggtgtacttttgtcttggttatgttgtataccgcaatcagttgctcaatgtgtatcgaacaaggtatgacacaggtggtttgtattggccaattgcatacaacacagtcatattctcacttgtgctcacccagatcatctgccttggtgtatttggccttaaagaatcgccggtagctgcaggcttcactgtacctcttatcatccttactcttttgtttaaccagtactgcagaaaccggcttcttccattattcaagacttttccagcacaggatttaatcgacatggacagggaagatgaacgatcaggaagaatggatgaaattcaccacggacttcattctgcttattgccagttcgctgacactgtagatgtgcccttggataaaattgaaatcgttggtggggatgaggagcaaggctctagctcgggtcagtccagtgttaaagaaacgtgcgaggatcccaagaagcacctggctcaccctacactaaaaggactccctgttaaccgcctccggcatgccgtgagattcagctacccaaaccttagccttgcacgttga

SEQ ID NO: 229 - DNA, 516 bp, Zea mays
  Peptide Sequence Number=SeqID_43604
atggcttaccggattgctcggtctacgtgcggccgcgggcgaccgaattccggcgaggacgatctcgggtctccagtgaagttctgtcgggtccgaggacttggaaagcttcacgggctattggcgaagctaaccgagtggctggcgcggcttggaagtgactggagggagctggccacggtggccgaggctcaggtggtgatggcgggcggtggcgtggcgtgctcgaggcgaagtccggtgaacttggctcgggcaggacttgagagcgcgcggggaggtacggctgaggtctggggctgctttataggcacgacatggtgcatgggcagtcgtggaccggcgagcgcgcgcaggcgtgcaatgcggagcgctggtgcgcgaacgggcgtgaactgggcatgtcagccacggtcgaacacgtggaaccgttgcttcttcccgagttctaacgccaattgggcgcaaatcttcacaaatttgggcaagatcgctgtgaaggatttgttcccctga

SEQ ID NO: 230 - DNA, 284 bp, Zea mays
  Peptide Sequence Number=SeqID_43605
gtggttatgagattgatggttttggttatgactatggtgctggcgaagatgaagctgtggaaggagacttccaggagttccaagactacgacgagttctgggtgtgggttagcggcaacccccagtcggctgcctgtgaaggccgcgggagagtggcacgaagcagtgtgcaagacctgcttcggctgattctgccaagcttcggcttccgcgatctccttctgcttctgaatggtgatttggcacattcttgtggtatggcccttgtcctcaccacggaataa

SEQ ID NO: 231 - DNA, 348 bp, Zea mays
  Peptide Sequence Number=SeqID_43606
atggcagtgacgcctttgggaatattctctgtcctggtgctaggatggctaggggatcatatctgtgtttcctccgttcaaatgtctcccaccttgctccaaagtgggctttccactgctgctatgtggatcttgccaaagacttccttagcaaatctgtggatggagctcctcggtattagaagattcagccaaggatgtggaacttctccaagctcgccttctggacgaatgaagataatgcgagagtttgagatgcaaaatgagaagatggagatggttggtgaactgatgaacgatgccttcgatgatgccttggagggtgacgaggaggaaaagatggaatag

SEQ ID NO: 232 - DNA, 369 bp, Zea mays
  Peptide Sequence Number=SeqID_43607
atggctccgttgcatgggggctccagcgcgggaaagtcggatctctgttgcgatcactcgctcgacgttgtggaccgtccgggcttgcaccaattcggcctcatgtcgttctactttgctggttgtctctccccaggcccacgaaagaatgaccttacgatttattgggcccttgggcctttcgtgaggtcttttactcttttagtggacccgggggatatctatcccccacacccgcgtcctcccctcgtcccgcgcccgcgcgagtaccgccggtgcgagctccaggcggcccgcgtcctcccctcgtcccgcgtccgtgtaccgccggtgaaaatatggaatggccgcaccagtgtggagacttga

SEQ ID NO: 233 - DNA, 447 bp, Zea mays
  Peptide Sequence Number=SeqID_43608
atgggcaagaacaacaagcgcaagtgtgagccaactcctccatcggaggagtttggtgactcggagtacttagaggaggagttctcctctgagtccgaggggtctccggctcccatccccctgcgtgagtcgtctgacgactcagacgactcccaggggctcgcggcggaggtctggacatacatccgggccgtcgagcgttccgggctcgagggctcggatgagtcggagtactcctcggatgaggaggactcggacggcggcggcggggacgaggacgacgacgacgatgacgacgacaacggtggcgacggtgacggtgacggcagcggcaggggcggcggcggcggcagcaaggacggtgacggcggcggcagcaggggcagcaaccggggcggcagcaccaggggtggcagcggcggtggcagcaacagggccagtggctag

SEQ ID NO: 234 - DNA, 468 bp, Zea mays
  Peptide Sequence Number=SeqID_43609
atggagagtcatgatctccgggcagaatgggaatcacggcttgtgggtaaagtgcacaacctctgcagagtgtttgaaaactggtatatcagccgtgctcgcggttatgagcggccaagggagctccagcgattagtggtacttgatcagagatactttggtactggtggcgatgagatcgatggttttggttatggttatggtgctgctagtccactacagccaaacaggatacttgctgagtatgttgatgtgtactcacccttgctctacacaccaaaccccccccatccccaggttgtcagcattgcaaccactgctcaggagaagatgaagccgtggaaggagacttccaggagttccaagactacgatgagttctaggcgtgggttagcggcaacccccagtcggctgcctgtgaaggctgcggttatctacgtttcgttttcgcactttgatttattgtaa

SEQ ID NO: 235 - DNA, 417 bp, Zea mays
  Peptide Sequence Number=SeqID_43610
atgggaggacgaccacaagggtattggggtcgtgctgcaaccctagtatgcgtccctaatggacccaactcgatacacgacccattgggccaaaatagggtgacacagcaccatgggcagaaaagatgtatcagtagtgtggatgtcttcatcacatgtcaatatttttaccgaggtatcaaggaccatgcaaggttcttactaaccctcgttggtgtccctatgaaaagggaagcccacataagggccaagcaccttgaacaggcctcgttccctccagtacacggtggtggccacaccacaaacgtgattggtgtggtctcgcaagacgtcgccccacatggtacaattccaaaggctcatgtaagagccgagggtttaagggtgtctaacctcactcaatcaactaggaactaa

SEQ ID NO: 236 - DNA, 456 bp, Zea mays
  Peptide Sequence Number=SeqID_43611
atggagcgcgaaggggggaagagaagccggagggcgacatgcgtacaaaggggaaacccgcggccttcgtgtttgtcccgtgcccaggtcgggcgtaaggaaaggatccagggtaatgatgacgcctcctatgacatggtcggtctgagccctgggttgggcgaggtggaggctcctctgaggtcgaggtcgagtctgtcttccaaggccgaggtcgagtccgagcccctgggtcgggcgaggcggagaccgtcggctgaggccagggctgagtccgagccctggggtcgggtgaagcggagttcgtcgtcctccggggctgagcccgagtccgagccttggggtcgggcgaagcggagttcgtcgtcgtccggggctgagcccgagtccgagccctggggtcgggcgaagcggagttcgtcgtcttccggggctgagcccgagtctgagccctag

SEQ ID NO: 237 - DNA, 1203 bp, Zea mays
  Peptide Sequence Number=SeqID_43612
atgacccccactccgggtggccgaactgcagcagcaatggcctcagggcggacgccgctgcaaccttgccctcgcccacgtctacgctcgaggggcgaggacaagtacaaagagccggaggccccgagcgcggatggtggcggtgatctcgccggcgacgaggacttctccagccgccgccacctccgcaccgacgacaggagccgtctgcccaccggcagatccccactcggatcctcccagatgagcggagcaccgatctccacgcagaggtgccgtaccggggcaaaggcaggacagcctcagaacacgaacgccgccctagcagcgcgcgacgtcttgggcggtcctccgcccggctcgcttctccccgccatcgaactggaggtcaccgtcttggtgaccaccggcgaggggatgcagccgggctgcctgatgaaaatccttgaagccgaacgatggctgaaaggtgccaacttccgcgaagttgcactcctccaacgacaaggcggaaggattgcggaccagcgggtgaaagggcggacagccatgcagtcggcatgcaaccgcgccaagtgggcgcaccccttcgaatccaacacgcccagcatggaggcccaggcccacacgtcatgcaaccggcgcgccggttgctacgtgctagcaactgcaccgccactcgcgccactaccgccactcgaggcaaccctacgtatgacccaacagtgccagccaggcgcatcggtcacgggccagtcagccgcgggagaaggcgcgacggtcgatgcggccaaaaatgggccggcagtaatggcggtggcaggcgggcagaagcagaggtcacgtcggaccgagaaaggggataccccgaaagggatccttctccgtgaaggaaacgggccccgagcccccctactgatcagaggttcgaaggctggcccctcggaggggttcaacagccgcctcagagcgctcgggctccgcgcccactactggtcagaggttcgagggccggcccctcggaagggttcaacggccgcctcaggccactcgggctccgcgcccactactgatcagggcgggaacgatcttgtaacggaatcccatcagaaggaggcatcgagccctcggaccccgtcaaaaggggaccgggtccggcagatcacccgcaggtacttttggagcgcgcctccgggcctctag

SEQ ID NO: 238 - DNA, 474 bp, Zea mays
  Peptide Sequence Number=SeqID_43613
atgatttgggaaaagtgtaccaaaaaccaactaaatcgagagaatgtccggttacatcagcgcactggatctcgatgctacattgcacaggcccatgttgtggatgatatggaaggcattatgagtgaaccagtacaagatggacaggaaccaaagtcagcaaaagaagctgtttctcaggttgtcaaatcaactacttttcttcgtgttgcaggtgtttgttcagcctccaagagtacctctagaggtgcaatatcatcacaggtccacgatcttcaggttgagcttgagaatgagaagcaagaaaaaaaagaacttcgacaagagttggataatttgaagatggaatcagaaacgtcaagggtaaaacattctgaggaaatagagggtttaaagaagacatcacaagaaatgcatggtctccttcgccaactattgagcttcaaccagggtcaacacaatccagggtcataa

SEQ ID NO: 239 - DNA, 573 bp, Zea mays
  Peptide Sequence Number=SeqID_43614
atgaccgccctcccggagattggtttccaatgtgacaataaccagggcgagtgtcgggctaaattttcttgccatcttgactgttttgcttgggtgaagcgagacagttaccttccacaaggaagccaaggtctaaaggctgttacaaaagccaagctacgttacgatcctctggaggttaatccagaagatatggttcgctttgcaatggagcagccacagacaatggcttcgtattctgtatcagacgatgttgcaacatactatctatacatgacttatgtccatcctttcatcttttctcttgcaaccataatacctatgttacctgatgaggtactgtggaaaggaagtgggacactttgtgaaattctgctaatggttcagccagctcttctcactaaatcagccagctcttctgcttgtcccattgtcatccagatacttatttgggatgttgaagtacaaccaaatagacatgctgtcctaggagcaagcgagtctcgccctgatctgatttatggcttcaatgagatgttggtgctagctcatctgttaagtgatgatagataa

SEQ ID NO: 240 - DNA, 399 bp, Zea mays
  Peptide Sequence Number=SeqID_43615
atgcaggcggcatgcaaccgtgccaagtgggcgcacccctccgacttccaacgcacccagcatggaggcccaggcccacgcgtcatgcaaccggcgcgccggttgctacgtgcgagcaactgcaccgccactcgcaccactaccacgcctcctcgactgcggaaccggtatcttcggactcgaatcggtaccacagtgggagaagcccaaagaatacgaaggttgacaaagcgccgaagctgtgagcaggaaagcttcaacgtgatagcagaaaaggaaaccgacttaaagatgaaaacgctattcagacctcggaggattactatagaattactaccaaatgtaaagggcatgggtgtaattttacatgggctgtgtccagtgactataaataggtga

SEQ ID NO: 241 - DNA, 705 bp, Zea mays
  Peptide Sequence Number=SeqID_43616
atgggcttcgctccgataccagctgtggtggaaccacccaaggtattaggcccacctacagatgtccctgtcctggggacctcatacagtcatgcaggtgcgcacaatggctcggtaggtccgagtatttgtatctccatcacaacgcccaagagcgcttatcccataacacagacattacacaccatcaaagtgggtcttagttttcttcctcctcctttggaaccaccttggaacagaaacaatagaactcagcagtttcatcacctacaacaacatgggtttgaaaaccctaagtacggagtgtactttcgcaagtattacccgtccaaggaaaaagactctcaaggatatgctggcttttgggaagtaagggcaatgactgtcggtgttttgggtccaaccgcacacccggggttgcccctcaagttgaaggctggccttttaatcttgtcccacgccttagaagtcggcactatcttggcttggaatgataatccatggggtgcaccggaggtgcacccaatgggtgtagcccccgaccttcaaatggattttagaggaaattggcacgaagctattcgcattatgctttggagatgtgaccgttttgaaaaatatactgataattcctgggcgtcccccccaatgggtgtgggcaagggacggcttggtacgctgagtgttttagccggttgcttctga

SEQ ID NO: 242 - DNA, 330 bp, Zea mays
  Peptide Sequence Number=SeqID_43617
atgcgaagggatatcgggtactctggaccgcacgatcacgagcagacgaccgagataagatctcgcagtcgagcgcacgggtgcgggagcgcggcgagcactgacagaccactagatctcggacggacgcccgagatccaacagccggcgaccggtcatgggtgcggtggcgccgctcgaccccgcggcgaggtctcgtcggagacgagggggactctaggggcttggggaaaggctcaggcgcatttatggcgacatggagaactcgaccgtgggcaccacactggcgtgggggcacccaagagtgtggaacacggcgaggcgggctaa

SEQ ID NO: 243 - DNA, 165 bp, Zea mays
  Peptide Sequence Number=SeqID_43618
atggggaagcctggcccatcactcctcatgctcctcctctgccgagtgacaacacttgtacccaccataaccggaatgggagaccacgtctcaggttgcatgagggataaagtctgttgccaggttcactcagtggtaaacattgacctctgtgggttatcctaa

SEQ ID NO: 244 - DNA, 294 bp, Zea mays
  Peptide Sequence Number=SeqID_43619
atggaggccaagtcacaccatcaaccaaaatcaggaggtacctgcaaaaattatgccacaagcaaggctgagtatactaatactcagctagacttacccggtcatggatcaagcagtctcattagctgcgagaagcagacgattcgaatcgagtttttaaaccttgcaagacaacgcatctccatggaccgttgtccacagaccaccatcattacgatatcaaaatggatacaaccaattcctgacctcgaacgagtgcaagaaaaatcactcgacttctaccgagatccctaa

SEQ ID NO: 245 - DNA, 345 bp, Zea mays
  Peptide Sequence Number=SeqID_43620
atggtgacaacaacagttgaggatggacaacaacagaagtctcctatggaagttgtttctgaagtgctagggggctccagtttatttctacataatattggtctgcaagataactccaagaaaagctccacaacaactgtttctgcaaagtttcaagaacttcagaatcaattggagtctgagaggctagaaaaagatgaactttgggaagaagtagaaaccttaaaggctcaggcacaggcctcaaaggagaccatggacaatatgaagagatcgatggaagaaaataacagtctcctccatcaactgttgagcttcaatcgaagccaagcgcccccatcttaa

SEQ ID NO: 246 - DNA, 690 bp, Zea mays
  Peptide Sequence Number=SeqID_43621
atggcgcctcctgttgacgtggctggtctgcgccctaggttgggcgatgtggaagctcctccgaagccgaggtcgagtctgtcttccgtggccgagcctgagtccgagccctgggtcgggcggagcggagttcgccgtcttccgggacttagcccgagtccgagccctgggtcgggcggagcggagttcgccgtcttccgggacttagcccgagtccgagccctgggtcgggcggagcggagttcgccgtcttccgggactttgcccgagtccgagccctgggtcgggcggagcggagttcgccgtcttccgagatttagcccgagtccgagccctgggtcgggcgaagcggagcttcctatggtgccttcggccaggcctgactgcctgtcagtctcactctgtcaagtggcaccgcagtcggagtggcgcaggcggcgctgtccttctgtcaggccgctttatgctgatgggggttaccagctgaaaattaggagccttgagggtggttatcgcctgtcggagatgaccagtggcggcgtcgactgcagctccgagtgcatcggcgtgtccgcggtgatgatcgatgccttcaggcttcagaagcaacaggcctgcacttcaagaggaggcagcaggccgggaagagaagcaagccaagcaagcgtcgataagggcttgttcggttag

SEQ ID NO: 247 - DNA, 240 bp, Zea mays
  Peptide Sequence Number=SeqID_43622
atgtcgcgcgtgttcgaccactactatatcaaggattgtggcatcatcttggcgccggaggtgacgcagaggaggactgacaacaatgaccactcgccatcgtcgggccaagagtcatcggtactcacaatgtcacgcgtgttcgacgactactatatcaaggattgtggcatcatttcggcgccggaggtgacacagatgaggactgacaacaatgaccactcgccatcgtcggggtag

SEQ ID NO: 248 - DNA, 963 bp, Zea mays
  Peptide Sequence Number=SeqID_43623
atggccgaaaggtaccaactcccacggagttgcgttcccccgacgacaaggcagaaagacggcgggcatcctccatccggaggcttggaaggtggaaagacacgatgcataagggagcacgaagacatggtcgccttccaagggggtcaccctccttttaaaggcgactctccctacttgcgtccccagccgtcgcgggctgagtcttctccaacacgctccaaggtcctcccctgcggcgcgggggctgggtcccacacgtcatgcaagccggctcagagcagaagaagccaaaccgccgtgcgcggtgcgcacaaccgcccagcggttacaagtgaccctccacttttgcccagaccaacgggcaaaaggggcgggcagccatgcaggcggcatgcaaccgcgccaagtgggcgcgcttctctgactcccaacacgcccagcatggaggcccaggcccacgcgtcatgcaaccggcgcgccgaatgcttcgtgcatgcaactgcaccgccacttgcgccaccaccgcgcctcctcgactgcggaaccaataccgcgactcgaggcgacccagcgcacgacccagcagcgccagcctggcgtggcggcggcgcctctggcaggagaagcgggcgacacttcgccttcgccataatgaccgcgtcagtaaagggatcaggaaagggggaaaccccgaaaaggatccttccccgtgaaggaaccaggctccgagcctccctactgatcagaggttcgaaggctggcccctcggaagggttcgacagtcgcctcagatcacgtgggccctacacccactactggtcagaggttcgaaggccggcccctcggaagggttcaacgaccgcctcaggctactcgggctccgcgcccactactgatcaggggttcgaaggctggcccccgaagggttcacagccgcctcagacacagagcgagggatga

SEQ ID NO: 249 - DNA, 870 bp, Zea mays
  Peptide Sequence Number=SeqID_43624
atggtcgcctttcaagggggtcaccctccttttaaaggcgactctccctacttgcgtccccagccgtcgcgggctgagtcttctccaacacgttccaaggtcctccccctacggcgcgggggctgggtcccacacgtcatgcaagccggcccagagcagaagaagccaaaccgccgcgcgcggtgcatgcaaccgcccagcggttacaagcgaccctccatttttgccccgaccagcgggcgaaagggcgggcagccatgcaggcggcatgcaaccgcgccaagtgggcgcacctctccgacttccagcgcgcccagcatggaagccgaggcccacgcgtcatgcaaccggcgcaccggatgctgcgtgcgagcaactgcaccgtcactcgcgccactgccacgcctcctcgactgcggaaccagtaccgcgactcgaggcaaccctatgcatgacccagcagcgccagcctggcgcgacggtcaatgcggccaaaaatgggctggcagtaatggcggtggcaggcgggcaggagcagcggtcacgtcgtcagccaagcttacgtcccatcctggggcggaaccgggaaaggggaataccccgaaaaggatccttctccgtgaaggaaccaggctccgagcttccctactgatcagaggttcgaaggctggcccctcggaggggttcaacaaccgcctcagagcgcgtgggctccacacccactactggtcagaggttcgaaggccggcccctcggaagggttcaacgaccgcctcaggccactcgggctccgcgcccactactgatcaggggttcgaaggctggccctcgaagggttcacagccgcctcagacacagagcgagggatga

SEQ ID NO: 250 - DNA, 1515 bp, Zea mays
  Peptide Sequence Number=SeqID_43625
atggcgggggccggagacaaggtggactacgtcttcaaggtggtgctgatcggagactcggcggtgggcaagtcgcagatcctcgcccgcttcgcccgcaacgagttcagcctcgactccaaggccaccatcggcgtcgagttccagacccgcaccctcgtcatcgaccacaggagcgtcaaggcccagatctgggacaccgccggccaggagaggtaccactaccagcaactaacgcacccgtccgcctccccgctctgctcccgatccctctccgctgctttactcgctcgctggtctcttgcgccaatcatgctcctcgacccgttcctcctgcgcattagatctctgtggactgtggcagtagctcaaacgttgagcgcaatggtggatctctctgcttgtgaagcgtttgctttttcgcgcgttcacacctaccttaccagcagggccgcacaggacaatgtgctgttaggcgcactgggagctttgctggtctacgacatcaccagacggcagagcttcgatcacataccccgctggctagatgagctccgagcccatgctgacaagaacattgtgataatgctggttggcaacaagagcgatctcgaggagcagcgggccgtgagcactgaagacgccaaggagtttgccgagaaggagaacctcttcttcttggagacctctgcgctccaggcaacaaatgtggagagttcttttcagaccgtcttgacagagatcttcaaaatccacagcaagaagaacatggtgtcggagccaaagagcaacggagccgcgccagcaatgccggggacgaaggtcctcgtcccaggtccggcgcaggaaatcccgaagagcaagtgctgcagttccatgtccaaggaagcccagggccttcgccttggcttccaacggccactaccaacttggaacgggcaggccaacaaaggcacaccatggacccaggcaaagacacgcttggagcggcgaggtggaactaaacagagggacaagcgactggcgtccacaggcagaacggcgcacggttctgccatcgcgctccctccacgctccctcccgagtcccaagcggacgtccgctatcctcgccccagcttccaactgcgcgccccagcctcatatcttccttgccaccgaccggatgagcagagacaaccccaccatcggtgacacccactccccgccaaagccaaccctccatctccgccgcggtctacatccgcagtcgtcggtggcgcccgctgcgggtggcaagcgagaaggtggtaggcatcgacccaccacaaattccgtggtggccgctgcaatgcgagaagatttacggctggcttatgcaaatcttgtagttgcaaaggccgatgatgatttctcgagggctgaggaaagtttcagagtcagagtcaagaaatattcttcaaaaatagtggatgaggctatccctcaaaaattaagggacggggtcaacccagggttgatcccgtcccatccttag

SEQ ID NO: 251 - DNA, 1077 bp, Zea mays
  Peptide Sequence Number=SeqID_43626
atgccttgggtggattcttcctccgaagcccctagtcatctcagagaacctgtaatcctcctcccttctttggtgaaagtcattgtcggcccggatgtattcatccatcttttgaagcaacttctccaaagtctgtggaggcttcctagcaaaatactgggcagtaagtcctggacgaagccccttaatcatggcctcaatgacaatttcattgggcactgtaggcgcttgtgctctcaggcgcaagaaccttcggacatacgcttgaagatactactcatgatcttgtgtgcattgaaagagagcttgagctgtgactggcttcgtctgaaagccctggaaacttgttatcaggtagagtctgtctcctaccactgcagggtagacggaggtcttaaaaccgttgtaagtgctaggaagtttgtccccggtgcaaagctgtgcatgcaacctgatgtcataccaaacaagcgcaagtcaaagagctcacgcaaggatagatccaaaactcaatcaccactgctgcttgggcttcctgatgaactggctatttcctgtctcatgcgggctgctcggatcgaacacccaaatatgcgggaccgtgatcagaagctatcttggtatgcctttgatcctgtaaaccagctctggaagtcattgcctccagttccaccagagtattctgaagctgttggttttggtagtgctgttctcaacggatgctatctgtacttatttggcggcaaagacccagtaaatggatctatgaggcgcgttgtattttacaatgctcggataaacaaatggctacgagctccagatatgctgcaaaaacggcacttctttggttcttgtgtcataaacaactgcctttatgttgctggtggagagtgtgtagggatacagagaattctaagatccgctgaggtatatgatccgaacaggaatagatggtctagcattgctgaaatgagcacaggaatggtgccctccattggagtagtacatgatggcaagtggtatctaaaaggtctaaattctcatcgccaggtcatgagtgaggtctatctgttgtag

SEQ ID NO: 252 - DNA, 642 bp, Zea mays
  Peptide Sequence Number=SeqID_43627
atgaggcgaaaagacggcgggtatcccccatccgggggcttggaaggtggaaagacacgatgcataagggagcgcgaagacatggtcgccttccgaagggggaaaagcgggcgacgcttcgccttcgccgaaataaccgcgccaaaaaaggctccgagccaccttactgatcagaggttcgaaggctggccccccgaagggttcaacagccgcctcagatcgcgtgggccctacacccactactggtcagaggctggcccccgaagggttcacatccgcctcagacgccgagcgagggatgaccaggggtacgttcgatacataaccaaggctcgggctgcgctaccgagctcaccggagacaccatgttcggcgcccatcgagggcaacatggcgctttcccccctcctccttgcggaaaggcgacgcaggggcgtatgtaaaaaagccgagtctgtccctgatcgccctctcgccctgtgcagaggctcgggggctactcttgcaaacccggctccggccgaaccgttgacagcgtcaacataccagcccaagaacttgggacccgaccgtacacccgggctacggccagctcgcatgagggaacaaccagaccagccgaagcattacgcaaggcattaa

SEQ ID NO: 253 - DNA, 249 bp, Zea mays
  Peptide Sequence Number=SeqID_43628
atggagcctggcggagggacagctgtcggagcggttgggtccttgctgacgtcctcttgcttcctttggggtagggtgatgatggcgcctcctgttgacgtggcgagcctgtgccctaggttgggcgatgtggaggctcctccgaagccgaggtcgaatctgtcttccatggccgaggccgagtccgagcccctgggtcaggcgaggcggaggtcgtcggtagaggccagggcggagtccgagccctag

SEQ ID NO: 254 - DNA, 771 bp, Zea mays
  Peptide Sequence Number=SeqID_43629
atgcagcccggttgcacccctccgacggcggtcacccaagatggtgacctccagcttgatggtgggggaaagcgagccgggctgcggcctctgcccctccctcagcctcaaggattttcatcaccagggctggggaggggagtgtgccgagttggggtcggcccctgcgtgggcggtggcccgctccttcactcagtgatcggagggaagggcggtcgtcgtccgtggcgccggcagctgcaccgtgcctggctctcggacgcgagtggcttcggagccgctcgcggcgccggcgtctgccacggcagctggaagaggttcctccgccggcgagatagccagggccggccacggaccgacctccaactctacggccttctgcccgtccttgcctcacgagtttgggcatgggcggggcctcctggcagcagcatccgccctgaggtcagtgctgccgctgttcggccccccggagcagaagtcgtcgtcgtcgctgctgctggagcgggtgacggcgcgccgttcgtcggtcttctgttgctccgcaggccctcctctatcgagtggggttactcgcctgttgattatctgaaccgcttcaccaagcatgagtcgccccgtgtcaaggtgacgattgagagtggagatcctcgggccgcgtcgccgtccgaggctaggtcggacctcgctaaaggtgtcgtcgatgccgagggtgctactgcccccttccagcgtcaagacccgagcctgcaggatcagagtgtcttgtag

SEQ ID NO: 255 - DNA, 3708 bp, Zea mays
  Peptide Sequence Number=SeqID_43630
atgggcgcgcctgacttctgcgcgcgcagagcgcgcatttattgcgcagcagcgtgggtgacacactggtatgcccggcccccgcacaaccgcggcacctcggcggagcatagctccgcggcgtcaatctcactccctagggcgcggcgaaggtcattggccaaccacgcgccccaatttgcttcaccggtgaagaacgggtgcagtagcagccgcctccctccacgcgccatcgggtgcaacaacctccacacccgtgccgcgaactccgcggcaataccgccatacgcggtgttcgttggagagggaagagctgcgacccccggcccaccagtcagccaaacaaacacggccagcggaggaatgagcgatggcccacatgccagtgatagtgatgtccatgccgtggaggatggcgtaggtgttgagtggccgacacggtggatcccaaagaccagtggtcggacccagaatggcaccttggccaagctctcggaccaacctatcgttatcctcctagttaattggctgcaggatgcctctggcggcacaggctcaggcgtcctcagctgcagcagtgattcgtcgatggaacgtaacgatgcagggttagctgggcgcccggcggtcgctgagctcagctcagctgccacgcacgccgccaccaacaacgccaccaccaccggtccaccggcgtgcgtgagcgcgcgagattttgaccgctcccccaacctctccacgcccgtttcgtttccttcctcccttcccttggacgcttacacgctgcccctgcctttcgcggcactccacacgcgcgccacggccgagcgctcccagcctcccactgagacgcggaccctaccggcgtgggggccccgcgtgtcagtcaagcctaccgttaggcgactcgccggccgtagcgagatgaagtcgagggtggcgctggagccgctggcggaggagcccggctgcggggaggaggacgcggcgcgccggcgctcgggcctccacgcggcgctgcaccggtgggcgcgcctcctctccggtggcgtggcaggggacgacgcccgaccggccgccgacctgcgcgtgctcctctccgtgctcgcctgcccgctctcccccgtgcccctcctcccgcgccttccacgccacaatgacggcacgccgtacgtgcaggtcgcgtcgtcggcgcagtacatcatcgagcagttcagggccacgacggggtgcgggaagctggaggacggcgccgtcaagagcatgtacgcgtccggccgggtgcgcctctccatgctgcaggagcccggcggtgggggaggcggcgggcgcggccacgaggggagcttcgtgctgtggcagctcgcgcccagcatgtggctcgtcgagatgtccgtggccgggcagagcgtcgccgcgggcagcgacggccgcgtcgcctggcgccgcacgccctggctcggcgcccacgccgcgcgcggcggctcccgcccgctccgacgcgcgctccagggcctggaccctgtgacgatcgcgtccatcttctcgacggccgagcacgccggcgagaaggaggtggacggcgaggactgcttcgtgctgcgcctggacgtggggccgtcggtgctgtcgagctggagcgacggaaccgcggaggtgatccggcacgggctgacgggcttcttcagccagcgcagcgggctcctggcgcggctggaggactcgcagctgacccggatccagtcccccggcgcggccgccatgtactgggagaccaccatcgcgtcggcggtgtcggactaccgcgccgtggacggcggcgtggccgtcgcgcacgcgggcacgtccacggcgcacctcgcccggttcggcgtgggcgtccgcgccgcgcgcgtcgtcacgcggatggaggagtcgtggaccatcgacgacgtggcgttcaacgtgccggggctcggcccggacgccttcataccgccggaggaggtcaggaggagccggtcctacggcgccgccatcgcaggcggcaaccgtcacctactgggcaacgtacctctgtctcctcacgccaacagagcagagcgtcggcaagagacgttggaggtgaagccgtatcagtatcatctccacttggaatggtccccggtcgaaaaatctcagccagatgttgatcctagggaaatagatcttgccatgaaaatcgccgaaaggatgttcctcaaaatgaaggaagatgaggcgaagaacaagattgaagaagaagaaaatgatcgatggagaccaaacgacgaatccacctcttcacaaggttcgtctttcaaatccacttctcatatgtgctttattgctaatgggagtgacagtgaaagcgaaagtgaggatgaggaggagcaagaaagtgatagtgaagatgaggatgatcttcaacaattcttcgctcagctaagcaagaaacatcggatgagcttgcttaaactcatgaaaagagcggaagaacaaaaagaaatgcttcataagcaagaagacttcctcatcagaaaaattgaagacttagagaagttgaccaaagagcatgagaagctaaagtgctctcatgatgatttggtccaaagaagtcagatggaggttcgctgccaaaccagcttgtgccagaatgaagatggtttccccaagttgctgagagcatgcacagttcgcctcggaatcaggagccagccagagtatgatggtcgtgaattcgtcgagcatggcacagagaagtgtgtcgtgactgtatacattggatccagtccacaccatgtggaatggagtgtcactgctgctgggcacagattcaaagacacctgccaagtcgtcgctcacaaggcattgagggccctgtgtcagatctatgaagaagaagtggccgacaccccactcagattctttccgccctttcagagagaccgtcccgcttggatggccaggatgcgtgcattggaggagcagcagctgcttgaggacgaccccatagtcgtgtacctcactgcatacctgctcaccctggatgcacagtatgatttcttggctcggcaccaccgtcagatgattgcccgagcagaagatgcagagaagctcaaccgtaagctccatgtggatctcaccacagttcaagcccgtgtagctgccttggaaagtcgtgaagccattgccgttgaagccctgaagcaagccaaggatgagcacgtccagaagttgatggaggcctacttggtaacccataaccaacgtagagccctgcggatccaagagcccgcttcatccaacccagttcaatctgtcagagatgaagaccccaagattcttgaaggtcacccggtctctaccagaggagaaaagaaggcttgggaactcccagaaggagccatagtcttggaaggaattccagtcttccctcaggctatggataagcaagagcaccccgagtcctcccaagatcccccgccggagttgtgtgagcccctcaccatgaagaagattccagcaccatcccttgaagtcaaggaagaagctgcaagcaccccgccagcaccgccgccctcagaggagctacaagagccagtcccgcttgaagaagagttcgatcgcgtcctgccatctcagtcgccgccagaagaagtcatcaacatcagctccctgttgacccatccaggagatatctcagattga

SEQ ID NO: 256 - DNA, 306 bp, Zea mays
  Peptide Sequence Number=SeqID_43631
atgaagaagaagagcaagagagatttagagatgaagcacaaaaccgcagctctcaagctcactcaaggatttctctccaaagatttgaaatgggagaggcaagagatgtactgttggtcagaggtcagaggggtcagagaccagctgaactgcccctcaggaccagttcaactagtcttgaccagagagtttaggagagaaaaccccagctcaactgcccggaggcaagttcagctggtgtatggtcaaagaggttcacagctgaagttgagttcagctgaagttgagaaagctcaactcagctga

SEQ ID NO: 257 - DNA, 468 bp, Zea mays
  Peptide Sequence Number=SeqID_43632
atggggtgtcttcttctcgccgaggagtggttcgagaaaaacaagcatcgcttccactccaactacaaggagggaggtggtggctccggtgccactgctcccaagcacaaggcgcaaccacgatcagaaggtgggacctcgggttcagtcaaactgacctccgaggggacaccacggagaaaaggtcggtgtcgcaaatgcgacatctatggccactgggcggttgactacaaacgttcaaggaaggagaaagcgaaagaaccacataagtcagaggccaatctggtcgtcgacagtgtcgaggatcatggtgccctgatgttgtccatgtgcgatgttgcgcataactcatcttatgatgttcatttgacagagaagataataccaatgattgtccctgatggtgtgtgggtgctcgaccatcaccacacaatgtggcaacactcccccaaaaaactagcctattag

SEQ ID NO: 258 - DNA, 807 bp, Zea mays
  Peptide Sequence Number=SeqID_43633
atggctcccctccaccgcctcccttcccgcgcgctgcctttgtcttcgtctcgcctgctcccattcccacatgaagcactgcgggaggccgggacaggggacgtgcgccggtgcgcgggagacaaacttcacctctacaggagtgaggagtcaggacctcatagttgtgtgcgggactcttttcgagccgctgtcgtacaccagcttgggcgcctccatcggattcagatcgtcgctggactcacttccctgacttacaagctgccatgtgacttaaattatttattcgcattaaagataaagaataaaaaccctagaacattaagaaacaaggctccttacactaagcaacatgctgcaaatataaagaatcctattgacaaacaagaaaacaatggtttcttgcatgataaaccacaacattttgctgatctgggatacccggtgcaaaaaggacaaggagacccagagaggcagagagggatagcagagtttaatacaggagatcgtattagaaaactgaagggtaacatagatggacaatttactgatttaaatcataagtcttataaaagaaaaccccttgggtttcctgtcttctcaacccgtggtacctggctcaccgcaatagtacccggagaggagaaagcggcggagtggcttgccggcgacagtagagcttcgggtgagggcacggtggtgtcagggatgtcacgacagacacatctatggtcgggtcacagtcggagattgccagaatcgcccgaaccaggagcacaggcggcgagtaccgtcggcgacgagtaa

SEQ ID NO: 259 - DNA, 210 bp, Zea mays
  Peptide Sequence Number=SeqID_43634
atggcggagcgggaggcccgcctggcagatcaacagaggatggcgaagatgttccagtacatgagagccttggcgccgcacacgggacaatctgggcggcatccaacaaccctcatagaacgcccagtccatcgccacaccagtccagccgcccacctcgatgagacttatgttattagtgttgagacttatgagatacttgagacttaa

SEQ ID NO: 260 - DNA, 153 bp, Zea mays
  Peptide Sequence Number=SeqID_43635
atggcgccattatgtcgtccagctcatcatccacctgaagcccaacctgccaccttctggccaccaaaagctgctgcggactgccaaacactcagcttttcagccaacttctataaaattcgtttgggtaaaaaccattcaaaatcaacataa

SEQ ID NO: 261 - DNA, 363 bp, Zea mays
  Peptide Sequence Number=SeqID_43636
atggatcctagcccacatatgctatgcattcggttttgcccccagaaccggatggttcgtacaatccaaaccacccagaccaacaccaactacatccctttgtcacgacaagttttcgtctatacaatggtagtcgaggaaatccttgtggatctccctcacatttgtgtggagaacggagttattctagaggacagctcggaggagtttctgcctacgctcaccccgttggcagaatcactagccttcgcagctggatcgtcatcttcgacaccgccagcaccagcagtccaagcccctactcccggaggcgacgacccggacgactctggtgacgatgatgaagacgaagaagaagaataa

SEQ ID NO: 262 - DNA, 537 bp, Zea mays
  Peptide Sequence Number=SeqID_43637
atggtgacctccagttcgatggcgggggaaagcgaaccgggctgcggcctctgcccctccctcagcctcaaggattttcatcaccagggctggggaggggactgccgcgtgcctggctctcggacccgagtggcttcggagccgctctcggcgccggcttccgccactgcagctggaagaggttcttccgccgacgagatagccagggccgcccatggaccgacctccaactctacggccttctgcttgtccttgcctcacgagtttgggcacgggcgggggcctcctggcagtggcatccgccctgaggtcatcgctgccgctgttcggccccccggagcagaagtcgtcgtcgtcgccgctgccggagcgggcgacggcacgccgttcgttggtcttccgttgctccgcaggcccccccgtcgggagtccctcggctcggtcagccttgttgtccgaggcttcccttgcttagttagaggaacccctcggccgctcttcgatgagccgagaccaggggtagcggtgtcagcgtga

SEQ ID NO: 263 - DNA, 1575 bp, Zea mays
  Peptide Sequence Number=SeqID_43638
atgaacctcgccgtcgcagccgcactgccgtccgtgacgccacgtaccggcgtcgtgctcccacggagcagtcgccgacactgcccccgcggggtcgtcccacgcgcggcctcgagctccgtttcctcctttacctccccctcagcagcggcggcgcccatctacacgcccacgccgcaggaccggtctctccggacgccgcatagcgggtaccactttgatggcacggctcgacctttctttgaaggatggtacttcaaggtgtcgattccagagtgcaggcagagtttctgctttatgtactctgttgagaaccctctcttccgtgatgagggcgggtgggagggcgttgcggcggctgatggcgcggcggctggtggtggtgaggataacctggagctgataccaggtgtcatggaccttcggtccatggggatatctgtcttctccggcgagatccagtgcaatgtcttcccaggagcttctggtgaagtttctttaactgctgctggtggattgaggaaaattggacttggtgatacctatgaaagtccttcactggtacaatttgtgatacttcgctttccaaatttaacatggcgtgcatcggggtgtgaggggcaatggctagacggtggtaaagagatgagggagaaggtgttggactatcctggacctggagcaaagctcaaggaacttgatcctctcaaggggcttagtgagcaggtctgcaagctggtccttggtgttgatttagcgcgacttgatgctcccttccaccaagccgtctcagatgaagtgagaccgtggtcagtggcactgggcaagcgcaggcgtgggtgcgggcgcgctgacgggtggggcccgccaggcggcaactcagagcggagggggaggcgtttggcgctgtgcgcggtgctgacgcgcgggaccagggggtccaccggtcagcggccgcgcgaggggaaagaagaggggggagagggtgaggctgttgggtgggccgcggctgtcagggttgtcttcaaccccgagccgggcgcacggctggccatgcccgactgcgagggggccctctctggggcgtgcggtctgcgaccaaggcggcggagtcaccgggcaacacggccgccgcagagggaggaagaaagggggagaaaggagggggtagatggctcaccgcgggttacgccggcgagcttgatggcacggagctccggcgacgcggacgtcgatgatcggcaagcgacgacaacggtcaaggcgagggcgacggcgtggggtggttggcaggggcgtgcaaccgaggaaggagaggggagggagttttatgctccccaggcccggccatggcgagtggatgacgtggggggggggagggggctgataggtgggcctggcgcgacgtgggcgagcgcgtcgcgcggaggtaacggttcgggccgagacgcggggcgagccgttgacaggcggcgtgagccgtgggcgcaacgcgactggcaagagggggccgcacgcagagaggagggcgcgcgccggggtaaagcggaggcgccgacatgcctggcccgctag

SEQ ID NO: 264 - DNA, 498 bp, Zea mays
  Peptide Sequence Number=SeqID_43639
atggccgactcactcgtggaggccatggaaaggatgtttaatgaacgtttgcccatgacaggagatggctatagaggttatggtgatggtcgtcgcgtcgatttcgataattcgtgtggaagacgtcgtgcacacggacgccgagtaagatttgaagacgaggagtttgaagaccatgatcgtgaggaaggatctgatgagaatccctttgcaaatgatggaatgtttggttggcgtcatcatcaccgacaagctaactttaaagatagagaccgttatcatgggcgttgtcatagaaatgacccgaataatattgcccgagtcaagttggatattcctaaatttactgggaaagaaagtgcagatgaatatcttaattgggctgagcagtgtgatcaaattttcagagttcacaatctttcagatcaacaccgagtgaacttggcttcagtcgagttctttggtgttggggacttgttctcaaatgctatgggttaa

SEQ ID NO: 265 - DNA, 528 bp, Zea mays
  Peptide Sequence Number=SeqID_43640
atgaacaaaagaccggcattcaaggatggacgcggccaccggaaggctctcgttcgcgtccccgttcaagggatgcaaaccagccatcaaagccaaagagccagaggccggcccgtaggggccactaacggcctcgacggtggggaagcttcccccggccgccaccacatcagcaccaacgacggcgtctgcgacgtcgcaccagcgaacgcaggccgctccaaagcgcaccggcaggtcctcgctcctgtcctcgccgcgaaagcgaggaagagggcggaatgttgcatcctagctgggcagcaacagttcgccttccccggcatggctggaggacgcctcctccgcagagctggaggatggtttccaccaccagaagctggaagaagaggtggccagccgatccgtgcggaggtagagccccggcttgcctcgctctccgccctcgcaaggatggagctggtggtcaccgtcttgggtgaccgccggcggaggggtgcagccgggctgcatgatgaaaatccttga

SEQ ID NO: 266 - DNA, 429 bp, Zea mays
  Peptide Sequence Number=SeqID_43641
atggggtccaggcacagtgcttgctctgccgaggctgagtgccgaggttctttcgttttgctttcgttagtcaccctcctgcggggagaggttgcctttggtgcaatctatgctcagcagaaggcgttgaaggagctttttcttctatctcagccatcttcggctctggagttgcagtttttgtcttcttggaagtcgccacctgttggggcgaaggcaaagacgccacccttcgctcgaggccttcgctgcagccgctggtccgacagagacaaagcgggcagggacacccttcgcaggactcggcactttgacgaaggcctgcggcgatgtcctaccacggcgcgtcctcgttcagtcccaaggcccacgtgcgatctggcccattgtaacgggccccgcgtggccgcctctgtattacgggcctaa

SEQ ID NO: 267 - DNA, 342 bp, Zea mays
  Peptide Sequence Number=SeqID_43642
atgtgcgccaggaatttagaaatggtgcagagggttacctggtccacgcgctccggcggggttacgaactccggcgagcacgattgcactattccggtgggtctggtcctcggctcaagctcgggcaaacttcacggcctcctggggaagctatccgagggctcggatcgagtggagtgctcaggtggatttgacctcgggttggcatgttacgaggaggtagtacttatgtgggtaagcggacacacttccgtagctgagatacgtggaacacatcatgaactgctgacatgtggggtggcaacttcaattgatatgctacaggtccacaaatcgctttga

SEQ ID NO: 268 - DNA, 306 bp, Zea mays
  Peptide Sequence Number=SeqID_43643
atgcagtacaatggatcaagcagtctcattagctgcgagaagcagacgattcgaatcgggtttttatccttgcaagtgaccgcacttgtacccaccataaccgaaatgggagaccacgtctcaggtcgcgtgaggagtaaagtctgcgggcaggttcactcagggcttgccttccaaagctggagtaggcagatcctcgatggcaggctctggtgctggctcctggactacctcctgagcaactccttgctccggaacgaggatgtactctccgtcagcgagattacagtctatcaaatgcaataa

SEQ ID NO: 269 - DNA, 478 bp, Zea mays
  Peptide Sequence Number=SeqID_43644
atgcccgaggggtccggtcccgagacctccaggtgggcgacctggtgcttcggctgcgacaagacgcccgagggcggcacaagctcacgccccctgggaggggcccttcgtcatcgccaaagttctgaagcccggaacgtacaagctggccaacagtcaaggcgaggcggcgcctctggcaggagaagcgggcgacgcttcgccttcgtcataatgaccgcgtcagtaaagggactgggaaagggggataccccgaaaaggatccttccccgtgaaggaaccaggctccgagcctccctactgatcagaggttcgaaggctggccccccagaagggttcgacagccgcctcagatcgcgtgggccctacacccactactggctggcccccaaagggttcacagccgcctcagacgccgagcgagggatgaccatgggtacgttcgatacattaccaaggctcgggctgcgctctcgag

SEQ ID NO: 270 - DNA, 474 bp, Zea mays
  Peptide Sequence Number=SeqID_43645
atggccacggggaggctgctacgcgctgtccttgggaggcagtcgcagcaaggaaatgctcgcggccatggagaaatggagctgcgcattttgtcgagcacctacggcgcgtcgatttggtggggctgcggggaaaaggagataggggcgccgcttcttgctgctcaagccatggagaggcttcttgcagccatggagcagaagggggcgctgggaggggatgagctgctgttggaattcctgggcgccgtggacagggagctgggcgaccatggaagtcgaatagggagctgcacggctgggaaaataggggcgccagggggatctcgcgcagcgtccattgccgagggtgaagctcgcgcccatgggagggaagatggcagggagggcgctggagaacagggaagggcgccatggctgttgggggcgcctgctccatggaagtggaggtcggccatggctgctggcggctga

SEQ ID NO: 271 - DNA, 531 bp, Zea mays
  Peptide Sequence Number=SeqID_43646
atgtcttcgcgctcccttatgcatcgtgtctttccaccttccaagcccccggatgggggatacccgccgtctttccgcctcatcgttggaggaacgcaactccgggtgtgttttgtaaagctgcgtctcttttcctcttgcttcgagtatccagacttttttgtcggtaacagggatgtttgtgcgagcgagagttgcttctcgcggaaggtgacaagtgaggtatccgtatcccggaggcgtaggagtccctcggctcggtcggccttgctgcttacgcgcactcttacccatccatggggctctgtcaccgacgcagtcgagaaggctcgaaggatcgcttcggcagaagagcttccgaacgtgaagacttgttcggtccgcggaatcacttatccgaacgtgagttacttatcgcagaaggtgatgagtgaggtatccgtatcccggaggcgtaggagttcctcggctcggtcagccttggctgcttacgtgtactccatcgttttcaggatccacttttcgaagtag

SEQ ID NO: 272 - DNA, 453 bp, Zea mays
  Peptide Sequence Number=SeqID_43647
atggcggccgacagcccgcccgccggcggcggaatcgacgacgtcttccccgcgtggcggaagaacaacattcgagctcgccccgtcctctcccccgccaacggaggaggaggcggggcaaccaaggccaagcgggaggctacgcctcatcggctgtcgagcgagtcgacgtccccagcgctccaatggggggcgcgtcgggcgtcgacctcgcgtttgagacgaaggcgagcgccatctccccacgacacgccaatcccgagcaagtggacgacgccagtgcgctcgcggagagcttgcaggacgtcgccctcgtacctgagacgacggtgcaatctgatgaagctgaggtgcccgatctttcggcgagtagagataattctgatttgtcggaagatgacccttgcgatccgactacgacgagcaagcccgaggcgccaatgcaatcgctga

SEQ ID NO: 273 - DNA, 339 bp, Zea mays
  Peptide Sequence Number=SeqID_43648
atgggcgggggcctcctggcagcagcatccgccctgaggtcagtgctggcgctgttcggccccccggagcagaagtcgtcgtcgtcgccgctgctggagcgggtgacggcgcgctactcgcctgttgattatctgaaccgcttcaccaagcatgagtcgccccgtgtcaaggtgacgagtgagcatgaacagaggcggagttggctcgaaaatgaaaacctggttggccggagcctagccgggttgtccgttagcgggaccgacgccggagttgaccagccgaggcctcgggtcgggctggcgcccttgggagatggttggccgaggccccaggggtaa

SEQ ID NO: 274 - DNA, 405 bp, Zea mays
  Peptide Sequence Number=SeqID_43649
atgcggaagttcgtcgcatcattccggcgacaagcggaagcgcgagccgacccctccctcagaggatttcggcgattccgagtactcgaggaggagttctcctctgagtccgaggggtcgccggtctacacctctcccccagcatcgtctgacgactcagatgattctcgggggatcgccgctgaggtgtggacatatatccgggccgtcgaatgcgccgggctcgagggcttggatgagtcggaggtctcctcggacgaggaggactcctctgactcgtccgaggaggggagtggcggtgttggcgatgacgagggcgacgacgacggcggcaaaggcgacggcaagggcgacgacatgggcgacggcaagggcggcagcggcagcagcaaggccagtggctag

SEQ ID NO: 275 - DNA, 84 bp, Zea mays
  Peptide Sequence Number=SeqID_43650
atggcgggcggaattaagctcgccggagctaaggggaagtggctggccggtgaggttcacaggatgcgaagaggattggactaa

SEQ ID NO: 276 - DNA, 711 bp, Zea mays
  Peptide Sequence Number=SeqID_43651
atggtcgagtatataaggcctagggggcatcccatcaaacgacagaaccatctcgtccgtggcagacgaagaagggactctacatcgtatagcggatccgccggagaaaaagccttccttgaaaatctccaggaaagtcggaacgaagcaggaaatagcacggcctccagcgctccgagtgaagactacctcctgcaagccaggagcagagaattcattcacccggagaaccccgttgtccacctcatccacggaaaaatggacacggattacaaggaaaaaaaagaaacaaacgagatgaaggcccgtcaagctgcccttctagtacctctgccctcaaaggagaacagaaagaagattgtcatcatgacaactccattctaccccgacgtcctcttcatcgggggagagtggaatcgtcccccatctccgacggcgaaccaattgtgcctggggaagaacctcctcagcgggaagctcgccgacaaaggaatcgacgccgtaacgcccggtgacatcatgaagccgaagaacgagatccggtgcagcctgtatcgcgagacgagatctcggaggtgggagaaactccagatgaatgagtctttagggaaaggaggaactcccgccgatgtgatcgtcggcaagctcaagagcaagccgagcaggaagcaagacagcgtcgagagaaccctctcttcgaacgaaacctga

SEQ ID NO: 277 - DNA, 1782 bp, Zea mays
  Peptide Sequence Number=SeqID_43652
atgccctccctgggtggacggaaggtgcgaagtccgcgttttgctttggatttgcgagggcgggatcccgcctcggttgtgcgtgaggcagaggatgaggcggtgagaattgttgggcgctatgtgccaaagacggaggcccagcggagttgggatatacgtggatccaacgactgcctgaatagggtcttcgagttgaattctttgccgtatggcggttaccctggggaggacgtcgtcgatcgccacgggaaaaaaccagcggccgtgactgaggatgaccccgcgccggaagccaccccagcctctaaaaagaggaagctaggtactgcggtcggagaactgggggtctccgatagctttgctatggagttgatgggaacatgcgcggcccccgggggaaggatgtcttcgcccgagctccgggagtcttcggcgcggatgctggaggttaccgggggtcgatggcccaaggacgttcctatcccccgcgtggccggcgaagacttttttacgtctcgcatggctcgtgacttgagagtgtttccttacggacgaaatattgttgctgttgtgtcggcagtgatgaacaaggatcgccaggaagctgcgcagaagcgtcgggcggtcatcaggctccccgaagctaggccgaaaagggcgcgggggactgcgaaggctacagcccccggcggtagccagccgatgctggcggcgaagccggccgcccctgggtccagcaaggtgccggagagcgtgaaggcggccggcgccggcggaaccaagtctgccccgaacggagctgcgaaggcccgggaattgccttcgtcggggaaacgcgttgccgactttggcacaaatattagtttggacgattatctcgttggatcgggcgaggggcaacttgttgttgttccgcctgcggtggcgaccatgatgtctgtcgcggtgcctggggtgaagggtagcgctcgcagcgctggcggcgagatttcggcggtcgctgccgtcaaggacgaagcgggcactgtgtcccgccggctgagggaggcgtcgcagcagctgagtcaagcggccgactttgccgaccgtgtggcgtcgggggcccttactgcagatgtgtctgccgaagtcgagagacttcgggcgcagcatgctgacgccgtccgggaaaagtcggctgcggatagcaagtgccgcaagctggcggagaaggtggccgccctggagggcgagaggacggacctccgggcagctggtggaggagaggagggaggccaactaggccatcgccaaggcgcaggcggaggccaaattggcgcgggtggaggggagtcttgccagccagcgcaccgaggagtgggaggtgcgctcgtggactcataccgcgagctgggcgcgcggactgctgacttcgaagtgcccgatcgagaggcgggccttcgcttcctcgagtggatgcaagaggaattgttggcgctcccgaccatcgtggagggatttatgtcctttgcctccctcgtcacatgcgaaggggcgatgaacgcgctgtcccgcgaggggtgcagtcactatgaggtcttcgaccgatctgatgaagattttgggcgcgagatttataaagtcgaagaccctatggtgaaggactccgcgggggccctcttcgaccggatgtggggcccctatggtcgagaggtggttagggagcggtctgaccgggcgagggatcagatggtgcgtgccaaggatgtggaggacttcggacccctgaacggcacgtag

SEQ ID NO: 278 - DNA, 1368 bp, Zea mays
  Peptide Sequence Number=SeqID_43653
atgctgtctgataacatggatgagagaaaaataagttttgtgctcacaaaagatccacccagtgatctagaggtaagcataactcccatcaagcgtccaaggcagcgaacaaatgttgatgaagaaactatagaagtgtcgattgatgcatataaggagtggcttgcaatactacaacttgataatccagaaacggtattgtatgaacgacaaagcaatgatgacctaatattatcagatgaagaaattcatggcagcagcaaacctactgctaattggccatctcatgctagacgtcataggaaaagagatcctgatgttattggtatatatgtagataacgatggagtcttcaaaaaggaggggcgtggtacccttaagggtatagcagcagccaccaagcgaatcaagaacggtgatcacaaacttaagattgaattttcatctaagcttggaggtcctgtaggaccaaacgctcgcacttttgtggatgaaatcgtattgtttacaaagaaaaaggcaccactcattggagtgaaaaagtggaaagatatagagctcaatgttagatcttctatagcctctgacgtactgcgaaggtgggagtttctaaccaatgaggacgcgcatgaaaagatctggtctgttgctaaggagagatacaaaggatggcgatcaacgttaagctcaacatacaaggcatacaatagttatgctgaaaggatgaaaaacaagcctgaagatgtagacatcgtcgagtggcattacatggtgttgtattttggatctgagaaattccagaaaataagcagtcggaactcggaaaaccgtcagaaacaaagaacgaagcatataatgggttctagaactttttcccaaataagctttcaacagagagatccagaaactggtatagaaccaaccgatctatccctttggatgattactcattgtaaaaatgatgaatggtcggaagaggcttcacgtggcatttatgagtacgcagctgagaaaattgctgagaaaatgtatcaaacagaaagatttgatctaacaagagaagaggaaaatgctattttccaaacaacattcaaggaaacaacaggatgtaaggcaaaccgacttcatggtcatgggtacctatcaagatatccaacaagaagtcaagtgatggaatcaaagttcctcgaacgagctcgtgccacggttgcaaccaaccaaaaaaacattgaactcgaaagtcaggtccagttgttaaatgaaaaacttgcgtatgaggttgcagaacgagaaataatactccaggaaaaatttcaatcactgcaagaagaagaagaaaaaaaagacaagtgcttagagaagaaatga

SEQ ID NO: 279 - DNA, 486 bp, Zea mays
  Peptide Sequence Number=SeqID_43654
atggaactcgacagcggcgatctgggcgagcacaacagggagccgggacgagatcgcggccgagggagctctggccggcatgggcgcgatggccagggagctatgcgcaggggcgagcaccatggggagctcggcggggaagagacaatcaccagggagctgggcgcggctggaccaaatctgagctggagctcgtggcaccggaggagcaggggaaaagcactgcggcgagcgtggggagggctcaggccgggcacgcaggaagcaaggcgcaacgtccatggtgagcatagggagatggggaaaagcggctcggtccgagtgccatggaaggggaagcttcggggaggagctcggttagaggagtgggaggccgcggcgcgcaggagcttgcgcgcgcagactgggcgagctccatgccggggccagggacgcacgcggaagctccggggaagaagaagacgcgagggagggaaagaagtctag

SEQ ID NO: 280 - DNA, 438 bp, Zea mays
  Peptide Sequence Number=SeqID_43655
atggagtcatggctacctgctcagagggaccctgcagcagcagatttattgagcaccagaattcaggagtcgttctttcgagctcagatgtcagcccagatagctttgcatgcacatcagctattggatctccctgcttttctgttagcaaccggtgcggattctaaggtgcacctctcctatctgcatggtctactcactgtactgactaccagcgatcaaggacaccgtgtagatggtcttcgtgcccggttgcacctaccatatgtgcattatctctgctacatcttcgcgcagctgatctggccaccgcagttccagggcaccctcgaggcctcacgcctccaatttggctcctaccgtccagcccctaaggatccagtgccagtaccagatctagtgccagacactcaggcagaggatgcggcattccattag

SEQ ID NO: 281 - DNA, 111 bp, Zea mays
  Peptide Sequence Number=SeqID_43656
atgggagacccagtctcaggacgtgtgaggggtgaagtctgcgcccggcttcactcaggtattttcggattcagaattatggatatggagcacgaccaggacgaaggctga

SEQ ID NO: 282 - DNA, 282 bp, Zea mays
  Peptide Sequence Number=SeqID_43657
atggaccggtcgattccagtcaccaccgccatcgagccgtacctcgctgtgactgccagaacctcccggagccaaccccgcccctcgccggacctccctcgccgccgcatacatgtttcttactcattgcattcgatagattgcaacctcgctgacggagaatacatcctcgtgccggagcaaggagttgctcaggaggtagccccagatccagcaccagagcctgccccagaggatctgcctgccccagctttggaaggcaagccccagttttatgcataa

SEQ ID NO: 283 - DNA, 711 bp, Zea mays
  Peptide Sequence Number=SeqID_43658
atgacgacgcaaggggcaggaagggcggtttccacttctctggctaagtctctcgggttgcgaaaacctaagagggaggcaggaagcggagcaaagaaccgtcaccagaccctctcccgggagaagcgggcgacgcttcgccttcgccataataaccgcgccaaaaaaggctggccccccgaagggttcgacagccgcctcagattgcgtgggccctacacccactactggtcagaggttcgaaggtcggccccccgaagggttccacggccgcctcaggctgctcgggctccgcgcccattactgatcaggggttcgaaggctggcccccgaagggttcacagccgcctcagacaccgagcgagggatgaccatgggtacgttcgatacataaccaaggctcgggctgcgctcccgagctcaccggagacaccatgttcggcgcccatcgagggcaacatggcgctttcccccctcctccttgcggaaaggcgacgcaggggcgtatgtaaaaaagccgagtctgtccctgatcgccctctcgccctgcgcagaggctcgggggctgctctcgcaaacccggctccggccgaaccgttgaaagcgtcaacataccagcccgagaacttgggacccgaccgtacacccgggctacggccagctcgcatgagggaacaaccagaccagccgaagcattacgcgaggcattaa

SEQ ID NO: 284 - DNA, 432 bp, Zea mays
  Peptide Sequence Number=SeqID_43659
atgacttctcatggatccttggacgaagggaatgcacagtcccacacggacgggcttgcacgagagggtttcccccgtatcttgtgggagctatttgagaagcaccgagtgccccacagtagggtgaggatgaccctagagcctcatcccctgcagccaggctggcgttcgctggactctgagtcttttggatacagggctgaggatactatcaaggcgattgctcttcacggactgaccaccttctgtggtttccaccccttggagctgtccactcaccccattggtttgttccccgcggagaaggaggacgacccaatgtggaaggaccgagtggagcacgccaaggatatatgggctatctacccaggtcagactgctcacttgacggtgcggtgcatgaatgccctgtatcgtctgcaagtgatgtga

SEQ ID NO: 285 - DNA, 930 bp, Zea mays
  Peptide Sequence Number=SeqID_43660
atgaccgcctcggccacgtcgggaatgcagttcctcgtggtctggatgtgctttagaaacgagcggagggactcgtcgttctggtgcttgatggatttgaggtccctgggctgcaccgtggcgaaggagatgtcagagccattgaagcatgtcctgaccgagcacaattggcaggtacgctgtgatgacatcctccgttgccccagtaacctgggcggccatggactagacgatcagacagtcgcccgggtcctgcttgggctcatatttgtcgacgttcgaaactttgaaattaggcggccactggaccacccggagcagcggggaaagggccgagactccgcaggtcaccaggggctcttggtgccccccgggcgtggtcgcgatggtggtctcgcggcggcaactgatgtcataggtcccacagcctttcccggacttgccggcccgacgctaggctttcatcgaggccgctgtgaagtccgttctcgtaacgcggctccatgccagtgccccgtggttccgatcgtactcctcccgctgcctcagttcgctctcatgaaggcggtcacgcaaagagtgaatgttgctttgtgcgtatcaccgactgttgatgacgtggcgcatgccagcttctggatgagcgtgcgagaggaggtgacgcttcatcctgggaaacgggctgggcagtgtcctataatcctgttctccgaccgcatggtgacgtcgtacactccaacaccgattttgataatggtgtgcctaacgttgtgggggctcctccccctacaaggtgggttcatcgtcggagatagaggcatcttctattctcccgtggatgaagaggacatcggggaaataggggtgtggagccgcccccgtcatcctagctgctgctcttgcgggctgggcaaccaaggtggtctttag

SEQ ID NO: 286 - DNA, 1182 bp, Zea mays
  Peptide Sequence Number=SeqID_43661
atgcaagacgcgtgcaaccgcgccacggttgtgcaccctttcagctccgtcaccagtggcggtccagcgtggaggcccgggcccacacgtcatgtaaccggtgcaccagttactacgtgcaaagaaaccgcactgccacttgcaccaatgccgcatctccttgactgcagaaccagtgcagcgattcgaggcagccccacgcgtgacccaacagtgccaattaagtgcaacgatcacgggggagccctctcccacggcataaagaggacgcacccgtgttccgttcctcgaacgactcgcgcacgcgcaacagatgccccgcgaatcgcccgtcccgtcgcattaactccttggcagggcaagcgacacctctggcaggcgaagcgggcgctgtttcacctccgtcatgatgaccgcgtcaaaaaagggaccgggaaaggggatatttcgaaaaggatccttctcagtgaaggaaacgggccccgagccctcctactgatcaggggttcgaaggttgcgccctgcggggttcggcaaccgccccagagcactcgggctccgagccctttactgatcaggggtttgaaggctggcccctcggaagggttcgacagccaccccagagcatgcagagtcagggatgaccctaggtacgtccgttacatggccgaggctcgggctacgctcccgaggtaccctaggagatttctgagaccagcgggaatgatttgtaatggaatcccaccggagggaggcaccgagccctcggaccctatcaaatgggtccgggtccagcaaatcacctacagggcaaaactgagtcacgacctctcccgagttcagcctcgggcgcaactgggagctccgcctcgcccgacctcaggcctcagcctcggcctcgggagaaggtctccgcctcgcccgaccccaggcctcggcctcagcctcggcctctggagaagtctccgcctcgcccgacctcgggctcggaccgaccgcgccacaggggatacatcattaccctacccctatctagctgcctcaggctacgaaggaacaagaccggttgaaggaaagaaaaggatgaaggcaataggaagggttgatgtccctcaagaagcattcatggccgcgctcagactggaaaaggaggtgctgcaactaacgttcatggacttatag

SEQ ID NO: 287 - DNA, 1086 bp, Zea mays
  Peptide Sequence Number=SeqID_43662
atggcagggacggacgtcgcaggctccgcacgcggctccgatgccgcgctcggcaagacgggcgaaccacccgccgcggcgcgctctggcgcagccaagaaggtgactctcgctctgctagcctccttctcggcgctgctgtacagccagattcagccgccgccgtctaagatccccggcacgccgggcgggcctccggtcacggcgcccagaacaaggctcaaggacggccggcacttggcgtacctggaatccggcgtcccaaaggagaaggccaagtacaagatcatattcgttcacggcttcgactgctgtagatacgacgtgctgaatgtctcccaggggctgttggaagagctgggaatttacctgctgtcctttgaccggcccgggtacgccgagagcgacgcccacccggcccggacagagaagagcgtcgcccttgacatcgcggagctggcggacaatctccagctcggccccaagttccatctcatcggcttctccatgggcggcgagatcatgtggagctgcctcaagtacatcccgcacaggctcgccggcgtggcgattcttgccccggtgggcaactactggtggtccggcttcccgccggacgtgttcaaggaggcgtggcgcgtgcagtttccgcaagaccagcgcgcggtctgggtcgctcaccacctgccgtggctgacgcactggtggaacacccagaagctgttccgcggatccagcgtcaaggacggcgaccctgccatgctatccaaggaggacaggcttaagcaggtcagacagcagggagagcacgactcgctccaccgcgacatgatggtcggtttcgggaagtgggactggagcccgctggagatggagaacccgttcgccggcggccaagacgaggtgaaggtgtacctgtggcacggcgtcgaggacctctacgtgccggttcaactgtcgcggtacatcagcgagaggctcccatgggtcatctaccatgagctcccgacggccggccacctcttcccggtcgccgacggcatgcccgacgctatcgtcaggtcgcttctgctcggagatgagtga

SEQ ID NO: 288 - DNA, 477 bp, Zea mays
  Peptide Sequence Number=SeqID_43663
atggtgcggacgaagaatgtctcagcgtcagggggaggagacgacgaggacccttcaagccccttcaggcaggtcaagggaaagattgtttaccttgagcagcagaagggcaggaagaagcgtcgtatggacagagccgctcatgcactccacagtctgtgctattgcacctcggatcctccttgtcgccctcatagcggagttgcacctgctacagctcacgtcgtggccctgttcagacctcctttcacagatgggtcgcgacgatctcctgctgacttcactactgcagcgaagttcctatatgagctgatgagacggacagtgctacccaggatgggatacagggaggtcactacccatattcagctatggctacttggtgccatgatctcacactccaaattcgacgtggttggcttccttatctgtgagatcgaggacacggtattggatggtctccgtgctcgccgttag

SEQ ID NO: 289 - DNA, 591 bp, Zea mays
  Peptide Sequence Number=SeqID_43664
atggcgcctcctgttgacgtggctggtctgcgccctaggttgggcgatgtggaagctccttcgaagccgaggtcgagtctgtcttccgtggtcgaggttgagtccgagcccctgggtcgggcgaggcggagttcgtcgtcttctagggctgagcccaagtccgagccctgggtcgggcggagcggagttcgccgtcttccggggctgagcccgagtccgagccctgggtcgggcggagcggagttcgccgtcttccggggccgagcccgagtccgagccctgggtcgggcagagcggagttcgccgtcttccggggccgagcccgagtccgagccctgggtcgggcggagcggagttcgccgtcttccgggacttagcccgagtccgagcactgggtcgagcgaagcggagcttcctatgatgccttcggcagggcctgactgcccgtcagtttcactctgtcaagtggcaccgcagtcggagtggcgcaggcggcgctgtccttctgtcaggtcgctttatgctgatgggggttaccagctgagaattaggagccttgagggtacccctaattatggtccccgacagtag

SEQ ID NO: 290 - DNA, 1047 bp, Zea mays
  Peptide Sequence Number=SeqID_43665
atgaacaaaaacactagcattcaaagtgccattacaaacggaactccggttccacctccgcagggacgaacaaccccactcgatgcgggggggcctgcggagcaacagaagaccgacgaatggcccgtcgtcgcccgctccagcagcggcgacgacgacgacttctgctccggggggccgaacagcggcagcactgacctcagggcggatgctgttgccaagaggcccccgcccatgcccaaactcgtgaggcaaggacgggcagaaggccatagagttggaggtcggtccgtgggcggccctggctatctcatcggcggaagaacctcttccagctgccgtggtagacgccggcgccggaagtggctccgaagccactcgcgtccgagagccaggcacgctgcagctgccgacgccccggacgacgaccgcccttccctccgatcactgagggaaggagcgggccaccgcccacgcaggggccgaccccaactcggcacactcccctccccagccctggtgatgaaaatccttgaggctgagggaggggcagaggccgcagcccggctcgctttcccccaccatcaaactggagggaccgggaaaggggataccccgaaaaggatccttccccgtgaaggaaccaggctccgagcctccctactgatcagaggttcgaaggctggccccccggaagggttcgacagccgcctcagatcgcgtgggccctacacccactactggtcagaggttcgaaggccggcccctcggaagggttccacggccgcctcaggctacccgggctccgcgcccattactgatcaggggttcgaaggctggcccccgaagggttcacagccgcctcagacgcgagcgagggatgaccacagaggctcgggggctgctctcgcaaacccggctccggccgaaccgttgacagcgtcaacataccagcccgagaacttggggcccgaccgtacacccgggctacggccagctcgcatgagggaacaaccagaccagccgaagcattacgcaaggcattaa

SEQ ID NO: 291 - DNA, 363 bp, Zea mays
  Peptide Sequence Number=SeqID_43666
atggctcaccagagagctcagtccacgcgcgggggcgggcgaccaaagtccggcgagggtgatcttcgcctttcggtgaagttctgccgggtccgagggcttggaaagcttcacgggcctatggcggagctaaccgaagcgctggcgcgacttgggggtgactggagtgggctggccacggtggccgaggctctagcggcaatggcgggcggaaaagagctcgccggagctaaggaggggtgtttggccggcggtgagatttggagcccggaaatccggtctgtctccctgctcaaacccgaggcaatccagggttttgtcgtgtctagggctcgcgttctaatgccatcttctggcatgtga

SEQ ID NO: 292 - DNA, 516 bp, Zea mays
  Peptide Sequence Number=SeqID_43667
atggccttgctagaccctcccaagtgcttcaagtccgaggtggcactcaacttggtgtgcaacctgctcggatggggtgtgctggcgttcgtcggaaggatctgtgtcggcacctctcccctcggcgatcttgccgccggggagttcgtgctcttcgtctccaacctcccctgcgggttggtgctcccgatctcgtctttcttcgtgctgctgctggaggagcttggcctccaacctcagcacctcacgccccacttcatcctccaggcggccgactttgcctacctctgcgagatgtctgtgggggcgacgcttcttctgccagcattcggacggaagggtgttgtgcaacgaccttccggggctggaaagcgagctgagctgcagctccatctttcgcggctccttcgccttggcgcacgtattgaggaggccaccaccactggcaagatgcaacaccgggttgctgccagcgtcgctgttcccaatggctgccaccgtgttaagagtgagtga

SEQ ID NO: 293 - DNA, 810 bp, Zea mays
  Peptide Sequence Number=SeqID_43668
atggtgtgccgcctacttggatgggatgtgccggtgctcggtggaaggacttgctgggaggacttgtgctgctgctggaggggcttggcctctagcctctacccgtggcgtcctgcttcatcttttaggcgaccatcatcgcctacctccgtgggatgtccatggatgcgacgctccctcctgcttcttcctccagcattcggggggaaggatggtcaccagcctcatgaaggtggacaacgggctgagtcacggctccatccctcgcacccccaacactttggggtgggaagcgagtcgtgctgcggctccatctctttggctttgaaggatttggtgtcgcctctgacgctgcctttcgccgccaagcggggcgtggctgtccgtccaccgaacgggcgacgctcgcgctgtacgcaggtccgccacatccatggcgtcccctgcgccgccggccacaccgttctgatgccgcctggggggtcgtacaagacgtcgtacgccgtggaggtggcggccgcgttcttggatgaggtggctgcttccgctggtgggccgctcgaagtagaggtggtcgccgccgttggtgaggctgctggagctagcttccaacgtgaccctgctggcccacggtacagaaccaggctgagcggctacacgggctctggaccaccccaggagacaagctttcgagtacagaaccaggctaagtggccacacaggttccggaccaccccatggaacgggctccccttctttagaaccgcccccaggctgtcaggccctcctgctttcgcagagaggtcctaa

SEQ ID NO: 294 - DNA, 294 bp, Zea mays
  Peptide Sequence Number=SeqID_43669
atggaggaagaaaggggcggaggggcttaccagcggcgagacagctctggtgaggtggtcgagggtgtaagggaggtcctgagggtcacggcgatgtgcgggtcaccgtcggggatggcgggcgaccaaagtccggtgaggttctgccgggtccgagcgcttggaaagcttcacgggccactggcgaagctaaccgaggggcaggcgcaacttggacgcgacaggagcgggctggccgtggtggccgaggcttgggcagtggtggcgggcggaggaaaagctcgccagagctaa

SEQ ID NO: 295 - DNA, 738 bp, Zea mays
  Peptide Sequence Number=SeqID_43670
atgccttctcactgtagtaaggggtaccactgtttcagggtaccgacagtggcccccgggcccacctcaggggaggatacgagcctgcaggaaccggcacccaaggaggatgactcgtgggcccaggcccccaagtcagagactgggctgttggtttcgtcaggggtgaagaggcgcactaccgcgggcggcggcttgctcctctcgcggcggcttgctcctctcgcggcggttcgccttcttcgcactcggagaccgaggcccaaggagtatgactcgtgggcccgggcccccatgtcagaggatggtccgctgctttcggcagatatgaagaggcacggtgaatcgctcctcgcgtggcggttcgccttcttcgcacttggagatcaacgcccaaggaatgaagaggcgtggcggtttgctcctcgcatggtggttcgctttcttcgcactcggacaccaacgcccaaggagtatgactcgtgggcccgggcccccatgacagaggctagtccactgctttcggcggagatgaagaggcgcggcggttcgctcctcgcgtggcagttcgccttcttcgcacacgaagaccgatgcccaaggagtatgactcgtgggcctgggccccagtgtcagaggctgggtcgccttggtgcacgtcaggcgagattttctgtggcgtctcggggcgtgagtgggggagtctttcttaaaaagggattcccccgagtgtggtag

SEQ ID NO: 296 - DNA, 627 bp, Zea mays
  Peptide Sequence Number=SeqID_43671
atgcagttgtttggcagaggggtttgcttgccaaaagcactagatgggtctaaaaatcaagatttagctttttcaagttttagtgtgaccctcttaaatctaaatcatggatcaagcagtctcattagctacgagaagcaaacgattcgaatcgagtttcaaccttgcaagatcagggctcaccaccttggcgtacaatgcctcactgaccccgactgccgtcgtgcagtgaccgcacttgtacccaccataaccggaatgggagaccacgtctcaggtcgcgtgatgggtaaagtctgcgggcaggcgacagaggtcgttagcggcacctgctccggccaaaccacggcggtagggttcaatcaaagtgcacgaggagctccactgggtgatgtagaggctatgcgcgcaaggaatcgagaaatggttcagtggattacccggtccacgtgctccggcggggtcacgaactccgacgagcgtgatctcactgctccggtggggctggtcctcaattcaagcttgggaaagcttcatggcctcccgaggaagctattcgagggctcggatcgagcggaggtgggtgggattggtttggtcacggtggtcgccctcgggcggctctag

SEQ ID NO: 297 - DNA, 345 bp, Zea mays
  Peptide Sequence Number=SeqID_43672
atggctgaacccacaaagtggaggagcaaaggcaaggcactcacaagtgtcaagacttgggatgactcttcaagcgaagatgatcctccaaggactcgtagccaccgctcttcatcacgctcttcacggtcatcacacaaatgccttatggcaagagttcttgttaagaatgttgttatagaaacatcttcgaatgagattacaatggagaatgagcaattaaagcaagaggtggctcgccttagccaggccttgtatgacaagaaatgcaaagccaaacaaatccaacctcctcaggataacaccattgagggagtgaacaagcccatggaggagaaactgtga

SEQ ID NO: 298 - DNA, 579 bp, Zea mays
  Peptide Sequence Number=SeqID_43673
atgaagatgaaggttatgcaagacataccttcgtacatcgaagctcccttgcgcatagcttcggctctgcgtcagccttcgtattctttgtgcttctcacactatggttccgatccgagtccaaaggaccttcggaagacgaaggcccccaacaacatgtattcccgcttaaatcttgtgattaatgagctccactctattggaatttataagctaggtgatgcagacattgtgaggaagatcatctccctactaccacaacaaatatatgggagcatcatcaccatcctccacaacctcgaggacttgagccaaatgaccccgacgattatgattggaaaaattgtggcatttgagatgtcgcggaaaatgggtcaacaagaggagccaacttcttcaaagccatatggctttgcatgtgatgaacacaaaaagatgaaaggcaagaagaaggctccaagctcaagtgaagaagaggaagaagaagatgatgatgatgatcaaccatcaacatcatccttcgaggatgtcacacccggttttagaaggcaaaccaaatgcaaaccatgtacgtgctag

SEQ ID NO: 299 - DNA, 519 bp, Zea mays
  Peptide Sequence Number=SeqID_43674
atgcaggaactcatggctcagcagaatgagattctgcgacagttggctcagcgttatccaccacctcagcactatggtggtggtgatcaccatcaacgtcccccagcagcggccactaatcaggagttcctcagcactcagccgccattgttcactcgggcagaggatccacttgatgctgatgtatggctcagggtagtggaatccaaattcccactgcttaatggagtttgttcagatgtggctaagtacgctcaggccttcaatgacctgtgtcagtatgcaggctatcatgctgacacagatgagaagaagagggacatgttcaggaggggtctcagtactaagctccgcgaccgtctcaacacagtcagggccaaaagcttcaatgagttagtcaacatggccatttctcaggaagattgcatcaccgcccgccaggcagaaaagaagaggaagacccctatggcaggacctttagctcagcctcagcgcttcagaattgtgtctgacacttag

SEQ ID NO: 300 - DNA, 231 bp, Zea mays
  Peptide Sequence Number=SeqID_43675
atgtccctgatctcttggtccaactcctcctcctggagtgttggactggtggctgtccttttctggctccgagcttctcagagagaaagagtttcctggtttgggtccagtggctgcagtgaagcagcccctgtcgctgaagctttcttcggcggcatgacgaagaacataaagaatgttgaattacatttgtatctttggcttgatagaagacaattctatgaggactag

SEQ ID NO: 301 - DNA, 513 bp, Zea mays
  Peptide Sequence Number=SeqID_43676
atggttgccccgcctcctcctcctgcggcgaggaaggcggcaggacaaacccggatgctgctcttccgccatggggggaagacgtcgtcgagttcaccgccgtcgggcaaagttacggccatcgtcgctgtctcgctgcggggggaggagtaccatgtcgtagctgccgtcgagggacatgaactcgagactcccgaagcagagcaacgtcctgggctgaagaggttgctggagactacccatctggaactcaacgggaagttgttcgttaacacgcagcaggcccctacctggcgcgccaactgtcagcgtttcgaccccgggggggtccctggaccgacgagtaaatttgtcgctgtgcgtctcagcccagatgggttggcgcgagatggaacacaagggaggaaaacgtggcttgtctcagcccagatgggtatggctgagttgatctatggcactaacttaggcttaagtgaattaggagtatggttttatcctttgtaccagcattaa

SEQ ID NO: 302 - DNA, 1782 bp, Zea mays
  Peptide Sequence Number=SeqID_43677
atggaatccttcgaccaaatgagagcgcacgtaagcggcaaggccgaccaagtcaagggactcctacgcctccgggatacggatacctcactcatcacctttcgcaaaaagttcgggcatcggcagggggagcagcagcaccctcgacgttgtttccacccacggcggaacctggcctggcctcggacggcgacccagggaaaaggacctccacctaagggaggacgccagcaccatgccaacagatgtcttggccaagctccagcagttgctaccacatcttccttggcctgggaagccgccatctcccgggccgacgaagtctctttccgagccgactccacgtctgtccgcgctaacaccgctgcctccggctctggctcatcgcagagcagccgagggttccaaaaactgagcaagggaagcctagagcggcaagaccgacagagccgagggactcctacgcctccaggatacggacacctcactcgtcaccttccgcgaaaggcaaccgacgctcggttaagtgacttagacatcggcagaaccctcggcggttctcccgacctacgacaaatgtctaagtacttgaagcgattacattttgctccggcaaaaacccggtatatctcctcacaaacgggactccggttccgctcccgcgggtatgaacaacctccacaccggggggcccgctggatgccgaactctaagcggcttgccggcgacctttgcagcagcagagacaatgacctccaccttgggcggctaaacagcagcagcgatgacctcaggacaaacgctgctgtgaagaggccctcgcccacgtccccacacgaggggcgaggacaagccgctaaggccgaagagttagagggcgccgaccgtgggttcgaacccaccgacaccgcgccggcgaacagcggctgccccaaagctcgccggcaggtcctcactcccgtcatcgccgaggccgccccaaaacacgagcaccgccctcgcggcgtacaacgtgctgggcgaccccccggcgtggctgacgggagcagcagttcgcctacccccgcatggctggaggaagcctccgcagggctggaggatgcctttctcccccaaacgctgggggaagaaaaggggttctccccctacgacacgggggctgggacccacacgtcatacgagctgatccgaagcacgaagaagaaaccggtggacgaaagggtggaccaccacgcgacaggcatccaactgcaccgcaactgtgcgccccttcggctccgtctacatccggtggaccagcgcaaaggaagcgggcccgcatgtcatgtgaccggcgcgccggttacgacgtgcgagaagttacaccgccactcgcgccaatgctgcgcctcctcgactgcggaaccagtgccgcgactcgaggtagccctgcgcatgacccaacagtgccaattaaaggcgacggccacgggtcagtcagccgcgggagaccgggaaaggggacattgtggaaaggatccttctcggtggaggaagcgggccccgagccctcctactgatcaggggttcgaaggctggcccctcgaaagggtttcgacagccgccccagagcactcggacttcaatcccattactgatcagggagcacgcagagtgagggatgactctgggtacgttcgatacataactgaggctcgggctatgctcccgaggggtctgggtccagcgaatcacccgcaggtacttttggagcgcgcctctaggccaccagccgacccctaa

SEQ ID NO: 303 - DNA, 927 bp, Zea mays
  Peptide Sequence Number=SeqID_43678
atggtgacctccagttcgacggcgggggaaagcaaaccgggccgcggcctctgcccctccctcagcctcgaggattttcatcaccagggctggggaggggactgccgcgtgcctggctctaggacgcgagtggcttcggaaccgctctcggcgtcggtttctgccacggcagctggaagaggttcttccgtcgacgagatagccagggccgcccacagaccgacctccaactctacggccttccgcccgtccttgcctcacgagtttgggcatgggcgggggcctcctggcagcagcatccgccctgaggtcatcgctgccgctgtttggcccctcggagcagaagtcgtcatcgtcgccgctgccggagcgggtgacggcgcgccgttcgtcggtcttctgttgctccgcaggcccccccatcgagtggggttgttcgtacctgcggaggaatctctcggctcggtccgccttgttgtccgaggcttcccttgcttagttaaaggaacccctcggccgctctttgatgagccgaggccaggggtagcggtgtcagcacgaacagaggcggagttggctcgaaaagaagacctggtcggccggagcctggccgggtcgtccgttagcgggaccgacgccggaattgacctgccgaggcctctggtcgggctgatgtcctcgggggacagctggccgaggccccggggtgatcgactgagccgcctgctcgggccggatcctcggggaagaccctggcggcgacggcccgggcttggtgatgacgccgtccttcagagtggaggtcttcggaccgcgtcgccgtccgaggctgggtcggacttcgccgaaggtgttgtcgacgctgagggtgctgctgctcccttcaagcgtcaagatctgagcctgcaggatcggatcatcttgtag

SEQ ID NO: 304 - DNA, 1416 bp, Zea mays
  Peptide Sequence Number=SeqID_43679
atggctgaaaggtaccaactcccgcggagttgcgttcctccaacgacgaggcggaaagacggtgggtatcccccatccgggggcttggaaggaggaaagacacgatacataagggagcgcgaagacatggtcgccttccaagggggtcaccctccttttaaaggcgactctccctacttgcgtccccagccgtcgtgggccgagtcttctccaacacactccaaggtcctcccctacggcgcgggggctgggccccacacgtcatgcaagccggctcagagcagaagaagccaaactgccgcgcgcgctgcaccgccacttgcgccaccaccacgcctcctcgactgcggaaccaataccgcgggcaggagcagcggtcacgtcgtcagcccagcctacgtcccatccaggggcgacgagagaaccctctctcacggcgtgaagacaacgcgcccgtgttccgttcctcgaatggctcgcgcacgcgcgacggccgcctcgcgaaccactcgccccgtcgcattaactccgcggcgggacatgcggcgcctctggcaggagaagcaggcgacgcttcgccttcgccataatgaccgcgtcaaaaaagccgcctcagatcgcgtgggctctacacccactactggtcagaggttcgaaggccggcccctcgaaagggttcaacagccgcctcaggctactcgggctctgcgcccactactgatcaggggttcgaaggctggcccccgaagggttcacagccgccttagacacagagcgagggatgaccatgggtacgttcgatacataaccaaggctcgggctgcgctcccgagctcaccggagacaccatgttcggcgcccatcgagggcaacatggcgctctcccccctcctccttgcggaaaggcgacgcaggggcaggctcaggggctgctctcgcaaacccggctccggccgaaccattgacagcgtcaacataccagcccgagaacttgggacccgaccgtacacccgggatacggccagctcgcatgagggaacgaccagaccagccgaagcattacgcgaggcattaagacctcggaggagtcaaaccactcctccgaggcctcgggggctacacccggcgggtgcgctcgcgcgcacccaccggaacaaaacgcaaccgagaaaggctggtccccttgcaaaaaagtgcgacgaaagcctccaagcgagtgctaacactcccttcgaggctcgggggctactgacggggaccataattaggggtaccctcaaggctcctaattctcagctggctaagccccagaagacggcgaactccgctccgcccgacccagggctcggactcgggctaagccctggaagacggcgaactccgctctgcccgacccagggctcggactcgggctaa

SEQ ID NO: 305 - DNA, 237 bp, Zea mays
  Peptide Sequence Number=SeqID_43680
atggacgaaggccttaagccgaagtttctcaagctttctaagcttcagtttgaaggacacactttcgtcatttccgaagaaaagatgtctcaagataagaaagttgctgctgagacggagctaaccgaagaggagaagctctttgagcagaagaaggttgtggatccttatatagctgggtttttagaatcaatggcaaaatcaaatacagagaagattacaaaagagatattgtag

SEQ ID NO: 306 - DNA, 810 bp, Zea mays
  Peptide Sequence Number=SeqID_43681
atgatgccggagtcgcatccgcatccccacgcgggggcggtgctggcgtcgacgtctagccgtcggagcctcagcttggggtcctccatctcgcagtcgttccggcagatggacacggaggaccccttcgcgcggtcgcagtcggagcatgagcaccgcgacgacgaggagaacctgcgctgggccgcgctcgagaagctgcccacctacgaccgcatgcgccagggtatcctacgccgggcgctcgaccaacaacaagagagcggcggcggcggcgtcgagatcgtcgacatccacaagctggccgccggcgacgggggccgtgcgctcctggagcgcctcttccaggacgacagcgagcgattcctgcgccggctcagggaccgaatcgacatggttggcatcgagctccccacagtggaagttcggtacgagcagttgacggtggaggctgacgtgattaccgccgggagggccctcccgacgctgtggaacgccgccaccaattttcttcagatcagaggaggtcgtcattggaggacgcccaagacgtgtcggatcggagccatcgtcgctagaggacgcacgaccgccgatcctcacagctcgtgccttgcgcggtcgtcgctgccgccagagccacacgcgcctgacgtggcctccactactggagatggctatgcctcatgcgactgccgtcgccacccgcgcccctcgtggccgctgctgccaccaccaaagccaatcgtgccactgcagtcgccaatggtgcctcgcgtggccatcgccgcgcgctcgtacctagtgtag

SEQ ID NO: 307 - DNA, 528 bp, Zea mays
  Peptide Sequence Number=SeqID_43682
atgtcaggtcaattcacaactccactcagagtgatgacagaggaagtcagctatagaggccgcaatatacttcacaatctttggggcagcaacaaagctctttccggtcgccagctccaagaggcagaggcgccaggggcttcggaggaagatatggggatcagccaaggaagatttactgcctattttgtggtgaagacaagggccatactacaagaatgtgccaaatcaccattcaaaagcagaaggagatcgcagaagccgaagcccggcaaaatcaaccgaagcaggtcctgcacactgcttcgtgtcactcaccctacataccagaatatgtgggtaatcatcctgcagcttctgttgcttcggctagtcagccacaggcttcttggccacaacttccacctccgccaccactacaacctgcctattcacgaggacagcagccagaagggagccaacagactcatcagcagcgagatttcagggaggaatccgaagctcgcacagtcaacaatactgtgctag

SEQ ID NO: 308 - DNA, 684 bp, Zea mays
  Peptide Sequence Number=SeqID_43683
atggagctctcggaggagcaggagtcggagggatggatcgctagacccatcactcgtgacaccgctcgcgggtgtcacatccacgacgctctcgacaccttgttgcgtcgggccttcgaccgacacacttggtccatcgagtaccgttgtgtagtctaccagcattgttgtgggttatactcggaccagtgggaggctacttgcttggtgcgctgtcgggacaatgatctccggggtgcagagacattctcagagaactattctatcactgagagggatactgccgaggtagccatgcaagatgcagcacaatgtgcactttcgcagtattgctcgttgtttagcggggtagctgatggccttgacctgaagtactaccctcgccactcgaccgacagtgttggaggtgtgattgtcttgcctgttggtgaaggcaatcccaggctgaacatcatggtcaacctagccatcgtgctcaacaccgagctggaccacgccattgacgagttgggcaaggttcaggcggaggttgcggaattgcgtgctgagtgcacaacgcgccactatttggatggtggttctcccacccctatcaggattcagcacccttaccattcaccgccccatggtcacttcgattatggtacccctgactgcatgacccagatagatttggatccatag

SEQ ID NO: 309 - DNA, 3954 bp, Zea mays
  Peptide Sequence Number=SeqID_43684
atgaaattcatctgcctacgcccgccggtcgccagagcctggatccctgagggagaggcggagaagcagcagaccaggggctcagcttcatcatttcccaaaatccccaagctagtagacgaagaggtgcgagtagatcgaatgcggggagttaggggtctcattggacgcttcggttcttcaaacaagaggaacatcaccatacttaagaatgtcaatggtatcctgaagccatccaggatgacgcttcttcttgggcctccatcctcagggaagagcacactaatgcgagcactcgctggcaaacttgacaaaaatctcaaggtctctggcagcattacgtattgtggccatccaatttcagaattctatcctgagaggactagcgcgtatgttggtcaatatgatctccacaatgccgagatgactgtaagggagacacttgatttctctaggcggtgcctaggcattggtgccagatatgagatgattacagaacttgctagaagggagcgggatgccggcattaagccagatcctgagattgatgctttcatgaaagctactgcagtacaaggacaggagactaatattataacagatctcactctcaaggtgcttgggctggacatttgtgctgatgttattattggtgatgagatgatcagaggaatttctggcgggcaaaagaaacgtgtgacaactggggagatgctaacagggccagcaacggctttatttatggacgaaatatccactggtttggatagctcgagcacatttcagattgtaaagtttatgaggcatttggtccatgtaatgaatgaaactgtcatgatctctctgctccagccaccgccagagacctacaatctttttgatgacataatcctgctatcagaaggatacatagtgtaccatgggccacgcgagaatatcctggaattctttgagtctgtcggtttccggtgccctgacaggaaaggtgtcgcagactttcttcaagaggttacttccaagaaagaccagcaacaatattggtatcttgatcaggagcaatatcattatgtatctgtacccgactttgcagaacgtttcaaatcattccatgcatgccaacagatgcagaaggagttgcaaataccttttgaaaagtccaaaacccatcctgctgcgttgaccaccaaaaaatatgggctttctagctgggaatcactcaaggcagtgatgtcaagggagcagctattgatgaagcgcaactctttcatctatattttcaaggtcacagtgttgatcatccttgcattcgtgtccatgactgtgtttctcagaacaaagatgccccatgggcaaattgctgatggcaccaaattctttggggccctgacttttggtttaataacgatcatgttcaatgggttcgctgagctacaattgaccataaagaagctaccagttttctacaaacatagggatttcttattcttccctgcatggacctttggagtggcaaacatactcttaaaagttcctatctcgctcgtggaatcagtagtatgggttgttctcacatactatgtgatgggctttgcacctgctgcaggaaggttctttcgtcagtttatagctttctttgccacacaccaaatggcaatggctttatttcggtttcttggtgctgttttgaaaacaatggttgtggccaatacttttgggatgtttgtgctgctcattattttcatttttggaggatttgtcatccgtagaaatgacattaaaccttggtggatctggggttattgggcatcacctatgatgtatagccaaaatgcaatatctatcaacgaattccttgctagtaggtgggctattccaaacaatgacacgactattgatgcaccaacagtaggcaaagcaattcttaaatccaaaggcttgtttactgaagaatggggattttggctttccattggagcccttataggattcattattttgttcaacagtctctacctttgggcccttacatatttaagtcctagtagtggctccaatgccctagtttcagaaggtgaagatgatgtaaatgaaatagcattgaaagaaagaagcagagatgcaagaagcgaagatgaaatatcccaagttgtatacggggatctaggcactaatggagcaacaaacacactagttcagtcacgagtcactttgcctttccagcctctttcactttgctttaaccatgtaaactattacgtcgacatgcctgcggaaatgaaggaacaaggattcacagaaagccgtttacaactgctctctgatatcagtggtgcttttaggccaggggttctaacagcattagttggtgtgagtggagctggaaagaccactttaatggatgtcctggcaggaaggaaaactagtggagccattgaaggagatattaccctgtccggataccccaaaaaacaagaaacttttgcccggattagtggttattgtgaacaaaccgatatccattctccgaatgttactgtatttgaatccatcacgtactctgcatggttgcgtctttcctcggatattgatgatggtacgaaaaagatgtttgtggaggaagtgatggcccttgtagagcttgatgtgttgtgcgacgctcttgtgggtctccctggagttagtgggttatcaactgagcaaagaaaaaggctgacaattgctgtggagctggtagcaaacccttcgatcatcttcatggatgagccaacttctggtcttgatgctcgagctgctgcgattgtcatgcgtacactactgcttttgaaacgtggaggtcaggttatttatgctggtgaacttggtcgccactctcacaaattagttgaatattttgaggcgattccaggtgttcaaaagatcacagaaggatataatcctgcaacatgggcgctggaagttagctctcctctatccgaggctcgattgaacatgaattttgctgaaatttatgctaactctgtgctttataggaaaaatcaagagctcatcaaggagttgagtgttccctcaccagactaccaggacctgtcattccctacaaaatattcgcagaatttctacaaccaatgcgccgcgaacttttggaagcaataccgttcctattggaagaatccgccctacaatgctatgcgctacctgatgacatttctcttcggccttgtatttggtacagtgttctggcaaaaaggaaagaacatagattcacagcaagatttatataatctactcggagccacttacgctgctaccttctttctgggggcttcaaatagcatcacggttcagcctgttgtatcaattgagcgagcagtgttctaccgtgagaaggcagcggggatgtactctccattatcctacgcatttgctcagacgtgcgtggaggtgatctacaccatcttacaggggatactgtacacagtcatcatatatgcgacgatcggatacgactggaaagcggataagttcttgtacttcctgtttttcatgaccgcgtgcttcaactacttcgggttgttcggcatgatgttggtagcgtgcactccctccgcattgctcgccaacattctcatcacgtttgctctgcctctttggaacctcttcgctggattcctcatcgttagaccggcaataccaatttggtggaggtggtactactgggcgaaccccgtgtcgtggaccatctacggcgttgttgcgtctcagttcggcgagaaccaaggcgagctttcagttcccggtgggaagcccgtggtggtgaagcagttcttgaaggataatctcggcatccagcatgacttactcggctatgtcgtgctagtccatttcgcctacatcattgcgttcttcttcgttttcggttattccatcaagttcttcaacttccagaaacgttag

SEQ ID NO: 310 - DNA, 261 bp, Zea mays
  Peptide Sequence Number=SeqID_43685
atggtgatgcagggggcatctctggctgaggtgcaggggaaggctgcctcccagactccacctcctgctgaggcaagggggaagagtcctgctgctcctattcctattcctgctcctggcatcggtgcttctgctcctcgtgcaggcgacgatgcagtctctccaggtggctggactgacctggcaccgtgtgacgcagtgaacgcttcgccagacgagaaggcaaaagggggatcactgacttacatgcactgcatctaa

SEQ ID NO: 311 - DNA, 750 bp, Zea mays
  Peptide Sequence Number=SeqID_43686
atgaactcaataactctcgttcgcaagctatgcgagtttggttgtctgttccataaggtgtggggcttcatttctgacaacataagccgctcgccctcagatgctgccactgaggtgggcactgttacccaggcattctgctcggcgctccaggaggagctatctgattattacaagctgctggttgttctggaatcgtactcattgaatccaattcccacacctggatctgattcagaagggaggagaggaagtagcgacaaggtcgccaagaccacctggcgcgatgtctcctaccagatcaccaagatcaacatgtacaaggatggtcggcatgtacaagatatgcttaaggtgaggttgcaattcagtatgtgcatatatttcttgggattgaatttgtacaaaggtcctcatatgcttaaggagaaggagttgcttgaaaagcacaatctctggcttgatgaagaactgaaagcaaaagcaaagaacttggctaaactaggaaaaacaaatatggatgagatgtcagcaaatattgctaagtttgaaagagagagatatgaatcttctagctccttgagacgaagcaaagaacacatctctgaactggagcaaaggatatcctacatgaaaaggtggaggtggcccataatgggaaggagcaatcgtgcttgctcccttcttggtttcgctcaactgctcgtgctgtcgcttagctttgtgaccacctacaaggactcaccttaa

SEQ ID NO: 312 - DNA, 288 bp, Zea mays
  Peptide Sequence Number=SeqID_43687
atggatggaaagggctcttttgcagcagatttatcacttcatcattactcattaagcttcggcttactgatcttcggcttcgtcatcctgtacataacaaagcgatataaggaaagtgcaaatttcaaggagaaggtaaagcagcaggcacaggtttattaccggtttgaggtggcttcgagcttcgtcaccagccaagtttcgctcgccctttgcccagatttgagtaacgaatctgtttccaatgcttcgggccaggctggggatgtcatccaagtctgctggtga

SEQ ID NO: 313 - DNA, 561 bp, Zea mays
  Peptide Sequence Number=SeqID_43688
atggcggctctcggcccccttacggaagcaagaggacgtcagcaaggactcgacagctccgacagctgtccttccgccaggctccagtgctcctccgacggccacgacatcacacccactgggtgccaaaacctctctggctgccacaacggcatgaaggaccagggccctcttacagagggttggccgcgcggggacgaggacgagacaggcgctcgcgtgagaccgctcgctccctcacccgcgtggacgcttgtaaccccctactgcaagcgcacccgacctgggcgcgggacgaacacgaaggccgcgggatttccacctctctcacgcccgcctccggcgacctcgcttccccccttcgcgctcggcctcgcgccgacccatctgggctggggcacgcggcgacattcactcgtcggcccagggaccccccggtctcgaaacgccgacaaaaatcttcgaaaacagttggctgaagcaaaattgaaatgtgctattgccgaagctgaccgagacgccagtgactactggaagaattattgggaaaaacagttgtag

SEQ ID NO: 314 - DNA, 348 bp, Zea mays
  Peptide Sequence Number=SeqID_43689
atgatctgtggaaagaatgtggtcaggggggagacattttcccgtgcaaaatctgtccaagcttgggttggactgtctaaagtccccacagaatggtattgtaatagttgtcgcaatcttgtgcaaaaagaaaaggctttagcaaagaacaaaaatgctaaagctgctgggaggcaagctggagttgattccattgaacagataatgaagagagctatacgaaatgtccccatctctgatgatcttggaggttgtgctctatgcaagtgtggagcacaggaacggtggtcgatggctgaggtgaaggtcatgcaggctcgtgctgatagggctgacaatgggctataa

SEQ ID NO: 315 - DNA, 498 bp, Zea mays
  Peptide Sequence Number=SeqID_43690
atggagcctggcggagggacagctgtcggagcggttgggcccttgctgacgtcctcttgcttccgtaagggggctgagagccgccatcgtcacaggcccgagtcagctcggggtagggtgatgatggcgcctcctgttgacgtggctggcctgcgccctaggttgggcgatgtggaggctcctccgaagccgaggtcgagtctgtcttccatggccgaggccgagtccgagcccctgggtcgggcgaggcggaggtcgtcggcagaggacagggcggagtccgagccctggggtcggacgaagcggagttcttcgtcttctggggctgagcccgagtccgagccctggttcgggcggagcggagttcgtcgtcttccgggacttagcccgagtccgagccctgggtcgggcggagcggagttcgccgtcttccgggacttagtccgagtccgagccctgggtcgggcggagcggagttcgccgttgatagtcgcctag

SEQ ID NO: 316 - DNA, 975 bp, Zea mays
  Peptide Sequence Number=SeqID_43691
atggaggttcgctgccaaaccagcttttgtcagaaggaagatggtttccccaagttgctgagagcatgcacagttcacctcggaatcagttgccagccagagtatgatggtcgtgaattcgtcgagcatggcacagagaagtgtgtcgtgacagtatacattggatccagtctgcaccatgtggaatggagtgtcactgctgctgggcacagattcaaagacacctgtcaagtcgtcgctcgcaaggcattgagggccctgtgtcagatctatgaagaagaagtggccgacaccccactcagattctttccgccctttcagagaaaccgtccagtttggatggccaggatgcgtgcattggaagggaagcagctgcttgaggatgaccccacagtcatgtacctcaccgcatacctgctcaccctggatgcacaatatgatttcttggctcgacaccaccctcaagcccgtgcaactgccttggagagtcatgaagtcattgctgttgaagccctgaagcaagccaaggatgagcacgtccagaagttgatggaggcctacttggtaacccataaccaacgtagagccctgcggatccaagagctcgcttcatccaacctagttcaacccatgagagctgaagatccccagattcttgaaggtcacccggtctctatcagaggagagaagaaggcttgggaactcccggaaggagccatagtcttggaaagaattccagtctcccctaaggctatggataagcaagagcaccccgtgtcctcccaagatcccccgccggagttgtttgagcccctcaccatgaagaagattccagcaccgccgccctctgaggagctacaagagccagtcccgcttgaagaagagttcgaccccgtcttgccatctcagtcgccgccagaagaagtcatcaacgtcagctccctcttgacccatccaggagatgtctcagattga

SEQ ID NO: 317 - DNA, 111 bp, Zea mays
  Peptide Sequence Number=SeqID_43692
atggggtacaggcacagtgcttgctctgccgaggctgggtgccgaggtaaagaagaaggcgtcgaggcggatctccaggagttccagggcttcggcgagttcgaggattag

SEQ ID NO: 318 - DNA, 696 bp, Zea mays
  Peptide Sequence Number=SeqID_43693
atggtgacctccagcttgatggtgggggaaagcgagccgggctgcggcctctacccctccctcagcctcaaggattttcatcaccaaggctggggaggggactgcaccgtgcctggctctcggacgcgagtggcttcggagccgctcgcggcgccaacgtctgccacggcagctggaagaggttcttccgccggcgagatagccagggccggccacggaccgacctccaactctacggccttctgcccgtccttgcctcacgagtttgggcatgggcgggggcctcttggcagcagcatccgccctgaggtcagtgctgccgctgttcggcccccccccggagcagaagtcgtcgtcgtcgctgctgctggagcgggtgacggcgcgccgttcgtcggtcttctgttgctccgcaggccctcccctattgagtggggttgttcatacctgcggagggggaaccgaagttccgtttgtaatggcactttgaatgccaactcgcctgttggttgcctgaatcgcttcaccaagcgtgagtcgccccgtgtcaaggtgacgagtgagagtggagatcttcggaccgcgtcgccgtccgaggctaggtcggacctcgccgaaggtgtcgtcgatgccgagggtgctgctgcccccttccagcgtcaagacccgagcctgcaggatcagattgtcttgtag

SEQ ID NO: 319 - DNA, 951 bp, Zea mays
  Peptide Sequence Number=SeqID_43694
atggctgaaaggtaccaactcccacggagttgtgttcctccaacgatgaggcggaaagacggcgggtatcccccatccgggggcttggaaggtggaaagacacgatgcatgagggagcgtgaagacatggtctacttccaagggggtcaccctccttttaaaggcgactatccctacttgtgtccccagccgtcacgggctgagttttctccaacacgctccaaggccctcccctgcggcgtgggggctgggtcccgcatgtcatgcaagccggctcagagcagaagaagccaaaccgtcgcgcgcggtgcgcacgaccgcccagcggttacaagtgaccctccacttttgcccagaccagcgggcgaaaggggcgggcagccatgcaggcggcatgcaaccgcgccaagtggacgcccttctccgactcccaacacgcccagcctggaggcccaggcccacgcgtcatgcaaccggcgcgccgaatgcttcgtgcatgcaactgcaccgccactcgcgccactaccgcgcctcctcgactgcggaaccaataccgcggctcgaggtgacccagcgcacgacccagcagcgccagcctggcgcggcggtcaatgcggccaaaaatgggccggcagtaatgacggtggcagacgggcgggagcagcggtcacgtcgtcagctaagctcacgtcccatccgggggcagcaagagaaccccctctcacgggaccgggaaagggggataccccgaaaaggatccttccccgtgaaggaaccaggctccgagcctccctactgatcagaggttcgaaggctggccccccgaagggttcgacagccgcctcagatcgcgtgggccctacacccactactggtcagaggttcgaaggccggccccccgaagggctccacggccgcctcaggctactcgggctccgcgcccattactga

SEQ ID NO: 320 - DNA, 129 bp, Zea mays
  Peptide Sequence Number=SeqID_43695
atggcgggcggaattgagctcgtcggagctaaggagaggtggctcgccggtgaagggaccgggaaagggggatattttgaaaaaggatccttcccagcgaaggaaacgagccctgagccctcctactga

SEQ ID NO: 321 - DNA, 414 bp, Zea mays
  Peptide Sequence Number=SeqID_43696
atgcgggggaaggtgaactgctgctgcctggccagggtgcagctgtccgtcctccatccggacgacggtcgtgccgtgcacaggcggctgctatcgccggtgctgaagcggcggccgccgctggagaggcttcccaccgcagcggtggtcgcttccgccgacgagaccgtcagtgccacctgcgctcggggcctccggctctttggctttaatggctggttctcgtcccccccgcccaagacggaggtcgttgtcacgctgctggtgcagtggtcgctggcgagccacctggattttgttaccccgcacgccttccggtcgggacaaccaccgagggcgctgccgacgtctgagtctaggtaccattgttaccccaagtacatgtgtttgttctttgtggctgctgaggcctaa

SEQ ID NO: 322 - DNA, 1692 bp, Zea mays
  Peptide Sequence Number=SeqID_43697
atgacgtcggttgctctcaaaccccctatggaagcatggcaacgtcagcaggatccatgccgcaccgacagttgtgcttctacagggctcaagggtgttctaccccaaaaaatgaagtctgtggattgtcctcccgctaatcctaaacgtataaccatcgagtcaagccaagaattccttagtgttgagataccacgtccagcctctattgaagttcctccaaacacaaagcattctgatcatcgtcctgcacctatcgagaaaccatctgttattcatgaagccaatgaacaaactggatctggcgatgacgacgatgactttatgacacctacaaagaagcgtaatgctgctggaagtcctatgaatatcttacggaagacatgcacaaagaggccgaaagtagtagaaactccacggcagacaatgcagaaacttaatgttagatgcaaccctcaggatgttattataaccattaagatattgaatgagagacaacgacaagccgttggtagaaaaggattttccaatattcttgacatgacacttgatgcactgggtagtcgttctcatcttcattggttgatggataagttggaccacaaggatatgactatttgccccggtcaaggcaaggaactaaagattacgaaagaaactgtccaccttatactaggccttccgaatgctggcggtggtaagccactaggaatcgatgaagcagtggcgggcaataacttgagggctgaacttggattgtctaaggatgagttcgttgttgcatctcttcaggaccgattgagaaaaggaaacgatgatgacctctctattagatgcttctttttgatattgttcaatagattgttgttccccacttccagctggggcatatctaaccatgaagtgttattgacggaagaaatggaccgtttccatgagacagactggtgccacttaatttttaacgacctctgcgaagctgcacaaaagtggcatacaagaagcacttctaatgtgtccacgacgatatatggatgctcagttgtcatactactcccattgatcaaggatatgctttcaagtaagatcaagcagctccaaccacgtgaccggcctaaattcattgaaaagtttgttgagtatgattctgaagttggcaaagcgtgttccatcataaaaagtactcttaccaagatggttgtgaagcagtatgaactagcggacacatttgctgagttaattgatgatgtccttcgcgcggagtctggcgacccagacaatgttgcggaagcgcctcaaacagctaaacctccatatatatctcagcatatgtcgtcagaggcacacatccataagggtacccagaatactcaggatctgactacgccatattcacaaccgaatacggagttgacagactgcaaccctatgagctcatatccgtcttcccacttgccgatgtttgacgccacaccgcaaaaacatggaggtgacattgatgcatctcatgacactccaacttacacgaccccccttttttatcagacacctagtggtcatactctcctcgattttgaggagcatgaacgctacagcaagtctcctcagattttttatcaaactgtccttgatgcttatctggacaagacactgccccaactggacaactttgttgactacaaaacggtataa

SEQ ID NO: 323 - DNA, 87 bp, Zea mays
  Peptide Sequence Number=SeqID_43698
atggcgggcggaattgagctcgccggagctaaggagaggtggctggccggtgaagattcgaagggcaggaggagggattgggtgtga

SEQ ID NO: 324 - DNA, 327 bp, Zea mays
  Peptide Sequence Number=SeqID_43699
atgaaggtgtcccctaggagactggacgccacacttgaacacgacgaggacgaagcgttgctgtcctccggcgcgggcacacgagaatcaaccggtgcctggagggaaagagatgtggacgctgggtccagggtagacgtcggcgtggggctgtggggggctgaggcagacgtcggcgtgggctgtggggggcagaggcagacgtcggcgtggggctgtggggggctgaggcaccgggaggagaggggcaaggagggggcggaaggggaggggataggcgtggagccattgcatggtgtcacatgtgctgtattgtttggtttctaa

SEQ ID NO: 325 - DNA, 2904 bp, Zea mays
  Peptide Sequence Number=SeqID_43700
atgcctgcttctgcttgcacacatcttgattctggttgtactaggaaatatacaaggttcaagaatattcacgcagtttatgatgaagattatgacagggatcctaagaggatcaaaactgaaatcattgattcggaactaagtgttggttctgtcagtgacaaggatagtgaacaagattgtgatgatgtatttctcaaggatctcaggactcagtgtaaagcaaagaattggaagacttcaaaaatcacatcggaaggatgtggcattaagaatcaggctaaaacagaagatgacattgatcttgataagcctcttattgcattgaaacaaaagagtccaaaaacatctcttgctaaggataatgtaaagatgaatgcactaagatcttctccatgtgctacgaaagaggaagatacaacatcacatagagacaagattcttagttcttccctgatcaaagcaacaatgcaagacccagtattagagaagcttggaaggaaatttgcagaactggagcagtctaaagttgttattgattgtactgaaatcgttggtgatcaaatttgttgtgttgaagtgaacaatacagctggagctctagcgagctgtgcaaaacctgatgtactttgtgaaataaaagctgaagatacaaattattctgaatttggaacttctatctgttccataaagaatcctgagcattcatcctttaagctgcaacagaagctggtagcgggtgatgactgtgtgcctcaatattgtttcatgactcgaccagctcaattagccgatgtttctgatcatccctgcgaacaaacctgcagtatcaacaattttgatgacattacagctgcaaaagcaattgaggtttcttcgttaggtctcactgatgaaacgagcaatcatcagaaaacatctgaaaatctaactgactcagatgtgtgtgagtcctctaccgcacatgggtttatagcttgttctttcaatcagtcctgccatgatcttgtggatagcgatgaacattggaatttatttgttcctcggaatgagcctgtgaagcttttggaagagttgtcttctgttgatgaatcatgcgcagatactcaatctgatttatgtggaagcacaaaaatgaattgcacttcccttgagggggttgtgcagatgcaggctgagggccaattggattcaatagtctgctgtggtgtaaggccaaagcatatgttactagatatggaaattagacatacagaaactggtgtattcacctttgataagactattgacttggctcatcctgccaattttgttgcacaagatggaaggctagaaagtatagtatacgatgttttgaataatcatgcacaaaggacagcctctaaaaacgaatcttctgttggactcccagaaactgctgtgagtcagagctcacttattgacttcactgacaattgtgttgaagacaaaagggcttcagttgataaaattttacctcccaataatctagactggccattgaaggataagttaaattctacaacagactatgacatttgtaggcctattaatgatgatgaaggatcagaagaagaattagtgcctcaacatcagttataccagtcgtgtagtgataaattcaaccttagcagtgccatgccagagatttctaatgctgaagattcacaaaaaatatctgccggagctcaaaattcttctgctacctttttggaaactgatgggcgaattaaaaagccaaatttttttgtggatgaagaaccaattgaagaaaacactccaaaagtattactgtccaagagaaagattatgtcaccgatgtctcaggagaagctttgcagtgctctgactggcattgatttgtgtgatggagttcaaagatttaagagcaaaatcattattgaagatcatgataaaactacaatatcattgcctcaaccagcacacatgcaagacagatcaatgttgtccacagacaggagacttaagagcaggacttttgtctcccctacaagcaaaggagttctgaagtcaacaggatccccaccccatcaacatacaacttgctcttgcacgagaagttcaccagtggtcttagacaccgagaaagctgttgaattttcacaaagacagatgcatgatatagaaaatatagctgctaagcttatcaggagcttgaagcacatgaaaagtatagtggatgaaagtttgtcaacagaagcatattcattacttcctaattttaacattgctgagcgtggtggggacgccgagaacccgaacgtcacctgcagcgtcacgctcgtgaacgaagtgcaggtcgatctccacatgcttcgtgcgctgatgctgcacttgattggtgcagaggtagacggtgctgaagttgtcgcggtaaacgagggtggcacgctggagggggttgtggagctcgtgaaggagttggcgcatctaggaggccttcgccacgccattggccacaacgcggtactcagcctatgcgctgcagcgggagatgatgggttgccacttggcagcccaggagacaaggttggtgctggtacccaagaatacgacatagccggaagtggatcggtgtgtgtcgggacagccgacctagtcggcgtcggtgtagaccatgagctccgacgtctgggagggtcggaggagcagaccatagtcgagggagccgtggaggtagcgcaggatccgcttgagagcggtgatatagggctcctgtggggtgtgcatgtggaggcacacctgctggacggcgtaggtgatgtcgggccgggagaaggtgaggtattgaagggtaccagtgaggctctggtaagacgtcacatcagcgactgggggccatcgtccttagagagcttcgcctga

SEQ ID NO: 326 - DNA, 108 bp, Zea mays
  Peptide Sequence Number=SeqID_43701
atggcgtccgccgcgaccgggatggcgcgggtgcgctcggttctggaggaggatgacagcttcgtggccattagatgcgaggcccacgatataaaagtaaacccataa

SEQ ID NO: 327 - DNA, 438 bp, Zea mays
  Peptide Sequence Number=SeqID_43702
atgggcaagaacaagaagggcggaagttcgtcgcaccactctggcgacaagcggaaacgtgagccaagtcccccctcgaaggactttggtgactccgagtctgaggggtcgtcggtctacgcctctcccccggtgtcgtccgatgactcggacgattcccatgggatcgctgccgaggtgtggacgtatatccggtccgtcgagcgttccgggctcgagggctcggatgagttggagatcttctcggacgaggagagctcctccaactcgtctgaggaggagggcggcggtgacggcgacgacgaggacaacaaggcgatggaggcgacgacggcggtgatggcgacgggggcaagggcaacagcggcaacgacaagggtgacagcggcagcagcaaggccagtggcaaagcgtcactggcttaaatattatagataa

SEQ ID NO: 328 - DNA, 291 bp, Zea mays
  Peptide Sequence Number=SeqID_43703
atggtgaccaccagttcctgggtggggaggagcaagccgggttgcgatcttggtcccaccctcagcttcaaggatgttcatcatcctcgctggggtgggggccgggctgagccggcgctctgcctcccgcgcgggtccgtcggcgccgaggcagaggcggctcgagaagtccccgtcgccgatgggatcaccgccaccatccgcgcttcgggcctccggctctttgtacttgtcctcgcccctcgagcgtcggcgtgggcgagggcaagattgcagcagtgcctaccctga

SEQ ID NO: 329 - DNA, 147 bp, Zea mays
  Peptide Sequence Number=SeqID_43704
atggcggctataactccagggaatctttgtaaaggctacgtagtggtgatgaggatgatggttttttattatgattatggtaatggtaaagaaggtgtcgaggcggatctccaggagttccaggacttcgacgagttcgaggattag

SEQ ID NO: 330 - DNA, 312 bp, Zea mays
  Peptide Sequence Number=SeqID_43705
atgccttcagtcccagctggtgatcagggtgggtttgtcccagctactgatgtgatgactgagatgataagggttggtgctagtgcagcagctaacgctgatgatgctactgcatctagtgccggtgctgctccagcagcagctggtcttgttgctgctgttcccgggggtcctagggcaatgaggtggaacaacaacacctctggatttattcttaggaggatggctcaaggcaggggctttgttcacatgactgaggcacatagaaacatttggcttaggaccttcctagccaagaactactacatgtag

SEQ ID NO: 331 - DNA, 768 bp, Zea mays
  Peptide Sequence Number=SeqID_43706
atgaagttgatacttcataccattactattttgtgcattttgctcctagctgttggaaaggttaaagatgaaaaggtgaaggtcctgatggaattaacaaaactaaaagaacaatatttgctattgaagggcagctctgctgtcaaggaaggtcatgatactggtgattcatctaaactcattcctgggcatgaccaacaagggatgctgaagactatgctgaagaggacatctttaagacactggatgaggaaagaaagtaatactattggacatgggagctctgatggaaatgatcatacagtttgcaaagaacattcagtggatgttgcaagattaagagttgaaaatgctatgcttcttgaaggtgttggtactgttgagcatctcacttcttcagtgcatagactgcatattgtgcttttgaagacttgtgacgtggatgcaccaaatacatatagattattgagatggttggaatttggagatgcgagttcccaatattttagcaattatgatcaagctacactcctgattcttataactgaagcaaaccttatgaagacagctcttaatgtggttcttcctgtaagctggtccggggattcatcagatgcaattaaatatgaagctatgtgcgatccatctgattcacctaaatcgaagtctgggaaagtagacccgctctcttctgcaggcatggagatggtggagctactaatattggctgctgagattctcaaggagagctttctggtgaagaaataa

SEQ ID NO: 332 - DNA, 285 bp, Zea mays
  Peptide Sequence Number=SeqID_43707
atggagaccctaaaacaaagatcaccgattgatggcccaagctccaagtatgatcaaagaattcaggcccttgtgcagccccttatatgctggatcaacaggaactgcgacaactccttcccaccaagcctcaaagaagagttctcatggctaggagcaaggatagttagaatgctactggatgtgagattaatatccacagatgaccagattgcagatgggttcaccaaggcactcactaccactaagatggaacagtttaaaataatcttgtataatttatga

SEQ ID NO: 333 - DNA, 366 bp, Zea mays
  Peptide Sequence Number=SeqID_43708
atggcacccaagaaaggtagctcgaaggcagccccatccgttgacgaagcagcgaaggcagcgctgctggccgagaaaaagggcaaggcccttgtcgacaccacccaccaagaagcctgcgaagacgacgcactcagcaagagacagcgcaatgaacaacctacacccgaaggcaccctccgcacctgcagctccagaggacaaccgcaacctcccctaggcttcgctccactagagggcgaggatgccactgaggatggcaaagtcatcggcgtttcagcagaggaacagctacagctacgggcctcgcgcatcaagaaccgcaacctccagaagcagaaagagatcctcgaggccaagcgctaa

SEQ ID NO: 334 - DNA, 393 bp, Zea mays
  Peptide Sequence Number=SeqID_43709
atgggcaagagtaacaaacgcaagcgtgagccgactcctccatcagaggacttcggcgactcggaatactcggatgaggagttctcctccgagtccgaggggtctccagctcccgtctctcccccgacgtcgtctgatgattcagacgactcccaggggattgccgcggaggtctggacttatatccgggccgtcaagcgctccgggctcaagggctcggatgagtcggagtactcctcggacgaggaggactcttcagattcgtccgaggaggacggcggcggtgatggcggagacgacgacgacgatggaggcgacggtgatgacggcgacgacagcggcggtggcggtgacggcggcagcagcaggggcagcaacaaggctagtggctag

SEQ ID NO: 335 - DNA, 624 bp, Zea mays
  Peptide Sequence Number=SeqID_43710
atgcacgaggaacaatggacagtgtttacaggcccacgaagggatgaccttacgaattattgggtcctcgggcctttcgtgaggtcttttatccttcccgtggacctgggggatatctatctcccacagacaccacccaagagagagagatgtcctatgaggcctagaggtcctttgtctcttgctgctaggcctcaggcaaagagaccacagggtggtcgtgcttggcagggtgctggtcgtgtgccatatggctatggacccgtggcagtggctttggatggaggcctggagaacaaatggctcttggattccggttgttcacgccacatgatcggaagcaacaaatggttctccggtcttgaccccgtgattcgtaaaaaatacatcacattcgaggataagtcaagaggtaagcccttctcgatgtctcttggcaggatctgtgggggacagatatcccccgggtcaactagaaggctagaaggcctcgcgaaaggctttgggcaattgggcctattgttttgcaaggccatcccttcgtgcgccagggaagaactgctggcagaatgggccgacgtagggaatgagcgaacgcggaccaaggcggctcgtgaggtttga

SEQ ID NO: 336 - DNA, 339 bp, Zea mays
  Peptide Sequence Number=SeqID_43711
atggaggtgataggggagccttcagccttagaggcagctgctgcagaaaacccagcccccgagggtggtgctggcagtgatctggctctggttggtagcacaagttgcaacccagcccctgagggtgttgccgatagtgatctggctctggctttggttgacggaatgcccgctcagctgaggtcgcatggtgccactgtcccggaaggagctctgtctctaatgcagtggaacccattgctgcttcagaaacagattggtgacttgaaggcgtcgaatgctgctgcattatcagatatggccctgcggtgctctgagcttgaggaaaaatatctttga

SEQ ID NO: 337 - DNA, 390 bp, Zea mays
  Peptide Sequence Number=SeqID_43712
atgggcaaggacaaaaaaggtcagggctcaccgcgtcgctccggcgacaaacagaaacgtgaaccgagtccttcgtcggaggactttggtgactccgagtactcggaggaggagttttcctccgagtccgagggatcaccggggatagccgccgaggtgtggacgtacatccggtccgtcgagcgcgctgggctcgagggctcagatgagtcggaggtctcctcggacgaggagaactcttccggctcgtccgaggaagggagcggcggcgacgacagcggtgggggtggcggcgacggcagcggaggcgacgacggcggcaggggtggcgacgacggcaagggcggcagcagcagcagcaaggccagtggcaaagcgccactggcttaa

SEQ ID NO: 338 - DNA, 4968 bp, Zea mays
  Peptide Sequence Number=SeqID_43713
atgacgccccgcatactctgtgacgacgtcggctctcagcccccttacggaagcaagaggacgtcagcaaggacccaaccgctccgacagctgtccctccgccaggctccatcgctcctccgacggccacgacatcacaccagctgggtgctaaaatctctccggctgccacaacggcatggccctcttagagagggttggccgcgcggggacgaggacgagacaggcgctcgcttggaagccgctcgctccctcatccgcgtggacgcttgtaaccgcctactgcaagcgcacccgacctgggcgcgggacgaacacgaaggccgcgggattcccacctctctcacgccggtctccgaccgcctcgctctccccccttcgcgctcgccctcgcgctcgacccatctgggctggggcacgcggcgacactcactcgtcggcctaagggacccccggtctcgaaacgccgacagtcgccctgggccaaggaaggaaccgggcacccgccactcctttgaccgccatggccgcgtcgccgtcacgacgactgacgccatgtgccaccgcctttgtcgcccctgtataaaagtccgcacatgtcagtcacgggcctctgccgctgcagcgatggcagcaacaccggcctgggactgggaggaatcgcttgtattcttcctgcagccgttcttcctccacggcgtgagcgccgcggcccaccttatcctggcgctcgccgtcgcgggacgcttgctctttcgccgcctctccgccagccggaccaaggacggggaggtgggcggaggagatgctagccgcggcgttggccggtttcggtactggtacggggtctctgtctgcaccacgtgggctatgggtgcgttcgaggtcctcctcgccgtctactcatggtacgcgaacggcggcgccgggtggtcgcgcgacgcggtcgttgaacaggtggacgcggccgcgcgcgcggtgtcgtggctgctgctcgccgcgtacctgcagttcgatttctggtggcgtcggcagcgccaggagcggttccccgtggcgctcaggctttggttggcgctcttcatgctgctctccgtagtcaccgtcggcgttcacgcggcgatgatcctcgacgggtcccttgtgcccggtcgatcgtgggcgctcgacgcagtctctgttactgcagcagcggttctactctcagtctcagctgggttcttcggaaggaaggagggagagggaggcggccatgcttccgaggcgcatgaacctctgctgaacggcgcgcacgaggggtccggtgacgacgacgagaacagcagcagcgccgccgacgcatccttgttcactggcgccggctttcttagcgtgctcaccttctcttggatgacgcccctgctcggcgtgggtcacaggaagaccctcgtcccggaggatgtcccgggcctcgaaccaggcgacagcgttgctggcgtcctcccgcccttcaaggccaaccttgaggcgctcaccggcgacggcggcaggtcgagccggaaggccgtcactgcgttcaagctcaccaaggccctgttgcgcaccctacggtggcacgtcgcggtgaccgcgttctacacgctggtctactgcgtcgccgtctacgtcgggccgtacctcatagactccctggtccagtacctgtacctcaacggcgacgagaggtacgcgagcaaggggcagctcctcgtactcgccttcgtcgtggccaaggtgctcgagtgcctgtcgcagcggcacttgttcttccggttgcagcaagcggggatacgagcgcggtcggcgctcgtcgcagtcctgtaccagaagagcctcgcgctttccagccagtcgaggcggagccacacgagcggagagatgatcaacatcgtcagcgtcgacgccgaccgcgtcggcatcttctcatggtacctgcacgaggtctggcaggtaccgctgcaagtagtcatggcgatgttcatcctgtactccaccctcggggtggcctcgctcgccgcgctcggtgccaccgtggccaccggcctcgccaccgtgcccctgggaagaatgcaggagcggttccaggagaagctgatggacagcaaggacgggaggatgaaggcgacgtcggagatcctgcacagcatgaggatcctgaagctgcaggggtgggagatgaggttcctgtccaagatcatcgagctgaggaagacagaggcgaactggctaaagagatacctctacacgtcggccaccatgaccttcatcttctggggcaccccaaccttcgtcgccgtggtgaccttcggagcctgcatgctcatggggatccccttggagacggggaagatgctgtcagcactggccacgttccgcgtgctggaggaacccatatacgaacttccgggcactatcgcgatggtgatcaagaccaaggtgtctcttgacaggatagcatcgttcctgtgcctcgacgagctacccagtgacgccgtgcagaggcttccacgtggaagctctgccgacttcgcagtcagcgtcggcaacgggtgcttctcatgggaagcctcgcctgatgctccaacactgaaggacctcaacttccaagctaggccaggcatgcgcgtcgcggtctgtgggacagttggctccggcaagtccagcctgctatcctgcattctcggcgagattccgaagttgtcgggagaggtccggacctgtgggacgacagcgtacgtcagccagtcggcgtggatacagagcggcaaaattcaggagaacatactgttcggtatggagatggacagagacaagtacgacagggtgctcgagtcgtgcgcgctcaagaaagacttggagaacctgccgtttggcgaccagacagtcatcggcgagcgaggcatcaacctcagtggaggccagaagcagaggatccagatagcacgcgctctgtatcaggacgccgacgtctatctgttcgacgatccgttcagcgcagtcgatgcgcatacaggatcccacattttcaaggtcatgaaagatgggaggatagcacaggcaggaagatacgacgaaatactgggttcaggcgaagagttcatggagctggtgggtgcccacgaggagtctctaacagcactggatgtggtcgatgccatgaacgagaacgaagccaacgtgtcatcctctcccagcagcaggatagagacgccgaacctgtccagatccctgtcgttagctgagaagaaacatggcgccaccaacgaggctgaaggggacgacgacgatgctcggagcgggcagctggtgcaggaggaagaaagggagaaaggcagggtggggttctgggtctactgggagtacctcacgcaagcctacaagggcgccctcgtgccgttggtgttgctggcgcagacgctctttcagatcatgcagattgccagtaactactggatggcttgggctactccggcgtcgaaggatgccgagcctccggtgagcgcgcccacgctgctcttcgtctacgtcgtgctggctctcggaagctcgctgtgcatcctcgcttcaactgatcaaagcgaggtggacaccaacatcgctgaccagatgggcaccgttgcattctccatcatccagctcgtcggaattactgcggtgatgtctcaggtcgcatggcaggtctttgtggttttcgtccctgtatttgctgcatgtgtctggtaccagcggtactacattgacacggcaagggagctgcaaaggctagtaggagtgtgcagagctccaatcatacagcacttcgcagagtcgatagcggggtcgagcaccatcagaagtttcggcaaggaagaccagttcgtgtcgactaacagccgtctaacagatgcctactcccggcccaagttctacaacgccggagcgagggagtggctttgctttcgcttggacgtgctgtcctctcttgcgttcgccttctccctgatctttctgatcaacctaccggccggtctcatcgatccaggcattgctggccttgcgatcacgtacgggcttactctgaacacgctgcaagcacaggttgtctggagcatgtgcactttggagaacaagatcatatcagtagagagaatcctacagtacatgggcgttcctgcagagcccccgcttgtcatgccagaaaacaagttggctcagagctggccatcgaatggagaaatccagcttcagaatctccatgtgaaatatgcgccgcagctgccgttcgttctgaagggccttacggtcgcttttccgggcggcgtgaagactggcattgtcggaagaacagggagcgggaaatcaaccctaatccagtccctcttccgcatcgtcgaccctgctgtcggccagatagtgatagacggcatcgacatccgcacggttgggctgcatgatctgaggtccaggctgagcatcattccacaggagccgacgatgttcgaaggaactgtcaggagcaaccttgaccctcttggggagtactccgacgatcagatctgggaggctttggattgctgtcagctaggggacgaagtcaggaagcaggagctgaagctcgactcaccagtggtagagaacggtgagaactggagcgtgggccagcgccagctcgtgtgccttggcagggtgatcctgaaacggagcaaggttcttgttctggacgaagccactgcctcggtggacactgcaaccgacggcttgatccagagaacgctgaggcggcagttcaaggagaccaccgtcatcacgatagcgcacaggatcacgtcggttcttgacagccacatggtgctgctccttgacaacggcgtggccgtcgagcacgacaggccggacaagttgctggaggacaagtcgtctctgttctcaaagctcgtagcagaatacaccatgcggtcggtgcttacatag

SEQ ID NO: 339 - DNA, 1608 bp, Zea mays
  Peptide Sequence Number=SeqID_43714
atggcacgtgtaggagaccggacgaggtacccgtcaatggaccccctcgacaccgtcgtcgctacgatgaagaactgcggaggggaagaccgcagggaggagttagggctcggagcaaagaaggggatgggggcgggggagatttgcatcgcaggggcgggggcagacggcgccggatccaccttcgcttcctacaacggcaatggtggcgaggtggtggtcatcgctgaagaggaggaggaggaaggcgagcgggggcttgaagacgatgttggtccccgccctaccatcgtggccgtcgatctctcacgctgccaccgctccctgcctcctctccctgcccctctcaccgagtcgcagtcgctcgtgatccccggcatcggcgccgctgccggaccagccatggagctcatggccgtccctaagaagaaggtctccaagtacaagaagggtttgaggaatggacccaaagccttgaagtctgtgccggtcattattcgctgcagatcgaccagagacgaagcgacgaagcagatgcccaacgccacggagtcccggcaccaggcggagctggacgcagccgcgacgcacagccactcgccgccggtctctcacgagggagggagggggtggaagaagaacgagcagcgagaggaggggaaaaggaggactgcccccgcctcctaccccgcctgccagccgctgaccccgccgcgatcgctccgcgcgaaccccgccgcgaagcgcccgcccggccggttctcccaacccttcttcgttcgccccggcctcagcgccgcatcctccgcgatgctcgcgatgtcctccctactgagacagccgtcgggacgtacgcccagccgcctcccccaccgcaaaagaggaagttggtggcgccacgggaggaccgatgtgggagcgatggattcgatgatctcatccctgggtccctcctcatcgcgtcgattgatccccagcaagcacaaacagcgccgcatcctccgcgatgctcgcgatgtcctccctaccgagacagccgccgggacgtacgcccagccgcctcccccaccgcaaaagaggaagttggtggcgccacaggaggaccgatgtgggagcgatggattcgatgatctcatccctgggtccctcctcatcgcgtcgattgatccccagcaagcacaaacaggttcttctccaacccttccaaaccgccgcgaccgctccgcgcgaaccccgccggaagcgcccgcccggccggttctcccaacccttctctgttcgccccggcctcagcgccgcatcctccgcgatgctcgcgatgtcctccctaccgagacagccgccgggacgtacgcccagtcgcctcccccaccgcaaaagaggaagttggtggcgcccgggaggaccgatactgcccccgcctcctatcccgcctgccagccgctgaccccgccgcgaccgctccgcgcgaaccccgccgcgaagcgcccgcccgaccggttctcccaacccttctccgttcgccccggcctcagcgccgcatcctccgcgatgctcgcgatggtgtttttgacgatagagctgcctgacgccaagggtgtgaagtag

SEQ ID NO: 340 - DNA, 996 bp, Zea mays
  Peptide Sequence Number=SeqID_43715
atggcatccggccggcgcggggaccgcggggtgggagagggaaaggtcaccgccatgaacgcgggccgcggagtcagtgcagatcggcaagatgtcgaggtcagggaagagaaggctgtggacacaggccagatctcggacagcccactggccgcgcggcgtctgttcgacgatttgccccactggcgatggcgctgctacccgccgcgccccgcgctcccggtccgtcaccctacgacctcgctgataggctccgggaccagcctcgacttctcgcttccgcaacgtccaggcgtcgtcggcgcgcccgggcgcgcgtaccccatgatcgaggcgacggcgagacgcggcgctcgcacggagagcgccaaggtcaggaaccgtcggctgcagaagaagttcaacggcacggcgacgaagcccaggctctcggtgttctgctccagccggcagctctacgccgttctcgccgacgaccacaacaaggagatcctcttctacggcagcacgctgcagaagtccatctgcggcgacccgccctgcggcacggtggtaagccgccgccgccgtcttctccgtctgggatttgctttggtgtgcaacgagttgggcatctccgagatctcctacgaccgcaacggctttgctcgaggcgacaagaagatgacggcgttcgaggttccggacttccgtacctactgctcacctctcgttacaatccccattataatttattcatctacaaaaattcactcaagtgaagacgctgaaactgggactggagttcccaacctgtggaccaaccatggattctcgatatctggatcaatgaaagtctgtgcaaggaacggcatagcttcatcaccgaacagttctttgcaccaacgttcccgtcctgatgagcttgatcctggaccggagcacctgcgaagaatgccaataagagctagccgagctagccaggaagagctagaaagtacaagagaaaaggaatga

SEQ ID NO: 341 - DNA, 474 bp, Zea mays
  Peptide Sequence Number=SeqID_43716
atggcgtcgggctcctctcgcccccaaattgaccagtttgtcaggttgaagaagggtcacgagcaaagagggcatttactatccttttcgatcttcaccattggaaggattttagttgccctgttgacagttttggagagatttggagattttacaatatcatggctaccgttttacttagaagtaaagctgttgttctttgtatatttgtggtaccctaagacaaagggaactacatatgtttatggaactttctttaagccatgtatttctcagcatgagaatgaaatcgaccgaaatcttcttgagctcagagctcgagccaccgatatggttgtcctttacttccataaggctgcttcggtagggcaaaatactttctttgacgttttaaaatatgttgctgcccagtccccttcttggaaatcaaggcagcaccctcatcaggatgttgacaattggaaatacatgtag

SEQ ID NO: 342 - DNA, 936 bp, Zea mays
  Peptide Sequence Number=SeqID_43717
atggcgacaccgtcgtcgtcgctttgctccagcttcgcctccctgcggaccgcctccatcggccacccccgcggcatcgcgtcatctacgcccaggaaggcgttccaagtgagggcatcagctcgggttgacaagttctcaaagagtgatatcattgtgtccccttcgattctgtctgcaaacttcgccaagcttggtgatcaggtaaaagccgtggaggtggcaggatgtgactggattcatgtcgatgtcatggacgggcgctttgtgccaaatatcacaattggacctttggttgttgatgctctgcgtcctgtgactgatcttccattggatgtacatctgatgattgtggaacctgagcagcgagtccctgattttatcaaggcaggtgctgatattgttagtgtccactgtgaacaaacatcgaccatccatttgcacagaacagtcaatcagatctttgaaaaccattgggatgtactgttgtcttttatccttgtggcatgctgtaagttggaattgagttatctttccactatctatcagattaaaagtctaggagcaaaggcaggagttgttttgaatccagcgactccactcaatgcaattgattacattcttgatgttgttgacctggtgttgattatgtctgtgaatcctgggtttggtggccagagctttatcgagagtcaagtaaggaaaattgcagaattgagaaggttatgtgcagagaagggagtgaacccctggattgaggttgatggtggtgttggtccgaaaaatgcctacaaggttattgaagctggggcgaatgccatcgttgctggctctgcagttttcggggctccagactacgctgaaggcatgctatcaaaggaatcaagaccagccaaaggcctgcagctgtacacgcataaggaactggacgtgtga

SEQ ID NO: 343 - DNA, 114 bp, Zea mays
  Peptide Sequence Number=SeqID_43718
atggcgattctaggagttcccctgcgtgcggtttcaagtttcaatgtagaagatagaaaccgggatccgatgcaaattaatgtggttagttccgacttagatgtttttaactaa

SEQ ID NO: 344 - DNA, 828 bp, Zea mays
  Peptide Sequence Number=SeqID_43719
atggatgcgtaccgggagcagggtgcgtggaccgccctcttcgaagcgcccagccaagaggtggacctccgcttccttgagtggctgcaggaggagctgggggtcctgccaacaatcgtgacgggtctcatgtccttcgcctccctcgtcacctgtgaggaggtcgtcgaggacccggtgctcaagcggtcggcgggggctctcttcgataggatgtggggtcctcacgaccgagaaacggtctgggagaggtctgaccgggcaatggatcagatggcgtgtgacgaggaggttaaagaccttggtgacctagacagcatgcttcccgaggcctcgctgccggaggcttcgggggtggagctggcgccgctgtctgatgcgggcaagggccctttgccgacccctgcgctgactggagacggcaaagaccccgcgccagcccccgcgacaatgtgcgaggactccccgaaggcggtggttgaaccagctggcgaagaccccacggccgtggccaggccctcgcaggttccgatgtttgggcctgcgcatgcaaccgctactgacaatgctatttttgtggcggcctcaaccgtggtgtctgcggatgcgttagatgtggctaaggtggagccttcgccgcgcgtggagggttccggtggactctcggatgagtacgaggtctccttcgttgaactctcttgggacgactgtgtggtcgcgccaggccttcgtttgagcttggtatttattgagggcctgcacgtcgaagacgcggtctccgtcgatgaggtctttggatgttggctcgtcgacgtctggggtggctga

SEQ ID NO: 345 - DNA, 249 bp, Zea mays
  Peptide Sequence Number=SeqID_43720
atggaatcccacatcaccacagagcttgaagctacattaggcattaatttgtccttggttcttggcgttggaagagccacaattctcaaccgcaatactgtcagtgatgatgtggatatatccgggattaatatcatatccacatttgacttattggcatttgatgtattctgcggggacgcctgtggatatgatccatcggccttagtcaaagcatatgttccgattgcagattcacgtggtctgtga

SEQ ID NO: 346 - DNA, 666 bp, Zea mays
  Peptide Sequence Number=SeqID_43721
atggctaggaggcgaggcggagctcggtgccgctacggcgagggacggcggtggagagagtcggtgctcgctgcggcgcgcggtggagggagctggggctcgctgcggtgcgtggtgcagggggcgaggcacggtggaggtgacgggggcggtggcggggacggggcgcggtgggaaggtcgcgggccgaggctctcgggccgggggcggtggcgggggcgaggctgcccgggggtggggggggggggccgcccccaagactgcacgggcgcgcggtggaggggccggggcatgcggcagctggaggacgagcaggcgcgttgggcgggccgctcggtcgccggtggaggggtcggggcgtgcggcggccggaggaagagcgcgcgtggtggccggaggagcgcgcgtgcggtggccgttgggcgagcgcgcgcggtggctggagacgattaccgcggtggagaacatggctgcgcgctggaggagacgagagccgcaggattggagagaggacgacgcgggagttttactctggagctcggcgccaagatctgtggcgccgagctccagtccacgtcggtgccgcgtcagctggtgggcgacagcgtggcaggtagctcggcgccaagatctatggcgccgagatgtgtaagctcggcgccatag

SEQ ID NO: 347 - DNA, 1032 bp, Zea mays
  Peptide Sequence Number=SeqID_43722
atgggcgccacgcgaatcgcccatcccgtcgcattaactccccggcggagcaggcgacacctctggcaggcgaggcgggtgtcgcttcgcctccgccatgatgaccgcgtcaaaaaagggaccgggaaaggggatgattcagaaaggatccttctcggcgaagggagcgggccccgagccctcctactgatcaggggttcgaaggctggcccctcggaaagggctggcccctcggaagggttcgatagtcgccccagagcacgcagagtgagggatgactttgggtacgtccgatacatggccgaggctcgggctacactcccgaggtaccctaggacatttccgagaccggcgggaacgatttgtaacggaatcccaccggagggaggcatcgagccctcggaccctgtcgaaggggtctgggtccggcgaatcacccgcaagtacttttggagcgcttctctgggccaccagccgacccctaacgaatggggcacgggcgtccactcggatcacccgaagctccgcctcgcccgacctcaggcttcaccctcgggaggaggtcttcgcctcgcccgacctcaggctccagcctcgggaggaggtctccgcctcgcccgacccctggactcggcctcgacctcggtctcgggaggaatcgcatcctcgcctgaccccggcctcggcctcaagagaaatctccgcctcgcccgaccttgggctcggaccgactgcgccaacaggggatacatcattaccctatccctagccagctcaggctacaagaaacaagaccggcgtcccatctggcttaccccgacgacgagtaatgatggactcaggcgctcctccgatggccatgccatcacgtgtacagggctcaagctctcccccgacaaccacgttggcatggccatcctggaggggggttcgcgcggggaaggagcggacgaacgggctccctctccctctctctccctctcgcgacgtgcttgtaacccctactacgagcagcaccctggtgcaggataa

SEQ ID NO: 348 - DNA, 495 bp, Zea mays
  Peptide Sequence Number=SeqID_43723
atgtccggtgcaccagaggactccgacttcaaagtcttcgctctcgggaatttccagaggcctcttcgctataattcaccggactgtccggtgtacaccggacatgtccggtgctccaaggaagggcggcctcaggaactcgccagcctcgggttctcactccaaccgcttcgctataattcaccggacatgtccggtgtgcaccggactgtccggtgcaacctcggggcaacggctgcttcgcgccaacggtcacctgcaggcgcatttaatgcgcgccagaagcgcgcagtcgtcaggcacgcgggagcaggcgcaccggacattgaacagtacatgtccggtgtgcaccggacatcaaggcgggcccagaagactgaaccccaacggtcgatccaacggctatttggtgacgtggctgtcgcaccggacatgtccggtgtgcaccggactgtccggtgtgccatcgaacagacagctccaccaaacggctag

SEQ ID NO: 349 - DNA, 495 bp, Zea mays
  Peptide Sequence Number=SeqID_43724
atgtccggtgcaccagaggactccgacttcaaagtcttcgctctcgggaatttccagagccctcttcgctataattcaccggactgtccggtgtacaccgaacatgtccggtgctccaaggaagggcggcctcaggaactcgccagcctcgggttctcactccaaccgcttcgctataattcaccggacatgtccggtgtgcaccggactgtccggtgcaacctcggggcaacggctgcttcgcgccaacggtcacctgcaggcgcatttaatgcgcgccagaagcgcgcagtcgtcaggcacgcgggagcaggcgcaccggacattgaacagtacatgtccggtgtgcaccggacatcaaggcgggcccagaagactgaaccccaacggtcgatccaacggctatttggtgacgtggctgtcgcaccggacatgtccagtgtgcaccggactgtccggtgtgccatcgaacagacagctccaccaaacggctag

SEQ ID NO: 350 - DNA, 444 bp, Zea mays
  Peptide Sequence Number=SeqID_43725
atgggcaagaacaacaagcgcaagcgtgagccgactcctccatcggaggagtttggtgattcagagtactcggaggaggagttctcctccgagcccgaggggtctccggctcccgtctctcccccggcgtcgtccgatgactcggacgactcccaggggatagccgcggaggtctggacatacatccgggccgtcgagcgcgccgggctcgaaggctcggatgagttggagtactcctcggatgaggaggactcggacggcggcgacgagggtgaagatgacgacgacgacgacgacgatgatgatgacgacggcgacggcagcggcagaggcggcggcgacggcagggacagcaccaagggcagcagcaggggcagcaccaagggcagcagcgggggcagcaccaagggcggcggcggcggcaggggcagggccagtggctag

SEQ ID NO: 351 - DNA, 273 bp, Zea mays
  Peptide Sequence Number=SeqID_43726
atgaagctgtggaaggagacttccaggagtttcaagactacgacgagttctaggtgtgggttagcggcaacccccagtcggctgcctgtgaaggccgcgtttatctacgtttcttttccgcactttgatttattatggctcgacttagacacactgcacgaaagtcagtcatccctgtcacacccggctttaaggaacaaagccaggtgggagctcatggagtgtaaggcttatcaaagagaatggttaaagctgagcattgcttttaagtag

SEQ ID NO: 352 - DNA, 207 bp, Zea mays
  Peptide Sequence Number=SeqID_43727
atggggaccctccctggcgggctctttgccgagtgtcccaagtggcactcggcaaagaaggcggctttgccgagtgctgccaggaggacactcgacaaagatatcttcgttgccgagtgcttcgccgagtgcttccggcactcggcgaagaggttgattccggtagtggttgggggtagtgtggatgcgactgatgcactcctctaa

SEQ ID NO: 353 - DNA, 882 bp, Zea mays
  Peptide Sequence Number=SeqID_43728
atggggtacctttttggggagtgttggccaacagacctaaagcccgatgttgtgcgttcgggcgcgtgcgtcgcgactcgacgacctgggtcttcattgtcaacttggagtgctaccggtgagcgtgaggccgctgctgcccctgtgcacgccgtcgccgccggtttctttgaccatagcaattgtgtccttaagctcggctacctcgacatcgtcacaaagggctacctcgacatcgtcaccttcttctccaatgacagcatgcgcggtgcatcacccgtgatggctgcaggggatattagcttgtcagtttctccaatctcactgtttgtagtgttccgctgtgactgtggggatgttaaaattcttccgaggaaattgattgattttcttgatgcccctgtacctttcattgctggtgtacaacataaaccccctgatatcaagatgaaaggatctagtcttgtcagggtcaaggcatgttcactgcctcgacttccacattacaaggagctcgtttctaatctcggtccacttcatgccagactatcgtgtgagaattctttggctaagagacatcccatctataaatgcaatgaagttcaggctgatgtagcttggaagttcttaaatataatgagaacctacttggaatcactttgctctgacctgcgctttcataccattacaaatgtacagtcaaataatgacagggtttctttgcttctgaaagacagtttcattgattcgttcccctcaaatgatagaccatttataaaggggattgggaagataaaaacaaggcacgtcgcgtggagtgcggaggatttcgattttgccgaagccacatcactaattagaagtgttctgaaaagtatctag

SEQ ID NO: 354 - DNA, 721 bp, Zea mays
  Peptide Sequence Number=SeqID_43729
atggttggctgctcgagtgaacagtcgtcagtagccctcggcattgggggtccgagggagaccgtcggctatccgagccagtactccgccgacttcactcggcgtgttcaaggctcgggcgaagtcggggttcaggttgcgcccgaagagctgcgccgggtcccgctcttcggcctcgtgatgcctccagatatttcggcgtcggttccttcgtcggcgggattcccgctgaggaggttcctctccagggaggatcttctcttcgtcggatccgcaatgcgacgcaaagttccctcctcatccgctacatatgagttggttccgaagcagaatgtggacccagggcggaagacgatcttgggcaggaaggtgacggccattgagctaccttggatcgacgacacaccccctacctggcgcgccagctgtcggtgttttgggtccgaccgcacacccggggttgcccctcaaggttcgggccgttttgaagtgcgtaataccctacgtcctggcgagagtgctgtatatggtgggttacaagacagaggaacaatggttcataatggaggaaaaattttgagtggcgacatcgccatagtgcatttgcaactttctgaggttggcacgacaacttggttcatggtggggtatacattcggcgatgattgtgcgggtgtaggtggaggttcgctggagtgcataatcaccaaggaagctagat

SEQ ID NO: 355 - DNA, 2085 bp, Zea mays
  Peptide Sequence Number=SeqID_43730
gatgccgcgcacgaagaatgcgtcggcgtcagggggtggcgatgacgaggaccctcgtcgccctttcaggcaggtgaagggcaagactgtctttttggagcagcaggaaggccgcaagaagcggcgttcggacagagaggctcgtacagcagcagcagctgcagcagccgctgcgcaagcagcacttggagatcagccggatgttccatcagatcagattgctttccgtgctcgtcgtctcgcctcccggtctcgctcctccactcacacctccgcttccactccgccacccactctgcctgctccagccactcctattgctccatccacctccacccccatacccactaccagcactacgccagcttccactgcttcccctgcccccgctcccgcttcagctccttctgttcctccacctcgcttccgggagcgtgatgagactgaggtccgtcctctggtttcggatcctcgtctgtttgatcttcagtgtgctactgcagcacgggtacatcggttcaggtacgtacccgtggagtcctggctaccagctcagagagacccaacagcaggtgttcttttcagcacccggattcaggagtcattcttcagggctcagatgtctgctcagatcgcgctgcgagtgcaccgcctattggatcttcccgcttttttgctagcagccggtgctgagtctgaggcgcatctcacctatctgcctggcctcctgactcttctgactatcagcggcagatatgttgaggagtgggtccgcgtcttctacgcctctgtttggattgacccggatcatcattggatgaggttccgctttgagcgcgaggatgtcacgatcactgccagtcagatccgacagctatttggattccctgagtcgacgactcgccttcacagcctctgctacggcacttcagatcctcctcgtcgccctcacggcggtgttgctccagggacagctcacgtcgcggctctgttccgcccgcctttcacagatgggtcgcgacgttctccagcagacttcactacagcagcgaagtacttatatgagcttatcagacggacactcctgccgaggatgggatacagggaggctaccactcatattcagctttggctccttggtgccctggtatcccactcacagtttgatgttgtggacttcctgatctgtgagatcgaggacactgttctggatgggattcgtgctcgtcggcagctaccttatgctcactacttgtgccacatctttgcgcagctgattcagccccctcgttttcagagcacccttgaggcctcacgccttgtttttggatcttaccgtcctgctcctgagattccagtgcccgcttatgctcctgtgtttgacactcaggccgaggatgcagcacttcgacagtttgacacccagggtacagcagctgatgatgatgatgatgatgatgatgatgatgattttgggattcctcctccgcctccgcctcctatgcctccacgctcacatgatcatgaggctgggagctctagtgctgcccctgctactcctcaggctatggaccctgctcttgcttcgattctccagactctcactcagcagcaggctcacctggcagccgagcaggcccgtttatccgataggatgctctcaatgtttcagaacatgcaggacaggcaggatgcacttcagcagcagcttattcaggatagggcagagaatagggcattcatggccctcatgcttcagcattctggtatctccgcacctccggttcagtctgttccccctcctccgcttcacgctccagtggtgccttcgatcttgtctggaccccctgctggtacctctccgctccggccggtcactttggcgttcacctctccggctctcagctctatctgtccgcagccgccagtgccaccagcatctgctgttaccactaccgctgtggcagtatctgtgaccgcttctgttccggtagctcctgcagcgcggcctgcgtccgagtcagtaccagctccagcttctaccgcagatcctggatccgagactgactctgaccctccgtcggc

SEQ ID NO: 356 - DNA, 1097 bp, Zea mays
  Peptide Sequence Number=SeqID_43731
gcatgcaagcttgccaagccctcggacctggccggacttcaccggaggcccgagatcgacctcaccggactttggtcttccgccgccgcgcgtggaccgagctatccagccagactcctcaccgccgacgagcatccccgcctgcgcgcatggaccgaccgactccggccatccccgacggcgacccgcacaccgttgtgatccccgagacctcccctacgtcctcgaccacttcaccggagccatctcgccgccggccatccttgcattgaatgctcctgcgatacggtcggtcggcgtggcgatctggccaaggttgcttcttggcgaagactgggcctcgggcgagccgaagctttgtgctgatggggggttaccagctgagattaggagtcttggggcaattgttgatcttggctctggcatcaagaacaagatagctctcaagttcaacaccatattttggcccaacgttgaagtgctaggtagtatcgcccccaacatcaagtcctcgggcaagggcagccgaccccggaggatttacgtctcgcccgaggaccccctccagcaacggacacaccttcggctcgcccgaggcccagtcttcgccaagaagcaaccttggccagatcgccacgccgaccgaccgtatcgcaggagcattcaatgcaaggatggcctgacacattatcctgacgcgcgctcatcagtcgacagagccgaaggctcggactcaggctcagccctggaagacgacgaactccgcttcgcccgaccccagggctcggactcgggctcagccccggaagacgacaaactccgcttcgcccgaccccagggctcggactcgggctcagcctcggaagacgacgaactccgcatcgcccgaccccagggctcggactcgtgctcagccctggaagacgatgaactccgcttcgcccgaccccagggctcggactcgggctcagccccggaagacgacgaactccgcttcgcccgaccccagggctcggactcgggctcagccccgaaggacgacgaactccgcttcgcccgaccccagggctcggactcagccctggcctcagccgacg

SEQ ID NO: 357 - DNA, 220 bp, Zea mays
  Peptide Sequence Number=SeqID_43732
gttcaaggctgttcttggcacggcaagagcagcaacaacaggagccggtgagacggtgtacctgtcgctcaaggcgccacaccatcttggttgtggtagtcgggcagccaacgtcgttctccaacaagttttccacctccatcatctctcatcgaaagatcgggcacccttctacccgttgggtttatcaagtggtatcaaatttcaggttgctcagtga

SEQ ID NO: 358 - DNA, 399 bp, Zea mays
  Peptide Sequence Number=SeqID_43733
atgagcaagagcttcggattctcaacactagaagacgggctctcggtgctgtcgaaaaacgaactggccgacagcctggcatacaatagcttaaagggccttatacttagcaatgccctcaggtgggcctgggttggtgggactcacagtttgatgaaccgggtcgccgactggcggggcccccgtgtcagcttcttcgtccaggcgcaacagaaccccgcgtggaggccggggaatttctcatcggagctcaccgccgccgtggatccgccatcgactgtggccgtggtgaacaactacacgaatcacggtggtgattgctcaccggaaccgcggagccatctgtaccgtgggcagggcacgacgcagcgtagcaactggtatggagccctcatctaa

SEQ ID NO: 359 - DNA, 212 bp, Zea mays
  Peptide Sequence Number=SeqID_43734
atgaggcaaccgagggcacctctggctggaggcaccgaactgtccggtgtgcaccggacagtgtccggtgcgcccagaggacatcaactcaaactcttcgccctcgggaattcttggaagccggcgcgctatgattcaccggactgtccggtgtgcaccggacatgtccggtgctccaaggaagcgcggtctccagaactcgccagcctcgg

SEQ ID NO: 360 - DNA, 474 bp, Zea mays
  Peptide Sequence Number=SeqID_43735
atggcccgcgcccgcgcctataaagcccatagggaccttaaccgtacccctccgcgcacgctcgacctcaccggagcccaaactcaccggcgtttgcccgtgcacggcgtgtccgcggctgcccgatctccctgccaccgtagaccggccaaccaagcccttcccaacctcgtccagccctcggagaggactgagcacacctcggtgaagctccccgagcgaggaatcgaagtttgcttcgccggagaggccagtccacggtcgccggactccacccgaccgccggcgagcgtagaccgggtaatcctcacctgtttaaaaatgctaaacctctctgtccacctcgttaaggtagcttttgccatttattttacaatatgcttaaggttaagaaaaatagaaaaggtgattaaaatgatgaaccagggggcactcctatttttgttagggtacttattcagtgtagttcactag

SEQ ID NO: 361 - DNA, 1287 bp, Zea mays
  Peptide Sequence Number=SeqID_43736
atggccgccgctctcccgcactcccgccttcacctcccgctccacacgcccagtcccacctcccgccgccgcccctgcccccgttcccgccgccgccttccctccttcgtcgccgtatcgcgcctccagaacaccaccgccgcgacccacccggtcctcccgcccccggctccgcccccctccgccgcgctcctcgccgccgagggcgcctccctcgcgccgcgccgcgagcaccgcttcccgggctcggtctcctccccaacaagcaccgcctctgcctctaacgaggcggagtacgccgtcctgcttcgcgccctccaggtgcgccgcgccgtcgccgccgaggtgctcgttgccgcgctcggcggcgggaaggtcggcggcctgacctacatcaagaacctcacggggcggatggggccgttcgtggaccgcgttgttgtcgaggccgcagcgatgcggcgggaccgccccgagctcgcccacatgtccttcaacgcccgtgcaaaggcgtacatccaggagtccggccttgtggagcttgtcaagtggttcaagcacaactcgatgacatatccccagatcgcaaaagttgtttgcgcatgttctggcgatttggggaaagttagaaagatgataaagtggcttaggtcaatttatgtaaaaggagattttttggggcgtgtccttgcaaacggtggatctttcttgaaccggagctttgaagaattggaagagattattggctatttggaaagccttggtgtcaggagagactggattggttatgtgatcagcagatgcccacagctgttgagcttgtctatggatgagttggagacacgagtcaggttttatacggatttgggaatggacaagaaggactttggcacaatggtctatgattatccaagagttcttggatttttaagcctggaagagatgaacagtaaggttcaatatctgaaagagtttggtttaagtactgaggaacttgggaggttactggctttcaagccacaactcatggcctgtagcattgaagaaaggtggaagcctcttgtgaaatacctgtatcaccttaacatttcacgggatggcatgaagcgaatgttgatggtccaacctacaatattctgtcttgatttggagacagtgattgcaccaaaggtacaatttttaattgatattggtgtgaggagtgatgcaatcggcaatgtgcttgcgaagtttcctcctgtattaacttatagcttgtacaagaaaatacgcccagtgttttgttag

SEQ ID NO: 362 - DNA, 1158 bp, Zea mays
  Peptide Sequence Number=SeqID_43737
atggtgaccaccagtttctgggtggggaagagcaagccgggctgcgatcttggtcccaccctcagcttcaaggatgttcatcatcctcgctggggtgggggccacgctgagccggcgctctaccttccgcgcgggtccgcggcgtgtcggagtcgtcggccgggcttccggcggcccctcctgccggagggcgaccgccgcgccgtgtgcacgggaggaccacccatgatgccgcgcgctgttagggcggcgttcgtgttctgggttggtcctgcttttgcactgggacggcgccctcgcgcagaagccgatgccccactcgtctgggaggatttgagtggggatctgccgggggctggtgtcccctgccgtcggcgccgaggcggaggcggatcgagaagtcctcgtcgccgacgggatcactgccaccacccgcgccccgggccaccgtgccggcgtgcttgtcctcgcccctcgagcgtcggcgggagcgagggcaagatcacagcagcgccggcccactgtcgccgaagtcagaatgggcggcggcgagccgcccgtcggtcttctgttgctccgcaggccttccccatggagtggggtcgttcgtacccgcggagggggaaccggagttccgtttgtaatggcatctcgaatgccgagccgacgccaaagtcgatcagccgaggcctcgggtcgggctggcgcccttgggagccggttggccgaggccccaggggtaaccggccgagccgcctgctcgggccggattcccggaggagtccctggagcgcgtcgtcgtccgaggctgggtcggactttgctgaagacgccgtcgatgccgagggtgctacggctcccttcagcgtgaagacccgagcctgcaggatcagatcgtcttgcagcgtgtgccttctgcggccgccgaggccagaaaaacacaccctcgccgtgcttgcgaagctgcatcttttttcctcttgtttcgagcatctggactctgtcggtaacagggatgtttgtgtgagcgagagttgcttctcgcggaagggacgagtgaggtatccgtatcccagaggcgtgggaatcccttggctcggtcggccttgccgcttacgcgtactttcacccattcatgaggccctgtccccgacttag

SEQ ID NO: 363 - DNA, 471 bp, Zea mays
  Peptide Sequence Number=SeqID_43738
atgggaaagaacaacaagcgcaagcgtgagccaactcctccatcggaggattttggtgactcggagtactcagaggaggagttttcctctgagtctgaggggtctccggctcccatccccctgcgtgagtcgtctgacgactcagacgactcccaggggctcgcggcggaggtctggacttacatccgggccatcgagcgctccgggctcgagggctcggatgagtcggagtactcctcggatgaggaggactcgtccgaggagggcggcggcggcgatggcgaggacgacgacgacgacgacgacgacgacgacgaaggcggtggcggcagtaacggtgacggcggtggcgggggcggcagcagcggcagcaaggatggcgacggcggcagcaggggcggcagcggcggcagcagcaggggcagcaacaggggcggcagcgacagaggcagcaacagggccagtggctag

SEQ ID NO: 364 - DNA, 1338 bp, Zea mays
  Peptide Sequence Number=SeqID_43739
atggcgtggatgccgatcacgtccatggagaacccggatgccagcacccccaccagcgtcgccgctacccacgtctcactattgtctttcgtcgtgtctgcacactacaagatgcagggtctcgccgagcatgtctgccccttcgagcttgtgcaccagggaggtctcatcagggccagtgagggcaagctgtggtgcactgagatcatggatgatagtgggaacgacaacctggatggtgtgggtaaaagcagcaacgagggacatggcggccataactgcaacaatgaagatatggttctcccaggactgcttggaggtatggcccttcccatgtttgatgaaatgcctcttaacagcggtgaggaagaaatttccctattctctaaaggctttgattatccagtgtttgattatatgccacttgataaagtgacttgggatgaggaatctaggcataatgatttgttggatcagctagcaccaaacgcagattacttcgttgctgccgagaggaagccaaccgcacatccaatcagttttgataagcttcacatggatgtggtgtatgatctatttgaggaaatgtcttgtaaggaagaagtagcagaaaaattagagcaggtgacatctaggaatgcagggttgtcgaattgtgatgttcaggatttgcccaatgaaatttctaatgatgttcagtgggatgaggagttcttatctgatcagagtatgcacatcggcttacttcaacacttagttgtgggaatggtttcaacttgccacccaaacatagattggatctcccacacttgtctgatgcagactattcagcttgaagaatttctatcctcagttgagatggacagggttggtgttttgagagagcgagacatagttcaacaaatcctacaagaatctggtagcatttgttcagtaatatgtgacaatcctaaggaagtgtaccatgaaacagaatggaagcaagggcagctgctccatgctgttgacgttgtgaaggatattgagcgagaatttgtacagatcaacactagtaggtcacaatgggccaacctggtcatggatgttgattctagactggacaaaactctttccattcttaggcctcaagcactcacggattatcgggatctactatcatgtctgggctggccattttcactgttttcactagacacggaaaaggataagtactcccaaattctgaatcctctagtcttgatgaatgaggaaaataaagcaatatactctcaaagcttccaagcaccatttaaagggaaatgtgcccttgggccatttctaaagtgttttggtgattaa

SEQ ID NO: 365 - DNA, 210 bp, Zea mays
  Peptide Sequence Number=SeqID_43740
atggcgcttcctgttgacgtggctggcctgcgccctaggttgggcgacgtggaggctcctccgaagccgaggtcgagtctgtcttccatggccgaggccgagtccgagccctggggtcgggtgaagcggagttcgtcgtctactggggctgagcccgagtccgagccctggggtcgggcgaagcggagttcgtcgtcttccgggatttag

SEQ ID NO: 366 - DNA, 399 bp, Zea mays
  Peptide Sequence Number=SeqID_43741
atgaagtcttttgctcgtagtttgcttgggacgaggagtagctcgaggagcagctcgaggggtgaggattcagtttttcagggcacaggttctaccgtgagcagacggagagcgctggcagaacatttgcctccacaagatgatgctgaaattgaggaaccagtggtagaggatcatgcaagagatgatgttgaagatgatggtggagataatgtgggagatgatgttggagacgatgctggtggggattctggggctagggattctgggtctggtggagattccgcagcttggtctggaacttctcgagttaggagaacgaggaagttgcattttgttggaccacctccagagcttccacccgaatctcgggttttgataaagcctagtggaaagtga

SEQ ID NO: 367 - DNA, 447 bp, Zea mays
  Peptide Sequence Number=SeqID_43742
atgggcaagggtcacaaacgcaagcgtgagccgactcctccgtcggaggatttcggcgactcggaatactcggaggaggagttctcctccgagtccgagggatctccagctcccgtctctcccccggcgtcgtctgatgattcagacgactcccaggggattgccgcggaggtctggacgtacatccgggccatcgagcgctccgggcttgagggctcggatgagtccgagttctcctcggacgaggaggactcggacggcggcgaggacgaagatgacgacgacgacgacgacgacggcgacgacgacgacggtggcgacggcgacggtgacggcggctacggcggcgggggcagcggcggcaagggcagcaccagaggcggcagcagcacgggcagcaccaggggcgacggcggcaagggcagcagcagcaaggccagtggctaa

SEQ ID NO: 368 - DNA, 135 bp, Zea mays
  Peptide Sequence Number=SeqID_43743
atgtcgctcgaggaaatccttgaagcaaggtacgtcgacgacatcaccaacgaacctcttcctctctacgagccacaacccgttgcactcaaagcaatagccagcaaggaggcgctcccaaacaaggtggcatga

SEQ ID NO: 369 - DNA, 219 bp, Zea mays
  Peptide Sequence Number=SeqID_43744
atggtgaatgatgctggtgacaaatttcatggcctgttcaagggtgacctttgcgaggggccacgcttcgatccacttagagaattttttgattgcgaccaagatttgggtgtagcccctgagtgcccttttgagaggttctcactacctgatgtgcatctaacactaggtgggccaatagaatccttgtcggaaggtgttccccacgaggcttcttag

SEQ ID NO: 370 - DNA, 1353 bp, Zea mays
  Peptide Sequence Number=SeqID_43745
atgacactctgcaccgtcttgctccagatcctccttccaacgctgctcttggtttctgccatcacaggcgcggacgctagcggcatcggcgtcaactacggcacgcggggcacgacgctcccggcgccggccgacgtggcgcggttcctggcccgggacaccatcttcgaccgcgtgaggctgttggacgccgacccggtcctgctgcgggccttcgccggcacgggcctcgccgtggacgtgacggtgcccaacggcgtcgtcccgcacctgctgaatctgaccttcgcgcggcgctgggtgcgcgacaacgtgacgccctacgcgggcgccaccaatatctcgcgcctcctggtcggcgacgaggtgaccaccgaggccaaccggacgctgctgctggcgctggtgccggccatgcagaacctgcacaccgcgctggtcgccgcgtccctgcacggccgggtgaaggtctccaccacgcactcgctcggggtgctcaccaccacggagcagccgtcggcggcgcggttccgcgacggctacgacgcggccatcgtgaggccgctgctcaggttcctccgcgcgaccggcgcgccgttcatggtgaacgcgtacccgttctacgcgctcgccaacgacagcagcctcgacttcgcgctgttccgggtgaacgacggcgtcatggaccagggcaccgggctggtgtacggcaacatgctggacgcgcagctcgacgccgtgcactcggccgtcaggcggatgggcttcggggacgtcgacatcgccgtgtcggagaccgggtggccatcggccggggaggactgggaggtcggcgtcggcgcggacctcgcccgggactacaacagcaacgccatccgccacctcggctccggcgtcggcacgccgctcatgcccaaccgcaccttcgaggtctccatcttctccctcttcgacgagaacctcaagccagggccggtgtcggagaggaatttcggcttgttccgcggcgacatgacgccggtctacgacgtcggcatcttcactgatccggagacccttgagccggtgagagcgaaggtgacgagccggaaatggtgcgtgccggagccggcggcggacgagatggtgctgcaggagaacatcgacttcgcgtgcggccaaaagggcgtcgactgtaccgcgatccggccgggcggcgtctgctacgagccggacacggtgcaggcccacgcggcgtacgccatgaacctctacttccaggccaatggccagcatgcctttgactgcgattttggacagacaggcattgttaccacagctgatcccagttatggaggctgcaaattcatgtga

SEQ ID NO: 371 - DNA, 1338 bp, Zea mays
  Peptide Sequence Number=SeqID_43746
cctgagtccgagccctggggtcgggcggagcggagtttcgccgtcttccgggtcttagcccgagtccgagccctggggtcgggcggagcggagttcgccgtcttccgggtcttagcccgagtccgagccctggggtcgggcggagcggagttcgccgtcttccgggtcttagcccgagtccgagccctggggtcgggcggagcggagttcgccgtcttccgggtcttagcccgagtccgagccctggggtcgggcggagcggagttcgccgtcttccgggtcttagcccgagtccgagccctggggtcgggcggagcggagttcgccgtggcgcctttggcaaggcctgattgcctatcagactcactctgtcaactttatgctgatgggggttaccagctgagaattaggcgtcttgaggaacttggccgcacatcgccgctcccaaccctagcaggagctctcggccccccgtccccgcctccatcctcccagaaaaattcctcccaccgcgcccgcgacagcgacgagcacgggcccctccaccgcctccgcctccgcctcgccgcgtgcggcctccgcgccgccccgacgtcgtcccctccgccctccccctcggccctcgacgcgccgccgcccgccctccgccgccgccgccgcggcgggctcggtctcctctggaagctcccctccacccgcgcgccgccccgcccggctccgatggacgcgcgcgcgcccccgcctccgcagccccatccgtcgcgcgccccgtcgccgcagtcccatctgtcgcgcgccccgtcgccgcagcccccgcccgcgccgtctaggaggtacggcgtgcacttctcggcgtccagcttcatccagacgccgctcaccgcgctgctcgagtactccggcatcctccggcccgatcccggttgtggaatccaacagccagggaccggggccgggccgggcgaggtgtcgatccggattgtggcgcccggcgaggcggggacgtcgtctgagagggccgaggaggtgatcgtcgaggaggaggaagaggatggacaggcaacaaggacgcgccccgaggactcatcacctgccgctggcggcggggagggcggcagggaaacctcgtcgtcgtaccagcggtacgacatacagcaggtggccaggtgggtggagcagatactgcccttctcactgctgctgctcgtcgtcttcatccgacaacatttgcaaggtttctttgtgacaatttggattgctgcggtgatgttcaagtccaacgatatcctgtgtaagcagactgctctgaaggttggtgattgttttgttgaacttctg

SEQ ID NO: 372 - DNA, 339 bp, Zea mays
  Peptide Sequence Number=SeqID_43747
caggaggagtgctttgctcagtccacctttgttgaggctgggctaagtgtaggagtgaagccccaaggctctctgaagcggtcgtcgccggacaaggcgcacaggtccaccatggacaccgtctaccaccaccaccatgtgtcgccgttgacaggcaacggcgccgccaccgccaccgtcggcgagaagctgggcgtggagcggttcgagctgccgttgttctacatctcgctgtcatggaaggagaaggaggacgatttccttgcgatgaagggcaccaagctgcccagcgaactaagaaaagggccaagaacgtggacaagaccctccaagtattaa

SEQ ID NO: 373 - DNA, 471 bp, Zea mays
  Peptide Sequence Number=SeqID_43748
atggcgcctcctgttgacgtggctggtctgcgccctaggttgggcgatgtggaagctcctccgaagccgaggtcgagtctgtcttccgtggccgaggtcgagtccgagcccctgggtcggggcctgactgcctgtcagtctcactctgtcaaggggcaccgcagtcggagtggcgcaggcggcgctgtccttctgtcaggtcggtcagtagagtggcgaagtgacggcggtcacttcggctctgccggctgggggacgcacgtcaggataaaggtgtcaggccacctttgcattaagtgctcctgtgatttggtcggtcggtgcggcgatttggtcagggttgcttcttggcgaaggctgggccttgggcgagccggaaatatattcgccgctggaggggggcctcgggcgagacagaaatcctccggggtcggctgcccttgtccgaggccaggctcgggcgaggcgtga

SEQ ID NO: 374 - DNA, 471 bp, Zea mays
  Peptide Sequence Number=SeqID_43749
atgcctccccatgtcttcgaggtcggggcggtggcacattcggcggtcaaccgcggcgggttgtgtttccgccgtgctctcaatcaccgacgagcaattgaatccgcaagcgcattaacgcagcaagaatcggctggttgttacggccgaggtcttcggagtccgtccttcaaccgccacgcacgaagcggagaggagaagcagagtggcagggcacgatggaggatcccagccgcgagctgcgcgtgccgttgcaaccgtcatccgtctgaggcggaggcggccccagattggtcgcccgaccaacgcggcaatcgtctcggcatggattccggaggaagacgctacctgacaatatgggcccacaagccagcgacttgcttgctgattgtagcgtgcgcgcggagctgcgggaccagtctggcggtgaccgagaggaagtgcgcgcggctgagcattcgcctggtgtaa

SEQ ID NO: 375 - DNA, 312 bp, Zea mays
  Peptide Sequence Number=SeqID_43750
atgggcaagagcaagaaaggtggtggctcttcgcatcactcgggcgacaagcgcaagcgcgagccgactcctccctcggaggacttcggcgactcggagtactcggaggaggagttctcttccgagtccgagggctctccggctcctgcttctccccggcgtcgtttgatgattcagacgactcccaagggattgccgcggagcggcggcgacagcggcaagggcggtgacggtagcggcaagggtggcagcggcgacggcagtgacggcagcaagggcaacagcaagggcagcaacaaggccagtggctag

SEQ ID NO: 376 - DNA, 345 bp, Zea mays
  Peptide Sequence Number=SeqID_43751
atgtcgcgcgcgttcgacgactactatatcgaggattgtggcatcatcttagcgtcggaggtgacgcagaggaggatcgacaacagtgaccagttcgtcatcctcgccaccgtcagggaagggacacagcgcagatggggggatctcgccagggaagggggcgtcaatggtggacctcgccgtgtaaggaagggtagacctatggacggcaccatcggtgggggcagcagctccgacgggagagcgatgtcgagaatggaattgggttggggagcgcggggaggagggtgggcgcgagctgagagagtggggccagaaggcgtaaagtgctggggcgtggcctga

SEQ ID NO: 377 - DNA, 444 bp, Zea mays
  Peptide Sequence Number=SeqID_43752
atgactcttggttgggctgccaaacgaagtgtaccccgggctcatcagcgaggtagtacccctggccattgcaccaccagatgcgctactccactacatacatcatgttcgaggatactcacacaacgtcaacaacgtccatcgtcccagcgcacaagaattcatgtccgatcagtagcgacttacgtgaacaacccgagagtcgtcgatgttggcgacaaccatgaggcctccctgcttaacgatggacagtgcggtgcagctgctctggaccgcgtccaagtggtggcttcgcgggagcttgtcgtacacagcggcacatgcgaccacgtaagactgcttctagaggtcgaactgacagtcgctaagcttcttctcgtcatcgatgagcgtcgccaacgtgagtgcctcctgctcatggtgtttgttcggggtttcaagtaa

SEQ ID NO: 378 - DNA, 183 bp, Zea mays
  Peptide Sequence Number=SeqID_43753
tgatgccctgccggaccacctaggtagtggtcaatggggattagctctccccggatggttcgagatgcaaggattatgttatggtcttggttcgactatgatgatgttcctcgatgaggaaatggagaaggcgaagccgtggaaggagacttccaggagcttcaagactacgatgaattctag

SEQ ID NO: 379 - DNA, 99 bp, Zea mays
  Peptide Sequence Number=SeqID_43754
atggagttgacgcctgtccacttggttctttctagcgcagaaagcgttaaaaaggatttccagctgtggtgggtaggaaaaatggagaccgatggatga

SEQ ID NO: 380 - DNA, 90 bp, Zea mays
  Peptide Sequence Number=SeqID_43755
atggaggttgtgttcgaggtgctgaagagcctagaggacgttgaggagctggaccccgaattggagcaagagcaaggtggtcagatctag

SEQ ID NO: 381 - DNA, 904 bp, Zea mays
  Peptide Sequence Number=SeqID_43756
atgcatgatgggagcgcgaagacattgttgcctttcgagggggtcaccctccttttaaaggcaactctccccacttgcgtcctcagccgtcgcggactgagtcttctccaacacgctccaaggtcttcccccctacgacacgggggctgggtcccacgcgtcatgcaaactggcccaggacagaaggagccaaaaccgccgcgcgcggcgcgcgcaactgcccagcggttacgagcattcctccacttttgcccagaccagcgggtgaaagggcggactgccatgcaggcggcatgcgaccgcatcgagggggcgcaccctttcgacttcgacgcgtccagcatggaggcccaggcccacacgtcatgtaaccggcgcgccggttactgcgtacaagaaactgcaccgccacttgcgccactatcgtgcctcctcgactgtggaaccagtactgcgactcgaggcaaccctgcgcatgacccaacagtgccaaccaggcacatcggtcacgggtcagtcagccacaggagaaggcgcgacggtcgatacgggcagaaatggaccggcagtaatgacggtggcaggcgggcggaagcagccgtcaagtcggaccgggaaaggggataccccgaaagggatccttctccgcgaaggaagcgggccccgagccccactactgatcagaggttcgaaggctggcccctcggagggttcaacagccgcctcagagcacttgggctccgcgcccactactggtcagaggttcgaaggccggcccctcggaagggttcaacggccgcctcaggcaactcgggctccgcgcccactactgatcaggggttcgtaggctggcccccgaagggttcgacagccgcctcagacgcagagcgagggatgaccctag

SEQ ID NO: 382 - DNA, 135 bp, Zea mays
  Peptide Sequence Number=SeqID_43757
atggatgaacaaagtgcaaatcaagagcaaagccaaggggctgtttcggtctggggcaccggacagtgtccggtgcgccaggctgcctcggccgaacaggccgctctcgggaattcgccgacggcgtacggctaa

SEQ ID NO: 383 - DNA, 669 bp, Zea mays
  Peptide Sequence Number=SeqID_43758
atggacgctagtgttagtcttggaccgaacttaaaagcaattagaaggatgcaaatgaatcaaagcgccgggactccatcttccgcttcctcccttactcgcgctcggcacgcaggcgacgggagcggcgctcaggctcgggctctcagcggcgacttcagcggcttcccctcccgcatcgcgccctcgcctccgtttaagatgtcagaagcactcgagaaagataaagaaattgatgaagaggaagaggagtatgtattgctagagttggacaattgtctttattcagacatgtcgccaggtgctccgttcgtactctccggtttggatacattgacgcctaccttgataataggtgacagtcttaagatgcaggtcctgtactgctgtaggttagctgcacagggtgctaagtacaaaatcggagaatatgaagaaactattggcacctgctatctattctctgaaactgaagctgaaccgaaacctacaagtaatgagatggcaccttctgaagaaaacacagacaaacaagttagcagcagtaaggaagcgccgtcgaaggaggtgaaccatctcgccagcgttcaaaagatcctcaaatttcggccaatcaatgcggagcattcgcagcatcgagcatatcagcacaaggacaaggaattctag

SEQ ID NO: 384 - DNA, 369 bp, Zea mays
  Peptide Sequence Number=SeqID_43759
atggtgcttgcggtcgtggtgctgctgggcgccgtggccgtccttgtggtggtgctgctgctgcagccccgcgtgtcgtacgtggcggtgcgggcgggctggcggtgctctgcgcctacccgttccgcgtgcccgacaggggcgtcctcccgttggctcgtaaacggtgtgcacatggtaatattcgtttccgtgagtcaaggtaaccaatcccgcgagaaactaggaaccctaactgattctgcgcacgcgcggaccgtccgcgccaccaccgcggactgtccggaccgcggaccgtccggcctcagcgccggactgtccgcgctgctcaatttgacttccatcatatgcccccctgccttttggtga

SEQ ID NO: 385 - DNA, 285 bp, Zea mays
  Peptide Sequence Number=SeqID_43760
atgcggaaaggtgctgggacttacctggacaggatcacgaatggaggaatggcgatgacgggtacacagtacactagcgtcgtcaaccgcgcgaggaggggcgcgagtaggaaaagacaagtcgggatagtcgtccgtcgtctcgaggtcgggcgggttttcgcgcggaaactgggctcggaggtggggccgataccccaggagctgccttccaaacaaatcacaaccaagcctagtgaaagtttttcgcgtggtccgttggcacctcaccgggaagtggtctga

SEQ ID NO: 386 - DNA, 405 bp, Zea mays
  Peptide Sequence Number=SeqID_43761
atgggggcccacgcccacacgtcatgcaaccggcgcaccggtcgctacctgcaagcaactgcaccgccactcgcaccgctgccacgcctcctcgactacggaactagtaccgcgactcgaggcaaccctgcgtacgacccagcagtgccagccaggcgcgacggtcaatgcggccaaaaatgggccggcagtaatggcggtggcaggcgggcgggagcagcggtcacgtcgtcagccaagcttacgtcccatcatggggcagacaggcggcgcctcaggcaggagaagcaagcgacgcttcgccttcgccgtaatgaccgcatcaaaaaaagggaccgggaaagggggataccccgaaaaggatccttctccgtgaaggaaacaggcttcgagcctccctactga

SEQ ID NO: 387 - DNA, 111 bp, Zea mays
  Peptide Sequence Number=SeqID_43762
atggatcctaagggcaaggggatggtggtcaacgataaggagaaggagtcctttgtcaatgatccaaaggacgagtaccataaggtgagcggcttggacaatgccaagtag

SEQ ID NO: 388 - DNA, 440 bp, Zea mays
  Peptide Sequence Number=SeqID_43763
accatctccttgcccccgcctccacgaaacctccacgacatccacgccgactccgcaccggggatgcccagctgggctaccgcttcgagctggtgcccgaccacaacagcaacatcacggactcggccgtgtgcgtggccgagtctagcgtcccggcggtccgcggtgggcagttcgccatcgatcttaccacggccggatcccccgggcggggcagcagcgagttgggccacgcgctctggcccccgggcggcttcgtgatgtcggccgccgtgcaggaggagggccggcgcggcaggccctccgtggggatcagcgtggcgcacttcgggtgcgccgaggacgccgccgcgttcgtcgctctggcagccgccgtcgacctcagcatggacgtgtgtcggctcttctcctgcaagctgcgccgagagctgtcggcgtga

SEQ ID NO: 389 - DNA, 198 bp, Zea mays
  Peptide Sequence Number=SeqID_43764
atgcagcacggcgagatggtggcaccgttgtcactgtatgacgatgggtggccgggtggaggagaagttgcaatggggatgaccggcgacggagaactgtttaaggcagattttaagggatattttggagatgctctcactaacgaacacctgagtgagctgacggacctcgaccacgccacacgacaatggttatga

SEQ ID NO: 390 - DNA, 741 bp, Zea mays
  Peptide Sequence Number=SeqID_43765
atggtggtggacaccgagctgaccacgacggattgcgagtctgcggcggtgttgagtcgatggcgacaaattcccggtgccgtcggtggcttgtcttctgaaattcggttgcggccaccttcaacacgtccgaaaggagcccctgggttccttaccccgagcacggtcgtcggcacgcccggattcgcctgcggcgggtcactctctcttctctctgctcacggcgatggtggcacacgatatgggcgacgagttgcgcggaccggtgggagaaggagctttatgtggtcgaccggggttggatcgagggctagggtggttggacggggtccgagcttcgcccgatcggacagagaatcctccctctcctcatcagagaagaggaaaccagatgcactggcgccgtcagagtttggggattcgactttgacggagttgaggttcgcccacagtccgatttgtgcacctcggctgcgttcaatcaaggcaggggatggcatcgggaccacggatggtggcggtggtatgacctcgtcgtcgttgaagaagggtggacaccctgttcttgctgctctggttggaggacgaccgaaacctggcggtgccggtgttggtggtctccaacgcggtgcagtaggttccacctccggtgtcgacaccggtggcaccggtgttaaccagattcaccattaccctgtgaatggcaaagccaatccgattgtcgtcgaggattccttcacg

SEQ ID NO: 391 - DNA, 156 bp, Zea mays
  Peptide Sequence Number=SeqID_43766
atggcgccccgcaagccctgtgacgacggcggctctcagctcccttacggaagcagggggacgttacagtttaaagggtataatgttgatttggacagaggtaaagtggtgattgagaaaatcaacgcctcaaacaagacacataagacttattaa

SEQ ID NO: 392 - DNA, 564 bp, Zea mays
  Peptide Sequence Number=SeqID_43767
atgaatcgtatcctctggcttttgcatctgtctgaaggccttggcaaatataatatccgctacactgcctgtattaaccagaacattgtggaccagaaatcccttgatgacacaagaaatgaccatagtatcattgtgagggtaattcttgagctgaaggtcctcctgagagaaggatccactgaaggtgtttctttcttcaagatcttcggctacgaagcatacccccaacagccagcaacgtccatcgtcccagcacacaagaatttatgtccgaacaacccgagagtcatcgacgttggcgacaaccatgaggcccccctgcttaacgatggacaacgcgatacagctgctctggaccgcgtccaagcggcggcttcgcgggagcttgtcgtacacaacggtgcatgcgaccacgtaggactgcttctagaggtcgaactgacagtcgtcaagcttcttctcgtcatcgatgagcgacgccaacgcgagttcctcctgctcatggtgtttgttcgggtttcaagtaagaaacatggattcatgcttggcgttggtttatga

SEQ ID NO: 393 - DNA, 795 bp, Zea mays
  Peptide Sequence Number=SeqID_43768
atggtgaggtggggcgagatggtggaggaggaagaggacgacgagtacgctaagctggtcaggaggatgaatccaccgagagtggtcatcgacaacgactcgtgtggcaacgcaactgtcatccgggttgatagggtcaataagcatggcattttactggaagcagttcaggtccttgtcgatctcaacctcgtcatcaccaaggcttacatttcttcagacggcaactggttcatgcatgtgttcaatgtgaccgatcaggacgggagtaagcttcataacagggaggtcattgaccatattcagaaatgcctggaatcagacggctaccttgttcctccggcgaacggttatgcgctgccggaagaccagttcacctccattgagctgacgggcgcggaccgcccgggcctcctctcagaggtgtgcgccgtgctcgccaccctgagctgcaacatcgtgaaggccgaggtgtggacgcacgacgggcgcaccgccgccgtgatccaggtcaccgacgaggccaccgggcgcgccgtccacgacgcgggccggctgtccagggtgcaggagcttctccgcgacgtgatgcggggcgacggcacgtgcaaccgcggcggcacgggaatttccgcggagaggcgcctgcatacgctgatgctggacagcgtcggcggcggcggtgccgaggaggctggtggcggccgtgacgagagcggtggatgtggcgtggcgaggcccaaggtcgtggtgatggactgcgcggagaggcggtacacgggtggtgatcctgcg

SEQ ID NO: 394 - DNA, 87 bp, Zea mays
  Peptide Sequence Number=SeqID_43769
atgaacgcccttgattctctgggtgctgagctcttacccctgaatctgcatgtctcccattgtgttcatgaccaccagggaatctga

SEQ ID NO: 395 - DNA, 123 bp, Zea mays
  Peptide Sequence Number=SeqID_43770
atggcggtggcttggccgcgccgcgtcccgcgccccggcgagctccgccccagcgagctccgccgcccgcgcccccgtcaatgtgctgcgtcgcgcgtttcgccgcgcgatggttcattctaa

SEQ ID NO: 396 - DNA, 534 bp, Zea mays
  Peptide Sequence Number=SeqID_43771
atggccacggtcgcgccggcgtccgtcaaggggttcaactgcactgccaaccgcacgcgcccatgccaggcgtacgcgctctaccgcgccggcttcgcgggcatgccgctcgatctcgcggccatcggtgacctcttcgccgtcagccgcttcatgatcgtgcatgctaacaacctctccacaatggccgcgccggccaacgggcagccgttgctcgtgccgctccagtgcggctgcccctcccgctccctcagctcgtatgcgctgatgcagtaccatatcggcttagggggcacctactggatcgtctccaccactaagttgcagaacctcacgcagtaccaggccgtggagcgcgtgaaccccacgctggtgcccaccgtcctcgacgtcgatatcatggtcacgttccccgtcttctgccagtgcccggccgccgccgacaacgccacgacgctcgtcacctacgtcatgcagctcggggacacgtacgtgtccgttgccgccgcattctccatcgcctatccacagtga

SEQ ID NO: 397 - DNA, 1356 bp, Zea mays
  Peptide Sequence Number=SeqID_43772
atggccggctcggccgcccccgcgcgccctgccccgtgcccgcccggctcggccgtccccgtgcccgcccggcttggccgcccctgtggccgcccggcctcggccgccccggccccggcccaaccgcccgcccctgcccagccgcccctgcgcgccgccggctcggccgcccccgcccctgccccaggccggttcaaccgccccctggccgagaacgatccggtcgaagagcccgaggagctcgcaggagaagcccctgagcagcagtcggtggctatgagaatcgatggttttggttatgactatggtgatggtaagtggtattctttccgtttggaaaggatggctcgacttagacacactgcacgtaagtccatcatccccttcttaccctcccgccttgctgagcgtccgcttcgccgtcctgtggccggacagtccagccacttggagagactgcaccaccgcctgcatgaggagcaggagcgtcgacgacaggagcagcagggctcttcttcctcgctccaccaggagatagagtctgtgaggagctgctcccctaagcttcccctggaggcgccccctgcaccaccactgggcgccccagcttctggagtagctgctggaggagatccagacgacggaggtggcgacgacagctcgagccacggcaccgacctctctgctaaccatgagctggaaggatggtttgctcgttccatcactcgtgacgctgctcgcgggtgtcacttccatgatgcgctcgacaccctgctacgtcgggcatttgaccggcatacttggtccgtcgagtatcgctgtgtggtctaccagcatagtcgcggggtctacccggaccgctgggaggcaacttgcttggtgcgccgtccggagaacagtctccagggtgcagaggcctgctcagagcactattctatctctgaacgggactcagctgaggcagccatgcaagatgctgcacggcgtgcgctttcgcactactgctcggttttcggtggggtagctgacggtcttgacctgaagtattacccccgccgtccatctggcagcacaggaggcgtgattgtctcacctgtcggtgagggcaatcctaggttgagcagcacagtcaacctagccgccgtgctaaacacggagctggaccatgcactggacgagctgagtagggctcgtgctgagatcgcccagctgcgggctgagcgcgcggaacgtcgtcacctggaggatggttcccccgctcccttcgggactcagcatctgtaccgttcacctcagcgtggatcccagtcttatggcaatcccgactgcaagaccaagataactctagaaccatag

SEQ ID NO: 398 - DNA, 324 bp, Zea mays
  Peptide Sequence Number=SeqID_43773
atggtgtcggaccccgcaccgtcgtcggcaccgcgctacttggcgtactcgctgccgtcgaaccacctccccggagaggacatcctcttctgcatcaacgtcgacctcgaggtccacgccaagatgaagtctgctgtcgtagcgtcctcggatccatgtccaccacgtcgcagaccaaggccgaccgggccaagctcgacggcatgtacgagtgcatcctctgcctgctgctccacctcctgcccgtcctactggtggaacccggaggagtacctcggcctggccgcgctgctccacgccaacagatctgtttgttggtgctga

SEQ ID NO: 399 - DNA, 201 bp, Zea mays
  Peptide Sequence Number=SeqID_43774
atggcccctagtgcccccctcgccttcgccactgtcgaccaggtcaggcccgaccttggtcactccaagcaaactcttactggttgtctcgaccaggtcggccccaaccccgacctaattatctcaactagtttggccccgaccaagtcaagcccgaccttggtcgccctaagcaaaccccaacctggttggcccggctag

SEQ ID NO: 400 - DNA, 1197 bp, Zea mays
  Peptide Sequence Number=SeqID_43775
atgcatgaaggaagtgcgaagacatggttgccatccaagggggtcactctccttttaaaggcgactctccccacttgcgtcctcagccgtcgcggactgagtcttcaccaacacgctccaaggtcctccccctacgacacgggggctgggtcccacgcgtcatgcaagctggcccagggcagaagaagccaaaccgccgcgcgcggtgcgcgtaactgcctagcggttacaagcactcctccactttcgcccagaccagcgggtgaaagggcaaaccgccatgcaggcggcatgcaaccgtaccaagagggcgcaccctttcgactccgacgcgtccagcatggggcccaggcccacacgtcatgtaaccggcacgccggttactacgttcgggaaactgcaccgccacttgcgccagtaccgcgccttctcgactgcggaaccgatgccatgactcgaggcaaccctgcgcatggcccaacagtgccaactgagcacatcggtcacgggtcagtcagccacgggagaaggcgcgacggtcgatatggccaaaagtgggccggcagtgatggcggcggcaggcgagcggaagcagcggtcaagtcgtctgcaggctcacgtcccctcctgggacagcgagagagccctctcccacggagtgaagacgacgcgcccgtgttccgttcctctaacggctcgcgcacgcacagcggctgtcccacgaaccacacgtcctgtcgcattaactctgcggcagggcaggcggcacctttggcagggaccgggaaaggggatactctgaaagggatccttctccacgaaggaagcgggccccgagcccccctactgatcagaggttcaaaggctggcccctcggaagggttcgacagccgcctcagagcactcgggccccgagtcctcctactgatcagaggttcgaaggctggcccctcgaaagggttcgatagccgcctcagagcactcgggctccgcgcccatcaccggtcagaggttcgaaggctggcccctcgaatgggttcgacagccgcctcaggccactcgggctccgcgcccactactgatcaggggttcgaaggttggcccccgaagggttcgacagccgcctcagagcacgcagagcgagggatgactttgggtacgtctgatacatggccgaggctcgggctatgctcctga

SEQ ID NO: 401 - DNA, 696 bp, Zea mays
  Peptide Sequence Number=SeqID_43776
atggcctcggcaacccgactccggcgtcggtcccgccagtggacggactggccaggctccgaccgacgaagcttcttttcgagccaactctgcctctgtccgtgctggcaccgctgcctccggctccagctcatcgaagagcggccgagggttcctttaactaagcaagagaagcctcgggcggcaaggccgaccgagccgagggactcctacgcctccgggatacggatacctcactcgtcaccttcgcacgaggaaactcacacttggttaagaggccccgacagccgcaatgaacagacaccggcactcaaggtacgaacaaccccccacattggagggcttgcggggcgacaaaaccccaggtggctcgccgacgcccgctccggcagcagcgacaacgacatccgctctgggcggccaaacagcagcagcgatgacctcagggcagacgctgctgcgacaaggccctcgcccaagacccacctcaaggggcgaggacaagctaccaaggccgtagagtcagaggtcagtccgcgggtggctccggctatctcgtcggcagataaacctcttccggctgcctcggtgggaggtggcaccggaagcagcgccggagccgctcaggccggagagctagacacgtggcagctgccagcgccacgaacggcaaacgcccttccccccgatcactga

SEQ ID NO: 402 - DNA, 981 bp, Zea mays
  Peptide Sequence Number=SeqID_43777
atgggcaagagcaagaaaggcgggagctcttcacaccattccggcgataagcggaaacgcgagccgactcctccctcggaggacttcggtgattctgagtactcggaggaggagttctcctccgggtctgagggatcgccgatccctgcctctcccccggcatcgtctgatggctcagacgactcccaggggatcgccacggaggtgtggtcctacatccgggccgtcgagcgcgccgggctcgagggcttggatgagtcggaggtctcctcggacgaggagaactcctcggactcgtccgaggagagcggcggtggcggcgatggcgagggctgtcggtgttttgggtccgaccgcacacctggggttgcccctcgaggtttgggccgcttagagatgcgtaacaccctacgtcctggtgaggatgcttcgtgtaatgggttacaagtggacccgggggatatctgtcccccacaagcccccgatctttgggttgattttgaggcaatcagcccaaagatcctaggtctagcttgcaggaccctgaacttcattgggtgcaccggaggtgcacctaatgggtgtagcccccgagcttcgagtagattttggaagataatctactcgaagaggaggagttctcctctgagtccgaggggtctccagctcccgtccctcccccagcatcgtccgatgactcggacgactctcaggggattgccgcggaggtctggacttacatccgggctcgcgggctcggatgagtcggagtactcctcggatgaggaggactcatccgaggaggacggtggcggcgatggcgaaggcgacgacgacgacgacaacgacggaggcgatggcggcgacaacagtgacggcggcggcaggggcggcaacggcggcagcagcaggggcaacggcggcagcagcaggggcaacggcggcagcagcagcaagggcagcaacaaggccagtggctag

SEQ ID NO: 403 - DNA, 402 bp, Zea mays
  Peptide Sequence Number=SeqID_43778
atgaagggacggacaaagaagactggacgacaccacccgttacaccctacacacggcagtgtatcagactatgtcgtaacctacatcaagatgtcttccatctcctcccgtgttgcggccgtcgaggcatgtccatctgcatccacgccagccaccccgcagcaggacattccctatggcctgccgggatacggcggcatccccaaggtaccggtgaacatcaacctttgccagtcacgacacatcctacccccacagcccccttccaatccatcgtctaccccttcctcattccccatcaccactaccatcatcccccccaccggaatattcaggagcaccattctctcaaccagcgatgagtgttcctcgctttcatcgattggagttttcattgtttga

SEQ ID NO: 404 - DNA, 1605 bp, Zea mays
  Peptide Sequence Number=SeqID_43779
atgcagttcagcagcgtgcttcccctagagggaaaagcgtgtatgagcccagtgaggagaggcagtggaggttatgggagtgagaggatgaggatcaactgctgcagcatcaggcgcaacaaggcactgaggaggatgtgtttcagtgcaaggggtgctgtgagcagcacgcagtgtgtgctcacatcagatgctggcccagacactcttgtcgtccgaacatcctttcggaggaattatgctgatcctaatgaagtcgctgccgtcattttgggtggtggtaccgggactcagcttttccctctcacaagcacaagggccacccctgctgttcctattggaggatgttacaggcttattgatatccccatgagcaactgtttcaacagtggcataaacaagatatttgttatgactcagttcaactcagcttctcttaaccgtcacattcatcgtacctatcttggtggggggatcaacttcactgatggatctgttgaggtgctggctgcaacacaaatgcctggggaggctgctggttggttccagggcacagcagacgccgttagaaaatttatctgggtacttgaggattattacaagcataaagctatagaacacattttgattttgtcaggagatcaactctatcgtatggattacatggagcttgtgcagaaacatgtcgatgacaatgcagacataactttatcatgcgctcctgttggagagagtcgagcatctgactatggattagttaagttcgatagttcaggccgtgtaattcagttctctgagaaaccaaagggtgctgccttggaagaaatgaaagtggataccagcttcctcaatttcgccattgattccccagctgaatatccctatatcgcttcaatgggagtttacgtttttaagagagatgttttgttagaccttctaaagtcacggtatgctgaactgcatgactttggttctgaaattctgcccaaggctttgcatgagcacaatgtacaggcatatgttttcactgactactgggaggacattggaacaatcagatctttctttgatgcaaacatggccctctgcgagcagatttccatccagactaatacagttttcatctcgtatgccccgtcgcagcctccaaagttcgagttttacgatccgaaaacaccattcttcacttcccctcggtacttgccaccaacgaagtcggataagtgcaggattaaagacgcgatcatttcacacggctgcttcttgcgtgagtgtgccatcgagcactctattgttggtgttcgctcacgcctaaactctggatgcgagctcaagaataccatgatgatgggtgcggatttgtatgagaccgaagacgagatctcaaggctactggcagagggcaaggtgcccattggcgtaggggagaacacgaagataagcaactgcatcatcgacatgaatgccagggttggaaggaacgtctccataacaaacaaagagggcgtccaagaagccgaccggccggacgaaggatactacatccggtctgggatcgtggtagtcctgaagaacgcaaccatcaaggacggcaccgtcatatag

SEQ ID NO: 405 - DNA, 513 bp, Zea mays
  Peptide Sequence Number=SeqID_43780
atggtaccgatccggggagggagaaccgcgccgcctatagaggccgcgatctccgtcgactcggtcgccgccgccgggagcaccgccggcgcgtctacgcccgtctgggctgccgccgcgtgcgcccccgccaggagcgccgtcagcgcgtcggcgcctatccgggctgccgccacgcgcgcccccatggggatgcgcggctgcccactgtgccgcctgctctcgcgctgcttccctcgccagcctgagctcttcgtcggtgttgtcgtcgacagaagcagagctgccagctctactgccgcgcagaacctcgagctctgttgccgccgcacgtgcagcatccgccgcctccgctgcttctacttccgctctcgctgctgccagttccgccgccgccaaccgtgctgcccttgccgctgtcgctgcagccgctgctgctgctcgctctcgttcttgtgccgcggcgacctcggcttcctgctggcgccgcgcactcgaagtgaccgagcgtag

SEQ ID NO: 406 - DNA, 753 bp, Zea mays
  Peptide Sequence Number=SeqID_43781
atgggtacacatatttatagggactatgtgtgtattagggtttctttcctgactcccacccagcagccgctgcagcagagcccctcgcgccgccgggcctcggccaagtctccttccaccttcaacaccagccagccgccgccgcctccccggggaggctcatccttcctcccgggggcggccacaccccagccgccgcccactcctctgccctggccggcccgagcctcttctccctgccaccaccgcccctgcgccaccggcgaggacgacgcggcgtgggagcgcgccatctccgccgccatcaagtccacctcggcgcccaagaccctcaccctcgatggcgtcgtcaagtcctccacgggcggcctcccctccgccgcgctcctcgagcgcttcgctgcctccctcgaggagctctccgtcgcggggcgcgcctcttctcgctcgcgggccttccccgcctcccggcgctccggcgcctctccctcgagctctccgtcgcggggcgcgcctcttctcgctcgcgggccttccccgcctcccggcgctccggcgcctctccctctccaccgtcggtcgccggagccgcccacaccctccctggctcggcgccccctgctgcgcggcccctgccggcgaccctccctggcgcggcgcccccaagtcgtcgacactcgctcccgccgccgtcggtctgctgcccctccctgcgccgcccaccgtcgactccgccctgtcacggagatctag

SEQ ID NO: 407 - DNA, 258 bp, Zea mays
  Peptide Sequence Number=SeqID_43782
atgagacaggccggcgggagcttggctccagagatgcgaccaatttgctcgcgcctgcagagcctagtccagggtgctttaagtattgtgcgagtctggctccacatctgcacgcagagcctgattgacaacaaccaaacaccagctcattatatcccgcgatgcaagcaccagcaaatacaggcaaccaaacatatggtggatacgtcaaaggtcaagttggacgtgatgaagctctggattgccaagcggaggtag

SEQ ID NO: 408 - DNA, 544 bp, Zea mays
  Peptide Sequence Number=SeqID_43783
ggcccttgccgctcacgcgccctgccctcatctctgctccagccagggccctcgccatgcccccacacgcccccaaagaagatagctggtactccaatgtactttatcttgggaatgaggatgaagttccaattctaactatgacgtgccccgcatcagatattgagaggtataaatctggtgagctgcgtttagcaccttcatctctaatcttgcccaaggacgtcctcggccaccggcgcaggcccatgtcgcccaaggcgagccccaggaagcaccccagcgccggcaccaaggacgagttctgggtgtggcatctgccggccgaccagaagacacgtccgaacttgggcgtctgctgttacggtgagatgagatgcacagtgtcgccgccgtcggtctccggctcctgcggaagaagctcaccagacccctacgatgtcccagaattcgggtggcgggacattcgccggtacaagcagttccggtcagtcgacacgaacatttctaccggcgacgactccgctcttggccagagactgaa

SEQ ID NO: 409 - DNA, 75 bp, Zea mays
  Peptide Sequence Number=SeqID_43784
atggctcatagaagatcccaaaagaacaagaagacaactccgaaggagaacaaggagggtgataaatgcctttag

SEQ ID NO: 410 - DNA, 1305 bp, Zea mays
  Peptide Sequence Number=SeqID_43785
atgggcttaggcgcctcttcgggacttaatgcacaacattcaatgcggccccttgaagattgcccgacctggggagatgagatgggaatgcagctggtctgtggcgcctcgggtccttccaggcagatatgtggcgccttgggtccttccaggcggatatgcggccagccgtccattgatgcttgcgttgcccaattaaataacgcacagctcgatgctcgggccggctccttcatatcggtggagagatcccaggagtcgccttccccttcatggaagcagtgtagacagttggctaatgaggcacgcgaccttggggtccgagctgcctcctttaatgatgaagaaagaaccaaggtgccactagctgttgggtcgctgaatcagttgaggtcagcctcgccccagtaccatttagctgctgggccgctggagggggaccggactgattcgccccaagctactgggcctttgggatttacgggtgaagcacgccaggatgatcttgtggctgaaccggtggattgggctacgacggacctcacccatcaaatgtgcatttctgagactgagaggacgaccttgactctgggcgatcatgtggctgcggacagcggaaggaagtcctcaaccgggaatttgctacaccaatccattcactgcactactggcattgaacagccagggatgctacatattaggggccttcaatcatccaaaaagctgatggtatactcacgaaaaaggttcaacagtagggacaagtctggaaatatgaatgaagaagggagtgggccaatcgcttctgtactgaggattgatactgatgaaaatacagtgtccacggtgcgagaggtcagcctagctgttactactgatggtagtcagtcaacttcgcaagagacccaaacaggcagtacgcagctcaagaacaaacaattccttagcaagctctccaaaaagatttcaggcctccttgcaacaccagaagatcccccttttatgacgtctaaaaatgcccaagttgcagaaattatcccacgccgcagccgtcgaattgctggcgtgggagttgaatttgacaacatggatttatcctcaagaaccacaaagaaagttatgcaggccttgaaagtaattggggatcctggggcagtcacccagcaagccaaagaagactatctgaaagtattctccactgaacttcctatttcacatattgaagcgctggcgtccttttttggatgggtggtaccagatgatctcaaggtgggcagcattagtgttggcattagtgcctgttga

SEQ ID NO: 411 - DNA, 477 bp, Zea mays
  Peptide Sequence Number=SeqID_43786
atgggtgtgggcaagggacggcttggcaagaacaacaagcgcaagcgtgagccaactcctccatcggaggattttggtgactcggagtactcagaggaggagttctcctctgagtctgaggtgtctccggctcccatccccctgcgtgagtcgtctgacgactcagacgactcccaagggctcgcggcggaggtctggacgtacatccgggccgtcgagcgctccgggctcgagggctcggatgagtcggagtactcctcggatgaggaggactcggacgacggcggcgaggacgaggacgacgacgacgacgacgacgacgaaggcgggggcggcggtgatggtgacggcagcggcaggggcggcggcagcggcagcaaggacggtgacggtggcggcagcaggggcggcagcggcagcagcagaggcagcaccaggggcggcagcggcggcgacagcaacagggccagtggctag

SEQ ID NO: 412 - DNA, 423 bp, Zea mays
  Peptide Sequence Number=SeqID_43787
atggccacccaagtttcggccgcacctgccggaaaagtacgacggaacgtcaaacccgtcggaattcctgcaggaagagcttgcgcgcggttcgttgcgaacttcgccagcgcttaccagcagcacggtgtggaggcccacctccacacggtaaggcaggagcccgaggagactctccggacgttcatctcccgcttcaccaaggtgcgagagtgtcgcgagatcattgacctcgcgaaacgcgttagcgagcggcgcgagcagtcttccaaggacggctgcccacctcgtcgccgacctggcaaagaaaaggtcgacgacggtgaggtggccacggctgaatgggacctcgggtatcagtcacccgagggggacctgaaggatgtcttcgctggaggctcctactccggtggggacaactag

SEQ ID NO: 413 - DNA, 693 bp, Zea mays
  Peptide Sequence Number=SeqID_43788
atgacttcccacggatcctctgatgacggaaatgcactgacccacacggacagacttgcacgagagggctttccccgcattttgtgggaggtacttcaggtggccggatacacgacaccccctcagtacgcggtgcagcagttcgagaagcaccgagtgcctcgctgtaggctggccacccaccctattggcttgttccccgctgagagggaggacgacccaatgtggaaggatcgggtggagcatgccaaggatatctgggccatctacccaggacagaccgcacacttgaccgtgatgcgcggtgaggcgatgtcccacctgatggcactactggaggcaacaaagattacattggacaacagagaggaacttgtggttgacttgtcccaagaaatggtggagaaggacttgcaggtggagcagctatccactgagattcaggagttggaggagctggtaggcaccagggagaacgccatcgaggttctggaggatcagctccttaacactcagcagcagctcgatgaggctaacgagcacctggacatgcaccaccaggagatccaggaccaggaggccaacgaggacgtcgacatcgagggaggagatgagcctgcctccagtgtggacactgccggctcgggaagaccaccttcccccgagtcgagtgttgcttcgttcgctcactag

SEQ ID NO: 414 - DNA, 246 bp, Zea mays
  Peptide Sequence Number=SeqID_43789
atggtgctggcttggctcgggcgcggcgctgggcatgcgggggcgcgcgtgagcgtgctctggcgcgggcagaaggcgtcgaacacgtggaggcctttaccccttgtgatcacagcttctagtgccaaggtgggctttagccaaggtaacacctggggtgttacaccaggggttttccatctggtagacgaaaagaaaggtctattaatatcggggaaaaggggaaagagtgtttcttggaggtaa

SEQ ID NO: 415 - DNA, 603 bp, Zea mays
  Peptide Sequence Number=SeqID_43790
atggacttggaatgggtggatgacctggagcagtttggtgatgtgggctctttggacgataatgttgaatccttcttatccaatgatgatggagatcccagggatatttttgctgcactcaaaagaagtcctgcagagcctagcccagccgtttcaaaaggttttactttcagtgaagtcaactgttggcgcacaagcaacagcaaaattgtttgctgccacttctcttcagatggcaagattttggctagtgcaggacatgaaaagaaggctgtactttggaacatggaaaattttcagacacagtatacaccagaagagcatgcccttattatcactgatgtccgtttcaggcctaactctagtcagctggcaacatcttcttttgatagaactattaaattatggaatgctgccgatcctggattctctttgcatacattcactgggcacaacggccaggtcacatcattagattttcatccaaagaaaacagaccttctatgctcttgtgatggcagtggtgaaatccggtactggaatgtgacccagtttgcatgcttgcgtgccataaaggttgcttatattccttctactctttga

SEQ ID NO: 416 - DNA, 588 bp, Zea mays
  Peptide Sequence Number=SeqID_43791
atggcgcggttcagggaggatcccagagcacgcggcgaacagggagcgagctgcgccagggaaaatcgcgacgcacaggggaggagcttggggacgccggtcatggaaacaggggcagggcgagctccatggcaggtggccgagcagaaagtgtcagttgagggagatgaagacatggctgggggcaacaacttgatccatgcgctggggagaagaaggactcgacgaccagcgagctgggagaggcaccgagttgcaggagggagtagggagggcgcggcatggctggataggagctcggctgggaactgctcggcgcagtggagcaggggcggacgagcgcgccagggagagagcgccgcgagctgggcaacggcacagcggaatataaacacctggggtgttacaccgccaaccactcgtcccgtcgcattaactctgcggcagggcaggcggcacctttggcaggcgaagcaggcgacgcttcacctccgccatgatgaccgtgtcaaaaagggaccgggaaaggggatactccgaaagggatccttctccgtgaaggaagcgggccccgagccctcctactga

SEQ ID NO: 417 - DNA, 66 bp, Zea mays
  Peptide Sequence Number=SeqID_43792
atggcctcgcaccgggcgctgctgctgctgctcctcgccgccgcgctcgtcgctgcgctggcctct

SEQ ID NO: 418 - DNA, 1572 bp, Zea mays
  Peptide Sequence Number=SeqID_43793
atgttcgttaccattgtcgttcattgtcctgtttgcaatgttcgtcctttgtttgacaaatattggatctacttcaccgatgacatacaccgtggtcttagagaagcccttggcaacccgcactacacagctccacatgaacaactccttacgttgcttttgaggaagctagcagacacattcgctaacagtgtgtttagcaaccggctgataaacaacgaactgagtcctgaaccattgctgttgcgtgaccatgctgccgctgctgtctcgcagttgaatgctgaccaacggctcatttttgaaaagctgactgagtctgctctctcctgcttgccgggcgtatttttcgtatatggacatggtgggacgggtaaaactttcttgtggaacgctatactcacgcatttaaggtcccaacaaaaaattgtgttggctgtagcgtcctccggcgtggcttcactactattacctaaaggccgtacagctcattcacgttttaaaatacccttcgatctagatgagggtggtgtttgtggtgtcaagagaggtaccatgctgtctgaacttatacagcagacttctcttgtcatatgggacgaggcaccgatgacccatagacattgctttgaggccctagacaggactatgcgtgatattctttcggaacatagagcggaaaatgcgaacatcccatttggtggcaaacctattgtgcttggaggagactttcgccagattttacccgtggtgcgcaaaggttcacgatctgcaatagttaacgcatcaattaccagctcaccattgtggcaacacgctactgttttaaaactgcgaacaaatatgaggctttccaacccgtctttacatggtaaggaacgtgcggacttggaacagtttagcaaatgggtcttagatatcggcgatggtgctctgccagcaatgacaagaggagacgagtccgaacctacatggattacgattcctgaagatttgttgatacatacggatggtgatgctgctgtggcactcatatccgaggtctacccagatttgttagagaaatatatggaccctacatacttagctacacacgccattgtatgtcctaataaccttacaaccgataaaataaacgactacattgtctcaatgctccctggacatggtgtccaatgccttagctgcgacacgatctcaaaggcgtctgaacgcatacctgattttgacatgctatatcctactgaattcctaaactctattaatgcagcgaatttcccttgccacaaactcgtgctaaaaagaggcgtcacagtcatgctgttacgtaacttgaaccagaccgcggggctttgtaatggaacaaggatgcttgtaactgaggtcggacatcgtgttcttaaatgcatagtactaacgccctccggagtcgacgaagaggttttcataccgaggattgcgcttaacactaccgatgtcaaatggcccttcacattgcaaagaagacaattttcgatacgaatatgctatgccatgacgattaataagagccagggtcagaccctctcaaag

SEQ ID NO: 419 - DNA, 84 bp, Zea mays
  Peptide Sequence Number=SeqID_43794
atggcgcccaagaggaaagcctcgagttcgtctgctgtggtgattcctccaatcgaccccaatcgcagaatattcagccgttga

SEQ ID NO: 420 - DNA, 543 bp, Zea mays
  Peptide Sequence Number=SeqID_43795
atgatctgcgagagcggcacaacctacgccggccaaggggacacctgtcggtgttttgggtccaaccgcacacccggggttgcccctcaaggcaagaacaacaagcgcaagcgtgagccaactcctccatcggaggattttggtgactcggagtactcagaggaggagttctcctctgagtctgaggtgtctccggctcccatccccctgcgtgagtcgtctgacgactcagacgactcccaagggctcgcggcggaggtctggacgtacatccgggccgtcgagcgctccgggctcgagggctcggatgagtcggagtactcctcggatgaggaggactcggacgacggcggcgaggacgaggacgacgacgacgacgacgacgacgaaggcgggggcggcggtgatggtgacggcagcggcaggggcggcggcagcggcagcaaggacggtgacggtggcggcagcaggggcggcagcggcagcagcagaggcagcaccaggggcggcagcggcggcgacagcaacagggccagtggctag

SEQ ID NO: 421 - DNA, 282 bp, Zea mays
  Peptide Sequence Number=SeqID_43796
atgtcacgtcttctcgactgcagaaccagtgccgcgactcgaggcaaccctgcgcgtgacccaacagtgccaattgagtgcaacgatcacggggcaagcgacacctccggcaggagaagcgggcgtcgtttcacctccgtcatgatgaccgcgtcaaaaaagggaccgggaaaggggatattttggaaaaggatccttcccagcgaagggaacgggccccgagccctcctactgatcaggggttcgaaggttgcgccctccggggttcggcaaccgccctag

SEQ ID NO: 422 - DNA, 477 bp, Zea mays
  Peptide Sequence Number=SeqID_43797
atggtgggggaaagcgagccgggctgcgatcttggtcccaccctcagcttcaaggatgttcatcatcctcgctggggtggggaccgggctgagctggcgctctacctcccgcgcgggtctgcgagtcaccctctcccgcggcgttcgagggaggaggcgctcactggccctgcgggcggcgcggacttggacagcgtggggctgatcgacggcgggcgtcgtcacctccagcgtgtcggagtcgtcggcttgggtcccggcggcccctcctgccgggggcggctgccgcgccgtcggtgtcccactcgcccgggaggatttgagtggggatctgccggggggctggtggcccctgccatcagcgtcgaggcggaggcggctcgagaaatccccgtcaccgacgggatcactgccaccatccgcgccccgggcctccggctcttcgcgcttgtcctcgcccctcgagcgtcggcgtga

SEQ ID NO: 423 - DNA, 528 bp, Zea mays
  Peptide Sequence Number=SeqID_43798
atggaggggctgagcaggagaacgtggaggaacattgagtcgaccgccacacttcgttctgcagtggtctctgttgatttaccttattttccaacattttggattgggaaaaggtggtctacaaatgtttccgaggaaaatcttctagaagtacttcagggcaccactttcagggtggagtatggtgatgctgcaattgcagctgacccggtaggtgctcatgtgatcagccatgcattccctcatacctatgggcagcctattgctcattttctcaggaagacaactgttgtccctgatgctaaggccatatctgaacaccaggtggtcagggttggcattgtcttctatggcagacaatccccaggaggccataatgttgtttgggggctctatgaggctatcaaggcccacaacctgttgggtgtatgcttcgtagccgaagatcctaaagaaggagaacaccttcggaagatcttctcatgggcaagcgccgaagctgttacctatagagcttcggcacaatga

SEQ ID NO: 424 - DNA, 122 bp, Zea mays
  Peptide Sequence Number=SeqID_43799
atggcgcaccagactgtccggtgcaccaaggccgtacagatgtcaaccagccactctcgggaatttggagacacactccgctataattcaccggactgtccggtgtgccaccggactgtccg

SEQ ID NO: 425 - DNA, 855 bp, Zea mays
  Peptide Sequence Number=SeqID_43800
atggagggcgcccctgcccccccccccccgctaggcatccaaggtccagggttgaagcatatccaaggttcgttggggccgacataccctgtccaatgctgccccattgcccttcgtctagcgccaacagtcattgcccttgggcttctcatcagggggtcgggaggcaagagccgtaagggcaacaaggacgatgacctaggtgggggtggagccggtggtgacgagggtagtgctggcagcgaccttgtcgtcgttggcgaggcgcagttccttgaggatgagcatggtgtgcgccgcggcgaaggtggggcgggcgatggcgttcgcgatgatgtcatgtgtgttggagaatcgatggttgagaccgcgaaggtggttgaggacgacttcggagtccttcacggggtgaccgacatcacggagggcgtcggcggtggtcttcgagtgctggcattaggagtcgatgctggagttgcagaagatggtcaggggctcgtggttgagaaagatggcacatggctctttgttggcgcggaggatgttctcaatggcgacccaaagatcgcgagcagattggtcgtcgtcctccattgcgaggtcgagaacggagttgtcgacggagctgaagatccaacttttgacggaacagtccgcctggtcccaattcgtgtcggcgggattagcaggagcgttccatcgatatgcgacttgaggccaaattttgcacaaggatttgaagtgggacgcccacttgtagttggaattcttaatctccagcgtcatgggaacatgggatttgacaaaaacggtgacgttgggaacttgggatgcaccatgatcactagcagctaa

SEQ ID NO: 426 - DNA, 59 bp, Zea mays
  Peptide Sequence Number=SeqID_43801
caagaactacccggaaaatacccttatattcgggtcggatacaggtacccggaattcag

SEQ ID NO: 427 - DNA, 162 bp, Zea mays
  Peptide Sequence Number=SeqID_43802
atggggctcggtgtatgcggctcgctctgccaaggtggcaatgagactgatggttttggttatgactatggtgctggttgtcagcattgcaaccactgctcaggagaagatgaagctgtggaaggagacttccaggagttccaagactacgacgagttctag

SEQ ID NO: 428 - DNA, 387 bp, Zea mays
  Peptide Sequence Number=SeqID_43803
atgagcttgacacaactaaaagggaagtgcattgctcaaccttctcaagataaccgtgatcatatggtgaagaagcttgagacgggaaaaaccgtagcatgcactaaaccccttgaaggaaatgtcaaggacttgaggattgccaagagggaggaacaaaagaagaaaatcaacacctcttccaaaagcctcaaccacgcctcaataaaaggtaacatccaaggcaacccaaaattgcaacttgtgctagaaaggaaaaagaaacaactacaaagggaggacactcacatgaaagagaaggacatcaagaacaacaacatccacttggataataagatcctcaaaataatcaatggtgtggttggggagtctctttctatatcttga

SEQ ID NO: 429 - DNA, 756 bp, Zea mays
  Peptide Sequence Number=SeqID_43804
atggcacggaggagaaagacggacgccccgccgcggctggacgaggcagatcgcacgctctactccaccttctgcggcgccgccaactccctctcccagctctacgcgcaggccatggcccagcagaagctcaacttccatgccggcgagcgccacgccttagtgcgtaaaccctctcctgtcttctgtctatcgcccctaattcctgcttcctctctttcgtcgcgtcgcaaagagttacttgtccaaggggagaatccacaaaacaacactggtttgagacgacattcagaaaatagcatccgttttcaagaaaagctctaccagtggatcttgaggaagcacgatgaagaggctaggctcactgtggctgaaataatgtctcatatccagcatgagatagactatgtaggtactgatgcacatgtctccccaagagtacctcagcatcctcagattgcaaatccattcgccaattcagttgtcccacctggaactggtttgtatgggcaatcagcagctgggtttgctcctagacccagtgtcactgaccagtcgaagaatacaatattctctaatgccttatcaagcccagtgcgcaggagtctccagaactctcataccactcaaggtgctggcaatggaggccggaatgcagaagcaaacttagcaggtgcaaatagagaggccaattctacaagctccaacgacacttctatggatatggtttcagacacgaatgaattctaccagtga

SEQ ID NO: 430 - DNA, 195 bp, Zea mays
  Peptide Sequence Number=SeqID_43805
atggtggactccaaggagttcgccgtgggcatcttcgacgcgctggcgcggcggcggcggcagaacctggagcggatcagcaaggacgagctctacaagttctggctgcaaatctctagggtggggcccgtgattccgtgggggcccggggcgaccgccccgcgcgccccccctcagggccgtcgctggctgtag

SEQ ID NO: 431 - DNA, 210 bp, Zea mays
  Peptide Sequence Number=SeqID_43806
atgaagccgtggaaggagacttccaggagttccaagactacgacgagttctaggtgtgggttagtggcaacccccagtcggctgcctgtgaaggccgcgttatctacgtttcttttccgcactttgatttattattgtgtatttgcttatggcatcacatcatcagctacacccatgtgcaggtctttggggatgttgacatcagactag

SEQ ID NO: 432 - DNA, 276 bp, Zea mays
  Peptide Sequence Number=SeqID_43807
atgaaccgactgcaccaggagaagaacctcttcatcgggaatctcgccggcggaggaaccgacgccgaaatattcggcaacatcacgaggctggagaacgggatccagcgcagcccgtatcgcgagacgaggtctcagaagtgggagaaactctggaagaacgggtcctcggagaaagaaggaactctcgacgacgtgaccgtcggcaggctcaagaacaggctgagcaggaaacaaggcaacatcgagagaatccacttttcggacgcaacctga

SEQ ID NO: 433 - DNA, 459 bp, Zea mays
  Peptide Sequence Number=SeqID_43808
atgtcttatctgcttgttttagacagtttaaggcctcaagtgacaattgctactgctatagtgttctgtcatcggttttttcttcgtcaatctcatgcgaaaaatgacagacggacaattgcaacagtatgtatgttcttggcgggaaaagttgaagaaacacccagacctctgaaggatgtcatacttctttcatacgagatcatccacaaaaaggatcctgctgcagttcaacgaataaaacataaggaagtatatgaacaacagaaggaacttattttacttggggaacgtgttgttcttgtaacacttggttttgattttaatgtgaaccatccttacaagcccttggttgaagcaataaaaaaatttgaggttgctcaaaatgcacttgcgcaagttgcctggaattttgtcaatgatgggtatgctaaaattactcttcatcactgcaaatag

SEQ ID NO: 434 - DNA, 162 bp, Zea mays
  Peptide Sequence Number=SeqID_43809
atggcgcccaagagaaaaactacgaactcgtctgctgcggtgatccccgcaatcgaccccaacagtcagttacctttcgcagaacattcagccactgaaagacagggcctatccagcatatctgtatcaagggctgaccgactcaactcgggttaccaataa

SEQ ID NO: 435 - DNA, 591 bp, Zea mays
  Peptide Sequence Number=SeqID_43810
atggcagacgacgtgaccaaaggcgggttagcgacaaccacgtcagcaaatgcccaaaggcagcgcaccaatctcaagtcagactttggccccacccacaggctcgtatcctcccctgaggtgagcccgggggccactatcggtaccctgaaactagggtacccttgctaccgtacaaagacaaagaacccacgccactatctcctagtcacgtggtgggggtgccatatgtggaccaagccgcagctcgccctaggcacgggcggctactcgggacccacggtagcacccggctccgccgtgtggtcggctccagggacgccacgtggccagaagaggcggagacccgatgctgccacgtgccctactgcctgtgactggagcttccgctacacaccgatactacgcaggctgcggatatcagggcgcaaggaggatgcactgacgatgggcattagttgctccaagtattacatccattatgtccctgagcccgcatgtcggggctcagcacccttgtacgtgcgccccttcagctataaaaggggaggcacacaacgttacaagacaggctcaaaaaagctcacttag

SEQ ID NO: 436 - DNA, 2646 bp, Zea mays
  Peptide Sequence Number=SeqID_43811
atggatctctttgttgctaggacaataataacaaaggcatctctcgtattccgtggaccaattgaaattacagaaagtcagctgatcctgcttaagagctttcatgttaggctcatgagcattgtacttgatgttgatgttgatccctcaacaactccttgggatccagcaaaagcatacctctttgttcctgtgggagctgagaaatgtatggatcttttaagagagatagattggactctagttaatagcattgtgaattctgatgcctggaacaaccctcttcagagggcacgcccagatgtctatctaggcacgaacgaaaggacacttggaggggataggagggaatatgggttcgggaagttgcgccatggaactgcatttggacagaaagcccaccctacgtatggtatcagaggagccatcgctgaattcgatgttgtcaaagcgtctggattagttcctggtcgtggatggggacattttaatgattatcaaaataaaggcaagttgttcatggcagattcatgttgggatgccaaagatcttgctggaatggttgtaactgccgcccactcaggaaaaaggttctatgtggacagtatttgctataatatgaatgcagaaaattctttccctaggaaagagggctatctgggtcccttggaatacagctcgtttgctgattactacaagcagaagtatggtgtggagttagtttataagaaacaacctcttatacgggcacgcggtgtttcatactgcaaaaatctactttctcctagatttgagcattctgaagctagcaatggagagttctcagagaatcttgacaagacatactatgtatatttaccacccgaattgtgccttgtgcatcctctccccggatcacttgttcgtggagctcagaggttaccctcaataatgagaagggtggagagcatgcttcttgcaattcaactgaaggacataattgggtatccagttcctgcaaataagatattagaagccttgactgctgcgtcatgccaggagacattctgctatgaaagagcagagctgctgggtgatgcatacttgaaatgggttgtgagtagattccttttcctaaaatatcctcaaaagcatgagggacagctcacaaggatgcggcagcagatggttagcaacatgatcctgtatcaatacgccctgaataaaaacctccaatcttatatccaagcagatcgatttgctccatcaagatgggcagctccaggagtgttacctgtatttgatgaagaaacgagagattctgaaccatccatctttgatgaggaatttactcctagcagtgagttacaaaagaacttgtatgatgactatgatggcgatagcatgcaagaagacggtgaaattgagggagattctagctgctatcgtgttctatcaagcaaaacattagcagatgttgtggaagcacttattggtgtctattatgtagctggagggaaaattgctacaaaccatctgatgaaatggatcggtattaatgcagagttggatcctcaagagatcccatcttcgaagccatataacatacctgagagcataattaaaagcatcaattttgacacattagagggtgcattgggtatcaagtttcagaataaaggcttacttgttgaagctataacacatgcatcaagaccatcatcaggtgtttcctgttaccagcgcctggaatttgttggtgatgctgtattggaccatctcattacgaagcacttattttttacttatacggacctacctccaggccgcttgactgacttgagagctgcagctgttaataatgagaactttgcaagggttgcagttaaacataagctacatgtacatcttcgccatggatcatctgcattggagacacagattcgagagtttgtgaaggatgtccaggaggagctttcgaaaccaggtttcaattcttttggccttggggattgtaaggctccaaaggttctcggagacatttttgagtctattgctggcgcaatattccttgatagtgggtgtgctacctccgtagtctggaaggtttttcagcctctgcttgatccaatggtgacgccggacacccttccgatgcaccctgtaagggagctccaagagcgctgccagcagcaagccgaaggattagaatacaaagcatcccgtacaggcaatgtagctacagttgaagtcttggttgatggcatacagattggtgtagctcagaacccacagaagaagatggcacaaaagttggcggctagaaatgcacttgttgtcttgaaagagaaggaaaccgcagcaaagaaagacactgaaaaggatggcgagaagaaaaacggttctcagttcactaggcagactctgaacgacatctgcttgagaaggcaatggccgatgccacagtacaggtgtataaacgagggtggccctgcccatgccaaaagatttgtttatgcggtaagggtaaatacatctgacagtggatggactgacgagtgcattggagagccaatgccgagtgtgaaaaaggccaaggactctgcagctgttcttctgctcgagctgctgaatcgaaattaccgtggcaagcctgatggaaaataa

SEQ ID NO: 437 - DNA, 186 bp, Zea mays
  Peptide Sequence Number=SeqID_43812
atgagcagggaatgggagagcccgcgccgcgccgacactgtggcctctgctgagaaggacagcgccgcctgcgccgcgccgactgcagtgccacttgacagagtgaggctaacaggcagtcaggtcctgcagaaggcaccacaggaaactccgctccgcccgacccagggctcggactcgggctaa

SEQ ID NO: 438 - DNA, 228 bp, Zea mays
  Peptide Sequence Number=SeqID_43813
atggccgcccccatggccggcgcgccctggccgcccggccgcgccccccgccgcccgcccggctgcgccccagccccggccgcccgcccggccgcgcccccagccgcccagccggccgctggccgcgctcgcctggccgctggccgccctcggccgcctggccagcccccccccccccgcgcgctcgcctggccgccggttcaaccgggccggttcaaccgcccctag

SEQ ID NO: 439 - DNA, 399 bp, Zea mays
  Peptide Sequence Number=SeqID_43814
atgagagagcatgagcccaatcttctgtcgagaacccagacgattgagaaacaatggcacaagttcgcccccgcaggctacccacggggtaatggatcttcgatcgagaaaggctgcaagaacggcagaatgagcgccttaggatggtgtgacatcgtggctccagctgaagggagcctcagacggtacattccgatcgacgctgagaagttgcaaccccagcaagggtcctcgacccatgtctcgcaggtacaaccatcgcctgtgccaacccttattagacaaggaaaggggatcgagatatactcatgcgaccttccactgttctcacacccggttttgaaggtccttacggagaggtactcaggaaacagcctgagtcccctaaagtatcactga

SEQ ID NO: 440 - DNA, 54 bp, Zea mays
  Peptide Sequence Number=SeqID_43815
atggagggtgtggtcctcctagttgccatggaactgggcctcatggtaggcctg

SEQ ID NO: 441 - DNA, 50 bp, Zea mays
  Peptide Sequence Number=SeqID_43816
atggcgaggaagatgctcatcgacggggaggtggcggccgtcgcgggatg

SEQ ID NO: 442 - DNA, 1146 bp, Zea mays
  Peptide Sequence Number=SeqID_43817
atgaccggtcactgtggagccagtggtggtgggaaagggaattgcttctcaattgttcaggattttgttttcgaggagttggatgatgtgctgcgctactaccctcagggctaccatggtgtggaccgcgaaagccggcccgtgtacattgagaagctagggatggtggatcccaacaaactcatgcagatcacctctgtggatcgctacatcaagtaccatgtccaggagtttgagagagccttcagggagaggttccctgcctgcacattggctgccaagaggcacattgactccaccactaccatcttggacgggtttaagaatttctccaagactacaagagaacttgtgcaccggatgcagaagattgtagcgactattatcccgagtggatttaagtggatctggaacagcgtgaagggcttccttgacccaaaaacttcatccaagattcatgtgcttggtttgaactaccagagcatgcttcttgaagtaatagattcgagtgagctgccagaattccttggcggttcatgcacatgtagtgacaagggtgatttgttggtgttcttcccagctgctttgtggtttgtgtgggcgtacatcaaacttggagtcggtattagtggagaggagagacgggaggggtggatgtggctgctagccatggtcctgagcagtccttgcttggtattgatcgatcatggccattttcagtgtaattgcattagccttggacttactcttggagcaattgctggtgttctgtcgaggaataagctcgtcactgcaactctcttcactcttgcaatcattcacaaacaggagctggaactgctgagcgatggggccaatgtgtacaaactcatcggaccggtgctggtcaagcaggacctcgttgaggccaaggccaacgtcaagaagcgcatcgagtacatctccgcagagctgaagcggatggatcgggcgctcaaagacttggaggaaaagcaaaacaacaagaaggaatcgaacattccagatgtttacccttttcaaaatcatagttggcagtacaatttctgttataatatcctttgtgtggaaattaaagtggccgtgcgcgtccggattgtgctccgccggcctggcacctacgcctga

SEQ ID NO: 443 - DNA, 744 bp, Zea mays
  Peptide Sequence Number=SeqID_43818
atgaccatcgtgcctttcgactatatcgatagtggaatcctaaaaaacgacaccttgaacggcaaggccgaccgagccgagggactcctacgcctctgggatacggatacctcactcatcaccttccgcgaaagcaccctcggcggttttttcgacctgcagcagatgtcttggaatgaattacctccacaccggaagggctgcaagatgatgaactccaagcagctcaccggcgaccactgcaccagcagcgacaacgacctccgccatgggcggctagacagcagcagcgattgccccagggcaaacgctactgtgaaagggcccttgcccgtgtccccacacggggggcgagaacaagccattaaagccaaagagccggaggtctgcccgctggtggcaccgacggtctcgtcggcagaggcaaccacctccgcggtgggaagcctcacctatggcggccaccacctcagcaccgacgacagcggccacctacgcaccgacgccgcaccggcgaatggcggccaccccagcgcgcacaaggaggtcctcgctcccgtcctcgctacgggagtgaggacaaggccatctagggacgcggatgccgccctcgcggcatacgacgtcttgtacgacccccccggtgtggccggcggcgcgagaagggccatggacacggccgacctgcgcacggcgcaaccgtcgcccgtgcagtggatggactaccacaccctgaccaggtag

SEQ ID NO: 444 - DNA, 363 bp, Zea mays
  Peptide Sequence Number=SeqID_43819
atgtcacgtcttctcgggactacaggacccgtgcagcgactcgaggcagccccgtgcatgacccaatggtgccaattaagggcgacggtcacgggtcagtcagccgtggggatagacgcgacggttggtctgaccacaggtggacaggcagtaattgcagcaatagacgtgcggaagcagcggtccaaccaccaaccaggccctggtcccacctacaggctcgcatcctcccctgaagcggcaggggatcgggaaacgggacattttgaaggagtccttcgcagcgaaggaaacggaccccgagccctcctactgatcaggggtttgaaggttgcaccccgtggggttcggcgactgccctag

SEQ ID NO: 445 - DNA, 354 bp, Zea mays
  Peptide Sequence Number=SeqID_43820
atgcctccacctccgcgccatcacattctcgacaaagggtgtaggagcaggcgcctcctccccgtattcgtcccgcaccagctccgacaccgactcgcgcagtggctattgcacgtccacgaggacgtttcacatcatgcgcgcatcatcgttttcgtcgtcgtcggacgtcccgttcgtcttccctgcctggctgccttcgccctattcttccaccccaacctgctgcccccgcctaaggtcgcagccgcgagcggaccgatgctcgtcgacgcgggtatgcccgtctcttccattcccctcctgctctatgaaactttggaagtgggggaggcgagggatggaggtctctga

SEQ ID NO: 446 - DNA, 661 bp, Zea mays
  Peptide Sequence Number=SeqID_43821
cgtgcgactatgtcaccaggctggaggcagccaggaaagccgtcgagctcggcggcggcgacgtgggccctttgcgctcaagccagggcccttgccgctcacgcgccctgccctcatctctgctccagccagggcccttgccgctcacgcgccctgccctcatctctgctccagccagggccctcgccatgcccccacacgcccccaaagaagatagctggtactccaatgtactttatcttgggaatgaggatgaagttccaattctaactatgacgtgccccgcatcagatattgagaggtataaatctggtgagctgcgtttagcaccttcatctctaatcttgcccaaggacgtcctcggccaccggcgcaggcccatgtcgcccaaggcgagccccaggaagcaccccagcgccggcaccaaggacgagttctgggtgtggcatctgccggccgaccagaagacacgtccgagcttgggcggtgttgtgcaagcagtgtcgccgccgtcggtctccggctcctgcggaagaagctcagcagacccctacgatgtcccagaattcgggtggcgggacattcgccggtacaagcagttccggtcagtcgacacgaacatttctaccggcgacgactccgctcttggccagagactgaa

SEQ ID NO: 447 - DNA, 93 bp, Zea mays
  Peptide Sequence Number=SeqID_43822
atggatgctgagttatatcgtgaatgcttacggagggcgaagtatattggccatcagtgctgcaaggggccttatcaatcatattctatatga

SEQ ID NO: 448 - DNA, 489 bp, Zea mays
  Peptide Sequence Number=SeqID_43823
atgcaggggaaggtgaactgctactgcctggccagggtgcagctgttcgtcctccatccgggcgacggtcgtgccgtgcgcgggtggttgctgtcaccgaccttgcggaaggggcgaacttcgacaacgcgggttcggtcggctgcaagcgtcgtcagctgcagcgtgcctggcatgctggctcagctggcattggcgccgcctccgacggtgcctcctgccgcttggttcgggcgtggttgtccgtccatcgcacgggcgactgtcgctccacggaaccttcggccgctctgcgatgagctgaagccggaggcagcggtgtcggcgcggactgaggctgtgtcggctcgaaaagaggcttcgtcggcctgggagcaggtggcttcccaggccaaggaggtgcagctgcgacagctggagcttggcaaggtcatccgcgagcgggaccaatcccggagtcacgccgccgaggcagaacaatttgtctga

SEQ ID NO: 449 - DNA, 261 bp, Zea mays
  Peptide Sequence Number=SeqID_43824
atggccgtcagagaagtgcctgagccttgtagaagcacagctggcggtgcggctgggatcctgctgacgtctccttacttccgtagggggctgagaaccaccgacgtcatggacgcacgcggggaaccatcattacctgctaccgggtcttaccccggtgggtggcacagcagtcggagcggggcgagcgacgctgttttcctgtcaggtcggtcagtgaaagggcgaagtgaccgcggtcacttcgaccttgccgactga

SEQ ID NO: 450 - DNA, 174 bp, Zea mays
  Peptide Sequence Number=SeqID_43825
atggagagtcatgatctctgggcagaaagggaatcacgacttgtgggtggcaatgagaatgatggttttggcattggctatggtaatggttgtccgcattgcaaccactgctcaggagaagatgaagccgtggaaggagacttccaggagttccaagattacgacgagttctag

SEQ ID NO: 451 - DNA, 196 bp, Zea mays
  Peptide Sequence Number=SeqID_43826
tgatgccctgctgggtcaccttggtagtgatcaatggagagtcatgatcttcgggcagaatgggaatcacggcttgtggagatactttggtacaggtggttatgagatcgatggttttggttatgactatgatgctgtcgaagatgaagctgtggaaggagacttccaggagttccaagattacgacgagttctag

SEQ ID NO: 452 - DNA, 132 bp, Zea mays
  Peptide Sequence Number=SeqID_43827
atggcgcgcatgctgaggtggttgccaccgctggggaggctgcccggcgtagaggtggtcaccgccgctgggtctagtctgggaagccaagttgtgcgtccggaccccctggatggtggttctaggtactag

SEQ ID NO: 453 - DNA, 510 bp, Zea mays
  Peptide Sequence Number=SeqID_43828
atgcaggcggcatgcaactgcaccacgggaatgcaccctttcgactctgacgcatctagcatggaggcccaggcccacacgtcatgtaaccggcgcgccgattactacgtgcaaaaaactgcactgccacttacgccaatgtcgcgccttctcgactgcggaaccggtgccgcgactcgaggcaaccctgtgcatggcccaacagcgccaaccgagcacatcggtcacagggcaggcggcacctttggcaggcgaagcgggcgatgcttcacctccgccatgatgaccacgtcaaaaaaggtgcgccacatcgttcaatttcgtatccttttcctcttcccctttctctctcttgctacagggaccgggaaaggggatcctccgaaagggatctttctccgcgaaggaagcgggccccgagccctcctactgatcaggggttcgaaggctggcccctcggaagggttcgactgccaccccagagcactcgggccccgcgcccactactga

SEQ ID NO: 454 - DNA, 48 bp, Zea mays
  Peptide Sequence Number=SeqID_43829
atgggaactaatgggcatctcgacctcgacacgggaggcaaatcctaa

SEQ ID NO: 455 - DNA, 432 bp, Zea mays
  Peptide Sequence Number=SeqID_43830
atgaacgtcaactctgggttcttaaatggcgagttggtcgacgagatctacgtcaggcagtctcccagcttcatcattgtcggcttcgaggacaaggtgctgctcctagataagatgctttacaaacttatagctaagagtctacagaattctatacacatagaaggagctatgcatgcagtttcattggcacattctattgtccctgcttgcatgacagtgcaggcgttgcagcccttccgtaagaagatttcatgggtttcagaatgcaataagctttgggaaggagcacaacaggcaagccctattcgcttcaggcagaggtgtcaccgtgttccttcttgtcctctgggtcgttggatcggtcgttacctggattgtgggcttggtctttggcgctgcgaaatcttagaaggtggatgctttatctaa

SEQ ID NO: 456 - DNA, 318 bp, Zea mays
  Peptide Sequence Number=SeqID_43831
atggttaaaaattttggcagcaaaacagtgcaaatagcagtaaatgctgtggtaacttcacacctactcgtctgtttatatagtgctgcagcaagagagttgtcgccactgctggagggagacgtggaccctgaagacaccaagtcgcagtggaaatgcttccggctgtgggacaactactgcgtgaagaacaagagatgcgtcgacgagtgcctgggcgtcgaggggaagggctacacccacggacactgcgagctgtggacgtgcgtctgctgcaagaagaatggcgaggatgaaatactagctcctagcggctag

SEQ ID NO: 457 - DNA, 441 bp, Zea mays
  Peptide Sequence Number=SeqID_43832
atgggcaagagtaacaaacgcaagcgtgagccgactcctccgtcggaggacttcggcgactcggaatactcggaggaggagttctcctccgagtccgaggggtctccggctcccgtctctcctctggcgtcgtctgatgattcagacgactcccaggggattgccgcggaagtctggacgtacatccgggccgtcgagcgctccgggctcgagggctcggatgagtcggagttctcctcggatgaggaggactcggacggcggcgaggacgaggatgacgacgacgacgacggcgacgacgacgacggtggcgacgacgacggtggcgacggcgacggtgacggcagcggcagcgacaggggcagcgacggcggcgacgggagcaagggcagcaccagaggcggcagcagcacgggcagcagcagcaaggccaatggttaa

SEQ ID NO: 458 - DNA, 927 bp, Zea mays
  Peptide Sequence Number=SeqID_43833
atggactgctcctcggcgccgatcgacacgcacaactccgcggccgaggaagccgccctgccgaggaggataccttcggccccggaggcatcctcgtccggcctcggcctgcagtggatgcgcggctctgtaaccctgtcgctgcggacgcccgatcaggagcccgcggccgtggcgctctcgctcaacaccaggcatccgcagggccatctgcaggaggagcttgcgacggcggcggcggcggcggtcgtgcatgagggcgcgcaggcgcaggcacagcagcccctcggcgagagggacatgcccgaggagcaccgcgccatcgccgacatggcggcccggctcgggatcgcggcgggcgcgcgggaccgcgcggtggaggtgttcatgaggatggaggagcgcaagggcaagtccaagtcgcaccactactacaccaagggcgcggggcggagcggcgacgcgctgtacgcggcgtgcctctacgtggcgtgccgtagcgcgggcgcgccccggacgttcaaggagctggcggcggcgacgcgcgacgggcccgcggcgaggaaggacatcggcaagctcatcgcgctcatccgcaagcgcctcggggacgaggccggcggcgaggccatggacatgggcgtcgtccgcgcggcggactacgtggagcgcttcggctcgctgctggggatcggggagggcgaggtgcgcgccgtgcaggaggccgcgcggaggatgcaggaccacctcgacgtacggcgcaacccggactccaccgccgccgccatcgtcttcatggccatggagcgccgggccggcgccgggagttccatccgggacgtgtccgcggccaccggcgtcgccgagaacaccatcaagcaggcatacagggaactctacccgcacgccgacctgctcttcccctga

SEQ ID NO: 459 - DNA, 487 bp, Zea mays
  Peptide Sequence Number=SeqID_43834
atggcgcttcctgttgacttggctggcctgcgccctaggttgggcgacgtggaggctcctccgaagccgaggtcgaaggccagggcggagtccgagccctggggtcgggcgaagcggagttcgtcgtctttcggggctgagcccgagtccgagccctgggtcgggcggagcggagttcgtcgtcttctggggctgagcccgagtccgagctctagggtcgggcggagcggagttcgccgtcttccggatcctagcccaagtccgagccctgggtcgggcggagcggagttcgccgtcttccgggacttagcccgagtccgagccctgggtcgggcggagcggaggcctgactgcctgtcagtctcactctgtcaagtggcactgcagtcggcgcaggcggcgctgtccttctgtcaggccggtcagtggagcggcgaagtgacggcggtcacttcggctctgccggggggcatgcgtcaggataaag

SEQ ID NO: 460 - DNA, 246 bp, Zea mays
  Peptide Sequence Number=SeqID_43835
atggccaccgccaccgccgctccagcatctgtggcgcgacgacggatctggggacacgctcgcgacggcggatccctgaggcgcgacggcggatctggggacacgctcgcgatggcggattcctgtggcgcgacggcgaatctagggacacgccgcggcatcggatcccgagggcacgcacgcggcggcggccccatgaggttcatcgtcatcgatttgaatatagacataaaaattaagagctaa

SEQ ID NO: 461 - DNA, 347 bp, Zea mays
  Peptide Sequence Number=SeqID_43836
ccccagacgtcgacctcgcggcggatgaacgacgacttggcggcgctcagatccgtcagatcctgagggaaggaagcggggcatcacgagagacaccttggtcacaaaagaaaaaaggcgggcaggagcagcggccacgtcgtcagccaagctcacgtcctgtccgggggcagcgagagaaccctctctcacggcgtgaagacaacgcgcccatgatccgttcctcgaacggctcacacacgcgcaacgaccgccccgccaaccactcgccccgtcgcattaactccgcggcgggacaggcggcgcctctggcaggagaagcggacgacgcttcgccttcgccataa

SEQ ID NO: 462 - DNA, 528 bp, Zea mays
  Peptide Sequence Number=SeqID_43837
atgaagaaagctattcttgacatcgagctgatggaccgcctagtcccgggagagggagagaacgacatgaatggtggcgaacttgacaacggggttgaaggtctcgtcgtactccactctgggacgctatgtgaaaccctgaaggacccaacaagccttgtagcatcaagcgagccatccgagggggttgtgcctaacagggcgaagtgggggtgggtgactcaccgccttggagggaaggcgattgagaatattggtagcaatgttcatggcctctgcccaacaacaagcgggaagagatgcctgaaagaggaggctgtgaatcatggttgtggtggtgtgaatagtacgtttgactcggccgttctaaggggaagtgtaggggcacgagagtcgcaactaaacaccatgggcaagaaaggagcaagaggcggagttgttgaactcacagccgttatcgcactggaggccacgaatcaggcgacagaactgggtggagacccaagcgaagaagtggtgagggtgtga

SEQ ID NO: 463 - DNA, 714 bp, Zea mays
  Peptide Sequence Number=SeqID_43838
atgccgcgcacgaagaatgtgtcggcgccagggggaggagatgacgaggatcctcctcgccccttcaggcaggtcaagggaaagaccgtgtatttggagcagcaggaaggccgcaagaagcggcgtatggatagagcagcccgagcagcggcagcagcggcagcagcagccgctgagcagatagagaaaggagctcagttgcaaattccttccgatcagattgcctaccgagttcgtcgtcacgcctatcgtcctcactcctccgctcctaccactccctccattgcttccactcatccacccacttcgcctgctccagtcactcctgcgccatccaccacctcatccatacctaccacctccactactccagcttccactgctccttccgctccacctatcccacctgctcgcttccgggagcgtgatgagactgaggtgcgaccacttgctgcggatcctaggttgtttgatcttcagcgtgctacagcggcacgaaaccctgcagcggtagatccattcagcaccaggattcaggagtctttctacagagcacagttgtcagctcagattgctctgcgagcacaccagcttttggatctccctgccttcctgctagccgcgagtgccgactctaaggttcacctctcctatctgcctggacttctcactcttttgactaccagcggcagatatgttgaggaatgggtctga

SEQ ID NO: 464 - DNA, 1025 bp, Zea mays
  Peptide Sequence Number=SeqID_43839
atggattttctcatttgtgagatcgagaacaccgtactggatggtcttcgtgctcatcgacagctgccttatgctcactatctgtgtcacatctttgctcagctgattcgcccccctcagttccagggtactcttgaggcctctcgcctcatctttgggtcgtaccgtccagctccagaggatcctatgccggcacctgctctagtgattgatactcaggccgaggataccacttttcaccagtttgagactcaggacgcaacagtccatgatgacgatgacgatgatgacgactttggggttccacctccgcctccgcctcctatgcctccacgcactcatgatcatgaggctgggagttccagtgatgttgcccctgctgcccctcctgccattgaccctgctcttgcggtgatcctccagactctcactcagcagcaggctcacttggcagcgatccagcagcagatgtccgagagaatgctctcgatgtttcagacgattcaggacaggcaggatactttgcagcaacagcttcttcaggaccgggctgagaatagagcattcatgactctcatgcttcagcatactggtgtactgattcccccagttcagtcagcaccgcctccacctcttcaggctcctattgtgccagctattcagctaggaccccctctgccttcagttggtctttcttcctctccgctccagccggtcaccttagttttcacatcactagtcatcagctccgtcagccctcagccgccagtgccaccagcttctgctgttaccactgccgttgtggtggtatctgtgacttcttcagctccggcagctcctgcagcgcagcttccgtctgagtcagtaccagctctagcttctacagcagatcctggattcgagactgactctggcccgcagctagcgctggcccaggggaagggtttccccacgcagaaacccgagagcgcaaggttcccaagtggaattttagtggcgcaccggacaatgcacgagactgtccg

SEQ ID NO: 465 - DNA, 189 bp, Zea mays
  Peptide Sequence Number=SeqID_43840
atggcggcggtgggtgcgctgcaaaggggggtgggtggcggtagtgcgctgcaaagggggcggtgggtggcggtggtagtgcgcatggaggcgaggcatgagtgcggggggcacgacttattccaggcttcaagggtaagcttctcggtatcttcttgggtaaggcacttttctcttgagatgggttaa

SEQ ID NO: 466 - DNA, 120 bp, Zea mays
  Peptide Sequence Number=SeqID_43841
accttcggcgcaccgaagcacaaccccaacagcggtggagccagaagccagttccgcgagctccccttcccccttcgccgaataagcacggcaagctcactggatccctttgatgcataa

SEQ ID NO: 467 - DNA, 957 bp, Zea mays
  Peptide Sequence Number=SeqID_43842
atggatgcaaacaagtactatgatcttgtcactggcttttacgaatatggatggggcgactcattccatcttgctggcggatatccgggtgagacttcccgtgaagccattaagcggcaccagcattttttggcactacaattggggctcaagaagggtatgaaggagctcattttttcagcaggtttgagtgagcaatgctgcttcttgaagggggacttcatggacatgccaatatctgataacacctttgatgcggcctatgcaatacaggctacatgtcatgcaccagatgcacaaggcgtctatagtgaggtctaccgtgtgctgaaacctgggcagtattttgcactggatgaatggtgcttgaccgaccgatttgatcccaacaacgccaagcatttggccatcaaggctgagattgagctcggtgatggcctacctgacatccgtaccactcgccaatgtgtccaagctatgaaagatgcaggatttgaggtcgtttttgcaaaggatcttgctcaagtttttccttgcccgtggtaccgggtgatggatcccacctacttttcatgggctcacttccaatgcacacgcccaggacggatcgtcacccgtgcaattgtcaatacactagagttcctccgtattgccccagcaggcagcatgggagcctacaacgtcctgatgagtgcctctgatggccttctaaaaggtggccgggaaggtatcttcacagcgaccttcttcgtcctgggccgcaagcctctcaaggaagttgatatattttacgcattgttattaatcgcaccatttcttggcaacacgactttgatcggaccaatgtactgtctggatctgtcatacgagaattcatctataaaaagtattctccatctcatgtatgatcctgtgttctatgcaaattcagagattaaaaagcattctagatcttaa

SEQ ID NO: 468 - DNA, 168 bp, Zea mays
  Peptide Sequence Number=SeqID_43843
atgaaaacttcggactggaagggtaggcagcagatgtcgcactccagcgcgtccttctccacggatagtgtcacagtcgcctcttcctcatcctccaaccccgcctcttcctcatcctccaccaccaccttggctttgtttggagtgccgccgtcagaggaagtcgtg

SEQ ID NO: 469 - DNA, 1077 bp, Zea mays
  Peptide Sequence Number=SeqID_43844
atgcccatcgttggtttggctgatgatggattagggttttatctgtctcatttcgctaaacctttgaccaaaaaaccaaaaagggtttttatcggtctggttaaagtgattgagggattagtctcggctgaagatcttgagagagatttcggttttcacttcccatggaataagatgtggaaagctactaagtgccattcagggtttctgatgcagtttccctcccaagaacgtcttgaggaaatgataagcttcccggagcttaaaatgaagatgtctggggccaagattgttgttgtgccttggagttctagggccaaacctaaatctagacttcatactgtgtgggttattgctgaaaatgtccctgaggaattacagaactaccagtctatctgtgaaatcggttcaatgattggtgcagtggaggaggttgacctcatgtctttggattctgatgatattgtgagatttaaaattcacattaaaagtgtggctatgattcctcctgtggtggaagtggcagtcaagccttttctttatgatatcttctttagaattgaatctatttgtgatgaaggatggaatgatgattcagtgaatctgggtaagagagcttctgttcaaatccatgggtccagtgacccactgtttgataaatctgggaaaaaacccaagaatttggatgatgttacccttgaagatgaccctaatcctaacctcaaaattggggagtcttcttctcaaggcaaagagtttgccaaaatgtctgaccctaaccttgtgccttctaaagacatgtctgatgaagagcagaaacttgataacctttctgatgagaaagtggattttgatccaaatgaagatgatttgctgagctctcaagaacttgaagaatttgctaaagatatggaggaagatcaaactgattttcaatctaaaattggtgctatgatctcgatccccccaatgacgatattgttcatgatgggaaaaacaaaaagcctctggacttgcccactaacacggctgatggcgtcagaaaaagctctaggttggagaagaatgatgatgtga

SEQ ID NO: 470 - DNA, 835 bp, Zea mays
  Peptide Sequence Number=SeqID_43845
gttgttcgcggtggatctcctcggcttcggccggagccccaagcctgccaactgcatgtacagggtgagagaccacgtggaggcgatcgagagaaccctcatcctcgccggcgacggtgaatcgcagagtctgatgagctccttccacctggtcagccactccatgggctgcaccatcgccctcgccttggctgccaagcacccgacgcgagtcaaatccatcacgctggttgcaccgagagcgagccaggtggcgctcaacaggctggccgagaagaagctgtggccaccgctgctgttcggttccgcggtgatgtcgtggtacgagcacgtcgggaggaccgtctgcttcctcgtctgcaagaaccacctgctctgggagtggctcttcagcctcctcaacctcaacaggggcgtggatttcagggtgagggatctgacgaagcacactcaccactcggcgtggcacaccatgcacaacgtcatctgcggcggggcggcgctgcaggacgcgaacctggaggccgtcgcggcggccggcatcccggtgcaggtgctccacggcgccgacgaccaggtggttccggtcgagtgcggccgccatgtcaaggcgaagatcccgcgcgccaagctccgtgtcatggagaggcgcgaccactctacggtggttctcggcagggagagaggcttcgccgaggagctcaaggcgttctggtgcgcttcaaggtccccggttcacgtccaggatgcggaggttcgtcgaggacgctcgggcccagcgagtgcgttcatgggccaagccctcaaaggctatcctaccgtaaaaagagattag

SEQ ID NO: 471 - DNA, 1377 bp, Zea mays
  Peptide Sequence Number=SeqID_43846
atgaaaatccttgaagccggacgatggctgaaaggtaccaactcccacggagttgcgttcctccaacgacgaggcggaaagacggcggatatcccccatccgggggcttggaagccgtcgtgggctgagtctcccccaacacactccaaggtcctcccctacggcgcgggggctgggtcccacatgtcatgcaagccggctcagagcggaagaagccaaaccgccgtgcacggtgcgtacaaccgcccagcggttacaagcgactctccacttttgcccagaccaacgggcgaaaggggcgggcaaccatgcaggcggcatgcaaccgcgccaagtgggcgcgcttctccgactcccaacacgcccagcatggaggcccgggcccacgcgtcatgcaaccggcgcgccgaatgcttcgtgcatgcaacagcaccgccactcgcgcccctaccgtgcctcctcgactacggagccaataccgcgactcgaggcgacccagcgcacgacccagcagcgccagcctggcgcggcggtcaatgcggccaaaaatgggccggcagtaatggcggtggcaggcgggcaggagcagcggccacgtcgtcatccaagctcacgtcccgtccgagggcagcgagagaaccctctctcacggcgagaagcgggcgacgcttcgccttcaccataatgaccgcgtcagaaaagggaccgggaaagggggataccccgaaaaggatccttccccgtgaaggaaccaggctccgagcctccctactgattagaggttcgaaggctggcccctcggaagggttcgacagccgcctcagatcgcgtgggccctacacccactactggtcagaggttcgaaggccggcccctcggaagggttcaacggccgcctcaggctactcgggctccgcgtccattactgatcaggggttcgaaggctggcccccgaagggggaccgggtccggcagatcacccgcaagtacttttgggcgtgcctctgggcccctagccgacccctaacgaacggggcacggacgtccactcggattacccgcttgcagctcaccggagacaccatgttcggcgcccatcgagggcaacatggcgctttcccccccctcctccttgcggaaaggcgacgcaggggcgtatgtaaaaaagtcgagtctgtccctgatcgtcctctcgccctgtgcagaggctcgggggctgctctcgcaaacccggctccggccaaaccgttgacagcgtcaacataccagcccgagaacttgggacccgaccgtacacccgggctacggccagctcgcatgagggacgaccagaccagccgaagcattacgcgaggcattaagacctcggaggagtga

SEQ ID NO: 472 - DNA, 915 bp, Zea mays
  Peptide Sequence Number=SeqID_43847
atgtcttcttcctcccttaagcgtcgtgtcttcccatcttccaagcccccggatggggggtatccgccgcctttccgcctcctcgttggaggaacgcaactccatgggagttggtacctctcagccatcgttcggcttcaaggattttcatcagccggcccggccgtacccccatgccgacgatcacccaggatggtgactgccggtttctgggtggggaagagcaagccgggctgcgatcttggtcccaccctcagcttcaaggatgttcatcatccccgctggggcgggagccacgccgagccggcgctctaccttccgcgcgggtccgcgggtcgccctttcccgcggcgtttgggggtggaggcgctcgctggccctgcggacggcgcggacttagacaacgtggggctgatcgacggcgggcgtcgtcacctccagcgtgtcggagtcgtcggccgggcttccggcggcccctcctgccggagggtgaccgccgcatcaggccggcgccccactcgtctgggaggatttgagtggggatctgccggggggtcggtgtcccctgccatcggagccgaggcggaggcggctcgagaagtcctcgtcaccgacgggatcactgccaccacccgcgccccgggccaccgcgccggcgtgcttgtcctcgcccctcgagcgtcggcgggggcgagggcaagatcgcagcagcgccggcccactgtcgccgtagtcaggacgggcggcggcgagccggccgtcggtcttctgttgctccgcaggccttccccatggagtggggtcgaatccctcggcccgttcggccttgttgtctggggctcctctagcttagttaaagagacccctcggccgcccttcggtggaccgaggccaggggtagcgatatcagtatga

SEQ ID NO: 473 - DNA, 798 bp, Zea mays
  Peptide Sequence Number=SeqID_43848
atgaagctgaaacaatttgcttcttcatgtggttggtgcaaggttattcttcactgcgacggcaacgccaacagcgaacttggaggtgttgcggctctgcacaccccttgttcttctagcagtttaactttgctaattgaagctgcaaaattaacttcgacagcaacaaggttgttcgacgaccaccgtgatgaagatttttatgggctacctcggaaatacagtattgtcgctcgggtagaagttaaattcccgattgaaccacattatcgtgatagacaacatttcattttatctgacatcaatggagccaagatcgaggccataacatatgtgtccgtgacagttaaacatttcaacaatttgctacatgaaaagcatgtttacaatatgcataacgtaaagtttggtcttcatccgggggaatttaattttcgacatctaaatggtcccatggaattgtatttcaaccaacaaactatcgtggagccatacacagttccaattcaaatgccgccattcccaaaacatatattcttcaaccttgatgatattgctgagttgccaaacaggactttagtcgacattatggctattgtagtccacatggatacaattcatcgcacaatgtggggccctttcagaaagattgttataatggatgctagagttcctcgagtcttcggatcataccgcaatacacttcaatccgttccatcacaacacccactattttggaccaattcaaaaagctttggtggcgcggaacaaccgtcagtttgctgttacatttcttga

SEQ ID NO: 474 - DNA, 468 bp, Zea mays
  Peptide Sequence Number=SeqID_43849
atggccgtagccagacatggcggccgcggcaccgcgctcctcctgcgggcccgttggcagcccgccggctcgggggcgcggtgcatccacgagggcccggacaccatcgaggagctgctggaccggcacctcgtgaagaagcccgcggcgggcccggacgaggagtcggcggaggcgcggcggcggctgacgagctcccggcgggaggcgctggccctgtaccgggacatcctccgggcggcgcggctcttcgcgtggaccgacgaccgcggggtgccgtggcgggaggtgctgcgcgccaacgccaggcgcgagttcgaggatgcccgcggggagcgcgacccggaggtggtggcgcgcctcctcatcggcggccgcgacgccgtgcaacaggcgctcgaccgccttgccgacgcctcacgccgcgcgatcgagaccgaggaggccaagcgccgtggcggagcgtag

SEQ ID NO: 475 - DNA, 812 bp, Zea mays
  Peptide Sequence Number=SeqID_43850
atggagggcttcatgtcctttgcctccctcgtcacctgcgaaggggccatgaatgcgctgtcccgcgaggggtgccagcactatgaggccttcgatcggtccgatgaagactttgggcgcgaaatttttaaggttgaagaccctgtggtgaaagattccgcgggggccctcttcgaccggatgtggggtgctcatggccgggaggcggttaggaagcggtctgatcgggcaagagagcagatggcgcgtgctgaggttgtcgaagaccttgagggtctgaacggcgcgcggcccgaggccgaggtcgacccggtgctgcccggggctgaggtcatcccggaagctgcggaggcctcctccgccggacctgtgcccacagtgactggtgaaggctccttgccagcacctgcgccgacggcggagggtggcggagccggcagcggaggatccgacggtggcggcagggccttcgtaggtggcttagcggaagagtcttcggatgaggacttggattactttgcggccttggatgtggctgcggcagaggcttctccgcgtgttacagatgctgaagttttgcctagtccgagtgctgggcgtaggcggcgaagggcggtggtgaagcgtagagtgagtggggtggatggtggtcggcttcgtgtgggcagggatggcaggcgggaattgttgtcctcgccggttggggtgagtgtaggtgagggggagttgcgaagtctttttgagggtgaggagctgaggatgatgctatttaactatagggagatgggtatcattctgaaggttgaaccaat

SEQ ID NO: 476 - DNA, 1338 bp, Zea mays
  Peptide Sequence Number=SeqID_43851
atgtccaccgaagatgacgttgacttctctgtcgacgcgggggaatgctccgccccctcccccttcctgctgctgaggttgtcgaggttctctgggtcctcctcgtggtgggggaggcagcagaggttggaagggtcggctgttcccgacagagtgcttgaagtctctgcagttccgaagggtgtggtgcatgtccttgtggtacggacattgggcatcgaggatgtcgtccaatgttcgttcgcctccacggggtgcccctcgggcacgagagacatgtggttcggcggcgtgaacctcgtcacgaggcctcttctcccaacgcttgtcgggctgttggttcgcgtcgcatcgtggtgccggtggtgcaggcttcgttcctccgatgaggtcctgagcccgttcgtctgcggtgatgtagaggtctgcctccctgaacagctgctcagaggtagttggtgccttttgcagtatggctcggacgaaggccgagtcattagatccccggtagaagtcctcgatcactgctgcttccgcaacctcagggatatgatttctcatggtctggaaccttttgaggtacgactagagagtctcataccctcagcgcctgatggatttgaggtcccatggctgcgtcggcttgtcggagagggattggaagttggcgatgaagcgccgactgaagtcactttagtcgtcgatgcagtgtcgggcggcccgggcagcggtggtatagacggccaaccagcctcccgggtcctgcttaggctcgtacttgttgacgttggagactttgaaatcgctcgggggatgagcgagaggcagaagatgattagctgcctgagtgagcagtcgccgatagccctcggcgtctggagtccgggggaggccatcggctatccgagccaacactccaccgacctcactcagtgtgttcatggctcgggccaagtcggggttcaggttccgtccgagaagagggttctctcgacgttgtctcgcctcctgttcggcctgctcttgagcttgccgacgatcacgtcggcgagaattcctcctttctatgaagacccgttcttctggagtttctcgcacctccgagatctcatctcgcgacacaggctgcgccgggtcccgctctccggcttcatgatgtcgtcggatatttcggcatcggttccttcatcggcgagactcccgctgaagaggttcctgccctggcacggttggttcatcgtcggagacgggggacgatttcgctctccccccgacgaagaggacgtcggggtagaatggaactgtcgtagcgacaagcttctttctattctcctttga

SEQ ID NO: 477 - DNA, 192 bp, Zea mays
  Peptide Sequence Number=SeqID_43852
atggagtctgacggagggacagctgtcggagcggttgggtccttgctgacgtcctcttgcttcctcggagtggcgcaggcggcgctgtccttctgtcaggccggtcagtggagcggcgaagtgacggcggtcacttcggctctgccggagagcgcgcgtcaagataaaggtgtcaggccacctttgcattaa

SEQ ID NO: 478 - DNA, 1033 bp, Zea mays
  Peptide Sequence Number=SeqID_43853
atggccgaaaggtaccaactcccgcggagttgcgttcccccgacgacaaggcagaaagacggcgggtatcgcccatccgggggcttggaaggtggaaagacacgatgcataagggagcacgaagacatggtcgccttccaagggggtcaccctccttttaaaggcgactctccctacttgcgtccccagccgtcgcaggctgagtcttctccaacacgctccaaggtcctcccctgcggcgcgggggctgggtcccacacgtcatgcaagccggctcagagcagaagaagccaaaccgccgtttgcggtgcgcacaaccgcccagcggttacaagtgactctccacttttgcccagaccaatgggcgaaaggggcgggcagccatgcaggcggcatgcaaccgcgccaagtgggcgcgcttctccgactcccaacacgcccagcatggaggcccaggcccacgcgtcatgcaaccggcgcgccgaatgcttcgtgcatgcaactgcaccgccacttgcgccaccaccgcacctcctcgactgcggaaccaataccacgactcgaggtgacccagcgcatgacccagcagcgccagcctggcgcgacggtcagtgcggccaaaaatgggccggcagtaatgacagtggcaggcgggcaggagcagcggtcacgtcgtcatccaagctcacgtcccatccgggggcagcgagagaaccctctctcacgacgagaagcgggcgacgcttcgccttcgccataatgaccgcgtcagtaaagggatcgggaaagggggaaaccccgaaaaggatccttccccatgaaggaaccaggctccgagcctccctactgatcagaggttcgaaggctggcccctcgaaagggttcgacagccgcctcagatcacgtgggccctacacccactactggtcaaaggttcaaaggccggccactcggaagggttcaacgaccgcctcaggctactcgggctccgcgcccactactgatcaggggttcgaaggctggcccccgaagg

SEQ ID NO: 479 - DNA, 675 bp, Zea mays
  Peptide Sequence Number=SeqID_43854
atgggcccgaggcctttcgcgaggccttctgtccttctagtggacccgggggatatctgtcccccacaagcccccaatctttgtgttgattttgaaataatcagcccaaagattccagaaatcagtgctctacctctggctaatgctttagagatcaacattctgttctcaggggttaaggattcattgggtgcatgcctatgggcaagagcaagaaaggcggaagttcgtcgcaccactccggcgacaagcggaagcgcgagccctcccttagaggacttcggcaattccgagtactcggaggaggagttttcctcagagtccgaggggtcgccagtctacacctctccctcggcatcgttcgatgactcggacgattcccaggggatcgccgccgaggtgtggacatacatccgagccgtcgagcgctccgggctcgagagctcggatgagtcggaggtctcctcggacaaggagaactcctctgactcgtccgaggaggagagcggcggtgacggcgacgacgagggcggcggcgacgtgggcggcggcgacgacggaggcgacggtgatgctgatggcgacggcggcaagggcgacgacaacgacgatggtggcgacggcaagagtggcagcggtagcagcaaggccagtggcaaagcgccactggcttaa

SEQ ID NO: 480 - DNA, 141 bp, Zea mays
  Peptide Sequence Number=SeqID_43855
atggagaatgagctggggagggggaatggaaaagatagaacaaggaatgagaatggcagaacagagtggcagaacaagaaatggggaatgagaatgagttttgcggggagtggggaatgggaaaagcagaacaagaaatga

SEQ ID NO: 481 - DNA, 146 bp, Zea mays
  Peptide Sequence Number=SeqID_43856
atgtctcttcccgcccacgcgctcctctctgtcacccgcgccaggccgcgccgccgccttgccaccgccggcagcccgcgccgccgccgcgccaccgtgagggggccgcgccaccgcgagcgggacgcgccgccggctctcatcaa

SEQ ID NO: 482 - DNA, 600 bp, Zea mays
  Peptide Sequence Number=SeqID_43857
atggccgtgatgggttcaacatcggaaaagatgtacctctgccaggatccacttttagtaagcatttctgcaaaacagtctttgattattgagaagccttaccttgactcccttaaccagcatacccttgagagtcttttctttagtcggtcgtctgaggtctttgggacaaggacaggtgcatgtgggcccaataacttggtggttctgccacagggatacaggtttagattgcctttagcttttcataatttgaccattagtgcaaatgtgtttgcccttgtgcttgatgtgtcgatagaaggcttaagtcaatacatgttatgtccactagggaaaccttatcctgagacactcgcccttgtttggaaatgtctcccgattatcgctgatatggacatgggattacctgcttctccactcttgaaagtctttcgctccgaatctcgggacgagattcttttaaggggggagggctgtaacaccccaggtgtttatattccgctcgacaacgagtacggatttaagcacatgatatcagtgaataagacggacactaaggaaatatttattctgaaaatcggtgagtctgatggttaa

SEQ ID NO: 483 - DNA, 834 bp, Zea mays
  Peptide Sequence Number=SeqID_43858
atgaggaacaggctcaagatgatgcggttgatgatcaagaggatgagccacctcaagaggaggtcaatgatcaagggggagatgtcaatgatcaagataaggaagatgaacagggtcaaagaccgccacacccaagagtccaccaagcgattcaaagagatcaccccggtagaggatgcattaaaagattcggattgggtgttggcgatgcaagaggagctcaacaacttcacgaggaatgaggtttcacttcttcactcaaactcattatctcgcacagtggactgggatccaactggacggacgcttccaaacctgaggtacactaccgagctggggcttcacggcgagctcagagggagcagagaccagggcgaactggcggctgggcggtcaagcgctgggaataggaagcgccgagcagggaggaagaagctttggggagatgggacgagcagaggaagtgccgcgcagaatccgagccagagagaagctgggagccgcgacacggaggagcatggggaggaagatgagcagggatgggcgagctcaggctccaagacgccatgggagggagagcgagccggagggagccgcacacagcagcaggcgcggtaccaagcgcgaccatgggagcgagccaggcgcgtgaccacgcgatgcagggaaccggctgggcgcgcgtgggagagggagcaggggtgcgacggctggagagggcgctcggccatggggagaaccacggctggctgggcggcgggattttatcccccggcggctggggatcttttctccccagagcggtggccggatgaagacgaggaacggcggtga

SEQ ID NO: 484 - DNA, 250 bp, Zea mays
  Peptide Sequence Number=SeqID_43859
gaaaaatccaattgaaaatgccttggctcgagcagccaagaatctgctcagtctgggagcaccgaactgtccggtggtgcaccggacagtgtccggcgaactcgtcgctctcgggaattcatcaacggcgtacggctataattcaccggactgtccggtgtgcaccggactgtccggtgagccaacggtcggcagggccaacggtcggccgcgcgatctgcgcgggacacgtggccgagccaacggctag

SEQ ID NO: 485 - DNA, 171 bp, Zea mays
  Peptide Sequence Number=SeqID_43860
atggcacggtggttatcccgtggttcggccaagaccaacgctgtgacagaacctcccaacaagtcttacccgactaaagaaaagactctcaagggtatgctggttatatgggagtcaagggtttcaaggagggtaatcaagatcaaggaaggtaatgcaggaattgtttaa

SEQ ID NO: 486 - DNA, 216 bp, Zea mays
  Peptide Sequence Number=SeqID_43861
atggctgtttctgtttgcgtgacaaaaatgagcaggcacatgaagtattatttgaggtttgtattgtatctgaaggcagatgaagtattaattgaggtattgttgacacagggaagtgttatacaacctatcgtggttgttcgagaaaatgagatggtgtttgttactgaaagggaaatgtgcccttgggccatttctaagtattttggtgattaa

SEQ ID NO: 487 - DNA, 825 bp, Zea mays
  Peptide Sequence Number=SeqID_43862
atggtgaccaccagttcgatggtggggagaagcgagccgggctgcagcctctgccccgccctcagcttcaaggatcttcattatccttgctggggtggagggcaggctgagccggagctctacctcccgcacgggttcgtgggtcaccctctccttcagcattcaggggagagggtgctcactggcctagcggaaggggcggactctgacaacgcggggctggtcggccgcaagcatcgtcagcttcagcgcattgggctcgctggctcagctggctctggctcggctcccggtgccccctcccgccgtacgagcggtcgccgcgccgcgcgcaccggagggtcgcccaagacgccgtgcactgctagggcggcgttcgtgttcttgggctgtcctgcctttgctctggtacgacgcctcttgcgcggaggtcggtgctcgcctgtccgagaggatccgagtggggatctgccggtgggcagatggctgccgtcgtcgacgttgaggtggtggcggctgaagaagtcctcattgccgacgagatcgccgccaccatccgcgcttcgggcctccggctctttggctttgatagcttgtcctcgcccctcgagtggggacatgggcgaggagctcgtcgcagcagcgtccgccctgagatcatcgctgctgctgtttggccactcggagcgggggtcgttgtcgctgctgccggagcgggcgtcggcgagccaccaggggttttgtcgccccgcaggccctccaatgtggggggttgttcgtacctgcgggagtggaaccggagttccgtttgtaatggcaccttga

SEQ ID NO: 488 - DNA, 669 bp, Zea mays
  Peptide Sequence Number=SeqID_43863
atgtcgtctgccattgagaaacgcgtggttggttgctcggtgccgtacgccatgaggaactgctgtggctccgctgacgccgacgtgaatccgccgagtcgtcctcctaccgaaggtttacccggcttttcccacacgctgctagctccgagtctccgatcgagttctcggctggttttccgccgccacgccgtcggccgcgggccgctgccgccgccgaagccgagcgacggcgggggagcgaagcaagagaagggaggaggagacggtcctgaccagtgcccgggtctcgggcgggttctggaagcgccgaggctgagggagttcacgctcgccgagctgcgggtggccacgcgcgggttgaagccggagatggtgctcggggagggcggcttcggcccggtctacaagggctgggtcgacgagcgcacgctcaatccagccaagagcaacgccggcgtcatcgtcgccgtcaagaagctcaacccggagagcttccggggcctgcaggagtggcagtcggaggtcaactttctgggtaggctgtcgcatcccaacctggtgaggctgctgggatactgtggcgactggcgaggacagggaactgctcctggtggtgtacgagttcatgtccaatggcagcctagaaaaccacctgttcagaagtaa

SEQ ID NO: 489 - DNA, 2709 bp, Zea mays
  Peptide Sequence Number=SeqID_43864
atggagcaggcgccgcagacccacggcggcggcggcttgctggcctgcggcgtcatggaggacgtcgcggtcggcgacctggatctcatggaggagctgtttatggcggcgccgggcttcgatttctccgacttctcccagcccggggccggcggcgagtccccgggggtctgcttctcgccgctgttcgacatctgcagcacaaccaccacggcaactcccccgccgccgccgccgtcaggcgacgacaacagggaccagcccaccccgccgcgccgcggctgggtgttccagccccggctggaggtcgatgccacggtgaaggagcggctgcggcgcgcgctagagcgcatcgcgtcgctgtcgcagacgcagcccggggagctgctggcgcaggtctgggtccccaccgtcatcggcgaccgccaggtgctcaccacgtgcggccagcccttctggctcgactgccggaacgagcgcctcgccaactaccggacggtgtccatgaagtaccagttctccgccgacgagaccgcgcgcaccgacctggggatgcccggccgcgtcttcgtcggccgcgtccccgagtggacccccgacgtccgctacttctccaccgaggagtaccctcgcgtacaccacgcgcagtacttcgacatccgcggcagcgtcgcgctccccatcttcgagccccgcagccgggtatgcctcggcgtcgtcgagctcgtcatgaccacggagaaagtcaactataatgccgagatccagaacatctgcagcgctctcaaggaggttgatctcaggagctctgatgtttcgagtgattcccgtgcaaaggtgactgatacttcataccgagcaatcataccagagatcgttgacgttctcagaactgtttgtgagacgcacaaactgccactggcccagacgtggataccctgcatctgccaggcaaagaggggaagccgccacaccgatgaaaaactcaagtattgtgtgtctaccctggacgaagcgtgttacgtccgcgacctgaatgtaaatggctttcacgaagcttgctctgagcatcatttgttcagaggtgagggtgttgttggcagggcctttgcaacgaacgagccatgtttctctgaagacattaccgcctccagcaagatccaataccctctctctcatcatgccaaacttttcagcttaagggctgcagtggccatccggttacggagtatcagcactggaagccttgactatgtcttggaattcttcctgccagtggactgcatagagattgaagagcaacgagccatgctgaattctttgtccattacaatacagcaaacatgctacacacttcgagttgtcagcttgaaagagctggtggatgaaggatcaattgaaacaagtgctctaactccaccagaatatgacaaatctatgcatgaaaacatagatgaggtttgtagtggcattggtgttcctgcaaggacagcatcactggaaacttccgaggaggtgtcctcatggatagcaagccttgtgtgcgctcaaaataagggagtgaaagaaatggatggtgacctgccatttggattcagcaagcaagaggatgaagggtttagtgttacagctggctggcatacctctccagtaatagagcctgaaggtagcatcttttcaggcttcaagcagcatgaagaatacaaggtcaaggaggtaacttgtctcagagatccaagctcatccaacttggaaaaaactgtagaaaagagacggactaagatggagaaaactgttagcctggaagaacttcggaagcattttgctggcagcctgaaagaagctgcaaagaatttaggagtgtgccccactacactgaagagaatatgcaggcagcatggaattaatcgttggccatcacggaagattaagaaagttgggcactccctgaagaaattgcaaatggtgatcgattcagtacatggtagcgaaggaacggttcagctcagctcgctctatgaaaactttaccaagaccacatggtcagaaagagagttacaaggggatgccacttatccattgtcagaggaaaaaggtcccttggaaccttctgttcctgatcggtattgcgagggcagattcacctcgcatacttctggttctaattccctctcaccctcttgtagccaaagctcaaattccagccatggttgttccagtggttcgaaatcacaacaacatgtcagtgctcctcaacttgcagtaaagaaagaagttttcatggaggagaatcagagctccacactactcaaagctgcaagccatgctgaactgcagatgcttcctgaagaaagacttgtcaccctgcctaggtctcatagccaagtgcttttaagtgaacaaaagccagtggaaaatataacaggtatgcaaatgtctaagcctgattctctcaagataaaagccatgtacggcgaagaaagatgtatattccgactgcagcctagttggggatttgaaaagctaaaagaagaaattctaaagcggtttggcattgctcgggaggtgtatgtggacctcaagtatttggatgatgaatctgagtgggttcttctaacatgcaacgcagacctgcttgagtgtattgatgtgtacaagtcatcaagtactcaaacagtaaggatcttggtacattctagtgaccagtaa

SEQ ID NO: 490 - DNA, 642 bp, Zea mays
  Peptide Sequence Number=SeqID_43865
atgggggggttcgtcaagacccagaagaccaatgcgtacttcaagcgtttccaagtgaagttcaagagaaggcgtgctggtaagacagactacagggcaaggataaggttgattaaccaagacaagaacaagtacaatacacccaaataccgatttattaccaacaaggacatcattgcacaaatcgtatctgcaagtatcacgggtgatattattcttgctgctgcatattcccgtgagctgccacgatacggtctagaagttggtctgaccaactatgctgcagcctactgcactggtcttcttttggctcgtcgtgttctcaagatccgtgatttggatcaggagtatgagggcaatgttgaggccactggtgaggacttctctgtcgagccagcggaagagaggaggcctttccgtgccctcttagatgtcggccttattaggactactactggaaaccgtgtctttggtgccctcaagggagctttggatggtggtctagatattcctcacagcgataagaggtttgctggcttcaagaaggatgataagcagctggatgctgatatccaccgcaagtacatctatggtctccatgttgctgagtatatgaaggtgctctatttgggggctgactaa

SEQ ID NO: 491 - DNA, 342 bp, Zea mays
  Peptide Sequence Number=SeqID_43866
atggccgcctggacacccttgccgtgccgcgcgccggagaagggcacgtcgaggagctcgccggggactcgccgtcgaggagctcgtcgaggagctcgccggggcgcgccgtcgaggagctcgccggctgagtggtggagggcgatggatgggccgctgccagggaacctgggagcgtgcgtttcaatttgggaagagaagcaggggaaaggggaaaggggagcgggtcccacttgtaaggtgtcgggtccacctagcagtgaggcttttttaagtagcttgtcacagtcacaacaacctggtattcctcgacatggtactggtattgacctgcataactag

SEQ ID NO: 492 - DNA, 415 bp, Zea mays
  Peptide Sequence Number=SeqID_43867
atggcgcctcctgttgacgtggtcggtccgtgccctaggttgggcgatgtggaggctcctccgaggtcgaggtcgagtctgtcttccgaggccaaggtcgagtccgagcccctgggtcgggcgaggcggagaccgtcggcggaggccagggctgagtccgagctctatggtcgggcgaagcggagttcgtcgtcttccggggctgagcccgagtccgagccctgggtcgggcgaagcggagttcgtcgtcttccggggctgagcctgagtccgagccctgggtcgggcggagcggacagtcggagcggcgcaggcggcgctgtccttctgtcaggccggttagtggagcggcgaagtgactgcggtcacttcggctctgtcgactggaggtcgtgcgtcaggataaaggtgtcag

SEQ ID NO: 493 - DNA, 477 bp, Zea mays
  Peptide Sequence Number=SeqID_43868
atggcagtctccacacctgggcaggggctcggctggcctggccggggcagtccgccgcgcgcaccacgctggcaagccttcaggccgccgcgatgggcaacggagcaggggctgggcgagctagagccacgcgtgggggctgggcgggctagccggccggctgccgcgcgcaggagctactggcgcggggggcagggagtcgcgaccaggagctatctagcctgggcgtgcctgcagggacctgaggtcggctgggggcaaggccggccatgggtgctggaaggagagggatggagcaggacgttccgggacggagctgcagcagcgccgctacggccaggatgttcacgaccaactgatacaattcttgaggatctcttgggccggttggttaggacccacacgcgcttcctctatggcactttgatcttattggctgatgttgatcgcattgtcttcattggggttagcgactaa

SEQ ID NO: 494 - DNA, 492 bp, Zea mays
  Peptide Sequence Number=SeqID_43869
atggtgtgtttgggcctcggcggccgcagaaaacacacgctacaagataatccgatcctgcaggctcggatctcgatagttgaagggagcagcagcaccctcggcgtcgactacacctttggcgagggtctcctccaagaatccggctcgagcaggcggctcggctggtcaccccgaggcctcggccagctgtcccacgaagacatcagcccggcccgaggcctcggcagatcaactccggcgtcggtcccgcaaacggacgacccggccaggctccggccgaccaagtcttcttttcgagccaactctgcctctgtccgtgctgacaccgctacccctggcttcggctcatcgaagagcggccgaggggttcctttaactaagcaagagaagcctcggacagcaaggccgaccgagccgagggactcctacgcctccgggatacggatacctcactcgtcacctttgtacggggcgactcacgcttggtga

SEQ ID NO: 495 - DNA, 390 bp, Zea mays
  Peptide Sequence Number=SeqID_43870
atgtgcaagagtaacaaacgcaagcgcgagccgactcctccatcagaggacttcggcgactcagaatactcggaggaggagttctcctccgagtccgaggggtctccggctcccgtctggacttatatccgggccgtcgagcgctccgggctcgagggctcggatgagtcggagtactcctcggacgaggaggactcttcggactcgtccgaggagggcggtggaggcgatggcggagacgacgacgacgacgacgacagaggcgatggtgacgacggcgacgatggcgatgacggcggcagcagggacggcaacggcggcagcaagggcggcaacgtcggcagcagcaggggcagcaacggcggcgacagcaacaaggccagtggctag

SEQ ID NO: 496 - DNA, 459 bp, Zea mays
  Peptide Sequence Number=SeqID_43871
atggctgctggttctcgtggcactagcaaggaagtaacggcggcggatgagcacatggagcggcagaggcaactgttggtggcggctggaaaaatgcaagtaataaaggaatttgaggaacttgctatcgatggtagcaattatcttgcatgggcatcagatatcaaaattggttttgcatctagagggattttacataccattaatgcacctgatgcaaacaatccaaatataactgatattgcgaaccacttgtcgtactcccaggcatttggtagacctttatttaaagtcaatccgagatggcaacaaaagatcaagatatatgaagcccacttcaatcaagctactgagaaatataaggagattggttgttccaacaacaaggcatccgctcagcagatggacgacatgatgattgaatacaactcgggcgacatatgtggagatctagtttag

SEQ ID NO: 497 - DNA, 1488 bp, Zea mays
  Peptide Sequence Number=SeqID_43872
atgcgcgcaactgcccagcggttacgagcattcctccactttcgcccagaccagcgggtgaaagggcagaccgccatgcaggcggcatgcaaccgcaccaggggggcgcaccctttcgacttcgacgcgtccagcgtggaggcccaagcccacacgtcatgtaaccggcgcgccggttactacgtgcgagaaactgcaccgccacttgcgccagtaccgcgcctcctcgattgcggaaccagtgccgcgactcgaggcgaccctgcacacggcccaacagtgccaaccgagcacatcggtcacgggtcagtcagccgcgggagaaggcgcgacggtcgatacggccagaaatgggccggcagtaatggcggtggcaggcgggcggaagcagcggtcaagtcgtcagcaagctcacgtcgcctcctgggacagcgagagaaccctctcccacggcgtgaagatgaaacgcccgtgtcccgttcctcgaacggctcgcgcacgcacaacggtcgccccgacaggcggcacctttggcaggcgaagcaggcgacgcttcacctccgccataatgaccgcgtcaaaaaagggatcgggaaaggggatactccgaaagggatccttctccgcgaaggaagcgggcccctagcccccctactgatcagaggttcgaaggctggcccctcggaagggttcaacagccgcctcagagcactcgggctccgcgcccactactggtcagaggttcgaaggtcggcccctcggaagggttcaacgaccgcctcaggccacttgggctccgcgcccactactgatcaggggttcgtaggctggcccccgaagggttcgacagccgcctcagacgcagagcgagggatgaccctggaatcccaccagagggaggcatcgagccctcggaccccgtcaaaaagggaccgggtccggcaaatcacccgcagagtgaggctgacagcagccaagtccggcctcgggcgccataggaagctccgcctcgcccgacctcagggctcggcccccgtctcggcctcggacgacgaactccgcttcgcccgaccccagggctcggactcagccttggcttcggaagacgacgaactccgcctcgcccgaccccagggctcggactcggcctcggcaccggaagacgacgaactccgcctcgcccgaccccagggctcggactcggcctcggctccggaagacgacgaactccgcctcacccgaccccagggctcggactcagccttggcctcagacgatggtctccgcctcgcccgacccggggctcggactcgacctcgacctcggaagacagactcgacctcgacctcggaggagcctccgcctcgcccgacccagggctcggaccgaccacgtcacaggggggccatcattaccctacccctagctagctcaagctacgaggaacaagaccggtgtcccatatggctcaccccggtaaacaaataa

SEQ ID NO: 498 - DNA, 786 bp, Zea mays
  Peptide Sequence Number=SeqID_43873
atggtcgccttccaagggggtcaccctccttttaaaggcgactatccctacttgcgtccccagccgtcacggactgagtcttctccaacacgctccaaggtcctcccctgcggcgcgggggctgggtcccacacgtcatgcaagccggctcagagcagaagaagccaaaccgccgtgcgcggtgcgcgcaaccgcccagcggttacaagtgaccctccactttggcccagaccaacgggcgaaaggggcgggcagccatgcacgcggcatgcaaccgcgccaagtgggcgcgcttctccgactcccaacacgcccaacatggaggcccaggcccacgcgtcatgcaaccggcgcgccgaatgcttcgtgcatgcaactgcaccgccacttgtgccaccaccgcgcctcctcgactgcggaaccaataccgcgactcgaggcgacccagcgcacgacccagcagcgccagcctggcgcggcggcggcgcctctgggaggagaagcaagcgacgcttcgccttcgccataatgaccacgccaaaaaagggactgggaaagggggataccccgaaaaggatccttccccgtgaaggaaccaggctccgagcctccctactgatcagaggttcgaaggctggccccccggaaggaggttcgaaggccggcccctcggaagggttccacggccgctcaggctactcaggctccgtgcccattactgatcaggggttcgaaggctggcccccgaagggttcacagccgcctcagacgccgagcaagggatga

SEQ ID NO: 499 - DNA, 459 bp, Zea mays
  Peptide Sequence Number=SeqID_43874
atgggcaagggtaacaaacgcaagcgtgagccgactcctccgtcggaggacttcagcgactcggaatactcggaggaggagttctcctccgagtccgaagggtctccggctcccgtctctcccccggcgtcgtctgatgattcagacgactcccaggggattgccgcggaagtctggacgtacatccgggccgtcgagcgctccgggctcgagggctcggatgagtcggagttctccttggacgaggaggactcggacggcggcgaggacgaggatgacgacggcgacgacgacgatggtggcgacggcgacggtgacggcggcaagggcagcaccagaggcggcagcagcacgggcagcaccagaggcggcagcggcaagggcagcaccaggggtggcggcgacaacgacagcaccaggggcggcggcggtggcagcagcagcaaggccagtggctaa

SEQ ID NO: 500 - DNA, 141 bp, Zea mays
  Peptide Sequence Number=SeqID_43875
atggagagtcatgatctccgggcggaaagggaatcacggcttgtggatgatgatgaggataatgatggtttttatgatgatgattatgcttatggtaaagaagaaggtgtcgaggcggatctccaggagttcgaggattag

SEQ ID NO: 501 - DNA, 141 bp, Zea mays
  Peptide Sequence Number=SeqID_43876
atggagagtcatgatcttcgggcggaaagggaatcacggcttgtggatgatgatgaggataatgatggtttttatgatgatgattatgcttatggtaaagaagaaggtgtcgaggtagatctccaggagttcgaggattag

SEQ ID NO: 502 - DNA, 759 bp, Zea mays
  Peptide Sequence Number=SeqID_43877
atggaggttcgctgccaaaccaggttttaccagaatgaagatggtttccccaagttgctgagagcatgcacggttcacctcggaatcaggagccagccagagtatgatggtcgtgaattcgtcgagcatggcacagagaagtgtgtcgtgactgtatacattggatccagtccgcaccacgtggaatggagtgtcactgctgctgggcacagattcaaagacacctgccaagtcatcgttcgcaaggcattgagggccctgtgtcaaatctatgaagaagaagtggtcgacacaccgctcagattctttccgccctttcagagaaaccgtccggtttggatggccaggatgcgtgcattggaggagcagcagctgcttgaggatgactcccacattcgtgtacctcactgcatacctgctcaccctagatgcacaatgattgcccgagcagaagatgcagagaagctcaaccgcaagctccatgttgatctcaccacagctcaagcccgtgtagctgccttagaaagtcgtgaagtcattgatgttgaagccctgaagcaagccaaggatgagcatgtccagaagttgatggaggcctacttggtcacccataaccaacgtagagccctgtggatccaagagcccgcttcatccaacccagttcaacccatgaaggctgaagaccccagattcttgaaggtcacccggtctctatcagaggagataagaaggcttgggaactatcggaaggatccatag

SEQ ID NO: 503 - DNA, 393 bp, Zea mays
  Peptide Sequence Number=SeqID_43878
atgggggcaccagactgtccgaacaacccgagagtcgccgacgttggcgacgaccatgagatccccctgcttgacgatgaacagcatggagcagccgctctgcaccgtgtccaagtggcggctgcgccggagcttgtcgtacatagcggcacatgcgatcacataggactatttctagaggtcgaactggcagtcgccaagtttcttcttatcgtcgatgagcgaccccaacgcgagtgcctcctgctaatggtgtttgttcggggttttcaagggaatgagaatgagttttgcggggaggagggaatcggaaaggcagaacagggaatgacagaatgtggaatggaagagacccagggaatggcagactattattgcagccttaatacgtag

SEQ ID NO: 504 - DNA, 653 bp, Zea mays
  Peptide Sequence Number=SeqID_43879
ggtcggacgagggccagcttgctgtggttgcgcccacggctggcacagtgccgaaggcggggggcgatgctcttggctctgggggcgaggtgtcggccctcgtggttgtcagggacgaggcgggcgcggcgacccaccggctgaaaggggtgacggaggcgctgagtcaggtgacggaggcgctgggccaggtggctgacttcgccagccgtgctgcgtcgggggccctcacggcagcggtgtctgccgaagtcgagagacttcggacgcaacatgctgacgctgtccgtgagaaatcagcctccgacagcaagtgccgaaaactgacggacaaagtggccgtgctggagaaggagaaggctgaccttcggcgccagctggcggcggagaagagggaggccaacgaggctatcgccaagcagcaggctgctcaggcggaggccaaactggcgcgggcggagggcaatcttgccaaggagctcgccgaacatctgcaggagcggctcaacgccctggagagccgcgcgaagggggccgaggccgcggttgaagacctcgtggtgaaggattctaccggggccctctacgaccggatgtggggtccacacggtcgcgaggtggtcagggagcgggcggagacggcaatggctcag

SEQ ID NO: 505 - DNA, 1161 bp, Zea mays
  Peptide Sequence Number=SeqID_43880
atgtcggagagcgagttagcagtaataaaaccagaggcgttaaagacttatatctggcttcagtgctttgatggttccattcagcaagtggaggaggaggttgcaatgttctgccccatgatatgtcgtgaaattgtgaaaaatggcacagggtcgtccaaaaatcatgctattgcgctccctgaaagagttaatccagccagtttgagtttgattcttgactactgccggtttcatcaggttactgggcgctcaaacaaggagcggaagtcctttgatgaaaaatttgttaggatagaaacagaaagactctgcgaattgacttctgcagctgacagtctacagctaaagccacttgttgatcttactagtcgagctcttgctcgaattattgaaggaaagacacctgaggaaatccgtgacattttccacttaccagatgacttaacagaggaagagaagttggagcccctaaaaaatgtaaatgatgatcctaggattcgcctattgaaccggttgtacgcgaagaagcggaaagagctccaggagcgccagaagctgaaggatgtacaagtacaaaaggaggaaaaagatgagagatctttggatgagttactttgttttattaatggggatggagatatgcaagatgatgtcgagtacccctttgaagatgctgacctcgatgatggacttgatcctgcaatgaaagaagagcttgatagagaagttgaggactttgcgaggaggttgaattcagtttggagcgagtcacatattggtggtaatggttctgtgcagagatttcctgggtttaatcacaggaatggagacgagtcatctacatcttctcgcgtctctactgctgacaggtgggaagggagcggatctggtgatctgtgctcgcgaaaaaaccacaccttctcgccccgtgccgcggtcttcgcgcgagcatctgctcctcaccgtcgtggctacacggtcaccagacgacttgcatcaccacttttgcgacgcggggctcgaagcccatggcgctctgtgtctggtatgcctgatgcggatgatgcagtagcaaagaggaaccgcaggcctagtgacgcgacgaaggtcgccctttcctctccattcgtcgtccaccgtatttgcgaccgccactaa

SEQ ID NO: 506 - DNA, 1389 bp, Zea mays
  Peptide Sequence Number=SeqID_43881
atggaccctgaagcaagaaatacattgattttctctctgcaaattatttctgtggcaagagtaaacttaactatgcattttacaaacaaacacacatatgatgaggttaatagaagtgttggagcaagtactgaagcttcaagtgaagccaatacccgccgctggtgcgtgcagattctcgggctggacatgtgcgcggatatcatcgtcggcaacgagctaatgcgcgacatctccggcggccagaagaagcgcctcaccacaggggagatgttggtcggcctgaccaaggtgctattcatggacgagatctccacgggcctcgacagctccaccaccttccagattgtcaagtgcatccagcagatcgtccacctgggcgaggccaccgtcctggcctcgctgctccagcccgcgccggaggtcttcgacctcttcgacgatgtcatgctgctgtccgaggggcagatcgtctaccaggggccccgagagtacgtgcttgagttcttcgagaggtgtggcttccggtgcccgcagaggaaaggtgtccttgatttccttcaggagatggaccaccatgtcgccgataggaaagaaatattggatcggccacgtgagattgcaccattaggtttatcaggaaaatttaatgattttttttcattctgccattgccatctggcactgtggcacatccaagtacagaacacaaagttgcatgttggggaccttgcattgtctaaaatagcccaaagttacatcaaaaaaagatcaggaacagtactggtacaaaatgaaaaaccatatcactatgtatcagtacctgaatttgttgcaaagttcaagaaatttcatatggggaagagcctcaagaaacaactttcggtgcctttccacaagaggaaaatacacaaatctgctttggtcttctctgagaagtctgtctctactttggagcttctcaaggtctcatggtccaaagaatggcttctcatgaagaggaattcatttttgtacatcttcaaaatagttcagccatctcgtagaaggtgtctgtatacgatggcatcagtgatgctcatcttttcaacaaaagctgctgatattcaccagataatccctcttgtgaaagctgcaggaccagataaaatgaagtttaatggggtagaagaacaacttgttcaagagttttccctggatgatttgtttcctcttgttgctccactgttcatggagacgccacactcttgttcgatgtatgcagaaaaggccgaacaatgttttgatgagcgctacatggccctcgtggatctccaggaagggaacgagaggcttttctacaagctgctcattgacaacattgaggagccgttggggaaagatccttga

SEQ ID NO: 507 - DNA, 1073 bp, Zea mays
  Peptide Sequence Number=SeqID_43882
atggggaaaaagcacggctccgcgccgaatttacatacatgttcaggcctcgacagccacgatgaacaaaagcactggcatccaaggtgccattacaaacggaactccggttccaaccccacagcagcagccatgatcccagtacggacgcggcaaccggaaggctttcgttcgcgtccctactcaagggatgtgaaagagacatcaaagccaaagagccggggccggcccgtgggcggcgctgacggcctcgacgaggggggagcttcctccggctgccaccatagcagcacggacgacagcgtccgcctctccaccaacgccgacgagctggaggatggtttctgccaccagaagctggaagaggaggtggccagccgacccgcgcaggaggcagagccccggctcgcctcgctctccgcccctgcaaggatgatgaacatccttgctactgagggcggagccaagatcgcagcctggcttgctcctccccacctagaggctgccgcccagcggttacaagcggctctccgcttttgcccggaccaacgggcgaaagggcgggcagccatgcaggcggcatgcaaccgcgccaagtgggcgcacctctccgacttccaacgcgcccagcttggaggaccaggcccacgcgtcatgcaaccgggaccgggaaagggggataccccggaaaggatccttccctgtgaaggaaccaggctccaagcctccctactgatcagaggctcgaaggctggcccctcggaagggttcaacagccgcctcagagcacgtgggctccacacccactactggtcagaggttcaaaagccggcccctcggaagggttcaacggccgcctcaggctactcgggctccgcgcccactactgatcagggcgggaacgatcttgtaacagaatcccatcagagggaggcatcgagccctcggaccccgtcaccaggggaccgggtctggcagatcacccgcagctcaccggagacaccatgttcggcgcccatcgagggcaacatggcgctctccccctcctccttgcggaaaggcgacgcaggggc

SEQ ID NO: 508 - DNA, 306 bp, Zea mays
  Peptide Sequence Number=SeqID_43883
atggaggtatcgagggataaacttgataattgtcaagtgcaactcccacaaatcatgcaagtggagtcgtacctactggagcacataggcaatgccaggcttggtgaagctaggatactgaagggcaccgacaaggctctagtaggcagtagggtgaaggtgagcgtcggagatagcgcccttgcaacgaccacagcggtcgaaggcctcttcccctcggcattaacaatggtggggcctttgaatcatgaggggccgactcattgtggtcaaggagctgcgaaggatacaagggtccttccctaa

SEQ ID NO: 509 - DNA, 444 bp, Zea mays
  Peptide Sequence Number=SeqID_43884
atggacgcaattcaggtcaaggctccgcccactcaagagacacgatcttgcctcgcccgagcccagcctcgggcaaagacagccgacccaggagaattcacgtctcgcccgagggaaaacagcgtcgcctgccctgctccgactgctatgccacccgccagggtgagactgacagtagccaagtccagcctcgggcgccataagaagctccgcctcgcccgaccccagggctcggactcaacctcgacctcggacgacggactccgcctcgcccgacccgagggctcggactcaacctcgacctcggacgacggactccgcctcgcccgaccccagggctcggactcaacctcgacgccggaagacgatctccgcctcgcccgaccccagggctcggagtccacctcgacctcggacgacggtctccgcctcgcccgaccctag

SEQ ID NO: 510 - DNA, 699 bp, Zea mays
  Peptide Sequence Number=SeqID_43885
atgcaggcggcttgcaactacaccaaggggatgcaccctttcgacctcgatgcgtccaacatggaggcccaggcccacacgtcatgtaaccggcacgccggttactacgtgcgagaaactgcaccgccacttgcgccagtaccgcgcctcctcgactgcggaaccggtgccacgactcgaggcaaccctgcgcatggcccaacagtgccaaccgagcacatcggtcacggggcaggcgacacctttggcaagcaaagcgggcgacgcttcacctccgccatgatgaccgcgtcaaaaaaggaagctccgcctcgcccgaccccagggctcggactcaacctcgacgccggaagacagcccccgcctcgcccgaccccagggctcggactcaacctcgacctcggacgacggactccgcctcgcccgaccccagggctcggactcaacctcgacctcggacgacggactccgcctcgcccgaccctagggctcggactcaacctcgacgctggaagacggtctccgcctcgcccgaccctagggctcggactccacctcgacctcggacgacggtctccgcctcgcccgaccacagggctcggactcagcctcgacctcggaggaatcaccgcctcgcccgaccttgggctcggaccgaccacgctacaggggggccatcactaccctacccctagctag

SEQ ID NO: 511 - DNA, 390 bp, Zea mays
  Peptide Sequence Number=SeqID_43886
atggcccaagggcacatttccctttcaacgactccatgggctgtcagcgggggagaggttctgaagtggaaaacctccccgacgttgaagatgatcgcgatgctgaaggtagatgtggaggtgaaggaaggagttttctatcaatctaatgttcgctgtctggtcgcgtgtaaggcgcgtctcattgtccccacactccttctgcgacaaacacacatggatagcattcttgggccatattcttcggggccgctttcccacttggtggtgcccgtggagatggcggtcgctagtgtgggccccaaaatagtcatcctcagcaacaagtggaccactactaggcaacgtggaatcccttgccgccccgagcgcagcaggaatgggagatag

SEQ ID NO: 512 - DNA, 486 bp, Zea mays
  Peptide Sequence Number=SeqID_43887
atgggcaagagtaacaaacgcaagcgtgagccgactcctccgtcggaggacttcggcgactcggaatactcggaggaggagttctcctccgagtccgaggggtctccggctcccgtctctcccccggcgtcgtctgatgattcagacgactcccaggggattgccgcggaagtctggacgtacatccgggccgtcgagcgctcttggctcgagggctcggatgagtcggagttctcctcggacgaggaggactcggacggcggcgaggacgaggatgacgacgacgacgacgacgatgacgacgacggtggcgacggcgacggcagcggcagcggcgggggcagcggcggcaagggcagcaccagaggcggcagcagcacgggcagcaccagaggtggcagcagcaagggcagcaccagaggcggcggcggcaacggcagcaccaggggcggcggcggtggcagcagcagcaaggccagtggctaa

SEQ ID NO: 513 - DNA, 162 bp, Zea mays
  Peptide Sequence Number=SeqID_43888
atgagggtgaggctcaagatgatgaaggagacgatcaagaagatgagccacctcaagaggaggacaatgatcaagggggagatgcaaatgatcaagacaaggaagatgatgagggaaccaaataggtcttccgcaacaagcaagatgagcatggtgtggtga

SEQ ID NO: 514 - DNA, 753 bp, Zea mays
  Peptide Sequence Number=SeqID_43889
atggagcaccgtcccgggccggagaggttgctggagactgcccatctagagcttgacggggagctgttcgtcaacacgcagcaggcccctacttggcgcgccaactatcggcgtttcgagaccggggggtccctgggccgacgagtgaaatgtcgccgcgtgccccagcccagatgggtcggcgcgtggccgagcgcgaaggggggaagagaggtggccggagacaggcgtgagagaggtgaaaatcccgcggtcttcgtgttcgtcccgcgcccaggtcggcctgagtcagcttggggtagggtaatgatggcgcttcctgtcgacgtggtcggtctgtgccctaggttgggcgatgtggaggctcctccgaggtcggggtcgagtctgtctttcgtggccgtggtcgagtccgagcccctgggtcgggcgaggcggagaccgtcggctgaggccagggctgagtccgagccctggggtcgggcgaagcggagttcgtcgtcttctagggctgagcccaagtccgagccctgggtcgggcggagcggagttcgtcgtcttctggggctgagcccaagtccgagccctgggtcgggcggagcggagttcgccgtcttccggggcttagcccaagggcttagcccgagtccgagccctgggtcgggcggagcggagttcgccgtcttccggggcttagcccaagtccgagccctgggtcgggcggagcggagttcgccgtcttccgaggcttag

SEQ ID NO: 515 - DNA, 1455 bp, Zea mays
  Peptide Sequence Number=SeqID_43890
atggagaaggccgcggcgaacgcgttgccgccgctgcggttcctcgccgttctggccgtgacagcgtggaccttcttcctctacttccatttctccgtgctcagcggcagcacggtggaggtgagccacggagatgacggcggcgccgatccgtgccgggggcggtacatctacatgcacgacctgccgccacgcttcaacgccgacatcatccgcaactgccgcaagaccgaggaccactggggcgacatgtgcggggccctcagcaacgcgggcctcggcaggccgctcgccgaccgcaccgacggcgtgctcaggagcgaggccgggtggtacgccactcaccagttcgcgctggacgccatcttccacaaccggatgaagcagtacgagtgcctgacgaaccgctccgccgcggccgccgccgtgttcgtcccgttctacgccgggttcgacttcgtccgctaccactggggctacgacaacgccgccagggacgcggcgtcggtggacctggccaggtggctgatggcgcggcccgagtggcggcgcatgggcggccgcgatcacttcctcgtcgccgggcggacggggtgggacttccggaggagcaacaacgtcgacccggactggggcaacgacctcctcgtcatgcccgccggccggaacatgtcggtgctggtgctggagtcggcgatgctgcacggcggcgactaccccgtcccgtacccgacctacttccaccccaggtcggacgccgacgtggcccggtggcaggaccgggtgcgcgggcagcggcggacgtggctgatggcgttcgtgggcgcgccgcggccggacgtgcccatcaacatccgggtgcgcgaccacgtgatcgcgcagtgcacggcgtccagcgcctgcaccatgctggggtgcgcgcgcgccaccggcagcacccagtgccacacccccggcaacatcatgcggctgttcaagaagaccaccttctgcctgcagccgccgggcgacacctgcacgcggcggtcggcgttcgactccatggtggccgggtgcatcccggtgttcttccacccggggtcggcgtacaagcagtaccggtggcacctccccagggacgaccacctccggtactcggtgtacatcccggacgccgacgtgcgggagcgcaacgtgagcatcgaggccgtgctccgggcgatccctccggccgcggtgcagcggatgcgggaggaggtggtcaggctcatcccgagggttctgtacgccgaccccaggtccaagctggagaccgtcaaggacgcggtggacgtcgccgtggagggggtcctcgacacggtggcgcggatcaggaacggcgagtacgtcgacagcggcgggccggtcaccgaagaccctccgaaccttttcgcctccacggagtccaggttccggccggcgcaggccgatcggtag

SEQ ID NO: 516 - DNA, 1614 bp, Zea mays
  Peptide Sequence Number=SeqID_43891
atgcaactgagcgtagccaactcgatcgtacaactgctggtcaaatctggacgtaaacccggcggcagtgctcgatcgcgccgggccgtcgaagtgaagggaatcgagatcaaggcggcggcggcggcgaaggcgaaggtattgccaccgctgcgaatcctcgccgcccttgcgatagcagcatggaccttattcctgtacgtgcatttctccgtgatcaccggcacggtggaggtgatgagcaacggcgaagacctcgccgacccctgccggggacggtacatctacatgcacgagctgccgcggcgtttcaacgccgacatcgtccacacctgccgcaaccgcaagaccgaggaccactggggcgacatctgcgcctcccttagcaacgcgggcctcggccgtccgctcgacggcgacagcgtcatcacgggcgaatctgggtggtacggcacgcaccagttcgctctggacgccatcttccacaaccggatggttcagtacgagtgcctgaccaaccactcggccgtggcatccgccgtgtttgtcccgttctacgccggcttcgacttcgcccgctaccattggggctacgacaacgccaccagggacgccgcgtcggtggacctgacagagtggctcatggcacgacccgagtggcggcgcatgggagggcgcgaccacttcctcgtcgccgggcgaacggggtgggacttccggaggatcagcaacctcggcgcggactggggcaacgacctcctcgtcatcccgggagcccggaacatgtccgtgctcgtgctggaatccacgctgaaacgcggcaccgacttctccgtgccgtacccgacttacttccaccctaggtcggatgccgacgtgctccggtggcaggacagggtgcgcggccagcgccggacgtggctcatggcgttcgtgggcgcgccgcgaccggacgttcagatgagcatccgggtccgggatcacgtcatcgcgcagtgcaaggcgtccggcgcctgcgccatgctgagctgcgcgcgcacccccagcagcaggcagtgccacaggcccgccaacatcatgcggctgttccagaaggccaccttctgcctgcagccgccgggcgactcgtgcacgcggcggtcggtgttcgactcgatggtggccggctgcatcccggtgttcttccacacggggtccgcgtacaagcagtacccgtggcacctccccaaggacgaccaccttaggtactcggtgtacatcccgaccgcggacgtcaggcggcgcaacgtcagcatcgaggccgtgctccgggcgatccctccggccacggtagcgcggatgcaggaggaggtgatcaggctcatcccgagtttgttgtacgccgaccccaggtcgaagctgaaaactctcaaggatgcggtcgccgtcgccgtcgatggaatcctggacacggtggcgcggatcaagaacggcgaggaagtcaactgtggcgggccagtcgacaaggatccgccgaacctttttgcctcgacagcatcgaggtttttcccggagggatatgtgcaagcagctcgcggccggagctggaccaaggggatgcaatcgcgcatctga

SEQ ID NO: 517 - DNA, 1623 bp, Zea mays
  Peptide Sequence Number=SeqID_43892
atggtagcatggagcttcttcctgtacctgcacttctcgttgatcagcggtgcggaagaggtgagcaacggcgacccgtgccgggggcggtacatctacgtctacgacctgccgccgcgcttcaacaccgacatcatccgggactgccgcaaagccgggggccgctgggccgacatgtgcgcgttcctgagcaacggcggccttggccggccgctcgccgacgacggcatggacggcgtcgtcactggcaaagctgggtggtacaacacgcacgagctcgcgctggacgccatcttccacaaccggatgaagcagtacgagtgcctgaccaaccgctccgctgcggcctccgccgtgttcgtcccgttctacgccggcttcgactctctgcgctaccgggtgggctacgacaaggccaccagggacgccgcgtcggcggacctgtcgttctggctcaccgtacagccccagtgggggcgcatggcggggcgcgaccacttcctcgtcgccgggcgaacagggtgggacttcaggaggaggagcggcgccgacgcgaacacggaccggggaaacggcctcctcctcacgccagccggccggaacatgtccctgctcgtgctggagtccacgctggaacacggcagcgacttctccgtgccgtacccgacctacttccaccccaggtcggacgccgacgtgctccggtggcaggccagggtgcgcgcccagcaccggacgtggctcatggcgttcgtgggcgcgccgcgccggaacgttccgacgagcacctgggtacgggatcacgtgatcgcgcagtgcaaggcgtgcagcgcctgcgccatgccggggtgcgcgcgcagccccggcagtgcccagtgccacagccccgccagcatcgtgcggctattcgagaaggccatcttctgcctgcaaccacctggcgacgacggctccagcacgcgacggtcggtgttcgactcgatggtggccggctgcattccggtgttcttccacacggcgtcggcgtacaagcagtaccggtggcacctccccagggacgaccacctcaggtactctgtgttcatcccggacgccgacgtgaggtggcgcaacgtgagcatcgaggccgtgctccgggcgattcctccgtccacggtggagcggatgcgggaggaggtgatcaggctcatcccgactttgctgtacgccgaccccagatcgaagctggagacgctcaaggacgcggtcgacgtcgccattgaggggatcctagacacggtgacgcggatcaagaacggagagcaagtcaactgttgcgggccggtggacaaggatccaccgaaccttttcgccgcgacggcatcaaggatcccgccgaagggagccatgcgagcagttgaccagaaccggtcagcggagttgaggcagccgtgtaggtcattctcgtatctacgagcatatgttcaggttgatttggtgacaagcgaaccacgggagattgaagggctctgttcactaaatcagcccttagcattcccggatccccatggaccatggcattctgtggcggcacaagtcacatacttccgatctgattctaatatagagggtctctatctatag

SEQ ID NO: 518 - DNA, 207 bp, Zea mays
  Peptide Sequence Number=SeqID_43893
atgaggggctcggggcgacccttttataggcgtccggagaggggaatgtggaggctgtcgggcaccggcgaggcgcaccagggcggcgataatggtggcatagtggtggcgacgggatggctcggtgcaggcggtggcgagtggtcacccggtcacagtgcgcggggacgcaaggcgccaaatattgctgagacaattgttagttag

SEQ ID NO: 519 - DNA, 849 bp, Zea mays
  Peptide Sequence Number=SeqID_43894
atgaggacatatggtgtcgcggcacctacaagctgcgcgtcgacttcagccgctcacgccgccagcacaagagatggcctactcgcccttcgctgcctcgaccgcgacgctaggctcttcaagcgctgtcgcgacgagtccgctcccgccgtccctgcctccaattcgactcctacacccactaaagcagccctgcccgcaagaatcacctatccgatactcattccctccttgtcgcccgacgtagcagctcgccgggatgctattgagtcagaggaagcagttgaagcaaaaggattgagagatgatacaacttgcattgtcattgacataatatcaccaaagaaaccaaaacacactatacaatctcaaagaacgccaggaaaaggccttgtgcttctaaaaaatttctttttaaggaaaacaacatctaactcgttgtctctccattataagaataattattctgagccagatttggaggaggtctttgagggtggatgcccatccctatcaaggaggtatcattggaattcagtctttagttcgacaaataacggcttagtagcactagaaaaagagggggtcatgattccacaatctgtgcagtgtgctggttcagggacatggaatcaccaggcggaaaatagcgccgctcgctccgatccgactgtcgtgtcaaccacccagacaaagactgacaacaagtcacgatcaaccaccgagttcggcctcgggcgcaacaggaagctccgcctcgcccgacctcaggctccggcctcgggaggaggtttccgcctcgcccgacctcaggctccggcctcaggaggaggtctccgcctcgcctga

SEQ ID NO: 520 - DNA, 504 bp, Zea mays
  Peptide Sequence Number=SeqID_43895
atgaacaagacgccggcactcaaagtgccattacaaatggaactccgattccacctccgcaggtacgaacaaccccacacgataggggggcctgcggagcaacagaaggccaacgggtggctcgccgccacccgctccggcagcagcgacaacgacctccgccccgggcggcgaagcagcttcagcaacggcttctgggcgggcggagttggcaatctcgtcggcagagaagccttctccggctgccaccacctcaacaccgcgccaacgggcgccgggcgcctcaaggcgcaccggcaagtcctcgccctcgccggagccacccagaacatgagcgcctccctcgcggcgcacgacgtgctgggcgaccctctgacgcggctgtcggcgcgaggaagacctggacgtggccggtccgtacgcggcgcgaccatcgtccagacgaaggacgaaatgctgcaccctggctgggcagcggcagtccgccttccccggcgtggctaa

SEQ ID NO: 521 - DNA, 1149 bp, Zea mays
  Peptide Sequence Number=SeqID_43896
atgaggacgaggagcgggtcccggtattctaacggcggaggcgaggatgccttggtggggcagaagaggaagagggcggcgtcggccgtcgccggtgagtgcgcctgctgcgagcgcaggaagcggcctgccgacgggccggactacctggacgcactccccgacgacctcgtcctctccatcctgaccaaggtcgcggccgactcctcggcgcccgccgacctgctctccgtccacctcacgtgcaagaggctcaacgagctgggcagtcacgacatggtgttcgccaaggcctcgccggcgtcgctgtccgtgaaggcggcggcgtggtccgaggcagcgcagaggttcctcaagcgctccgccgacgccggcaacctcgaggcctgctacattctcggcatgatccgattctactgcttgggcagccgcagcggcggcgcggcgctgctggcgaaggcggccgtcggcgggcacgcggcggcgctctactcgctggccgtcatccagttcaacggcagcggcggcgccaagtcggaccgcgacctccgcgcgggcgcggcgctgtgcgcgcgcgcggccgcgctgggccacgtggacgcgctccgcgagctcgggcactgcctgcaggacggctacggcgtgcggcgggaccccgccgagggccgccgcctcctggtgtcggcgaacgcccgcgagctcaccctcgcgctctccgcggccgcctcgcgccacgccgcgggcgtcgtcgtcggaggcggcggcggcggcgggtgccctctcctgtccgacttcgggtggagcctccccgaggcggagccccacgcggcgaaccagttcatggtggactggtggtgggcctccgaccgctgcgccgcccaggcgggcgggaagataaccggcgagagcggcgtggacggcgacggcgcggagctccggctgtgctcccacgtgcggtgcgggcggcgcgagacgcggcggcacgagttccggcggtgctccgtgtgcggcgcggccaactactgctcccgcgcgtgccaggcgctggactggaagcgcgcgcacaaggtgcagtgcgtgcccgtggaccgctggctacttggcgccgtcggcgacgctcaggatcagcagcagcagcagccgcagtga

SEQ ID NO: 522 - DNA, 606 bp, Zea mays
  Peptide Sequence Number=SeqID_43897
atggagatgagcgatgcggagcggctgttcttcttcgagatggcctgcaacaactccgaggtcgcgtacgagcagaaccccaacgacgccgacaacttgacgcgatggggcggagcgctgctggagctatcacagatgcgtaacggccccgacagcctcaagctcctccaagatgcggaagccaagctggaggaggcactgcaaattgatcccaacaagtctgatgcactctggtgcttgggaaatgctcagacttctcatggattcttcactccagacactgcaatggcaaatgagttctttgcgaaggcaactgaatgtttccagaaggctgctgatgtggaacctgcaaatgagctgtacaggaagtcattagacttgtcagcgaagcaatcaaggaagaagaagaagaaggacaacgagttctgtggactggacgccgtcgcgtgcagccgcaccgcacagggtgcaggtgcagacgtccgcagtgcagtgcagtgcgtgcgtgccatccagggcctgcctctgcctctgcctctccatccccatccaggacagaaggacaagcgatgcttcgtcttcacgcctgcgacgactgggaggtag

SEQ ID NO: 523 - DNA, 228 bp, Zea mays
  Peptide Sequence Number=SeqID_43898
atggggatccccgttggggatctatccccgcggggaacggggatggggaagaaatgttccccgcaagcgttcgtggggatccccgtggggaagttatttcgtcgcggggacggggatggggagctattccccggcggggaattccccgttgccatccctactcgctgcagcgagcgtgccgtcgtcgtcagagtgaagccgcgagggacacatggtcgcagcgcttga

SEQ ID NO: 524 - DNA, 139 bp, Zea mays
  Peptide Sequence Number=SeqID_43899
gaagaaaaagaaaaggaaaaaggtggctgtgtacagccaaggggctgtttcggtctggggcaccggacagtgtccggtgcgccaggctgcctcggccgaacaggccgctctcgggaattcgccgacggcgtacggctaa

SEQ ID NO: 525 - DNA, 1638 bp, Zea mays
  Peptide Sequence Number=SeqID_43900
atgcaggcgtcatgcaaccgtaccaagggggcgcaccctttcgactccgacgcgtctagcatgggggcccaggcccacacgtcatgtaaccggcgcgccggttactacgtgcgagaagctgcaccgccacttgcgccagtaccgcgccttctcgactgcggaaccagtgccgtgactcgaggcgaccctgcgcatggcccagcagtgccaaccgagcacatcgatcacgggtcaatcagccgcgggagaaggcgcgacggtcaatatggccaaaagtgggccgacagtattggcggcggcaggcgggcggaagcagcggacagacgacacctttggcaggcgaagcgggcgacgcttcacctccgccataatgaccgcgtcaaaaaagggaccgggaaaggggatactccgaaagggatccttctccgcgaaggaagccggccccgagcccccctactgatcagaggttcgaaggctggcccctcggaagggttcgacagccgccttagagcactcgggccccgagccctcctactgatcagaggttcgaaggctggcccctcggaagggttcgatagccgcctcagagcactcgggctccgcgcccaccactggtcagaggttcgaaggctggccccttggatggtttcgacagccgcctcaggccactcgggctccgcgcccactactaatcaggggctacgctcccgaggtaccctaggacatttccgagaccagcaggagcgattctgtaacggaatcccatcagagggaggcatcgagccctcggaccctatcaaacgggaccgggtccggcaaatcacctgcaggtacttttggagcgcgcctctgggccacgagccgacccttatcgaatggggcacgggcgtccactcggatcatccgctagcaactcactggagacaccatgttcggcgccctccgagggcaacatggcgctttccccctccttgcggaaaggcgacgcaggggcgtatgaaaaaagccgagtctgtccttgaccgtcctctcgctctgtgcggaggctcgggggctgctctcgcaaacccggctccggccaaaccattgacaacgtcaacataccagcccgagaacttggaacctgactatgcacctgggctacgaccactggtaacccccatcagcacaaagctgcaaaggcctgatgggcgcgattcaggtcaaggctccgtccactcaagggacacgatctcgccgcgcccgagcccagcctcgggcaaagggctcgggctcaacctcgacgccggacgacggactccgcctcgcccgaccccagggctcggactcaacctcgacatcggaagacgaactctgcctcgcccgaccctagggctcggactcaacctcgacctcggaagacgaacttcgcctcgcccgaccctagggctcggactcagctttgacctcggaagacggactctgcctcgcccgaccccagggctcggactcagcctcgacctcggacgacggtctccgcctcgcccgacccttgggcccagactcgacctcgacctcggaggagcctctgcctcgcccgacctcgggctcggaccgaccacgtcacagggaggccatcattaccctacccctagctag

SEQ ID NO: 526 - DNA, 1350 bp, Zea mays
  Peptide Sequence Number=SeqID_43901
atgtcttcgcactcccttcatgcatcgcgtccttccaccttccgagcccccggatggggagtgctcgcattgctttcgtcttgtcgccgttggaggaacacaacttcgcggaagttggtacctttcagccatcgttcggctttagggattttcatcaggcagcccggctgcatcccctcgccggtggtcacccaagacggtgaccaccagttcgatggtggggagaagcgagccgggctgcggcctctgcccctccctcagcttcaaggatcttcatcatcagtgctggggaggggagtgcgccgagttggggcctgtctccgcgcgggcagtggcccgctccttccctcagtgatcgggggggagggcgttcgccgtccgtggcgctggcagctgccgcatgtctggctctccggcctgagcggcttcggtgctgcttctggtgtcacctcccaccgaggcagccggaagaggtttctccgccgacgaggtagtcggtgccacccgcggactgacctccggctctacggccttggtagcttgtcctcgcccctcgagtggggacgtgggcgagggccttgttgcagcagcgtctgccctgaggtcatcgctgctactgtttggtcgcccggagcggaggtcgttgtcgctgctgccggagcgggcgtcggcgagccacccggggttttgccgccctgcaggccctccaatgtggggggttgtccgtacctgcgggggcagaaccggagttccgtttgtaatggcaccttgagtgccgatgtctgttcattgcggctgtcggggcctgaacatctaggtatttttggtgagtccctcggctcgatcggccttgccgcccgaggcttctcttgcttagttaaaggaaccctcggccgctctgcgatgagccggagccggaggcagcggtgccagcacgtacagaggcagagttggctcaaaaagaagcttcgtcggtcgaagcctggcctggccgtccactggcgggaccgacgccggagtcgggttgccgaggccatgagccgggctgtccactggccggaccagcgtcggagttgggttgccgaggccatgagccgggctgatgtcctcgggggacagctggttgaggctacggcgcagccggtcgagccgtctgctcaggccgagttcccagaggagaccctagcggcgatggcccaggcgtggtgtcgacaggttcctttgaggtggagatcctccgaccatgtcgccgtccgaggccgggtcggattccgtcgaaggtggagtcgacgccgagggtgctgctgctccccactgatgtctgctcctgcaggaacagtttatctgtag

SEQ ID NO: 527 - DNA, 93 bp, Zea mays
  Peptide Sequence Number=SeqID_43902
atggagtatattgtctccaggggggcatgtggcggccccggtgctgcccatgtggcaggtttaccccctaaaacggttaaagagacgatttaa

SEQ ID NO: 528 - DNA, 1206 bp, Zea mays
  Peptide Sequence Number=SeqID_43903
atggcctggatgccacccgtcagcagagtggacatggcacatttaatactgaggtggcacaacgcttgtcagtggagtaaccagagcgcatttaatgctgaggcggcacatcacctgccagtggactggccacatggcagcatcgggtctccgcctgagcggggagcagaggcgtacgcaatatggtctgggcacgtgtcggctccggacccctgcctggccttgattaaggtccgggtcctggaccctgcccggaggttcgggccgtgtatccaggggtccggtattttcccgcgggggttcggacccaatgttgacaccatggagtatattgtctccccggccacgtggtggccccggtgctgcccacgtggcggggggccggcgcccaaggaggatgactcatgggcccgggcccccgtgtcagagactgggctgttggtttcgacggggatgaagaggcgtggcggcccccgtgtcagaggttggtccactgctttcggcggggatgaagaggcgcggcggttcgctccttgcgtggcggttcgccctcttcgcacacggagaccgacgcccaaggagtatgacacgtgggcccgggcccccatgccaggggctgggtcaccttggcgcgcgtcggacgagatcttctgtgacgcttcagggcgtcagtgggggaatctttctttaaaaggggattcccccgagtgcgccgccatggctttgctagaccctctcgagcgcctccagcccgaggtggcactcaacttggtgcgcaacctgcctggatggggtgtgccagcgttcgccggaaggatccgtgtcggtgcctctcctcacggcgatctcgccgccggagagttcgtgctcttcgtctccaacctccccagcgggttgtcgctgccgatctcgtctttcttcgtgttgctgctggaggagctcggcctccaacctcagcacttcacaccctgcttcatccttctggcagccatcatcgcctacctctacaagatgtctgtgggggcgacgcttcttcctccagcattcggcttcaaggatgttcatcagccttgcggaggtggagagcgagttgagctgcggctccatctttcacgtgagcttcaccagtgcctcatgggggtcgtacaagatgtcgcggagatggcggccgcgtgcttccagcgtgaccctactgatgtcgagtag

SEQ ID NO: 529 - DNA, 126 bp, Zea mays
  Peptide Sequence Number=SeqID_43904
atgtacaaccggctcaagactgttgtcaaccaagtccgcaacctcgggagcaccaagtgggatgaccatgaaatggtcaagaatagaatgagttggtccatgaccacctcattcttcaaaagctaa

SEQ ID NO: 530 - DNA, 984 bp, Zea mays
  Peptide Sequence Number=SeqID_43905
atgggggatacccgccgtcttttcgcctcatcgttggaggaacgcaactccgtgggagttggtacctttcacccatcgttcggcttcaaggattttcatcagccagcccggctgtaccccccccgctggtggtcacccaagacggtgaccaccagttcctgggtggggagaagcaagctgggctgcgatcttggtcccaccctcagcttcaaggatgttcatcatcctcgctggggtgggggccgggctgagccggcgctctacctcccgcgcgggttcgtgggtcaccctctcccgcggcgttcgagggagagggcgctcactggccctgcgggcggcccagacttcgacaacgcggggctggtcgacggcaggcgtcgtcacctccagcgtgtcgggctcgtcggcttggctcccggcggctccttctgccggagggcggctgccgcgccgtgtgcacgggaggaccaccctagatgccgcgcgctgctagagcaccgttcgtgttctggggtggtcctgcctttgcaccggcgtggcatcttcacgcggaggccggcggaggcggttcgagaagtccccatcgccgacgggatcaccgccaccatccgcgcttcgggcctccagctctttgtacttgtcctcgcccctcgagcgtcggcgtggccgggttgtccgttagcgggaccgacgctggagttgatcagccgaggcctcgggtcgggctggcgcccttgggagatggttggccgaggccccaggggtgaccggccgagccgcctgctcgggccggattcccggagaagtccctggcagcgattgtccgagcgtggcgatgccgtcgtcctccagagtggggatccttggaccgcgtcgccgtccgaggctaggtcgaacctcgccgaaggcgtcgtcaatgccgagggtgctactgcccccttccagcgtcaagacccgagcctgcaggatcagagtgtcttgtag

SEQ ID NO: 531 - DNA, 888 bp, Zea mays
  Peptide Sequence Number=SeqID_43906
atggtggccgatccattgtggcaacttcttgctcgtcgcgtcgaggacgatgattcatcaacacttgtcggggtgctcctgacgttccttcttctcggtgctgggctcaccgatgtcacatgtgatcttccctttgcggaaaatagcacctaccacatcctccccataagcaaacttggtctctatattgaggaggtcgacggtggtcttcgatcgccgtcgcccgagctcgtggacaagcgcctcgttggcggtgccataagtgaaggcacttactacatcaacgtcggtggcattggggagttcattccttttatgggacaacctccggatgtagtcccaaagactctcctcgctcttctgggcacaccttttgaggtcctaggagctcccaaggcgtttgtaggtgccctggaagtttttgtcgaagtctttcctgagatccgcctagtcatggatggtgtcgctcggcaaatgctcaagcaaggcccttgccccctccgtggtgaatggtgtcgaagacaatctgtggatggggagatacaagatgatgagttggtcgtctcatattcacgccatgcgacagtcaaggcgctagtcctccaaccatacgctagggttcgaagacccatcgtacttggtgacattcacaggagcctgcacttttggcgagaactgcgcttttctgttggagcgtccgaaggcgcgtggacccgaccctggtgggctagggttgtgctcagacctcctttcgcgtggttgctcgacttcctcctgctcctggcgctggttgtcgaggatgtaccaggcgtcatgtgtttctctgaggcgggttttcatgggaaggcgggccttcatggattgggagggttgtgcccactgctctaa

SEQ ID NO: 532 - DNA, 1014 bp, Zea mays
  Peptide Sequence Number=SeqID_43907
atggaggttcgctgccaaaccagcttttgccagaatgaagatggtttccccaagttgctgagagcatgcacagttcgcctcggaatcaggagccagccagagtatgatggtcgtgaattcatcgagcatggcacagagaagtgtgtcgtgactgtatacattggatccagtccacaccatgtggaatggagtgtcactgctgctgggcacagattcaaagacacctgccaagtcgtcgctcgcaaggcattgagggccatgtgtcagatctacgaagaagaagtggccgacaccccgctcagattctttccaccctttcagagagaccgtccagtatggatggcgaggatgcgtgcattggaagggcagcagctgctcgaggacgaccccacagtcgtgtacctcactgcatacctgctcaccctggatgcacggtatgatttcttagctcagcaccacccccgtgtagctgccttggaaagtcgtgaagtcattgttgttgaagccctgaagcaagccaaggatgagcatgtcccgaagttgatggaggcctacttggtaacccataaccaacatagagccctgcggatccaagagcccgctccatccaacccagttcaacccaggagagctgaagaccctcagattcttgaaggtcacccggtctctatcagaggggagaagaaggcttgggaactaccgaaaggagccatagtcttggaaggaattccagtctcccctaaggctatggataagcaagagcaccccgagtcctccaaagatcccccgccggagttgtttgagcccctcaccatgaagaagattccagcaccatcccttgagatcaaggaagaagctgcaagcaccccgccagcaccgtcgccctctgaggagctacaagagccagtcccgcttgaagaagagttcgaccccgtgctgccatctcagttgctgccagaagaagtcatcaacattagctccctcttgacccatccaggagatgtctcagattga

SEQ ID NO: 533 - DNA, 807 bp, Zea mays
  Peptide Sequence Number=SeqID_43908
atgtctcctgtgcttgtactcggttccccgtcggtcgccgccgccgtgcttggacatctatacttactctctgtccttaccttcctctcctggcagtcggctccagctatgctcctcgtgctcttggatcttgactcgtctgagctcttcgtgctcgtggtcgaggtcaaggctatggatcttgacccggctgcagaggaggagcgacaacttgaggaccacaatgaggcaatggatgctagacaagccttaatgggtgtcgatgtcactcatctagatcctatcgagcttgaggattttgccggctctagaacaggtactggtacggactccacgagcccaccaacatctaccactgcctctgctagtggtggctcaaggaagagatccaaagtttggaacaatttcgacgagttaaccaatctggtaaatgatgattatgctttcactgataaagtatttgcaatcaccttagataatgcttcatcaaacaataccgccatgaaatatctgagacatttcttgtctggttaccttggtgtgcctgctcctgttgtgactgatgatgatgacgatgattcttttacacctaatgatgatgacttggtgattgaagagcgtcgacattgcctagctccagatatggtggaggttttgtcttgcataaaagactgggagcttgctgatgctcacctgcaacatattatggaggaaaagacatgggaacttaaagctgaacatgagaatttgtaccttgatgatccagaaggaacacaaacactagatggtggtggtggcctagcttag

SEQ ID NO: 534 - DNA, 258 bp, Zea mays
  Peptide Sequence Number=SeqID_43909
atggcggggagcagcgaggcggcgtccgggcggcgcgacagcggtcgggtggcgcggcagcggcgaggcgggtggcgcgcgcggcgaggcggcgtccgggcggggagggacggggcgagcggcgaggcgagcggcgtgcgaatggcggcgaggcggcgtccgggcggcgtccgcgcggtgaggcggcgagcggcgggctgtgataaaaattttacaatgtttggagaaagttgtgagacacaatgtgtagaaacctaa

SEQ ID NO: 535 - DNA, 251 bp, Zea mays
  Peptide Sequence Number=SeqID_43910
atggcgagcaaggccagcctctgggaggcacgcgagaaagatgagccaagcaggatggccgtgaggaggagcacagccatggagaacgcctatggcgccgaggtaacacagctcggcgccataggctatggcgccgaggtacgtgctgcgttggcacaaacggacgtcgtggcgccgacgtgcacgtacctcggcgccatagcctatggcgccgagctgtgttacctcggcgccacaggctacggcgccga

SEQ ID NO: 536 - DNA, 468 bp, Zea mays
  Peptide Sequence Number=SeqID_43911
atggacgacggactccgcctcgcccgaccccagtgctcggacacagcctcggcctcggaagacggtctccgcctcgcccgacccagggctcggactcaacctcgacctcggaagacgaactccgcctcgcccgaccctagggctcggactcaacctcgacctcggaggagccttcgcctcgaccgacctcaggctcggacctgccacgtcacaaggaaggccatcattaccctacccctagctagctcaggctacggggaacaagaccggcgtcccatctggctctccccggaggcgctcatgttggcatcgctcatcgacgacgagaagaagcttggcgactgccaattcgacctctggaagcagtactacgtagctgcatgcgtcgctgtattcggcaagctccggcgcagccgccgcttggacgcggtccagagcggctgcaccgcgctgtccatcttcaaatag

SEQ ID NO: 537 - DNA, 453 bp, Zea mays
  Peptide Sequence Number=SeqID_43912
atggcgagccccgaccagacggtggatggcgctggcgcctggtgggaccacaaccgtcaatgcaacaaacacgttggaagcctggaagccatggctttgtccggatcccatgttccgctcgccccgtcaagccgtcgctcctccaccacgcttacccggcgttccgctcgccccgtcaagtcgtcgctcctccaccacgcttacccgtcccacgccgcgtcggcctcctcgcccgccctcccgttcccccggggaccgaagctttccaggggcctcgatgtgcccaacctaaagaagcgatgcgagaggttcgtctccaccatgccctgccccaggcgcttcgacctccactgcgagcacgaggcgggcaagacggagccaccgccgccgcaggcccacgtcgtcgagctcaccgctcacgaccgcctctatggagcctgtggccagtcatag

SEQ ID NO: 538 - DNA, 318 bp, Zea mays
  Peptide Sequence Number=SeqID_43913
atggaggatctgcatgctgcatgctggggcttgagggcggccgagccgccgcgggatctgacgggcagcatgcatacaggctcgcagtgtcccagccgccgcatggaggatctgcatgctgcatgctggggcttgagggcggccgagccgccgcgggatctgacgggcagcatgcatacgggctcgcagacgatatacgcgatgaacagtaaattgcagatccatttaaaatttcataccgtgatttctggttcgacaaacgggaacgaagtctgtcgcgtaggacagttcggcaaggccggggacctgccggcgtga

SEQ ID NO: 539 - DNA, 603 bp, Zea mays
  Peptide Sequence Number=SeqID_43914
atggagatctcgagggagagggagagctcgagggagagagggagagctcggcacagacgagtcacggcgacgacaccgatggagatctcgagggagagggagagggagagagggagatctcgagggagagagggagggcgagtggagatggcgtacccggccgaggcggcgccaaaccctagcacgcgggatccagctcgagggagagagggagggcgagtggagatggcgtacccggccgagacgacggcaaaccctagcacgcgggatccagctcgagggagagctcgggaaaccctagcacgcggggctgcgcgagcgaatgcgcctgcgagcgagctgccgcgcgtggggagcctggctacggagcgacgcccaaaatggccgtatgagcccggcctggttgagaggtgggttttgcagcaagcgagacaggctccgacccccacacagctgcaacagtgctcccacatgggcagccgaacaagccataggatgcctccgaacccaacgcacgcggggtcaagcgtcaatgcttatccgctcttgccgagcctgctggcacggaaagcagaagaggacgtgccgcacgcatctgcatga

SEQ ID NO: 540 - DNA, 576 bp, Zea mays
  Peptide Sequence Number=SeqID_43915
atggctctgatgccctcaccagcggaggcaaccacctctacaagaggtagccttaccagcggcggtgaccacctctgcaccggtgggcggcggctgcctcagcacgcacgaaggggttctcgctcctgttcgaccaataggagtaaggacaagaccatcaaagaacgccgctgccactgccgcggcgtacgacgtcttgtatggtcccccagtgtgcccgacgggcaggggaagccatggatgtggcaaacccgcgcacggcgcgactttcccccgtgcggtggatgggcaaccacgccccgaccagacggcaggagtgcagcgactcgaggcagccccgcgcatggcccaacagtgccgttaagtacgacggtcacgggtcagtcagccgtgggaataggcacgacagttggtgtggccataggcgggccgacagtaattgctgcaacaggcgcacgaaagcagcggtccaaccaccaatcagactctggtcccgcctgcaggctcgcatcctcccctgaggcgggaccgggggccacagtcggtaccctaaatcaggggtaccctctcctatag

SEQ ID NO: 541 - DNA, 204 bp, Zea mays
  Peptide Sequence Number=SeqID_43916
atgggcttgacctttgtggtcggcaaagggaggattagggttgaaagagacccggctctttgtgggcgcctcaacaaggaagtagggcaccttggtgatgttgatcctagggcaatagatcttgccatgagaatcgccgaaaggatgttcctcaaaatgaaggaagatgaggcgaagaacaaaattgaagaagaaaatgattga

SEQ ID NO: 542 - DNA, 678 bp, Zea mays
  Peptide Sequence Number=SeqID_43917
atgacaatacacccaggtgctggtaaagaactcaaaatcacaaaagagacgcttcggctcatattgggtttgcctagcgcagaaggtggcagggaattcactgattggtatgatggagataaactaccaactagcacatcgtcaccgataaatgaacctattgtatccacgcctcctgttggaacctctgataatcagcatcatgatcgccccacccaggttccaactgctgatattaaaggatccgaacaggatcctcccatctctggtgccccaaagttcgacaaaagccctttgacagaagcattcattgattgtattcatgatgatgatcaattatacaatccagataccatagccaacacactcatactaaatgtcaatgttgggatcatggttcctatgctatgccgtagtcactggactctatatgcaatcaatttccagcttcgtcgcatagacattttagattcaaatccaaatggtccggctcttggcggtactacctggaatgatatccacaatgatcaagtgatgataaagggaatgaaactaccatggtccagattaatcatgaaaagacttagcatggtgttacaagaagctcgaccagattcttgtataccaaagtttggcaacttcaaaattgtgcttcttcccaactgtccaaccatgtaa

SEQ ID NO: 543 - DNA, 2841 bp, Zea mays
  Peptide Sequence Number=SeqID_43918
atggactgcattagcttctggtctaaggcaagtgtgttgacagtggagaaccacataagtggcacaccgtcagtcgcaaggggcaagtcaaggattcgtgctgaacctgaaaaggacggaaaggtcacatcgcgatccattgctgacggcatccgccaaaagtttaccacaaccaaacgggtcgtggaggcggagccagtgagcgcggcctggactgggacgcgggaccacggaggcaggcacaggtacagcagcaacagcgatcagaggcaggggataggatcgaggtttcaagggccaaatcgaatgcggcacgcagagtgtgtctgcaagcaattcagggagcggaagcggccgatccgcggggcgacgaaccggacgatgcccgtgcaggacgacgacgagagcgtctcttggttggtgcatggctccgccggggacgcgccggcggtgctgctgcacggcagcctggacatctggatccacgaggcgaggaaccttcccaacaaggacatcctgtccaagaggatgcgggacctgctgtgcaagccgtcggagggcatgaccagcgacccgtacgtgacggtgcaggtcgcctccgcggtggtggcgcgcaccttcgtcatccccgacgacgagaaccccgtgtgggcgcagcagttcctggtgcccgtcgcgcacgaggccgccaccgtcaacttcgtcgtcaaggacagcgacgtcgtgggcgcggagctcatcggcgtcgtcgccgtccgcgccgaccagctgcaggccggggacatggtcgagggcgcgtacccggtcctggagcgcaacggcaaggagtgcgcgccgggggccgtgctccggctgtccgtgcagtacgtgcccgtggcgaggctcaccatgtaccaccacggcgtcaccccgggcccggacttcgccggcgtgcccaggacctacttcccgctgcgccggggcgggaaggtcacgctgtaccaggacgcgcacgtgcccgacggaacgctgccggaggtaaggctcggcaacggcgactgctaccggcacggccagtgctggcgcgacgtctacgacgccatatgccaggcccggaggctcatctacatcaccgggtggtccgtgttccacaccatccacctggtgcgcgacggccacgacgacatggcgctcggcgacctgctcaggaggaagtcgcaggagggcgtgcgggtgctgctgctcgtgtgggacgatcccacgtcccggagactccttggcatcaagatggaaggttacatgggcacaagggatgaggagacccggagatttttcaagcactcttcggtccagatactgctttgcccacgatctgcagggaagaggcacagctgggtgaagcaacaggaaacaggcactatctttactcatcaccagaagacagtgatcttggatgctgatgctgggaatcatagaaggaagattgttgcttttgtgggaggacttgatctatgtggaggccgatatgatacaccaaagcacactctatttcgaactcttcagacatttcacaaggaagactactacaacccaaattttgcggttgaagatgctcgcggcccaagagagccatggcatgacttgcattccaagatcgacggtccagcagcatacgatgtcctgaaaaactttgaggagcgctggttaaaggcgtcaaagcgcagtgccgctaagaaactgtcaaaattgtcgaggtcgcataatgattcgctgctgtggatcaacaagatacctgatattatcgctattgacgacgaaatctattcaaacgacgatgatccagagagatgggacgtgcagattttccggtcaattgattcgaattctgtcaagggttttccaaaagatccacgggaggccactagtaagaatcttgtttgtgggaaaaatgtactgattgatatgagcgtgcatacagcatatgtgaatgccatccgaggtgctcaacatttcatctatattgagaaccagtacttccttggctcttcatttaactgggattcacatagagatgttggtgagcataaaaatctacttctcccttatgatcatctgaagtttccaaaattcaggactctgaagtacagtacattgcagaaaatgacaatgcaaatgatgtatgagataatctataaggccttgaaagaagtaggactagatggtacatatgagccacaggattacctgaatttcttctgccttggtaaccgtgaagctgaggacactacttgcacatctagtggaccattctcagccagtaacccacaggaccaagctcggaagaataggagattcatggtgtatgtgcactcgaaaggcatgattgtggatgatgaatatgtgataattggatccgctaacatcaaccagagatccatggaaggaactagagatacagagattgcaatggctgcataccaaccccagcatacatgggcaaatatgctttctgctcctcgtggacagagacaaatgagctttgctaatctggtgtgctttcacctgcagattttcgggtacaggatgtctctatgggcagagcacattggagccattgaggagagcttcaccagaccggagagcctagagtgcacgaggcaggtgcgtcacatcggacagcagaactgggagaaattcatctccagccatgtgaccgagatgaagggccacctgctcaagtaccccgtcagcatcgattccaggggcaaggtgaatcctctgtctgggtgtgccacattcccagatcttggcgggaacatctgcggctccttcctgaatatccaagagaacctcacaatatga

SEQ ID NO: 544 - DNA, 1452 bp, Zea mays
  Peptide Sequence Number=SeqID_43919
atggcacagcacagcgcggcgtgctccattttcttcctggcggccggcccagagccaaaacctaggactgggcacaacatgtctccatccgacgacggcgaggaaaccctcgccgcgctcatagaactgtctagaacgccggagggccgggagggtctcaccgacgtgctcatcgacaccctcttcctcctcccggcctccccgccgcgcctcttgctcctccgcctacgcctcctccgcaacctcctcgccggcgatgagctcaaccactacgccttcatcgagcactccggccccgccgccgtcgccgcctccgtgctctccttcccctcgctcgcccccgacgtggcgcgcgccgcgctccaggcgctcgggaacgccgcgctcgccggggagctccaccgcgacgccgtctggcaggcgctcttccctgaggcgctgcgggtgttcgcggggctcagggaccagggagtcctggatcccctgtgcatggttctcgacacgtgctgcggcggggaaggcggtcgcgggaggctccaggagctgtgtcacgaggagctgggcctgccaatcctcgtccaagctgtcactacggcgtcacaagtggagcacaaggaagagtggttagagtggcttctgttcaaagtctgtgctgaggagcagaagtttgagagcttgttctatgccttatgctctgctaatgatgtgggcgagtataatgctaagcatatttttcttctggatacgttgtcaaggtgtttgaatagccatcccgaagaagttaccgtctcagacagttttgcacatgatgtttttaatctacacaagcatgctgctgaaactgtgaattttacttaccgaggtacctcccctcttccaaccgggcaccctgcaatcgatgtccttggatatacactgcagctcctgagggacatctgtgcctgggaatccacctcagcagatactcaacgccctgttgactcactattgcaggctggctttgtaaagcgccttctgagatacctaggtgagcttgagccaccaagtacaatcagaaaatcaatggcaggagcaggaggacaaggagataaccatccagctcttgaaaatgcaaaggtctgcccatacattggttacaggagagatttggttgcagtcattgctaattgcttacacagaaggaagaaggtgcaggatgagattaggcagttagatgggatcatgttgctgctgcagcaatgcgtcatcgatgaagataatccatacttgagggagtggggtcttctagctgttaagaacttgcttgaagaaaatgaagaaaatcaaaaggaggtttctgaacttgagatgcaaaaacctgttataactccagagattgctaacataggtctcaaggtggagatagacaaggaaacaggtcgtccgaaactagtcaatacttctgatacctga

SEQ ID NO: 545 - DNA, 453 bp, Zea mays
  Peptide Sequence Number=SeqID_43920
atgggcaaaaacaacaaacgcaagcgcgagccgactcctccgtcagaggactttggcgactcggaatactcagaggaggagttctcctctgagtccgagggatctccggctcccgtctctcccccagcgtcgtccgatgactcggacgactctcaggggattgccgcgaaggtctggacttacatccgggccgtcgagcgctccgggctcgagggctcggatgagtcggagtactcctcggacgacggcggcgaggacgaggacgacgacgacgacgacggcgacgacgacgacgacgacgacgatggcgacggtgacagcggcggcggcggcaggggcagcaacagcggcagcggcggcggcaacggcggcagcaggagcggcaacggcggcagcagcaggggcagcggcggcggcggcagcagcaagggcagcaacaaggccagtggctaa

SEQ ID NO: 546 - DNA, 348 bp, Zea mays
  Peptide Sequence Number=SeqID_43921
atgagcggcccgctgccgcccgctccaacacgctccaaggccctcccctgcgactcgggggctgggtcccgcatgtcatgcaagccggctcagggcagaagaagccaaaccgccgcgcgtgggactgggaaagggggataccccgaaagggacccttctccgcgaaggaaccgggctccgagccccccactactgatcaggggttcgaaggctggccctccgaagggttcaatagtcgcctcagatcgcgtgggcccgacacccactactggtcaggggttcgaaggccggccctccgaagggttccatggccgcctcaggctactcgggctccgcgcccattactga

SEQ ID NO: 547 - DNA, 225 bp, Zea mays
  Peptide Sequence Number=SeqID_43922
atggcccatctctgtaggcacgcaaacgcaacccaccgccgcgccggcgccgccgccggccctacttccttacccttccctggccgtctcccgaagttcgctgtctccgctttaaccatccgtggtcccgttcttctgcaggttacaaggacgataccccaggccatcacagtcgcattattcaggaacaggaaagatgtctacacgttaccagcacacatgtaa

SEQ ID NO: 548 - DNA, 483 bp, Zea mays
  Peptide Sequence Number=SeqID_43923
atggacggaccaccacgcccacgctgcctgcaggcaacggccactcgctgtcgctgcgctgcaaactccccgctccggttccggccagatccatccttgtccactacagatgtagatcaggtttgccagtggagtgcaggtttgccagtgaactacagtgcacttatcactcagcgaggcataggaacagtagtctgctgtctaatgctggaggccatcttattatttcaagcgacggtgtctgggatgcttttgactgcagaaatggcttttaaatgtgcacgagggcttcctcctgaggccgcagctgagccaattgttaaaaataattatcctgagccagatttggaggaggtctttgaggacggatgcccatccctatcaaggaggtatcattggaattcagtcttcagtttgacaaataacggtttagtagcaccagaaaaagagggggtcatgattccacagtctgttaagttatga

SEQ ID NO: 549 - DNA, 726 bp, Zea mays
  Peptide Sequence Number=SeqID_43924
atggtgaaagccagagagatggaagcggaacctttttccgccgcagattcggcccctgacgctcgcctcagctcaactcaaaaagaaaacaacccccgccaaaaacccaagtcctcccgccaaaacttggcgccaaaagggcgccgccgccatccagccgggacggacatgggcacgtgcggcgccggaagagccaccagcgatgaggacatatggtgtcgtggtgcctacaagctgtgcgtcgagttcagccgctcacgccgcccgcacgaggatggcctacacgccctccgctgcctcgaccgcgacgctaggctcttcaagcgccgtcgcgacgagcctgctcccgccgtccctgtctccaattcgactcctacacccactgaagtagccctgcccgcaagaatcacctatctgatactcaatcccgccttgccgcccgacgtagcagctcgccgggatgctactgagtcagagtttaagaaaaacatgtcaaggaatttgatattttgctatttgaaagccacagtccagttcaggaaacttctttcaaatgcacgattgccacccgacgggacagtcgacgccgcctgcctcctgattcgctcctcctcatccggcgtcgcctcacggcagcagcatgaggaacgagaagagcaggtagagggagaggagtgcccggactgcggtgggactaggctgtacgaccgctgcaaaggagagtga

SEQ ID NO: 550 - DNA, 177 bp, Zea mays
  Peptide Sequence Number=SeqID_43925
atggagagtcatgatctccgggcagaaagggaatcacggcttatggataaagtggcgatgagaatggtggttttggtattgactctggtgatggttgtccgcattgcaaccacttcaggagaagatgaagccgtggaaggagacttccaggagttccaagattacgatgagttctag

SEQ ID NO: 551 - DNA, 535 bp, Zea mays
  Peptide Sequence Number=SeqID_43926
atggaaaaagagccacttgacatggttgagagctcagttcgagtcatcgagacacatgttgacatcattcgtagtctagtgactgatggggttgtggatactagtgaaccggaatcagtgtacacacttgagaccactttgtttcaaattggagatgtatgtgacatgcttgagaagtgtgctctgtccatcaaaaagtatgttgactccaagagggctaaaattattcaagacgaagccctgcaatatgctgaagatgatgaagctgcagatgatttggaggaactcccaagcccagatctccttactcaagccgacatattggaaaaatattttggaattgagtatgatagcgacaaacagagaaggcatggttgtgatgttataatgctgaaggaccccaagaagagattaagccctgtagtctaccacctcccgttatttgtgggcttcaccgatggctggaaacatttggtgataacaaacgaccttcgggctgaagacgcctgcgagcttgttaaggggccagacgatg

SEQ ID NO: 552 - DNA, 816 bp, Zea mays
  Peptide Sequence Number=SeqID_43927
atgtcgatgccgccgcatccaaatccgctgctgccggcggcggaggagccattccacgtgttcgtggggtacgacccgcgggagcacgagctagcggtcttcgtcgactacgacttcctctacctcgtggacctggctgacctcctcgccatcgccggccgcattggcgtggctagcgtcaagcacgatgtgaggaatccagcattcctcgattgggaggtcaaagagcagctccagaacataaaatctgaaatagctgatgtgtctgctaatcctcaaggtctacttttagaggcccttcattcggttggatattctggggcactggcaaaacctttgatggcttcagaatctgctgtaaaccggttggatgttagcagcttggaggaatttgttgctgaacattacactgctcccaggatggttcttgcagcatcaggagttgatcatgatgcgctgatttcagttgtagaaccacttttgtctgaccttccgtgcgtgaaacgtcctgaagagccaaaatctgtgtacgtgggaggcgactatcgctgccaagcagattctcaaaacacacacatcgcacttgcttttgaggtgccaggtggttggaatcaagagaaaaccgcaatggttgtgagcttcagggatttcccccctgagggaaccatgcgggtgtgtgacagtacttgtcctgagatttctcaggcagtctcatctgtacttgagcgtgcggtgtatgccattgctcctggcggtgttaaaaaaacaatcacatgtgctgttgcatatgctaatctaatagtgcttcaaaggtag

SEQ ID NO: 553 - DNA, 441 bp, Zea mays
  Peptide Sequence Number=SeqID_43928
atggtggcagtttgtagggatgaaaacgggacgggtacccggaacgggtaccgggtacgggtatcaaaacaggatggattttcggatacggatacgggtgccttcgccgaccgccctccgccgaccgccctgcctgctgccaggtgcctgcgccgaccgccgtgcctgctgccaggtgcctctgccgaccgctgtgcttgctgccgtgcctgctgccaggtgccttcgccgatcaccgtgcttgctattgtgcctgctgccaggtgccttcgccgatcgccgtgcttgctgttgtgcctgctgccaagtgcctgctgccacggacgtgagaagcacagactgaccgagcagccaagcagcagagacagggcaagcagagcaactaagccaggtcaggtgcctccaccgagaagcagagctgcagatgttagaatattttga

SEQ ID NO: 554 - DNA, 1272 bp, Zea mays
  Peptide Sequence Number=SeqID_43929
atgcaggtgaagcagaaggtctacgagttctacaaaggcacggtggagcgggtcacggccccgcgcaccgtctccgcgttcctcgagaagggcgtcctctccgtccccgagttcattctcgccggcgacaacctcgtcgccaagtgccccacctggtcctgggaagcgggcgatccaagcaagaggaagccgtatctccccgccaataagcagttcctcgtcacccgtaatgtgccctgtttaagacgtgccatctcggttgaggaagagtatgatgcagcaggagcagaggtggttctcgatgaggatggcgaaggctggcttgcaacacatggagtgcaaggcacccttcttatagccctgctccaccacgctgaaaaacctggggcgtcatggtcagaagacaaaactatgcagtctggcacatcaaatcctcatccagtcctgccagtcgcagagctgaggggttcacggacaagacaatcatctactgcgagcaatgcgagcgagaatcatctgcagggccttgctgcgtcgtccagggcaagatccatccccactacagtagagggcgtatcactcagcaccctgcggcggtggcgatacatgtccacggtcacacgaatcacgagatggcagcatgaggaggaggacaccgcagatcacgggcagctgtgcgcggctttggacgtgctccacgagtgcttcgacgacatggtggagccccgcacgcagactgacctcgccgccgacatcgtcttcaaccaagagtcgggtctgcgccgcctcaacttccgcgggtactacgtggtgggcctggagaaagtcggcgagctcatcaccgtgggcacgctgcgggtgtttgggaaccaggtggcggagctgcctctggtgggcactcgcttcgcgcaccggcggcaggggatgtgccgcctcctcgtgacggagctagagaagatgctccgtcaggtgggcgtccgcaggctggtgctgcccgccgtgccggagctgctgcccatgtggaccgcctccctgggcttccacgccatgacccgctcggacgtgatggagatggccgtagagcacgccatccctgagcttcaagggaaccaccatgtgccaaaagactctgcttgcttagcttcatttttcgattgggatcagctggctcacgagatcaaggatggtgagaaaagagaagaagttgatgaggaatatgctaagaggatgcctgagacaagccaagttcaaaacgagtgtccatatatatag

SEQ ID NO: 555 - DNA, 588 bp, Zea mays
  Peptide Sequence Number=SeqID_43930
atggcgcctcctgtcgacgtggtcggtctgtgccctaggttgggcgaggtggaggctcctccgaggtcaaggtcgagtctgtcttccaaggtcgaggtcgagtccgagcccccgggtcggacgaggcggagaccgtcggctgaggccagggctgagtccgagccctggggtcgggcgaagcttccggggctgagcccgagtctgagccctggggtcgggcgaagcggagttcgtcgtcttccggggctgagcccaagtccgagccctagggtcgggcggagcggagttcgttgtcttccggggctgagcccgagtctgagccctggggtcgggcggagcggagttcgccgtcttccggggctaagcccgagtccgagccctggggtcgggcagagcggagttcgccgtcttccggggctgagcccgagtccgagccctggggtcgggcggagcggagttcgccgtcttccggggctgagcccgagtccgagccctggggtcgggcgaagcggagttcgtcgtcttccggggctgagcccgagtccgagccctggggtcgggcggagcggagtttcctatgacgcctga

SEQ ID NO: 556 - DNA, 681 bp, Zea mays
  Peptide Sequence Number=SeqID_43931
atgaagcagatgcccccgccacctaaggatttggagattgctatagtatcattgatccctttcatgtcatggtctattcaaaaggaaaatccacttctgagattaacagttgagaactgtgagttgtccagtattggtgtgattatacttctggactgcctcacaaatgcgaagcaactccttgatgtgctatctattgcagacaatcatctagggagtcctgtggcagctgcattggccagattcttgggttcacatgtacgagctttaaatgctacagatatcggcttgggaacagtaggcttccaaatacttgaggaaacattgccaacagaagtagctctttcccacatcaacatcagcgtcagcctcggctcagcccccgccatcgctgattcgctggccatcagagtcggcggccaggccatgtcgaggttctggaagccagggtcggagaagccgagcaccctactcgtcgacgacgaggagggcggagtcgtcttcctgccctcctccagctccgtctcctcctccggctttggttacgcgagtctagagagacagcggcaacggctgccggtgtacaagtaccgcaaagccattctctacctggtggagcggcacgccaccaccattgtcgtcggcgagactggcagcggcaagtccacgcagatccctcag

SEQ ID NO: 557 - DNA, 1002 bp, Zea mays
  Peptide Sequence Number=SeqID_43932
atgcagcccggccgcatcccctcaccggtggtcacccaagacgcttcaaggatgttcatcatcctggctggggcgggggccgggctgagccggagctcttccccccgtgcgggccggctggccacctcctcttccagcttctggcggtggaaaccatcctccggccctgcggaggaggcgtcctccagccatgccggggaaggcgaactgttgctgtccagcttggatgcaacattccgtccttctcctcactttcgtggcgaggacgggagtgaggacctgccggtgcgccttgccaactgtcggcgttggtggagaggcggacgccaccgtctgtgccgacgtggtggcagctggaggaagcttccccccgtcaaggccgtcggcgccgccgacggaccggccctcggctctttggctttaatgtctgactcgctagtcgactatctgaaccgcttcaccgagcgtgagtcgcctcgtgcaaaggtgacgagtgaggagtccctcggctcggtcggccttgctgtccgaggcttctctggcttagttaaaggaacccctcggccgctcttcgatgagccgaagccggaggtagcggtgtcagcacggacagaggtagagttggctcaaaaagaagacttggtcggccagagcctggacgggtcgtccactggcgggaccgacgccggagttgagttgccgaggccacaagccgggatgatgtcctcggggaacagctggccgaggcctcgggatgatcggccgagccgtctgctcgagccggattcctggagaagaccctcgcggcgatggcccgggtgtggtgctgatgtcgcccttcagagtggagatcctccaaccgcgtcgtcgtctgaggctaggtcgaacctcgccgaaggtgtagttgacgccgagggtgcttctgcccccccccccccttcaactgtcgacgtccgagcctgcaggatcgggttgtcttgtagcgatccactttcgaagtag

SEQ ID NO: 558 - DNA, 297 bp, Zea mays
  Peptide Sequence Number=SeqID_43933
atgggtgtcagatattcggggaggattgtctgtagcgggtttggacagctgatcgacttgcaaaaagaggtctgccccatccagttgcttgccctctgtgtgatcaggctgaggaaaccatccagcatattcttgtctcctatttggaagcaccgtaatgcttgtgtttttgagggggttgtgccctgcacccagcgagttcagagtgctgtgattgaggagggcaacgtctggtgtttggctggtgcatcagctctgcaggacctcctgctgcgccagctccctaggggaccttag

SEQ ID NO: 559 - DNA, 1962 bp, Zea mays
  Peptide Sequence Number=SeqID_43934
taccttaaggaggctggttgggctgacggtggtcggcttataggatgcactcagcccagacgactggctgttcagtatttcctattattgtatgcagatgtttctccttctcatttgcttcttatcattgcgttttcaactcatcttactattgaacagatggttgcatcaagagtagctgaagaagtaggtgtaaagcttggagaagaagttggttataccatccgattcgaagatcaaacaaacccgggtatgaccatgataaaatttctcacagatggggtattgattagagagatgatggaagatcctcttcttaccaagtatagtgtaattatggtggatgaagctcatgaaaggtccatctcaaccgacatgttgctgggtctcttaaaaaagccttgccaagtgaaaatgcgcattgcctatctaacttcccataccattgaaattcagaaagattttctcaataactgccatgtaactaatacccaatctgtggtagccatgatacatgcattagtgataaatctaagcatacttccatactggcgaaagaattctttgcttgggtcttctgataatttgcccagcccagaacctgctgtactttctgttgaaggtaaaggatacaccgtggaaatccattatgttgaagaacctgtctcagactacttacaggctactgtgaatactgtacttcttattcacgaaaaggcaagatttttcatgcaggaaccaccaggggatatcttggtattcttaactggtcaggatgacatagaagctgctgttaagttgttgaatgaagaaattcagcaccttggaagacactatttggttggtcagagggaggcaccagacttgtcacttgtatctgaccagcttcctccggccatcatgcgtggtttggaagatctcatttttgctcctacatcaaaagggaaaaggaaagttgtgttatcaaccaatattgctgagacatcgctgactctggagggtgtggtatatgttgttgatagtggattttccaagcagaaatgttataatccgatttcggacatagagagtttagttgtcgcaccaatatccaaggcatctgcaagacaacgagcaggcagagctggaagggtgcgacctgggaagtgctttaggatctatacagaggaatattatcttactgaaatgcagtcagaaggaattccagaaatgcaaaggtccaacctggtctcctgcataatacagttaaaagccctaggcatagacaacatcctgggctttgattggccagcttctccatctccagaggcaatgattcgggctcttgaagttctattctccctaggtatcctcgatgaagatgccaaattaacagtacccattggcttccaagttgctgagatccctctggacagtattcctttcagatccacctatgaggccatgttctatggagcgaagacgcttgaacctgcagatagaatatggaagtcctgggctcctggcccccgagcaaatatcgtttcttcgcatggatggttgagcacaataggtgttggacagcggacagctaaggaggaggctgtcttgttgtctttggctggagcaaaaggattgccttttatccaagctttggaccagccagcgaatgattttggatgctctgatgagatattgaccatagcatcatttctgtctgttcaatctgtatgggtttctgtgaggggagtgaagaaggaatttgatgaagcaaagcttcgatttgctgctgctgagggagatcatgtaacattcctgaatatctacaaaggatttcaccagtctggaaaatctagccaatggtgttacaagaactttttgaattaccaagcactgaagaaagttgtcgacattaggggacaacttctcaggatagtgaagagttttggtatacaactgaaatcatgtgacagagatatgcag

SEQ ID NO: 560 - DNA, 1426 bp, Zea mays
  Peptide Sequence Number=SeqID_43935
atggcatttgaaatgtatggtatgttagctggaaatgtcagtgccttgacgggtgaatatgtgaagccggcctatggtggtgagaaagaagcctttctgaagaaagttgttacaccgatttaccataccatagcaaaggtggaagctgaaaggagcaaaagagagaaagggaatcattctgagtggagaaactatgatgatcttaatgagtacttctggtctgctgactgctttcggcttggttggcctatgcgagctgatgctgacttcttttgtcagcctgatgaaagaaatgaaagcacaaggatcagcaaacagaagggaaaggtcaacttcgttgagctacgctcattttggcacatattcagaagttttgacagactctggagcttctttattttagctcttcaggttatgataattctcgcttgggacggaggttcactagccagtatttttgattatgctgttttcaagaagccgctgccgccggtgccacccaccggccgcccttcccctcctccaccccgagcccggccgcgcccgcgcccgctgccgtcatcaccggcctcgcaagccgccagatccctctgctccggccgcgccgacatcctctgccccagctgccacctccccatggcggccctcccctcgtcccccatcggcggcgacagccccagcgccaccgccgtggccgtgaccgccggccaggccatcgccccacccgccacaatgcccctgggcgcgcgcacagccgccacagggctaccagtgcaagccgtcgtcggtcgggcagagggcgctgctgccatgttcgcctcccttgctgtggtcggcctaacagccgaacgtcctctaccccacgacccccgcagcgagctcactgtgggcgccccctacatcgccgacctcaggcccctgcttgacgcccctcctccggccgtcatgccgccgctccggcgctgggcctccgtcggggccaccgtggctgcctcacaggagcgtcagcgcgccacgtccctcgctctagagcacgagcgtgccatgtgcgctgctctgaccgcccatatggccaccgcgcaacgtctcttcctcggccatcctccggtcgaccacgagacacccacgcccacacccgaggctgcccatggtctcgacgtcgaccacgtcaccactctccacgctcaggtcgtcggactccacaacatccggtcccttgtgtccattgtgttggacccggcgtcctcccactaccctcgttggcgggggcaggttctcacgctttggcaatatgctctcgccgaccacgtcctcgtcgacctggtcaacccaccacatcttgggggcccctccatgggggagtactgccgccagatgaaggtcctagcggactccctccgcgacctcggcgagccggtggtcgacc

SEQ ID NO: 561 - DNA, 480 bp, Zea mays
  Peptide Sequence Number=SeqID_43936
atgatgaacctcacaagcttgaagtctgaactttcaaggctccgacgtagaaatggaagaagaaaaagtatagcagaaagcatactgggtgacaagtatatgactactgaaacaacaaatagtggcaggtggtttcgaccatttccgaaccagcttttgataattctgatgattccagttggattttcccaggtgtatgcatatgtaactgatgttgagagtggaacgaaaatcgacgaagacactcaacggcagccccttggtgaagatgtcggtgaactgcagcgtggtggggacgctgagaacccgaacgtcaccgacagcgaccctctcacggataaagtgcagatcgatctccacgtgcttcgtgcgatgatgctgcacgagattggtggagaggtagaccgcgttgacgttatcgcagtagacgaggctggcgcgctggagggggctgtggagctcgtggagaagctggagtaa

SEQ ID NO: 562 - DNA, 402 bp, Zea mays
  Peptide Sequence Number=SeqID_43937
atggacgcagacgaccctgacagtaacgcgctcagggatgaagtgaaggtcgacctcgacatgcttcgtgcgctgatgcgggacagggttgacagagaggtagaaggcgctgacattgtcgcagtagaccagcgtgctcctagtgtgggaaatgtgaagctcctagagaagctgacgcaaccagctcgcctcagccatgccattagcaatagtccggtattcggcctcaacatgacagagacagatctattggacaacatgcatgatgttgggcctggtgaaggtgagatactgaagagtgtcgataaagttgcggtagacagtggggtcactcataggagcacagtcaccagagagcttggcatgcgtgtccaccggggtcaaacagggcttgcaatctag

SEQ ID NO: 563 - DNA, 309 bp, Zea mays
  Peptide Sequence Number=SeqID_43938
atggctaaagatagcaatggcaaagaccgagatctgagaaagaggcttgacaatgattattattttaagtgtgcaattgaggaatgttatgcatcatttaagaatatcatcaatggccttgtacagggtgaaccagagaaaagggtcataaataagatatttgtagaagttgaaaaatgcatctctgaggacaaagttattgcagatttgaacatgcgggccctgccagatctctacttcaagtttgttgagttgtctacgtgtgtgcccatatacgagtcagcacgggtgcccatatacgagcgttag

SEQ ID NO: 564 - DNA, 660 bp, Zea mays
  Peptide Sequence Number=SeqID_43939
atgagggccttggagatactaggccgcacaccgttgaacacacagtcattacggtggcgccaaatacaccaagcacctaacaccattaaggaattggaaccagctttaaaatcaccatgcaccatcccagccgctttgctccaccactcatcaaaattagattcatcattgccaggagagagggtcggcagccccaacttttgcagcaacaagaaccagaattgtcttgaaaagacgcatgatactaagaggtggtggatgggcaaaaaagcagggtgcgggaggccccttttggccaaacggtctgctgtccagcacctattgtgcatgaccagccataagaagccacacttggccggaacccagatctctgacccaagacatgtcatcaaaggcctccaccaccgtcctcttattagcgatcctaaatggaacaagagcgtgaacatgggaagccaaatcctccagtctctgccccatgagccatctgtctcgccaaaacagggtactacgaccatcacacacctcagggaccaccgcaatagagaacaaggactgcagcaagctgttacatacaaaggaagatcagcccaaggcttggaggagtctgtcttgttcagccagagccacctaactcgcaaggcccaattcaaacattga

SEQ ID NO: 565 - DNA, 348 bp, Zea mays
  Peptide Sequence Number=SeqID_43940
atggggtgcccaaacaaagcccaagaagactctttgaaagcaaccaagtccctgccgagcaaccttgcgaagcggatgaccaagtccctcccgagcaaccttgtgaggcggagcaggcgactaagttcatgtccatgtcgagcagccagtttttcagcagagactgttaagttgaacttccgtctagaactccaagctacaccaacccacaacttggacaatggactatgtcttgaattgcaagttttgcgtgaatgggtttcacttgaagtcatgaccagtacttggctaccagtagtccccttctcgggtggagcatatacgtcgtactccaaggtctcttcatga

SEQ ID NO: 566 - DNA, 399 bp, Zea mays
  Peptide Sequence Number=SeqID_43941
atggagagtcatgatctctgggcagaaagggaatcacgacttgtgggtggcaatgagaatgatggttttggcattggctatggtaatggtaagtggtattctttccgtttggaaagggttgtccgcattgcaaccactgctcaggagaagatgaagccgtggaaggagacttccaggagttccaagattacgacgagttctaggcatgggttagcggcaacccccagtcggctgcctgtgaaggccgcatgtcacttagaccctgcaaggatcactacacacttagggtctcttgccttgattacaagtcacttagagaacaagaatgaggaagaagaaaagcgatccaagagcaagagctcaaaagaacacgagcaaaactctctctctagtcattag

SEQ ID NO: 567 - DNA, 876 bp, Zea mays
  Peptide Sequence Number=SeqID_43942
atgcaggcggcatgcaaccgcaccaagggggcgcaccctttcgacttcggcgcatccagcatggggacccaggcccacacgtcatgtaaccggcgcgccggttactacgtgcgagaaactgcaccgccacttgcgccagtaccgcgccttctcgactgcggaaccggtgccgcgactcgaggcaaccctgcgcatggcccaacagtgccaaccgagcacatcagtcacgggtcagtcagccgcgggagaaggcgcgacggtcgatacgaccagaaatgggccgacagtaatggtggcggcaggcgggcggaagcagcagtcaagtcgtctgcaagctcacgtctcctcctgggacagcgagagaaccctctcccacggcgtgatgacgacgcgcccgagttccgttcctcgaacggctcgcgcacgcgcaacggctgccctgcgaaccactcgtcctgtcgcattaactctgcggcagggcaggcgacacctttggcaggtgaagcgggcgacgcttcaccttcgccatatgaccgcatcaaaaaagggaccgagaaaggggatactccgaaagggatccttatccgcgaaggaagcgggccccgagccctcttactgatcagaggttcgaaggctggcccctcggaagggttcgacagccgcctcagagcactcgggctccgcgcccactactggtcagaggttccaaggctggcccctcggaagggttcgacagccgcctcaggccactcgggctccgcacccactacttgtcaaaggttcgaaggctggcccctcagaagagttcgacagctgcctcaggccactcgggctccgcgcccactactgatcaggggttcgcaggctggcccctga

SEQ ID NO: 568 - DNA, 1149 bp, Zea mays
  Peptide Sequence Number=SeqID_43943
atggttgcactgttatcccgggtggtctctcaacgaaccagtccttacggagaggaccgcccgatctgggttgaacggcggagatcggatgggcggcctgggtcttccctacggctagctggggcggcggcgctcgtccccgcggcggagggctcgccggagacgaggggcacgggcgactggcggggctctggggcaatccgagtggtcggggaggtcggggagggcacggggactccattggtggggtttgggtcggggcagaggcaccggaggggggcggttcacggcggggcggctcggcggcggggttattctactccggcgagcaatcaaacgcaacagagagccaaacaaggggcgataggggcgggagaggtcccttacctcaaggcgggctccggggactcctcggcggcgacagagacgcgacggggacccgggtcgacggtggcggctgcacggcggacgacgggtgagcgcgggcagagagaaatagggagggggagagggaattggggcgcgttccgggttgcggacgtcggggcggagctcaccggggctaagggcgcggcggagctccaacggcgacgagaaaccgagctcgggacggcggggttaaggcggcggcgctctgcgtgcgcgcagcgagggggaaagagggtctactgggcgcaaatggggggagagggtgagggcgagtggggctcggggcacaagtggccgagggcgaggtggggcgagtcccacgcgcgacgtgggcgcggggaaggcgggcgcgagcagctcggcggcggttacgcggggacgacggggctgacaagccgggcccgcaacgcagagagagaagaaaacgggtgcgggcgcgagagaagcggggctgacgggttgggcccacgggcagagagagagcgagggatcgggcgcgcggggggaagcggcagcgccgacaggtggggccgggcgagcagtgagagagggaggcggcttttgtccgaagctgtttctccctgcaggaccttcggcgacgaagcatggtcccaacagcgaaaaaacaccttcccttctttcatgcttcgtaaagaagagtttttatgcttcgtgaaaaatcctccaatcgtcgcagaaacattaatgcttcgtcaataa

SEQ ID NO: 569 - DNA, 372 bp, Zea mays
  Peptide Sequence Number=SeqID_43944
atgggcgcaccggacagtccggtgcacaccggacatgtccggtgccccagccacgtcatcctatccgttgagattggagctggtcgaccgttggaggctttgtcctcatgtggcaccggacagtccggtgcctctctgatcctctgctctgacttctgccgcgtgtactgttcactgtcagagtcgaccgttggcgcgcagatgaccgttgctccgctggcacaccggacagtccggtgcacaccggacagtccggtgaattttagcggagcagccttcgtgaaatcccgaggctaccgagttcctgaggccgacctcccttggcgcaccggacactgtccggtgtacaccggacagtccggtgaattatag

SEQ ID NO: 570 - DNA, 516 bp, Zea mays
  Peptide Sequence Number=SeqID_43945
atggcgctcatcatgctcatcggcgacggcagcactatgtgccacgtcgtgcggcatcttgctcacaccccgacccccatcgctcctgtcgccatctcgggcattcctgttgtgccaaagccgcctatcgtgcccgtggccacccttccactgatgctcatcgtacctacgattcccgcggtgggcgtcgtgccacagatccatgtggtgtcgaacaccgctgtgctaccccctatgtcggctgtagtacccaccatcatgccaaaagtgatgttgtcgccaatgctcgtcattatggcgaaggttggcgccttgccgccaatgcccgtcgttgttcctaaggttggtgacttgccgtcgatgccctccatcccggtagtgtcggtctccattaggtcccatgaatgcgacacgaactcggtggacaggcctgtgaagatgctcgtggaatcagtgagccagaaacttagatgtacgtatgtgcatatcttggaggacgtaggtgagtcggagtag

SEQ ID NO: 571 - DNA, 396 bp, Zea mays
  Peptide Sequence Number=SeqID_43946
atgggcaagaacaacaagcgcaagcgtgagccgactcctccatcagaggacttcggtgactcggagtactcagaggaggagttctcctctgagtccgaggggtctccggctcccatccctctgcgtgagtcgtctgacgattcagacgactcccaggggcttgcggcggaggtctggacttacatccgggccgtcgagcgctccgggctcgagggctcggatgagtcggagtactcctcggacgaggaggacttgtccgaggaggacggtggcggtgatggcgaggacgacgacgacgatgacgacgacgaaggcgatggcggcggcagcggcggcagcaaggatggcgacggcggcggcggcagcggcaagggcagcaacaaggccagtggctaa

SEQ ID NO: 572 - DNA, 492 bp, Zea mays
  Peptide Sequence Number=SeqID_43947
atggccgccccgcgaaccactcgtcctgtcgcattaactctacggcgggacaagcggcagctttggcaggagaagcgggcgacgcttcgccttcgccacaatgaccgcgtcaaaaaagggaccgggaaaggggataccccgaaagggatcgttctccgcgaaggaaacgggcctcgagccccctttactgatcagaggttcaaaggctgcccctcggaggggttcaacagccgcctcagagcgctcgggctccacgcccactactggtcagagagggaggcatcgagccctcggaccccgtcaaaaggggaccgggtccggcagatcacccgcagaggctcgggggctgctctcgcaaacccggctccggccaaaccgttgacagcgtcaacataccagcccgagaacttgggacccgaccgtgcacccgggctacggccagctcgcatgagggaacaaccagaccagccgaagtgttgcgaaacacactaa

SEQ ID NO: 573 - DNA, 456 bp, Zea mays
  Peptide Sequence Number=SeqID_43948
atggcggctacggcggcagaagagcgtggagaactcgagggcgaaagggcgctgcgagtgatgacaatggctaccgcgctcggggggaatccctttttaaagaaagattcccccactgatgcccgagacgccacagaagatctcgcacgacgcgcgccaaggggcctaggcccacgagttatcctccctgggcgatggttcctaggtgcagagaagtcgaaccgatgctcacgccagtaccgcgtctcctcgaggccgcaacagaaggtagagagggtgaattttcaaaaccaatgcagcggtatcgaggcaccctgtgcgtggcccagcaaaaccatcaagtgcagaggccacgggtcagtcagccgcggggacaggcgtgacagttggcgtgaccgaagccagactggcataattatgtctgcaagcgcacagaagcagcgtgccaatcgctaa

SEQ ID NO: 574 - DNA, 630 bp, Zea mays
  Peptide Sequence Number=SeqID_43949
atggtgaccgctggcccaactgctgatactgaagacgccacccaggaggtcgtacaagatgtcgcggagatggcggttgcgcgcttccagcgcgaccctgctgatgtcgagctcgaggtgtcaaggctggatgccagtattcttaagaaggaattggtgacgtggcccccaagaggaccgacaggacttggcctggaagccaagccgtgttcccggacccctgaatcacagttccaaatactaggacacccatcgcagagtggtggaccgtgtaggcttacgaataaaaccatcacaaagcaaatctgggggggtgaatcctctctttataacttggtattcatgagcgtaaaccaacagatcgggtttatgagggtggaccttaccgggctggcgtacatatatgcgctacctagttacaaaggaagaaaactgaattccccagctttgcttttatgggaaaaacttacggaggtgctctatgttctagggattgggcataggctctccttcagctgtgacaaggcagacacacccaggtcggcacacttccgtcaccttgaagggtccttcccagctgggagagagtttatggatcccttcttggttcagtactcgcctcaggactag

SEQ ID NO: 575 - DNA, 171 bp, Zea mays
  Peptide Sequence Number=SeqID_43950
atgccgtcaatggggctcggtgtatgcggctcgctctgccaaggtggcaatgagactgatggttttggttatgactatggtgctggttgtcggcactgcaaccactgctcaggagaagatgaagccgtggagggagacttccaggagttccaagactacgacgagttctag

SEQ ID NO: 576 - DNA, 162 bp, Zea mays
  Peptide Sequence Number=SeqID_43951
atgggggggacgactcgcgcatggggatgtgagaccgaacagggagcggcgacacccccgggctccacccaatccaagtcaattgtggatcacaggccagattggcactataccgagcttttgggcatatcatttccaatgctccagtaccagcagttataa

SEQ ID NO: 577 - DNA, 651 bp, Zea mays
  Peptide Sequence Number=SeqID_43952
atgtccgtattagcatctaaatatatatgtgaaaatgggaaaaagaaaaggaaaaagaaaaagagaaagaattctccagctaactgggccaggggaggggatttcggcccactcggcgcggacgcgcttgcggcccagctggcccagctgcgagggagcgacggcgggggacggcgccgtagcgcaggcccaccagccagggagggagagggggctgacggcgttgacggcaacagaggggggaaaagggctcgaccggggccggtcggcggcgagctccacggcggttctccgccgccggtccggttcttcggcggggaagtggtggcgaggcacaggcgggtgaagtgggtcacgggggtggggttaattggaccgacgggggcctatggcggccggtccgcggcggcgaagtcgccggtgaggtttccggccataattgagtgggggaagtggcgtgtcgtgaacgtgagagtgtggcggagctcttggtgcaacttaattgaacagaagatcgccagagagggagaggggagctcaccggggcaaggtaggcagcacggcgactctagctcaattggcgcgggggaagccgaggaggtggtcggagctggtgtggtgaagatggggctcgggcgggtccttttatag

SEQ ID NO: 578 - DNA, 1014 bp, Zea mays
  Peptide Sequence Number=SeqID_43953
atgtcgcttccaacagagctcacatgcggacatgcaaatagactcgtggaggagagagaaaccgtggatttggggtacggggaggctgagcgtacatttctgtgtcctcatcaacgctctgctggaagggttgaggtggagaagcaggtcctggattccagagagaaattggagtattaccgcacaaagatgcaagatcttgtcctgtataaaagtcggtgcgagaataggctgaatgagattacagaaagggcgtcctctgataaacgcgaggtggaatcattggctaagaaatatgaagagaagtacaagcaagtagctgagttagcttccaaactagcagttgaagaagctgcatatcgtgatgttcaggagagaaaagttgagctgcatgatgcactgattaaaatggtacaaggtggaagtgttgatggtttacttcaggttcgagctgatcgaatccaatatcaattagaagagatggaaaaagctcttagtgaacggtgcaaacactttgaacttaaattcaaaccatctgcatcagttgagcttccttccggttgggaacctgggccacaagagggactcattgagtgggatgaagactgggataaatttgaagatgaagggtttagtattgttaaggataatggtacaatacaggaaaacccagtttctgctgaaaatggaaaagtgccatctctttgggatgatggtgatatgtctcctgttgcatcctctaatggtcatatcaaggaagaaaggcgttacagtggaggtgatcaagtggctgagagtgaaatagcatatgattttggtgatgaatctgtgaggagtcctggcagtgctggaagaagtgcctcagggagtccatttaaatcttccggctttggcatgcatgactcatctcccagcaaaagagaaagttacagtcgagctgtccacaagaatgacgagaaggccgagccgtcaagcaaaagagaagacagagagacgatgcgcccatctgtttga

SEQ ID NO: 579 - DNA, 3150 bp, Zea mays
  Peptide Sequence Number=SeqID_43954
atgctgcagtacctggacttctcgcacgccagcacctcaaggaagtgggcgcacaggagacagggcgacggacttgaagctccaaggaacagcatggagttcgctttggaggcttcccacagctatggcgtgtttcaggaagatgttccgcactatccctgcaatatgaggcagtacccaaaatcagggctcaaccacagctttaacccagtcaagaagctgatccaggaggacatctcgttccgaacgaatgaagtccagaagaggcccggcggcgtcatcgccagactgatgggcatggaatcgcctccactgaacgcagctactgaatccatcagtcgttcggagatcaccccgagaccaacaatgccaagaagagatcctcctgaaagggagacctcagccaagcatgtctccttcgtgcagcacggcaacagggactccaccaagcaggcgtcaaagcaggagatccgagcctatggcgaggagagggacgtgtttgggcagcagaacaagaggggcaacgagtggagtaagccgcagccgcgggagcacccgcaggaggaggagctgcagaagttcaagaaggagttcgaggcgtggcaggcgagcagggcgtgggagcactcgagaagcttcgagctggagagtagcaccctcggcgacgacgatgacgacggcaggtgcacggacatcgtgccgtacaggtaccagcaccaccaccaccaccaccacaaggggaaagatgccagccatggcggcaagcacatacgctcctccaacgaggacgtgcattgttggagaagaagcagcaaggagagcggcacgtccatctccgggagccgtacgttctctctgacgaccagcgcagacgccgccgcctgctccacgaggctgccgctctccaggttctaccacgaggaggagaggtcgctgtcgccgacgaggatcgtgatcctcaagccctgccccgagctgagcgcggacgacgtcgaggagtcctcgctcgggtcgccggagctggtgaagaaggagaacaacatggaggccttcctggaggaggtcaagaagaggctcaagatcgagctcgagggcggggtggcctccgacgacaaggcggaccgccgttggttcgccgccgcagccgccgccgacgttattccggccgacccgaagcagatcgcgcggagcatcgccaaccagatcagggagaacgtcacgagggacatgcacccggcgctgctgcggtcggagtccacgcgctcgtaccgcagcgacgtgccgttcgacgggcagggacagatggattacatcggccgagacgccaggaggcagctctccgacaggctcaagaacgtgctgaggagggacccgccggacgccgagacgcccttctcgttctcccaccggagaagggccacctcgacgtcgttcgacgaggagccaacgaggcccaagccgacgaggcacgaggtggcgccgccgtcgtcgaggaaggggaaggtcaggagcaaggaggaggagaagaagtgcgcggtggagtccgacgtccggtcgttcagatacggaccgagcaacaccccgacgacgacccagctggactccgagcccgtgtcgccgcgaaacctcatgaggaaggccacgggagcagcaggccagcgtcgtcggaggagaggaaaggggaggaaggacgcgttcagcatcagaggcaaggtgtccaacctgaggcagaactttgggctcagagccaagctgttcggcaagaagttccacgcctccgacgagccgttccccgacgacctcccgcccatcggcaccctcgtcaccgcaccatcggtcctcatacaccccggcgtcctgcaggagaactccaccgaggtaccaccgagcccggcgtcatggtgcagcagcccgcctgacgagatgagcaggggaggctacccaagccctgtctcgccattggaggcatcctttagcgagcaccggtctcccatgaggacggaagccaaagacatggcttcagctgcttctgaaccaggagaacaagcccatgctgaagaggggcgcgccgagacaagtcctgtcctggacgagcaggacgacggcgacatggacgatacagatcaccccatgaagtccttcgtcagagctgttctcgtcgtcgccggcatgtacgggcggaggcacaaccctggcaacgccaccatgtcagagtgcgaggtcaagcctatccccaagtgggtgctggaggaagtcgtgtccccgtcctcagccccggcgggcagcggcgcggcagccgtcatggaccaccggctcctcttcgacctcgtcaacgaggcgctgccgggagccgtccgggcctccacgacgctgtgcgcgttcgacaagtgccacgccatggcgccaaggagagcctccggtggcaaggcgctgctagaggcgctgtggaagtccatgcaggtgtggatagagccgccgagcgaccgcaggacggcgagctctgcctccgtggacgtgctgatcggccgtgacctgagcgtgtcggcgtggcacggcgcgttccgcgaggacgcggacgcgctggctggggacgtggaggcggagctgctggacgagctgctcgaagagacggtgtgggacgtgctcctcaatccggatgctttcaattggtcgaagacttttctgttgtcagatatccctccaaagttgcaggagcagggaatgaattccatcccttttgtggtccctaaggattgtccagttgatccctccctggaggatgccacttctgggatctccaaggattctgatggttatggtggaccgtctccaatcattgtggagtcagggctcagaagaagcaaacgattgaaggaaccacgtgctgggttcaggcatggggcctgcccaaaaaggaactgcctcatgtgccaacataacttcgatggcccacccccgctatcctccaaggtgctgcggaatctgggcaccaggctttgtaacctgtctgaggatgacctttctgagcagaggttgaagcaaaagaaattgactgtgggacctattgggccgcagagggttgacaggaaggacctgactgatgaaaaaactgatgattcatctgatgaggataaacaagacaaccactag

SEQ ID NO: 580 - DNA, 543 bp, Zea mays
  Peptide Sequence Number=SeqID_43955
atgatgaccgcgtcaaaaaagccacccccagagcactcgggctttaggctcattactgatcagaggttcgaaggctggcccctcggaagggttcgacagccgcctcagagcactcaggctccgtgcccactactgatcaggggttcgaaggctggcccctcggaagggttcgacagccgccccagagcacgcagagcgagggatgactctgggtacgtccgttacatggccgaggctcgggctacgctcccgagtcacttcgcccttccactgaccgacctgacaggaaaacagcgccgctcgccccgctccgactgttgtgccacccgccagagtggggctggcaacagccaagttcagcctcaggcgcaacaggaagctccgcctcgcccgaccctagggctcggcctcaacctcggcctcggaaggaggactccgcctcgcctgaccccaagactcggcctcagcctcgacctcggagggtggtctccgcctcgcccgaccccagggctcggcctcaacctcgacctcgggaggaatcac

SEQ ID NO: 581 - DNA, 96 bp, Zea mays
  Peptide Sequence Number=SeqID_43956
atggcgcagccgaccgttgcagatctgggagctgttggcgcaccggacatgtccggtgcacaccggacatggttccggtgcacaccggacagtccg

SEQ ID NO: 582 - DNA, 177 bp, Zea mays
  Peptide Sequence Number=SeqID_43957
atggtgatgaacctggacgtagcggtggacggggaggtgggggctggtggtggtggtgcggctgcagtggctgaagggctgggggtggtggttggggatcgccgacttcctgataccaggttgtcaagggcatcgggcccgaggggggtatataaggccataggccagggctactaa

SEQ ID NO: 583 - DNA, 564 bp, Zea mays
  Peptide Sequence Number=SeqID_43958
atggacggggcgcagctgacgctcgagcagagggcttccagagcacagcaggatggtaagagaggagggcagcggcgttggagaaggtccaagctatcaagcacagaagcaggaaaggtcacagagatacttctttctacaaacttttggaactcagtacaagattgtattcgtgcatcacaaccactcctcattgtgttgcgaattgttgatggtgatgaaaagccagccatgccagaggttgccgctgccatggatatggcaaaagcaaagatcacttcgggttttgaaggtagagaggcaatgaagaggaagttgcttgccattattaatcggaggtggcaagatcaaatggagttctttgaacttcaaaaaaatgatccaacaaaaagggagattggtaggctgagggcagcattcaatgaggtgctatggaagatggttgacgactatgaccttcaagctataatcagtaaacaagctgatgagtatatgagtatggctggccctgccttctcatcgccattagcaattagagaacaacaacaaaaagagccccagtaa

SEQ ID NO: 584 - DNA, 981 bp, Zea mays
  Peptide Sequence Number=SeqID_43959
atgagggcgctatctcacaggagttggtccgtgaaggtaatttgttcatattatttgtattgggttaagatcatgctagatataatggagaactcatcgctctgtgctgagactggaacttcgcaggaaggagtgggagtgaaaaatccagatgaatgttcattggaggaaccacaatccatgaatttgttgccagaaccggcactgtattctccagatgacttcgttaatgaacaagagaaccatagtccgtcagaaattgttgaattagtcaaaccatctgtattgacatttccttactcgccggaaaatactaatgacaaagaggagaaattgagtccacaatccgttcttgatcccattgcagaagttaccagtcctagacacaaaactccaaagcaagatgaattctccatgcctacttccagagtgctattcaaagaggttgacgccccttcagcatccccaactttgtggaatgggccacaggtagccattttggatgacagagccacaagggtgtccttcatcaaggccgtgctagaagcttcaggattgctgtctgaggaaaattcgcaaatttggtacacagaagagccactgcttgatgtatctgtattggctgaagtaggaaactcgtactgcctgacagacgatgcagtgctcttgtttgactacgtggaagaggttcttctcgagataagggacaagttctttggtagcgacccttgggttaattctctgaaacacaatgtacggccagctccagtaggaagacggctggttcgagaggtggctaagggaatcgattctcttgtaggtaaagaatttccacacactttagaacaggtaatgatgaaagacttggacagtgggtcgtggctggatcttggaggcgatactggaagtgttgtagttgagttgtgggatggtttacttgatgacttgctggaggaactggtttttgatttgtggctttga

SEQ ID NO: 585 - DNA, 450 bp, Zea mays
  Peptide Sequence Number=SeqID_43960
atgggcaagagcaagaaaggtggaagctcctcgcaccattccggcgacaaacggaagcgagagccgactcctccctcggaggacttcggcgattcagagtactcggaggaggagttctcctccaagtccgagggatcaccggtccctgcctctcccccggcatcgtctaatgatttagacgattcccaggggattgctgcagaagtgtggacctacatccgggccatcgagcgtgctgggctcgagggctcggatgagtcggaggtctcctcggacgaggaggactcctctgactcgtccgaggaggggagcgacggcgacgacgacggcgagggcgacggcgacgacgggggcgacagtgatggtgacggcagcatgggtgatggcaagggcgacggcggcaagggcagcggcaagggcggcagcggcagcggtagggccagtggctag

SEQ ID NO: 586 - DNA, 468 bp, Zea mays
  Peptide Sequence Number=SeqID_43961
atggcgtcaacagtagtccggacccccaaggttggtcctggacccctggatatacagtctggaccccaaggttggttccagacccccggatatacagtccagacctccgaggttgatcctggacctccacttgtgcaagccggacccctggaatgggatccggacccccgtcgacaaggtcgaagtgaccacggtcacttcgccctttcacttactgatctgacaggaaaacaacgccgcccgccccgctccggctgttgtgccaaccacccaggcatcggcctcggcctcgggaggagatctccgcctcgcccgaccccggagctcggcctcagcctcggcctcgggaagagtcacgtcctcacccgaccctgggcctcggccccagcctcggcctcggaggagccaccgcctcgcccgacctcgggctcagatcgaccgcgccataagggattgaaagggaaatag

SEQ ID NO: 587 - DNA, 393 bp, Zea mays
  Peptide Sequence Number=SeqID_43962
atggtccatatcgttgagctccacggcggggcctctgaggacttcctgatggaggaggaggctgcgttgtccatgccacgggcctccagccgccctgtgcctggtgctgctgctatgcacgctgtgcagcagccactcccgctcagtcatcctgggcgccgtcaagggctacacccggctgcgccgaccgacgacctgcgggcggagctcaactgcaggcgggcgggagaggacgcttcggtctctctggagaggcctgatgacctacgggcagaactcaatcgtaggcgtgcgggtgaggatgcccgagtctctctggagagggcgcgtgagcgccgacagaacatcgagggtcgcaacctcgaccaagacttcgctgcggtcgcgccgtag

SEQ ID NO: 588 - DNA, 573 bp, Zea mays
  Peptide Sequence Number=SeqID_43963
atggacgacggggatcgggtggctggcttcggccctcttctccggccagcagaggtggcggcgctcgcacccgcggcggggagctcgccgaagacaaggggtgcgggggctccgcgggtcttagggcgaccgggatggtctgggaggttggggaaggcgcgaggaacccaatggcgagggctaagtcgcgataggggcaccggagggtggtgggccacggcgagacggctcggcggcggcgccaaccgactccgacgagaaatcaagcacaacagagagcaagggagggaaaaggagagggcagtggaggttccttacctcaaggcgcaccctaggaacctctcggtggcggtgaaggcgcgacgatggctcgggtcaacggtggcggcaccgggactgcatggaggatggcggggtgttacagtcgacgatggcgatgtggccgccggagagcgggacctcgggtatcagtcacctgagggggtcctcaaggacgtcttcactggagactctgacaccggtggcgagagcgaccgtcgcagaagttgggtcccgaaagctgcttcacattag

SEQ ID NO: 589 - DNA, 141 bp, Zea mays
  Peptide Sequence Number=SeqID_43964
atgggcaagagcaagaaaggtggaagctcctcgcaccattccggcgacaaacggaagcgagagccgactcctccctcggaggacttcggcgattcagagtactcggaggaggagttctcctccaagtccgagggatcaccg

SEQ ID NO: 590 - DNA, 234 bp, Zea mays
  Peptide Sequence Number=SeqID_43965
atggcgtcaacagtagtccggacccccaaggttggtcctggacccctggatatacagtctggaccccaaggttggttccagacccccggatatacagtccagacctccgaggttgatcctggacctccacttgtgcaagccggacccctggaatgggatccggacccccgtatggggtccgggccgcccataggggttcccaaggccctaggacagaacatacccgggctttga

SEQ ID NO: 591 - DNA, 627 bp, Zea mays
  Peptide Sequence Number=SeqID_43966
atgaacgtatgtgagctcactcttgttgtctcacaccccccacaggtcaagaacagttcaacaaatttttttcaatgtagcaggcaatactttgatgatttgcttggtgatgaacctattgttgatacaagtgtcactactcagcaaacttatcctaccatcaacgccatacagatcaaggacttccttctgaccgtaaggaggaaggatgcccgatcagtgaagatcaagaggagcaaggatgttgtcaaattcaagttttacttcaagcctttgttgtctcactaccggaatccggccctttgccgagtgccggagtctttgccgagtgctttttatcgggcactcggcaaagaagactttgtcgagagccgcactcggcaaagtcctgcgctcggtaaagagcttatttaccgagtgcaggacactcggcacagcgaagcactcggcaaagacttctttgccgagcgtcaaacactcggcaaagacggctcttggcaaaggtcacttgaaacttggaaaaccgtgcatgcaaaaatgatatccatgctacttagcacaagttacgatcgatttcaagagcggaccggaaacttcgagcaccatgttcactcaacatggtcgtga

SEQ ID NO: 592 - DNA, 1776 bp, Zea mays
  Peptide Sequence Number=SeqID_43967
atggagcttgtatacatggaaaggagaaacggatcgtacgacgatggcgcggttccagagttcagtggaaggggggctggaggggatcaggatcaggacccgcccgctgctgcatccgaggtccagtctgactcgcgtcagacaccggacgagaagaagagcaagggctgccaatcatgccgtgacccattctgttcatgcagcggcggcacgccccactcggaactgttccccccacatcccgccaagatgatgatcctggagttcctcatcgcgagcctcaggcacccgacaagaacccacaacgtcagtgatctcgacgacctgatcgccgacggggtcagccaagggagcgtggtaaacctcggcccttctgagaagaaggtgctggaatctctgcacgccatggtaaacgccaagacgaggccgaagagcccgtcgccgttcatggcgggatctaagctgaggaaaatccggtccaagtcccacgtcataacgcagtcggaaatactgaagctcatctctcctgagacgtgggaagcctcctccttccctggggcgtctccgatgatcggcggaggcacggctgaggacggcgtccatgggaacaagccgccgccgccgtgctgctcgtctgtgagctcaaaccagcatgttctgtcacggtgcccgtcgtccctcagcgcatgccttctacagtgcatatggaaggatggcctgcctcattttgagctgtcactggacgatcatcccattgcggtgtacgctgcaagtccagtcagggtgctggagaaggacagggccttcgactacgtctacatgatccattcgggagagcaaggaagaaaagactggatgggccactcgagcaacgtgtccagacttgtgggcaaggtgaaggtgtcaagttctcttgttcttaacccagacaagtcaggtcttttggaaaccgagtttgttctgtatggttctccggacgactatcttaggcagatgcgcagtccctacagcgtgccgaaagggaagggccttgtcaggagggtgacagagatcatgagagcaggcaatgtttccgctagcccgagacatccctggaagctgggcaaatcttcctctcatcagttcgacgacttggctggagtacttgaaggtgaaatgatcagtgctggaggatcagacctggtgagtctcaaggccgacgatctgccgtccaaccaagaattagcagcgattgtggtgagggaacagcggcgcagacgacggaaagagcctgtttcgggtggctggggcctcaagttccttgagaaagcaggactgaatcgcccacaaggcactgaagaaactgatgttcagaacagtgatggtgccacacattgtgtaactgttgttgtccccagaggctaccacggcggcgtggtatcaaagagtagtcgcccgtcaggcctcgtcgagagatggagatctggaggacgctgtgactgcggcggatgggatcttggctgccccatcagagtgctcaacggtgatggatgtggctccttgcctgaaggagagtcacgggacagaaggtcggtagagatatcgatcaagggctggtctgatctttacaccagtactttgcagggtgcaaagaatgagacaatgttgaagctcgtgaatatcacggaggacttgtacatcctctacttcgactcgagtatttcaccattgcagtgcttctcaacagggatagcgattgtgcacagccgagcgccagagctttgccccaaactgtga

SEQ ID NO: 593 - DNA, 903 bp, Zea mays
  Peptide Sequence Number=SeqID_43968
atggaggtcattctgtgcattcgtgaggatatggacatcatagatcttgaggatgagacaatagatacaaagatattgaactcgatggctgttacaaatgaccatttcaagactgcgcttggaacaagcaacccatctgctctccgtgaaactgttgttgaagtcccaaatgtctcttgggaggatattggtgggctagagaatgtcaagggagagctccaggagaagatcacaagggtgggaataagttcctccaatcctacagttgaacctttgccttcaaattctctggggaatgctattgttgatggtatgtcacaaggaagtgctgaaatgaactgttcagatgatgatgttaataccgtttcacgaattccaactacaaataagcctcatgatgagtcaatggggaatgtcgcaatcagcaaggatgatatcaatactaataataacttaagcatagagctaaagaaagaacacgacagtgatctgcatcaagattgttcatctatgacaaataaggttactattgatgctattgatggtgacaagtgtattaaaactaaagttggtgttttcagccatgcaggtcagcaggggctccggaatgaggtttctgctagcgaaaactctaaagacaaacgatctttgaattctgagaagaatactccagtaaataatactgacaatagcatgcaagatgctaagactgctgcaggctccagtaccacagatctccagaagtcatcagctttgccaaaatctgcttctcctataatgcaacctactaagcaacctcataagactttagatagctgtcttgggaagactagaagcccagatataaagtcagagatgtctcaaaatggtatgcaagctgggagtagtgagaaccagtattaa

SEQ ID NO: 594 - DNA, 1215 bp, Zea mays
  Peptide Sequence Number=SeqID_43969
atgggctgcttccttggctgcttcgggggggccaaggagcgccgccgccgccgccgcaagcggtcgccgtcacagtcccccaacggccgtgcccgggccttgccgcgggttacgccgaacaaggttgatctggatggggaggccgtctccgccgccgcgccgctactagcgacgctcctcgagttgagggactccacggacgacatgtgcctggccctcgtgaagaagaaggtgacattcgaccccaacgtcaccacattcgaggcggccccgatcccggaggacgacggcgaggaagccgatccggaggatggtgggaatagcaaggagaaggggtggatgctggcgtcggagtgcgccaagtccgaggccttccccttgaaccacaggtacagcaagttcgccggcagcggcaacgtcagcgactacgaggacgccgaggaggacgaattcgaagacgaggaggaggaggaggacgactacgaggatgaggaaggggaagacgggctcgatgagtgtcggatcgacgacgatgacgaagacgagcacggcctcctcggcatcggacgcagcgaggaggatgcgtgcgagtcgctcttcctgtttccgtttggcaagatgtccagggattccggcggccaggtagcggcgcccgtcgcgcccccggcggaggcccccgcggtgctcggctccgtagagagcctgaacctcacccggtggaaggaacccaagcctcgcggtgccgccgcgcccaagtcctcggacaaggagaacgtcactgtggagcgggagaaccggatggacttcctcgccgaaccacccgcggtggcggccaagaggaaggaggaaccgaggccggcggtctcggacaacagctacacccccagcacgccgagcaaacaggaggcctccgtggacgccagcctctccacgtggctcggttcctcggcgacgcccgagagcaactcggtccggtcctactcgccgatcagccgggacgaacggccgatcctcggcgccctcaccgtggaggacatcaaggtatcgtccgccaactcaacgcctcggaggtcgaggtccccgagcccgagtcccgatgacatgccgatcctggggacggtgggggcttactggaactgcagtgccaaggagtctgatccggtcacgagaggagggtttatgaggaccagaaccagatttggccaggtcaggtga

SEQ ID NO: 595 - DNA, 288 bp, Zea mays
  Peptide Sequence Number=SeqID_43970
atgtgcgcagggggaagcggcatcgagtccggcaatccggtttgtcctcctcttggccccatcctcctcgccctcaccgccaccgtcggctcgtcgtctctctcccacaggaggacggcatcgtcgaatccggctgccgtgaactgccggtcgggccgcgcccagccgtggtcgagcaggtcgccaaggcgttcggtgccgtggtggtggtgggggggggggcccggagccaaggaggcggacatgggccttggccccccaaggcttgtccgcattaagcggctgtaa

SEQ ID NO: 596 - DNA, 633 bp, Zea mays
  Peptide Sequence Number=SeqID_43971
atgcaggcggcatgcaaccgcaccaagggggcgcaccctttcgacttcgacgcgtccagcatggaggcccggactcacacgtcatgtaaccggcgcaccggttactacgtgcaagaaactgcaccgccactcgcgccactaccgtgcctcctcgactgcggaaccagtaccgcgactcgaggcaaccctgcgcatgacccaacggtgccaaccgagcacatcggtcacgggtcagtcagccgcgggagaaggcgcgacggtcgatacagccagaaatgggtcggcagtaatggcggtggcaggcaggcggaagcagcggacaggcggcacctttggcagaagaagcaggcgacgcttcgcttccgccataatgaccgcatcaaaaaagggaccgggaaaggggataccccgaaagggatccttctccgcgaaggaaacgggccccgagcccccctactgatcagaggttcgaaggctggcccctccgaagggttcaacagccgcctcagagcactcgggctccgcacccactactggtcagaggttcgaaggctggcccctcggaagggttcaacagccgcctcaggccactcgggctccgcgcccactactgatcaggggttcgtaggctga

SEQ ID NO: 597 - DNA, 591 bp, Zea mays
  Peptide Sequence Number=SeqID_43972
atgaggaaaaaacacggctccgtgccaaaaatgcatacatgttcaggccccgacagccacaatgaacagacaccggcactcaaggtgccattacaaacggaactccggttccacctccgcaggtacgaacaaccccccacgattggagggcctgcggagcaacagaaggccgacggatggctcttcgccgcccgctccagcagcagtgacaacgacttctgctccgagcgaccgaacggcagcagcgatgacctcagggcggatgctgctgccataaggccctcgcccacgtccccactcgaggggcgaggacgagttgaaggccgtagagttggaggtcagtccgcgggcggcaccgactatctcgtcggcagagaaacctcttccggttgccgcggcggaaggtggcaccggaagcagcgccaaagccgctcggaccgaagagccggacacgcggcagctgctagcgccatgaacggtgaacgcccttcccccccgatctctgagggaaggagcgggccgctgcccgcgcggagaccgaccccaactcggcgcactcccctccccagcactgatgatgaacatccttga

SEQ ID NO: 598 - DNA, 582 bp, Zea mays
  Peptide Sequence Number=SeqID_43973
atggtggctagtgatctaccttcgctagctacactgtcagcggcttgggggcaagccgcatttcaagcgatggggaatgtcaacgatggtacacgggacatgactgagatggttcgacaacaggcaaagttacatcggtccgagccctgggtcgggcgaggcggaggctcctccgaggtcgaggttgagtctgtcttccgtggtcgaggtcgagtccgagccccgggtcgggcgaggcggagaccgtcggctgaggccagggctgagtccgagccctggggtcgggcgaggcggagttcgtcgtcttccggggccgaggccgagtccgagccctggggtcgggcgaggcggagttcatcgtcttccggggccgaggccgagtccgagccctggggtcgggcgaggcggagcttcctatggcgcccgaggctggacttggctgctgtcagcctcactctgtcgagtggcacagcagtcggagcggcgcaggcggcgctgtcctcttgtcaggccggtcagtggagcggcgaagtgactgcggtcactccggctctgtcaactggagggcgcgcgtcaggataa

SEQ ID NO: 599 - DNA, 2400 bp, Zea mays
  Peptide Sequence Number=SeqID_43974
atggcgccggacccgtgcgccgacctcgcggtgacgcccaagacgtcggccaaggacgaggcgtcctgctccgtggccccgcccacgccgcccaaggtcacccccgacgaggtccgcgcggtggcgcgcaagttcgcggaccagcctatccaggagacggaacccgacgtctgggccgtcctcaccgccatctccaagaaggcccgcctccggccccagcagatcagtgggaagcattgcaagatatacaaggacaccgtctcaggggagcggaaccgccatgagcctgtgcctgttttcttcaaggacacaagctcaaatggcacattcatcaactggaaaaagttcaagaaaaatgcatccccggtcaagcttaatcatggcgacattatatcattaccatcacctcctcatgacggcaaatcctttgtatttgtctaccgggaagttaatgcaatcagttgtgtagagaatggggttcccattcttaaaaggaagtcagaggagggtagttctggaagcaagaggcttaagggtcttggtattggttctcctgatggtcctgtttcactagacgatgtccgaagactagaaaaatctaatgctgatctcagggaacaacttgaggctcatgttgtgacaattgaaactttgagggctgaaataaaaacgacccaagtgcagcatggaaagaactctataaaagatctggatgaaaggcttggtgcatctaaacaatcacgcgcggatgctgatgagataatttcaagccagaaagcaatcatccgtgagcttgaggaacagctaagtgaggagcgcaacttaagaagagaagagcgtgataaggctgcacatgacttgaaatttgcagtgcataaagtgcaagccgaggctcaagaagaaattaagaaacaagcagagtcttaccttagacaacaaagagaacagaaagaagttattaacaagcttcaggaatcagaaaaagaaacacgtttgtttgtggaaactttgaggtccaagttggaagatgctcgagataatcttgtaacatctgagaaaaaagtaagagagctggaagctcagtttcaggacgagcagctagtatcagccaacaatcgaaagaaatcagaaaatctggaaactgaattgagaaaactgaagaaggaacttgagaatgagaaggctgctcgagaagaagcatgggcaaaggtctcagctcttgagcttgaaatagctgcaacgattagagatctatcaattgagaaacagagggagactcagctgcgtgctttctattcaactacagaagaaatctcttctctgtttgcgaagcagcaggaacagctgaaagctatgcagagaactttggaggatgaggagaactatgagagcaccttaatgagtgtggatctcaataaagagcatctagccattgataatgctggtatgaagccagtaaactgctcaaaaaatacactgggagcttcaattgcttcaccagaaaatactcaggtaagtgaacatagttccagtgacgaagatgccaacatgactgagcagcaagatgatgatgttactgccaatggtggcaacactcaagatctagaatgcaccagtccagaaaggtcagtggagaggaggccgggttttcatggcaatcctgttcctacagctcctgagagggaagtaacagatactgagcaagttcctgagacagaaagcgaagctggtaatgttggttgcgatgaccaaagatgtgacaatatcggaggagagactatgccgctagaggacgaagtgctgcttccagagaacgaggagcctactgcattgctcaaagatgcagggcagccacaatcaaatatggttcctattccaattctcgatgatggcggcggccactgttcagaagaaaaacacgagggtgcttgctctgagagcaaacgggatgacacacatgttggagctatcagaacgggtgatctgttggcctcagaagttgctggcagctgggcagtggaaacagctccatctgtcaatggggagaacgaatctccaaggagcttgggagatgctacagagcgagatgaagatggaggtagcgtggcagctgatgctttgctaactttggtgaactcagagggccaggcggctgggagccagaataatgttgagcaggccagttccaaaataaccgatgatcgccgtgttcttagtgccatgattgggattgttgatcctgaattcaggaagcaaatgtccaggagtggagctggaaacgaggagccgatgtctgacgctgagacggatgaaggcgtcgaggaaggtgattcagattcaggttcagatggcagcgacagcgacagcgaggaggctatggttgaggattctgttgggtag

SEQ ID NO: 600 - DNA, 159 bp, Zea mays
  Peptide Sequence Number=SeqID_43975
atggcgagagttgcgtgtaccctctgtggcaagaggttggacggtggtgtatctgtgctctcggtgaagaagcgacaaacttttgttgcttttgttcaaaggtggtacccaaagaaaagaaccaagactaaagctatgggagggaaggccctccgttaa

SEQ ID NO: 601 - DNA, 1344 bp, Zea mays
  Peptide Sequence Number=SeqID_43976
atgccatcctcttcttcttccgccgacgccacgccgccggccgccgcctcgtctgaggagacgttgagtaacgtgatggtggaggagttgcgcgccggcgactctgttgaatttggtgtgtcacggatgacatcagcccgtattgaagatatgcagcggttgggctactttggcggcggagtcgctcgtgctccggggacggaggaagtccccgagccggagggcgagttggttgtttttgaggcgttcttcgtcgccggactccgcttgcctgcgcaccgggtcttcgaattaaatcaactgtcgtacgacggctaccccggtcaagacgaagcggaccgccgtgggaagaaaccggcggtggagactggaggcgaccctgcgctggtggccgccgcctcctcgaaaaagagaaaattagtgatggacaaggatcgccaaggggcggcgcgaaaacgccaggcgactgtgagggttcacgaagcccggccgaaaaggcagcggggaacgacgaaggctgaggcctccggcggaggcaagccgccgctgccggcgaaggtgggcgcctctgcgcccggcaaggcgccggaggtgacggtgggcgccggaggccccaagctgacgaaggtggtgccgtctgtcagcggagtggcggaggctgcgaaggcggcccgaacgttaccgccgcccggcaaacgcgttgccgacttcggcaccgagattaatgtggaggactatcttggggggtcggacgagggcccgcttgctctagttgtgcctggcgcggcgatcgcgaaggctgcgccagcgccgaaggcggggggagagacccttggcgccggaggcgaggtgtctgccctcgcgctggtcagggatgaggcgggcgtggcgacccgccggctgaagggagcgacggaggcgttgagtcgagcgacggaggcgctgagtcaggtggctgacttcaccagccgcaccgcgtcgggggcccttacggcagctttgtctgccgaggtcgagagacttcggacgcaacatgctgacgctgtccgtgagaagtcggcctccgacagcaagtgccgcaaactggcggagaaggtggccgccctggagaaggagaaggctgacctccggcgccagctggcgggggagagaagggaggccaacgaagccgtcgccaaagagcaggctgctcaggcggaggccaggctggcgcagcggaaggcaatatcgccaaggagctcgccggagagctgcagcggcggcttactgccctggagagccgcgcggagggggccgaggccgcgatgcgagcggaggccgaacggacgcgcacgcagctcatga

SEQ ID NO: 602 - DNA, 873 bp, Zea mays
  Peptide Sequence Number=SeqID_43977
atgtcagcccagattgctctgcgagcgcaccagctattggatctccctgcgtttctgctagccatcggtgcagactctgaggtgcatctctcatatttgcctggacttcttactcttctgactaccagcggcagatatgttgaggagtgggtctgtgtgttctatgcgtcagtttggatcgacaccgatcaccagtggatgaggttccgctttgagcgagaggatgttactattcatgccagcgagactcgccttcacagtttgtgctacagtacctctgatcctcctcgtcgccctcacggcggagttgctccagctacaacccacgtcgcggccctgttccgaccgcccttctcagatgggtcgcgacgctctacgacagatttcactacagtggccaagtatatatatcagctcatgagacagacgctactgcctcggatgggttataaggaggccaccactcatatccagctttggctacttggtgccctgatctctcactccaagtatgatgttgttgacttccttatatcccatgaggacccagtgtcggtacctgatccagtgatcgacacgcaggcagaggatacaactttccatcagttcgagaatcagggcacagcagttcctgatgatgatgatgatggcgatgatgatgatgatgattttgggattccgcctccgcctcctgtgcctccatgctcccatgatcatgaggccgggagttcccgtgctgtctatgctgccccttgtgcggttgaccctgctctggctgtgatccttcaggctcttacacagcagcaagctcttatggcatccgagcaggctcgactggcatccgagcaggctcgtcaggcagcggtccagtag

SEQ ID NO: 603 - DNA, 1644 bp, Zea mays
  Peptide Sequence Number=SeqID_43978
atggcgttccgccgcatcttatccacagcggtgcgccgccgctcggccatcgccgcggcagcggccgggaacgcgcgcgaggcctccacggccgtcgccgcggcgcccggcgtgctagcccccgacgcgaccccggtgcgcgctcccgtgatgccgtacgatcgcatcgccgaagccgttaacgccaggctccggcggcttgagcacccagacccgcgcttcctccgctatgcaagccccgtgccgtcccacgccgaccacacggccatccttgcggcgccggagacccgggtcaccacgctgcccaacggcctgcgcgtggccacggagtcgtccctcgccgcgcgcacggctacggtgggtgtgtggatcgatgcgggcagcaggtacgagaacgaggaggcggccggcgtcgcgcattttgtcgagcacatgctgttcaagggcacagggaagcgtagcgccgcgcagctggagcaggagattgaggacatgggtggccacctcaacgcttacacgtcgcgggagcagacgacctactacgccaaggtgcttgacaaggacgtgccccgtgcgatggaggtcctcgcggacatcctgcagaactccaatctcgaccaggcccgcattgaacgtgagcgcgaagtgatcctacgagagatggaggaggttgagggacagtctgaagaagttatatttgatcatctccatgcaactgcattccaatatacatcccttggcagaccaatcttgggttctgcagataacgtcaagtcaatcaccaaagaggacctcgagaactacattgcaactcattatacagcttctagaatggttatcacagctgcaggcaatgttaaacatgaagacattgttgagcaggcaaagaagttgttcagcaagctatcaactgaccctacaacaacaaacatgttggtctctaagcagccagcctctttcactggttctgaggttcgaatcattgatgatgacatgcccctcgctcaatttgctgttgctttcaatggagcatcatgggtggatcctgattctgttgcactgatggttatgcaaacaatgcttggttcatggaacaagagtgctggtggaggaaagcacatgggttcagagcttgtgcagagggcagcaatcaatgacatcgctgagagtgtaatgggattcaatacgaattacaaggacactggtctttttggtgtctatgctgttgctaagctgaagggcgggcctggtgcagcggtagagcctaccgtctgtaaccggaaggctgattgcttggatgatttggcttttgcaattatgcatgagatgagcaaattgtcataccgggttacggaagaagatgttatccgtgcacgtaatcagctgaagtcctctatccaactccaccttgatggttcaactgctgttgttgaggacattggccgtcagctgctgacctatggacgaagaattcctacccccgagctttttgcaagaatagatgctgttgatgcaagcactgtgaagcgtgttgcaaaccgcttcatctttgatcaggatgttgctattgctgcgatggggccgatccaaggacttccagactacaactggttcagacgccggacctacatgctccgttactag

SEQ ID NO: 604 - DNA, 735 bp, Zea mays
  Peptide Sequence Number=SeqID_43979
atgtctcctcgctcccttatgcatcgcgtctttccaccttccaagcccccggatggggggtacccgctgtcttttcgcctcatcgttggaggaacgcaactccgtgggagttggtacctttcagccatcgttcggcttcaaggattttcatcatgcagcccggctgtatccccccgtcggtggtcacccaagacggtgaccaccagttcctgggtggggagaagcaagccgggctgcgatcttggtcccaccctcagcttcaaggatgttcatcatcctcgctggggtgggggccgggctgagccggcgctcttgaaagggaaatgtgcctttgggccatttctaagtattttggtgattgagtgcaaacacaagtgcttaaatgtgaaaatgtgcccatggttgaacaaagtgcaaatcacaagtaaaggaagaagaagaaaagaaatggagagtggctgtgtacagccaaaggctgtttcgggcttgggcaccggactgtccggtgtgcaccggacagtgtccggtgcgccagaccagcgcggagcaaaccagccgctctcgggtttttctccggcgacttcggctaaaattcaccggactgtccggtgtgcaccggactgtccgggcgagagactccaatttgtggagattcctcgcaaacgggaaaagagaaaagaaaagaagaacaccgtggtattcaagttgatcattggatcacttgagaggagttga

SEQ ID NO: 605 - DNA, 186 bp, Zea mays
  Peptide Sequence Number=SeqID_43980
atggacgagtctggtatgcctcctgggactagtaattgtatcacatttgagtcccagaggattggggacgcttcaaccacggaagacagcctcgacctcgacctcggaggagcctccgcctcgcccgacccagggctcggaccgaccacatcacaggggggccatcattaccctacccctagctag

SEQ ID NO: 606 - DNA, 954 bp, Zea mays
  Peptide Sequence Number=SeqID_43981
atgttgttcttccgccacgtggggaagacgtcgtcgattccgccgccggcgggcgggttgtcggccgccattgtcgctgtcgcgcgacggaggaaggagtatcatgtcgtagctgtcgtcgagggacatgaactcaagactcctgaaacggagcaccgtcccgggctggaaaggttgctggagactacccatctggagcttgacgagaagctattcgtcaacacgcagcaggcccctacctggcgcgccaactgtcggtgtttcgaccccggggggtccctggaccgacgagtaaattgtcgccgcgtgccccagcctagatgggtcagcgcgagacggagcgcaaagggggggggaaaccagagggagacaggcataaaaggggaaacccgcggccttcgtgtttgtcccgcgcccaggtcggccctgggtcggggcgaggtcgagtctgtcttccgtggtcgaggtcgagtccgagccccgggtcgggcgaggcggagaccgtcggctgaggccagggatgagtccgagccctggggtcgggcgaggcggagttcgtcgtcttccggggccgaggccgagtccgagccctggggtcgggcgaggcggagttcgtcgtcttccagggccgaggccgagtccgagccctggggtcgggcgaggcggaattcgtcgtcttccggggccgaggccgagtccgagccctggggtcgggcgaggcggagttcgtcgtcttccggggccgaggccgagtccgagccctggggtcgggtgaggcggagcttcctatggcgcccgaggccggacttggctgctatcagcctcactctgtcgagtggcacagcagtcggagcggcgcaggcggcgatgtcctctcgtcaggccggtcagtggagcggcgaagtgactgcggtcacttcggctctgtcgactggagggcgcgcgtcaggataa

SEQ ID NO: 607 - DNA, 1518 bp, Zea mays
  Peptide Sequence Number=SeqID_43982
atggctggcggcttcagggtactgcatctggtcaggccttttcttgctttcttgccagaggtgcagagcgcggataggaagataccgttcagagaaaaagttatctacactgttatttccctcttcattttcctggtctgcagccagctcccactctatggcattcattcaacaactggagctgatcctttctactggatgcgtgttatcctcgcatcaaaccgtggcactgtgatggagttgggtattactccaattgtgacatctgggatggtaatgcaacttcttgttggatcgaagatcattgaagttgacaacagtgtgagagaggatcgtgctctgctgaatggtgcacaaaagttgcttggtatcctgattgctattggggaagctgtggcatatgtcctgtctggaatgtatggcagtgtaagccaacttggaacagggaatgctatcctcattatacttcagcttttctttgctggcatcattgtcatctgtctggatgaacttctccagaaaggttatggcttgggatctggcatttctctgttcattgctaccaatatctgcgagaatatcatctggaaggcatttagccccacaaccatcaacagtggtcgtggtgctgaatttgaaggggctgtcattgcactgtttcatctgttgattacgagaaccgataaagtccgtgctcttcgtgaggctttctaccgccagaaccttccaaatgtgaccaatttgcttgccacagtcttggtcttcctcatagttatctatttccaaggcttccgtgttgtccttccagtgagatcaaagaatgctcgtggccagcaaggctcatatccaattaagctattctacacttcaaacatgcccatcattctgcactctgcactgattaccaacctctatttcatatcccagcttctctacaggaagtacagtggaaacttccttgttaaccttcttgggatgtggaaggagtctgaatactctggccattctgttcctgttggtggtcttgcttactatgtaactgccccatcaagtttggctgatgtccttgcaaatccattccatgcactgttttatgtggtcttcatgctgtcagcttgcgctctgttctcaaaaacgtggattgaagtttctggttcatcagcaaaggatgttgctaagcagctcaagcgtaaagtgctgcgaagctgctgttacagccagcagctacagtactctgtgaggacgccaaacaggcccaaattcatcttccatgctaaggaacaacaaatggtgatgccaggacatcgtgagtcaaacttgcagaaggaactgaaccgatacatccccactgctgctgcatttggtggagtatgcatcggcgcattgactgtcctggctgatttcatgggtgcaattggttcaggaactggaatactgctggctgtgacaatcatataccaatactttgaaaccttcgagaaggaaagggcaacggagcttggtttctttggtttttga

SEQ ID NO: 608 - DNA, 312 bp, Zea mays
  Peptide Sequence Number=SeqID_43983
atgaacaaaaacactggcattcaaagtgccattacaaacggaactccggttccccctccgcgggtacgaacaaccccactcgacaggggtgggcctgcggagcaacagaagactgacgggcggctcgccgccgcccgctctgactacgacaacaacgacccccgccccgggcgacgaagcagcttcagcagcggcttcggggcaggtgttacgacagaaggactctcacccgctgaggacgagaaccagccattcaggcagggagacggagacccagggccactggcgccctacctatcccggcatggctag

SEQ ID NO: 609 - DNA, 1237 bp, Zea mays
  Peptide Sequence Number=SeqID_43984
atgggggggcctgcggagcaacagaagaccgacgaacggcacgccgtcgcccgctccagcagcggcgacgacgacaacttctgctccagggggccgaacagcgacagcgatgacctcagggcggatgctgctgccaggaggcccccgcccatgcccaaactcgtgaggcaaggacgggcagaaggccgtagagttggaggtcggtccgtgggtggccctggctatctcgtcggcgaaagaacctcttccagctgccgtggcagacgccggcgccgggagcggctccggagccactcgcgtccgagagccaggcacgcgacagctgccggtgccacggacaacaaccgcccttccccccgatcactgagggaaggagcgggccgccgcccacgcaggggccggccccaactcggcacactcccctcagccctgccgtcgcgggctgagtcttctccaacacgttccaaggccctcctcctacggcgcgggggctgggtcccacgcgtcatgcaagccagctcagagcagaagaagccaaaccaccgtgcgcggtgcgtgcaaccgcccagcggttacaagcgactctccacttttgcccagaccagcgggcgaaagggcgggcagccatgcaggcggcatgcaaccgcgccaagtgggcgcacttctccgactcccaacacgcccggcatggaggcccaggcccacgcgtcatgcaaccggcgcgccgaatgcttcgtgcatgcaactgcaccgccacttgcgccaccaccgcgcctcctcgactgcggaaccaatgccgcgactcgaggcgacccagcgcatgacccagcagcgccagcctggcgcgacggtcaatgcggccaaaaatgggccggcagtaatgacggtggcaggcgggcaggagcagcggtcacgtcgtcagccaagctcacgagaagcgagcgacgcttcgccttcgccataatgaccgcgtcagaaaagggaccgggaaagggggataccccgaaaaggatctttccccgtgaaggaaccatgctccgagcctccctactgatcagaggttcgaaggctggcccctcgaaagggttcgacagccgcctcagatcacgtgggccctacacccactactggtcagaggttcgaaggacggcccctcggaagggttcaacgaccgcctcaggctactcgggctccgcgcccactactgatcaggggttcgaaggctggcccccgaagg

SEQ ID NO: 610 - DNA, 333 bp, Zea mays
  Peptide Sequence Number=SeqID_43985
atggacgggaaacacacgctacaagacaatccgatcctgcaggcttgggtcttgacgctggaagggagcagcagcaccctcggcatcgacaacaccttcggcgaggaatccggcccgagcaggcggctcggccggtcagcccggggcctcggccagctgtcctccaaggatgtcagcccgacccgaggcctcggctggtcaattccggcgtcggtcccgctaacggacgacccggccaggctccggccaaccagattttcttttcgagccaactctgcctctgttcatgatgacaccgctacccctggcctcggctcatcggagagcggctga

SEQ ID NO: 611 - DNA, 602 bp, Zea mays
  Peptide Sequence Number=SeqID_43986
ctctacctctcgcgcgggttcgtgggtcaccctctcccgcggcgttcgggggagagggcgctcacaggccctacgggcggcccggacttcgacaacgcggggccggtcgacggcgggcgtcgtcacctccagcgtgtcgggctcgtcggcttggctcccggtggcccctcccgtcggagggcggctgccgcgccgtgtgcacgggagggccacccaagatgtcgcgcgccgccagggcggcgttcgtgttctggggtggtcctgcctttgcaccgggatggcgccctcgcgcggaggtcggtgccccactcgcccgggaggatttgagtggggatctgccgggggggctgatggcccctgccatcggtgtcgaggcggaggcggctcgagaagtccccgtcaccgacgggaagatggttggccgaggcccctggggtaaccggccgagccgcctgctcgggccggattcccggagaagtccctggaccgcgtcgccgtccgaggctgggtcggacctcgctgaaggtgtcgtcgatgccgagggtgctacagcccccttccagtgtgaagacccgagcctgcaggatcagattgtcttgtag

SEQ ID NO: 612 - DNA, 1065 bp, Zea mays
  Peptide Sequence Number=SeqID_43987
atggggggtacccgccatctttccgtctcctcgttggaggaacgcaactccgtgggagttggtacctttcagccatcgttcggcttcaaggattttcatcagccggcccggctgcacccccacgccggtggtcacccaagatggctgagccggcgctctacctcccgcgcgggtctgcaggtcaccctctcccgcggcgttcgagggaggaggcgctcactgccctgcgggcggcgcggacttggacaacgtggggctgatcgacggcgggcgtcgtcacctccagcgtgtcggagtcgtcggcttggctcccggcggcccctcctgccggggggcggctgccgcgccgtgagcacgggaggaccacccacgatgccgcgcgctgctagggcggcgttcgtgttctggggtggccctgcttttgcacctggatggcgcccttcggcagaggccggcgccccactcgtctgggaggatttgagtggggatctgccggggggccggcggcccccgctatcagcgccgaggcggaggcggcccgagaagtccccgtcgccgacgggatcactgccaccatccacgccctgggcctccggttcttcgtacttgtcctcgcccctcgagcgtcggcgtgggcgagggcaagattgcagcagtgcccaccctgaggcctgcactgtcgtggctcggccatctgggaccccttggccgctcttcgatgagccgaggccaggggtagcgatatcagtacgaacagaggcggagttggctcgaaaatgggaacctggttggccggagcctagccaggttgcccgtcagcgggggtcgacgtcggagtcgatcagccgaggcctcgggtcgggctggcgcccttggaagaggcttggccgaggccccaggggtaaccggccgagccgcctgctcgggccggattcccagagaagtccctggaccgcgtcgtcgtccgaggctgggtcggacctcgctgaaggcgtcgtcgatgccgagggtgctaccccccttcagcgtgaagacccgagcctgcaggatcagatcgtcttgtag

SEQ ID NO: 613 - DNA, 447 bp, Zea mays
  Peptide Sequence Number=SeqID_43988
atggagaaatggattatgggaaggtcggagcccgtcgagcgcaaacgtgacttcgtccacgctctccatcatctctccgtactcttccgcctccatcagcgttgccgtcggcgctaccgcgggggccgcggaggggatggaggtgggtcctcgtcgaagtcccacatcgaagaggactcctgcgacgggagcgggagcgactgcgaggccgacgacaccagcaagtcggcggcagcgtcgcagtcgaacgtggctgcgagggcgtgcgagacggttagcatgacacagtttggccaacatgtcacctcttttcacgtggaacacaaaacaggggtggaaacagagctttcaatgcatgctggaggtgcacgacgtgatcaatattatccatgcttgataaatgatgacaatggtgatgaccatgatatatggtcaatattgtattga

SEQ ID NO: 614 - DNA, 528 bp, Zea mays
  Peptide Sequence Number=SeqID_43989
atggctgctactcgaagggtgaacccctttttaaaggcagatttccccgctcgcgccccgaagcgtcacaggcaaggtctcccccgatgcgcaccagggttcccatcctatgacatgagggtcaggccccacatgtcatacaagctgacccgaagcgcgaagaaggcgaatcgtcgcacagggagcgtgcaaccgccccgcggttatacgcccttccatcttcgccgcaaccagcagtcaaaaaggcgaaccgctgcacagggagtgtgcaaccgccctgcggttattcgcccttccatcttcaccataaccagcggtcaaggaggcgaaacgctgcacaaagagcatgcaaccgccccgcggttatgtgcccactcggcttcgaccgatggtccaacctctggcatgggggcccaggcccacatgacatgcactcggcgcaccagtttctgggtgcagaaaagtcgcaccgccactcgcgccaataccgcgcctcctcgaggccgtcgcagaaggctgagaagataa

SEQ ID NO: 615 - DNA, 423 bp, Zea mays
  Peptide Sequence Number=SeqID_43990
atgggcaagagcaagaaaggcggaagttcgtcacaccactctggcgacaagcggaagcgcgagcagagccctccctcggaggacttcggcgattccgagtactcggaggaggagttttcctcagagtccgaggagtcgccggggatcaccgccgaggtgtggacatacatccgggccatcgagcgctccgggctcgagggctcggatgagtcggaggtctcctcggacgaggagaactcctctgacttgtccgaggaggagagcggtggtgatggcgacgacgagggcgacggcaacgacggaggcgatggtgatggtgacggcgacggcggcaagggcgacggcaagggcgacggcgacggtggcgacggcaagagcggcagcggcagcagcaaggctagtggcaaagtgccactggcttaa

SEQ ID NO: 616 - DNA, 830 bp, Zea mays
  Peptide Sequence Number=SeqID_43991
atggagagggcgtacgaggggaggggtcgctcgcgcgggtgcaggcaggggcacgactccatggagagggcgaacgcggagatagccggacgcggcgatccggggcggaggatgtgctgtggactggagtggactggactgtgctatggcaggttcaaccggggtccagggcaagttcaaccggggtccagagaggttcaaccggtgtccagggaaagttcagccgggactgactgccagtctgacccccaggcggttgaactggccctaggggcggttcaaccggtgtcaggacctgtttttccagtctgcggcaaagggaggattagggttgaaagagacccgtctctttgtgggcgcctcaacgaggaagtagggcaccttggtgatgttgatcctagggcaatagatcttgccatgagaatcgccgaaaggatgttcctcaaaatgaaggaagatgaggcaaagaacaaaattgaagaaaatgatcgatggagaccaaacgacgaatccacctcttcacaaggttcgtctttcaaatccacttcttatatgtgctttattgctaatgggagtgacagtgaaagcgaaagtgaggatgaggaggagcaagaaagtgatagtgaagatgaggatgatcttcaacaattcttcgctcagctaagcaagaaacatcggatgagcttgctcaaactcatgaaaagagcggaagaacaaaaagaaatgcttcataagcaagaagacttcctcatcagaaaaatcgaagacttagagaagttgaccaaagagcatgagaagctaaagtgctcttatgatgatttggtccaaag

SEQ ID NO: 617 - DNA, 496 bp, Zea mays
  Peptide Sequence Number=SeqID_43992
gtgtcaaaggttcatctacaactatactaaatcgactgtccggaataccatagattattccggacaggagaagctttttggaaaaacagaccaagcgcggaccatccgggcccttgcggcggaccgtccacgacaccaggatacccctcggacagaaccaatgcaaaaatccaagtctgcactatggaccgtctggaggaaaagcgcggacagtctgagccctcgcgcggaccgtccggcctcaggcgcggaccgtccgccgttgatctacaggggcggaccgtccggacctggctcgcggaccatccgcgctcagcagaatggagcaacggctaggaagtggttggtggctataaatacaaccccaaccacctccattcactacacccaagcattccaaccttcaacattcaatacaagagctagcaatccattccaagacacattcaaagcctccatctctccaagtttcacaattgagaaaagagatcattag

SEQ ID NO: 618 - DNA, 381 bp, Zea mays
  Peptide Sequence Number=SeqID_43993
atggaggtgggtcctcgtcgaagtcccacatcgaagaggactcctgcgacgggagcgggagcgactgcgaggccgacgacaccagcaagtcggcggcagcgtcgcagtcgaacgtggctgcgagggcgtgcgagacggtgggatgcgcggggaatgcgttgcggcggacaggcgggcgtgcggaggtttcacgcggccgggcgtgcggttagcatgacacagtttggccaacatgtcacctcttttcacgtggaacacaaaacaggggtggaaacagagctttcaatgcatgctggaggtgcacgacgtgatcaatattatccatgcttgataaatgatgacaatggtgatgaccatgatatatggtcaatattgtattga

SEQ ID NO: 619 - DNA, 159 bp, Zea mays
  Peptide Sequence Number=SeqID_43994
atgattatggaggccattgagtacaaagttgtcttgaagatatatgttgaggaacaacttgagccttcaccagatgatgaagagtggacaaactctaaggtgattggagagtttcttggggcatttgaggaaggatttggcactagcaatggattctag

SEQ ID NO: 620 - DNA, 234 bp, Zea mays
  Peptide Sequence Number=SeqID_43995
atgggcccaaggccttccgcgagtacgctcgtccagtcgtcgcttctgagctttgatcggtcagcttatgctttagagatcagcacttcgtttttggaggttgaagattcattgggtgcaccagaaatcaacatttcatcatcagttcatgcttttgagatcagcattatgtcttctgggattaatgattcattgggtgcaccacacccaatgggtgtagcccccgagctttga

SEQ ID NO: 621 - DNA, 477 bp, Zea mays
  Peptide Sequence Number=SeqID_43996
atggcctgggctgcctcgctggctgaaagtgcacctcaagccaaatatacatgtctttttgtcaatgatgttaaagatgacctgtctcaaattggatttgatgtcgaatcaattcagaaaatggttgctggattggagggaaagatcgagttacttgagaacaaacaggacgtggctaatactggtatctggtatctctgccaagtagcaggcggtttaaaagatggaataaacaccaggtttttccaggaaaccagtgagaagctgaagctctcacattcagctcaacctgaaaacaagccagtgaaggggcttgaatttttttcggaaagcaccatggaacagaaagtagctgactccaaaccaattgcggtgacagtcgacgctgagaagcctgagaaaaccgctgctgtaatgggcaccacagtgcacaggtctatcaggttctcatatcggaaggcaggccttgctttgtga

SEQ ID NO: 622 - DNA, 781 bp, Zea mays
  Peptide Sequence Number=SeqID_43997
atgaattcacccacccccgccagtggaggagactctcatttcagttctgacttcctttctcgcgatggctttccttccatcttgtgggaagtgcttaactccgccggttaccctacgccccctttgtacacggtgcagttgtatgaggagcatcgggtacctcgttgtcgggtctggctaactttggaggctcatccccttcagccgggttggcgttctcttgactctgagacgattggactcaggacgaacgacaccgttgaggcagtggccatgaagactctgacgactttctgtggctaccatcccctggagatggtgatgcaccccatgggactcttccctgctgagaagaaggatgatcccatgtggtgtaaccgcgcccttcagagcgatgctatgacacttcttgctaacaccgctcaggctgccaagctcactctcgacagtcgggaagattttgtggtcgacctatccacagagttggtggagaaggatctgcaggtggaaaggctgagccagcgtattaccaccctggagcagcaagtggagatccgagacaacactattgatgtcttggaaaaccagcttcacgatgtgcagagggaactcgaggaagccaatgaccacttggacatgcaccacctggagatggaggccaatgaagcaggaagcgagggagaagaggctcccgaggagctaggaccagcccctggtgccaatgggactacctccgcgatgcctccttcacccgtatccagtgtcgcttctaccgctcagg

SEQ ID NO: 623 - DNA, 108 bp, Zea mays
  Peptide Sequence Number=SeqID_43998
atggcgattgctcgtcggagtttggagttcatggtcgcgccacgctatgccatgaacaggcttctctacaacgtaatcaccgtggttttcgaacccgcgatctcgtag

SEQ ID NO: 624 - DNA, 369 bp, Zea mays
  Peptide Sequence Number=SeqID_43999
atgtcgaggctactggataaggctcttgctattgaacacaagcgtgttcaattgggtgatttgaagaggaaggctatctcacagggacagggtagcagcagtgttcgtccccgctactctcgccacagggtacaccgactcgaccaggaggaccgcgcccagttcagtatgctccacaggggtctccacagacacctactcgtcaggctactcccactggcaccccgacgaggcctacaggacagaagaccggccctacatgcttcaagtgcagtcagattgggcactatgctaatgcttgtccgacgggaaattctggtacaccagctaagaacaagcaacagactcctggcaagggatattcagtag

SEQ ID NO: 625 - DNA, 1491 bp, Zea mays
  Peptide Sequence Number=SeqID_44000
atggacaaggatcgccagggagctgcgcaaaaacgccaggcggtcgtcaggctgcctaaggctaggccgaagaggttgtggggggctgcgaaggctgctgcccccggcggaagccaaccgacacaggcggcgaagtcggccgtccctgggtccagcagggtgccggatgccgtgaaggcggccgccgccggcggtactaagtctgtcccggcgggagccgagaaggctcgagagttgcctccgccgggcaagcgcgttcccgacttcgccacggatattagcgtggatgattatcttgttgggtcgggcgaaggccagcttgttgttgttccgcccgccgtggcgaccgcggcggctgtcgtggagcctagggcgaagggttgtgctcttagtgccggtggtgagtttccggcgctcactgccgtcagggacgaggcgagtgcagtgtcccgccggctgaaggaggcgttaagtcaggcggctgacttcgcagaccgcgtggcgtcgggggcccttacggcagttgtgtctgccgaggtcgagagacttcgggcgcaacatgctgacgccgtccgggacaagtcggccgtcgacagcaagtgccgcaagctggcggataaggtggccgcgctggagggtgagagggctgacctccggcgccagctggcggaggagaggaaggaggctaatgaggccctcaccaaggcgcagtttgcgcaggcggaggccaatttggcgcgggcggagtgcagcctcgccaggcagcgtgccgaggaattggaggagcggttcaacgccctgcagacccgtgtggagagggccgaggcttcgacgcgttcggaggccgagcggacgcgcaaacagcttgtggactcgtaccacgagttgggcgcgcggaccgctgacttcgaagtgccggaccaagagcccggccttcgctgcctggagttgctgcaggaggagttgttggcgctccccgccattgtggaggggtttatgtcctatgcctccctggtcacctgcgaaggggcgatgaacgcgctgtcccgcgaggggtgccggcactatgaggtcttcgaccaagctgatcaggatttcgagcgtgatatctacaaggttgaggaccctgtggtgaaggaatccgcgggagccctcttcgaccggatgtggggtcctcacggccgggaggtggtcagggagcggtctgagacggcgaggggtcaggcggcgcgtaacgagaaggtggacgacttcggggctttaaacagcgtgcagcctggctcggagtcgaacccggtggcggctgtgtccgaggtcgccccggcgccggccccagagaccgccggaggcgcccttgatgcccccacagccaccacggccggcggtggctcgtcgccaactgctgcgccgagggctgatgatcctgcgaagatggcggcggaggcggcagtggaggatcctacgagggctgggtcttcgcaggtggcatag

SEQ ID NO: 626 - DNA, 1293 bp, Zea mays
  Peptide Sequence Number=SeqID_44001
atggtgaccatcagctcgatggtggggagaagcgagccgagctgcgatcttggtcccgccctcagcttcaaggatcttcatcatcctggctggggcggaggctgggctgagtcagagctctacctcccgcgcgggttcgtgggtcaccttctccctcagcattcaagggagagggcgctcactggcctagcgggagggtcggacttcgacaacgcggggctggtcggcggcgagcgtcgtcagcttcagcgtgttgggcttgttggctcagctggccctggctcggctcccagtgccccctcccgccgcaagagtggttgtcacgccgcgcgcaccgaaggaccgcccaagacgtcgcgcgctgctagggcggcgttcgtgttctggggctgtcctgcctttgcaccggtacgacgcctctgcgcgaaggtcggtgctccgctcgtccgggaggatccgagtggggatctgccgacgggcaaatggcttccgttgtctgcgccgaggtggtggcggctgaagaagtcctcgtcgccgacgggatcacagccaccatccacgctccgggcctccggctctttgactttgatagcttgtcctcgcccctcgagcggagacgcgggcgagggcattgtcgcagcggcgtccaccctgaggccatcgccgctgcagtttggccacctggagcggaggtcgttgtcactgttgctggagcgagcggcggtgagccacccggagccttatcgccccgcgggccctccaatgaaccctctgccgctcttcgatgagccgaagccggaggcagcggtgtcagcatggacagaggcagagttggctcaaaaagaagacttcgtcggccggagcctggccgggccgtccactggtgggaccgacaccggagtcgagttgccgaggccacgagccgggctgacgtcctcgggggacagctggctgaggcttcggggtggccggccgagctgtctgctcggaccggattcctggagaagaccctggcggcggcggcccggacgcggtgctgacgtcgtccttcggagtggagatcctccgaccacgttgccgtccgaggctcggccgggctttgccgaaggtggggttgacgccaagggtgctactgctcccccttcgtcaaggtccgagcctgcaggatcggtttatcttgtaaaggtgatgagtgaggtatctgtatcccggaggcgtaggagtccctcggctcggtcagccttggctgcttatgtgtactccgtcgttttcaggatcccactttcgaagtag

SEQ ID NO: 627 - DNA, 114 bp, Zea mays
  Peptide Sequence Number=SeqID_44002
atggcgcaccggacagtccggtgcgccaccggtgcgccaacggtgcgccaccgtgaacagtccactgtccggtgcacaccggacagtccggtgcggtgtccggtgtgccactaa

SEQ ID NO: 628 - DNA, 1841 bp, Zea mays
  Peptide Sequence Number=SeqID_44003
gaaggccgcaagaagcggcgtacggacagagaagcccgtgcagcggcagcagctgcagcagccgctgcgcaggccgcacttggagatcagccgcagactccatccgattagattgcattccgtgctcgtcgtctcacctcccggcctcgctcctcctctcacacctccgcttccactctgccacccactctgcctgctcccgtcactcctattgctccatccacctccacagccatacccactacctcctctacgccagcttccactgcttcccctgctcccgctcccgcttctgctcctcctgtccctccacctcgcttccgggagcgtgatgagactgaggttcgtcctctggtttcagatcctcgtctgtttgatcttcagcgtgctactgcggcacgggtacgtcggttcagccggtgctgattctgaggcgcatctcacctatttgcctggccttctgacccttctgactatcagcggcagatatgttgaggagtgggtccgagtcttctatgcctctgtttggattgacccggatcatcactggatgaggtttcattttgagcgagaggatgtcacaattactgccagtcagatctgtcagctctttggattcccagagtcgacgactcgccttcacagcctctgctacggctcttctgaccctcctcgtcgccctcacggcggtgtggctccagggacagctcacgtcgcggctctgttccgcccgcctttcacagatgggtcacgacgttctccagcagactttactacagcagcaaagtacctatatgagctcatcagacggactcttctgccgaggatgggatacagggaggctaccactcatattcagctttggctccttggtgccctggtctcccactctgagtttgacgttgtggacttcctgatttgtgagatcgaggacaccgttctggatgggattcgtgctcgtcggcagttgccttatgctcactacttatgccacatctttgcgcagctgattcagccacctcgatttcagagcacccttgaggcctcacgcttgtatttggatcttaccgtctgctctgagattcctgtgccagcttctgcttctgtgtttgactctcaggccgaggatgcagctcttcgacagtttgacactcagggtacagcagctgatgatgatgatgatgatgattttggggttcctcctccgcctccgcctcctatgcctccacgctcacatgatcatgaggctgggagttctcgtgctgcccctgctcctcctccggctatggaccctgctcttgcgacgattctggccaacctggcagccgagcaggcccggttatccgagacgatgctctcgatgtttcagagcatgcaggacagacatgatgcacttcagcagcagctacttcaggatcgggctgagagtagggcattcatggcccttatgcttcagcattctggtatctcagcacctccggttcagactgctccacctcctccgcttcacgctccagtggtgccatcgattttgtcaggaccccctgttggtacctctccgctccggccggtcactttggcgttcacctctccggttctcagctctgtctgtccgcagccgccagtgccaccagcatctgctgttaccactaccgctgtggcagtatctgtgaccgcttctgttccggtagctcccgcagcgcggcctcagtccgagtcagtaccagctccagcttctaccgcagatcctggatccgagactgactctaaccctccgtcggcgttcgctctgctacctcgaccacgaccggatgcgcccccgccgcctcctcctgcttcag

SEQ ID NO: 629 - DNA, 1341 bp, Zea mays
  Peptide Sequence Number=SeqID_44004
atggtgtctccggtgagctgcaagcgggtaatccgagtggacgtccgtgccccgttcgttgggggtcggctaggggcccagaggcacgcccaaaagtacctgcggcaactggcgcgctggttgtgcgacgcgtgggcctgggcctccaagccggcgcgtcagaagtcggagaagcgcgtccacctggcgcggttgcatgccgcctgcatggctgcccgcccctcccgcccgttggtctgggcaaaagtggggggtcgctttttgcatgacatgcgggacccaacccccgagtcgcaggggagggccttggagcgtgttggagaagactcagcccgtggcgtctgggggcgcacgtatggagagttgcctttaaaaggagggagactcctttcagaaggcaaccatgtcttcttcctcccttatgcgtcgtgtctttccatcttccaagcccccggatgggggtatccgccgcctttccgcctcctcgttggaggaacgcaactccatgggagttggtacctctcagccatcgtttggcttcaaggattttcatcatgcagcccggccgggctgcggcctctgcccctccctcagcctcaaggattttcatcaccagggctggggaggggagtgcgccgagttgaggtcggcccccgcgtgggcggcggcccgctccttcactcagtgatggggggaggagcggttgttgtccgtggcgctggcagctgcagcgtgcccggtcttcagacgcgagtggcttcggagccgctcgcggcgccggcgtccgccacggcagctggaagaggttcttccgccggtgcgatagccgggaccggccacggactgacctccaactctacggccttctgcccgtccttgcctcacgagttttggcgtgggcgggggcctcctggcagcagcatccgccctgaggtcagtgctgccgctgttcgaccccccggagcagaagtcgtcgtcgtcgccgctgctggagcaggtgacggcgcgccgttcgccggccttccgttgctctgcaggccttccccctcggagtggggttgttcgtacccgcggaaggggaaccggagttccgtttgtaatggcatctcgaatgccgcctcgcttgttgattatctgaaccgcttcaccaagcgtgagtcgccccgtgtcaaggtgacgagtgagtatgaacagaggcggagttggctcgagaatgggaacctggttggccggagcctagccaggttgcccgtcagcgtggccgacgccggagtcgatcagccgaggcctcgggtcgggccggcgcccttggaagatgcttggccgaggcctcaggggtaa

SEQ ID NO: 630 - DNA, 684 bp, Zea mays
  Peptide Sequence Number=SeqID_44005
atggattccagcatggaatctgtcgctgagctatgtgcccagaagttctccgcgaccgttgttgcagcccgtgacacatttactgcttctactgccgcctgtgtggttgctggtgatctctgcgccacagcatcagcgagtgcaaccgtcgtttgtgctcaggaggcattggccaaatactatgagctgagggcatatgctgtcttgttctgttcatatgctgttctgttcttaagcccagttatcagtacacatgatccactcagttcatttggcagatggttgtttgtctttccagtgcagaagaagatgaacaaaaaacttgcacatgcactcaaatatgtcgtgtctcaaatgagtgatacagctaaaaaactacaagatactgcctctttctgctacacagatgaggatgttgtagatggtttcatgatgactcaagtagcttgttcaatggacgagttagctgaaatactagaagtaacttcaattgactgtcaggtttcgatgatggaccctactgctatattagaagctggctatggaagtgaagacaatgcggtgtgggaggacgtattccgtgaccgagaaattatgaatcagcctctagaagcggagacgcttggtgagcactgtgctaagtgggggcttagtttcaatgagatctgggatagatcaatgtaa

SEQ ID NO: 631 - DNA, 414 bp, Zea mays
  Peptide Sequence Number=SeqID_44006
atggtgcgtcgccacaacccatcggtggtagagttcagcagtgactctgacgagattcaggaggaatcaccggttctctctcctccgcctcgtcgtcccctctccaagagaggacgcgactctggccggatggaagaagagggatcctcgatgccctcgcaacctactcgcgggaggcgccaaaaggttggtgtcactcgtcctcgtcgcagcacctcctcctcaggatacgctccttgccaggaggaggatggagcgttcgacgacgtcatcgatcttccgccgtctgacgctctctacatcaccggcctgcacatgcatccgacgaatgtttcccggggacctaatgaaccttcagtcgacttctctctgaagggagtggacacccttcaacgtctaaggttcactaactga

SEQ ID NO: 632 - DNA, 1622 bp, Zea mays
  Peptide Sequence Number=SeqID_44007
atgacgcggtgcctcatgttcacgctgctgttcctcgtctcctccctcatctccaccgtggggctccccgtcgagccgcccgcggagctcctgcagctgggcggcggggacgtcggcggcgggcgcctgagcgtcgacgcgtccgacatcgcggaggcgtcgcgcgacttcgggggcgtcgcccgcgccgagcccatggcggtgttccatccgcgcgcggccggcgacgtggcgggcctggtcggcgccgcgttccggtcggcgcgcggcttccgcgtctcggcgcggggccacggccactccatcagcggccaggcgcaggcggccggcggcgtggtcgtggacatgagccgcggccgcggccccggcgccgccgtggcgcgggcattgcccgtgcactcggcggcgctgggcgggcactacgtggacgtctggggcggcgagctgtgggtggacgtgctcaactggacgctgtcccacggcgggctggcgccgcggtcgtggacggactacctgtacctgtccgtgggcggcaccctctccaacgccggcatcagcgggcaggcgttccaccacgggccacagatcagcaatgtctacgagctcgacgtcgtcacagggaagggagaggtggtgacctgctcggagacggagaacccggacctgttcttcggcgtcctgggcgggctgggccagttcggcatcatcacgcgggcgcgcatcgccctggagcgtgctcccaagagggttcggtggatccgggcgctctactccaacttcagcgagttcacggcggaccaggagcgcctcatctccctcggcagcggcggcggacgccggttcgactacgtggagggcttcgtcgtcgccgccgagggcctcatcaacaactggaggtcctccttcttctcgccgcagaaccccgtgaagctcacctcgctcaagcaccattccagcgtcctctactgcctcgaggtcaccaagaactacgacgacgaaaccgcagggtcggtcgaccaggacgtggatacgctgctgggcgagctgaacttcctccctggcacggtgttcactacggacctgccgtacgtggacttcctggaccgcgtgcacaaggcggagctgaagctgcgcgccaaggggatgtgggaggtgccgcacccgtggctcaacctcttcgtgccggcgtcccgcatcgccgacttcgaccgcggcgtcttccgtggcgtgctggggggccgcaccgccggcgccggcggccccgtcctcatctaccccatgaacaagcacaagtgggacccgaggagctcggcggtgaccccggacgaggaggtgttctacctggtggcgttcctgcggtcggcgctgccgggcgcgccggagagcctggaggcgctggcgcggcagaaccagcggatcctcgacttctgcgcgggcgcgggcatcggcgccaagcagtacctgccgggccacaaggcgcggcacgagtgggcggagcacttcggcgccgcgaggtgggaccggttcgcgaggctcaaggccgagttcgacccgcgggccatcctggcggcggggcagggcatcttcaggccgcccggctcgccggcgctcgcggccgactc

SEQ ID NO: 633 - DNA, 405 bp, Zea mays
  Peptide Sequence Number=SeqID_44008
atggcgcctcctgttgacgtggccggtctacgtcctaggttgggcgatgtggaagctcctccgaagccgaggtcgagtctgtcttccgtggctgaggtcgagtccgagcccctgggtcgggcgaggcggaggccgtcggctgaggccagggcggagtccgagccctggggtcgggcggagcggagcggcgctgtccttctgtcaggccggtcagtggagcggcgaagtgacggcagtcacttcggctctaccggctggctttgtgctgatgggggttaccagctgagaattaggagccttgagggtggcaatgagattgatggttttggttatgactatggtactggcgaagatgaagctgtggaaggagacttccaggagttccaagactacgacgagttctag

SEQ ID NO: 634 - DNA, 165 bp, Zea mays
  Peptide Sequence Number=SeqID_44009
atgggcgggggcctcctggcagcagcatccgccctgaggtcagtgctgccgctgttcggccccccggagcagaagtcgtcgtcgtcgctgctgctggagcgggccctcccctatcgagtggggttgttcgtacctgcggagggggaaccggagttccgtttgtaa

SEQ ID NO: 635 - DNA, 159 bp, Zea mays
  Peptide Sequence Number=SeqID_44010
atgacgactgacaggccgctggagctcctacacatggacctattcggcccgattgcttacataagcatcggcgggagaaaaatctcgaacccaagaaaccttaaagggattcttgagacgggctcaaaacgagttcagcttaaggatcaacaaaattag

SEQ ID NO: 636 - DNA, 528 bp, Zea mays
  Peptide Sequence Number=SeqID_44011
atggcggccagcatggccgcagtggtggcggcggtgtccgcgtccatcggggcgatggcgcagcaggggggcgacggtcgcagtcggcctggcggctgcgtccgggcggggacgcgtcggagcggcgcagctctgctgtggcggccggagacaggacgcgtgcggggaggggcgcagctctgctgctcggtctcctggccggagacggatcacttggtatcaatgaagatgattgatgaagttcatgcacgaaagggaaaaataaaggcatttacatcttattgtggtgggttaccatctccagctgcagcaaacaatctgcttgcctataaattcagttggaacccagctggtgccctccggtcagggaaaaatcctgctgtctacaaatttcttggtgagacgatccatgtagatggtaagtctgttacagttttatttctcctaacctgctacactaaaggagcaaatgcttgctcgcctgttctccctttttcaaaaaagatggcagtagctattacctattaa

SEQ ID NO: 637 - DNA, 241 bp, Zea mays
  Peptide Sequence Number=SeqID_44012
atgccgacgcagcagagtacatcacatgatgcctaccctaagaggtcatactacggtggacctgaacacatatgcccatactgccatgttgttttctggttccaggagtgtgttaaaaacaatttctgctccacccagaggaaaattgtgtacaacctttgctgcaaaggagggaaagtgaacctaaaaccatttgagcgtccgccgcctttgcttgctaatcttttgagatttgatggag

SEQ ID NO: 638 - DNA, 548 bp, Zea mays
  Peptide Sequence Number=SeqID_44013
atgtgggttctggagcggttcagggagcttgacatgctggagatatgctaccctgccatgggcgaggacatctctatatctgtcatgttgcttacctctcagctcatgacttttggagagcctcggataggctatcctgcttttgttgcatactttgaccgcccccgccccctaaaaccccgcgcccacctccacccacctgcgcacgccggaaccgtcgccaccaaatccgctcatccaccgcccacctccgcacgcctgcgcgcgccggaaacctcgcctgctcccaagacgcagtccagccgcgtcccacctccgcccacctccactcgcctgcgcaggcccgaaacctcgccgccaaatccgctcaccaccgcccccggcatcaccaactacgacccccttctcccctacctctctcctctctgctccccgcagggttcgtcttcgtccgctaccttcccacctctcccaaatgcccgcaaactggatccaccgctccctcccccgcaatggcctggttccaccgagacaactgcggggctagg

SEQ ID NO: 639 - DNA, 411 bp, Zea mays
  Peptide Sequence Number=SeqID_44014
atggcacacacgctgaggtggtcgccaccgctggggaggctgcccggcgcagaggtggtcgccgccgctgaggtggtcgctgccgtcggtgcagaggtggtcgcctccgctggcgagccgctcagagctagctacccacgtggccctactggcccacggtacggaaccaggctgagcggctacacgggctccggaccaccccaggagacaaaccaacaggccgggcttatgagggcagacctcaccgggttggagtacacagatgctccagtggccaggaagaggcactccttcagtcatagcaagatagttacccccgggtcggcccatttctgcatggacttgtcagaagcctggacccatggggagtccagaacggttttcgggggaaggcaggcttcggccccatag

SEQ ID NO: 640 - DNA, 603 bp, Zea mays
  Peptide Sequence Number=SeqID_44015
atgaagcggtatgagatctggtccgtcggatcagcaatctggggtcccgatttaattatcgcgaatctaacccatgcccgcccgatcacgatcgaactgcacacccgcgcccacgtcgaaccgttatcaggatctaatcctaagcgttggcaacagatccaatggccagaagccctttcccccaatcccggtcagtccacggcggcgcccaggcctccagcggcggtgccattgccggcgcaccgcccacttcgtgaacaggtgcacaacttcgacatattctcggtgcgaaacaatgtgggggcaacgacgaacacgatcgggggttacttcgtgaggattatggtgactaccgtgcccaccgcgacgcgaagcggaacttcggcgaaccaaagctccgcttctttggtgaggaattcccggcgcgacgcatgccaatcgagctcggcgagaccacgagcatcatcccggggacgagctggagctcccagacccgactccggaaccccaccgatggtgggaagaagacaggaggaggtgcaggtgccatgcgggtcttatcctagggtcgaggtggactcgagcccacctaagctccggtaa

SEQ ID NO: 641 - DNA, 795 bp, Zea mays
  Peptide Sequence Number=SeqID_44016
caccctccgacgacggagacgacgcctctgcagcagcacccgtccttcgcccgcccgccgccgccgccgccggggacgtacatcgtgcaggtgcccaaggaccaggtgctgcgcgtgccgccgccggaccgcgcgcgccggtacaagaagctcgcggcgcgccccgcgcggcgccgcgcgctccgccgcgcctgctgctgcgcctgcgccgccgcgatcctggccgtgctcgtcgccgccgccttcgccggcgccgtctacctcgcctaccgcccgcgcgcgccgaccttctccgtcacttccctttccatccgcggcctcgacgccgcctccctcttgcgctcctcctcctcctcctcagagacgctctcgcctcggctcgacgccgccgtgcgcgcggacaacgggcgcaacgcgaaggtgggcgtggagtaccgcggcagcgggtccgtcgccgtgtcctactccggcgcaaggctcgccgcggggccgtggcccgcgttccgccagccgccgaggaacgtgacggcgttcgcggtcgccatgagcgggcgcggcgtgcggctcacggaggaccaggcgacgcggatcgccgccgagcaggccgccggcgccgtgccgctgcaggtggagaccacggtgcccgtgcggctgcgcttcggctcggtgctgcggacatggaccgtccccgtcagggcgcgctgcgacgtgtccgtcgacaggctcgacggcgacgccgtcgttgtaaaccgcgggtgcagggtcagggtcaggccgctctggtggtggtggtga

SEQ ID NO: 642 - DNA, 504 bp, Zea mays
  Peptide Sequence Number=SeqID_44017
atgtcggttgtcgattgtatacttgaggaggcaattccagaggcgctgccgcatgagttacctgaagttaatgttatcgacgttcacatagctcgctcggatgaagcatcccctactggtttgttggctgggccagagtgcagcccttcgtctcaaggcatgtcactatgccgaatctccctggatcgtagcttcggcgtgtaccttcgcgctgtgtttgcttatatgccgatctttcaaaggcttcagaatgttgaaggtctgaaaaacaccttccctgagctcgttgccgagaaacgattgaaatatttcgagcgcgaggtggcccaccacacagcgggtacgaatgatctggtgattcacttcccaagcgccgagtggtccaccattcagcgggtgcgggcgacccggcgattcaccttcccacctgcagcactatataaacagacgggtaggtgtgaagttatcacagcattcattgccattgcactgttgtgctgttga

SEQ ID NO: 643 - DNA, 921 bp, Zea mays
  Peptide Sequence Number=SeqID_44018
atgccacgcacaaagaatgtgttgacgctagggggaggagatgacgaggatcctcctcgccccttcaggcaggtcaagggaaagaccgtttatttggagcagcaggaaggccacaagaagcggcatctagacaaagcagctcgagcagcgatagcagcagcagcagccgttgagcaggcagagcgaggagctcagttgcatattccttccgatcagattgcctatcgagttcgtcgcctcgcctctcgtcctcgctcctccactcccaccactgctaccactccaccacctacttcgcctgctcccgtcactcctgcgccatccaccacctcagccatacccaccacctccactactccagcttccactgctcctcctcccgcttcagctcctcctatcccacctgctcgcttctgggagcgcgatgagactgaggtgcgaccacttgctgtggatcctaggctgtttgatcttcagcgtgctacaacggcacggatgggttacagggaggctatcactcatattcagctttggctccttggtgccctagtttctcacttagagtttgatgttgtggattttctcatttgtgagatcgaggacaccgtactggatgctgattcggccccccacttccagggtactcttgaggcctctcgcctcctctttaggtcctaccgtccagctccagaggatcctgtgttggcacctgctccagtgattgatactcaggccaaggataccacctttcaccagttcgagactcagggcgcagcagtccctaatgatgatgactttggggttccacctccgcctccgcctccgcctcctatgcctccacgcactcatgatcatgaggctgggagttccagtggtgctgcccctcctgccattgaccctgctcttgcggcgatcctctag

SEQ ID NO: 644 - DNA, 312 bp, Zea mays
  Peptide Sequence Number=SeqID_44019
atgcaggtggcatgcaaccgcaccgcgggggcgcaccccttcggcttcgtcgcatccaacatggaggcccagggccacacgtcacggaccgggaaaggggatatttcgaaagggatccttctccacgaaggaagcgggccccgagccctcctactgatcaggggttcgaaggctggcccctcagaagggtttcgacagccgccccagagcactcgggcttcaagctcattactgatcaggggttcgaaggctggcccctcggaagggttcgacagccgccccagagcactcgggctccgcgcccactactga

SEQ ID NO: 645 - DNA, 1413 bp, Zea mays
  Peptide Sequence Number=SeqID_44020
atgcatcgcgcccttccaccttccgagcccccggatggggagcacccgcgttgccttcgtcttgctgctgttggaggagcacgacctcgcgggggttggcaccctttagccatcgcttggcttcaaggattttcatcaggcagcccggctacattccctcaccaatggtcacccagggtggtgaccatcagttcgatggtggggagaagcaagccgggctgcgacctctgcccgccctcagcttcaaggatcttcatcatccttgctagggaggagggcggggcaagtcggggcctgcctccgcgtgggccggtgacccgcttcttcctccggcatctaggggaggaagacatcctccagctctgcggaggaggcgtcctccagccatgcgggggaaggcgaactgctgctgcctggacagggtgtagcattccgtccttcgtctgggcgactgtggccggctgcaccgaagggtcacacaacacgtcgtacgccatgagagcgaacgggagtgaggacctgccggtgtgctttggggcggccgccactcgctggtgcgatgttggtgggcaggtggccgctgtcgctagtgctgaggtggtggcagccggagaaggtttctccgccaacgacactgtctgtgccacctgcgctccgggcctccggctctttggctttaatggctggttctcgtcccctgcgaggggacgtgaacgagggccttccagcggtagcgttcgccctggggccatcgctgctgctgtcttgccgtccgagacggaggtcgttgtcgcgctgttggtgcagcggtcgccggcgagccacccgaagagtccctcggctcgatcggccttgccactcaaggcttctcttgctcagtttaagaaccctcggctgctctgcgatgagccggagccggaggcagcagcgtcggcgtggacagaggcggagttggctcggaaagaggcttcatcggcccatgagcaggtggcttcccaggccgaggaggtgcaggagcggcggctggagcttggccaggtcatccgcgagtgggaccaaccccggagtcacgctgccgaggccgtgagccgggttgatgtcctcgggggacaactggctgagctacggagcggccagccaagcgcgatgctgacgtcctccttcgaggtggagatccttccgcccgtgtcgccgtccgaggctgggccagattccgccgaaggtggaaacgacgccgagggtgctgctgctccctctgtcgatgacttgttcgtcggtagcagaatcgcttatccgagcgagagttactttttgcagaaggtgatgagtgaggattctgttatcgatatagtcgagaaggcacgaaaatcgttctggcagaaaagttttcgagcgttgggacttgttcggtag

SEQ ID NO: 646 - DNA, 246 bp, Zea mays
  Peptide Sequence Number=SeqID_44021
atgggcaagagtaacaaacgcaagcgcgagccgactcctccgtcggaggacttcggcgactcggaatactcggaggaggagttctcctccgagtccgagggcggcagcggcgggggcagcggcggcggcgacgggagcaagggcagcaccagaggcggcagcagcaagggcagcaccagaggcggcagcggcaagggcagcaccaggagcggcggtggtggcagcagcagcaaggccagtggctaa

SEQ ID NO: 647 - DNA, 528 bp, Zea mays
  Peptide Sequence Number=SeqID_44022
atggcaacagaggaaatggaacacaatgacagtgggccagtttttgaccagaccccaactcctcatgatgatacactgaaagggacaacaaactctggatctgatccaccccttacagagctagagtgcgttcgttctctgtgggatttaatttgttccaaggacattgaccaaagcagggttgtcattgattacggtgaatacagtgcaaactgtatggatatttatgaatctttcgcggagggcaaatgtcttgagaatgtcttcctgcagtgtttcattgagtgtgttcgtgatgattccaaaaatcatcgtcgaactctgacatctaacagattaatacttgatgtcaacgttgggaattgcttgcacaacacattgcctcctttggtaaatctggataaatgcaagtcggacaattcccgagacctacgtgctcatgcccttcatcaactcacattccattgcatgaacaaggcgctgccacttccattagatatccagagatttatgtttgcgcgcaattag

SEQ ID NO: 648 - DNA, 726 bp, Zea mays
  Peptide Sequence Number=SeqID_44023
atggcggcgccatggggtaacaagtcaataagtgagtatacgacgccgacgtctgttcatcgaccaaatcaatgcttggatatcgtagcaatggtgcaggaagaacaacaaggagggaaccagttagcctcagatgcaagtacgcatacaaaatcagctactgctgtagatgcaattactccaccagcagctttgagggccccgggggttgatgatcagaccatatttgaggcatcgaggatgacagtaaatcaaggaggacaacaccttaatactatgcgtactattggtgatcatgaacaggacacaccagtgattctgcagagacatgaagttacaattgatccgagattggtacctaaagttggtatgacattcagtggggtggatgaagcatataaattttatagtaggtatgcatatgaagttggatttccattaaaaagtatagggaacgaaaaaattgataccgaaaagaatcaattacaatgcaacaagacgcatgatcctgaatacatggagttcataagttcaatgcaagagagtcgaatcccgcaacattgtattatggattatgtatcagaaatgcacagtggtcctgagagtgtgcctgtaacaacacagggcatgtataacctgaaaaaggcaaagcaacgagaaagaaatgcaaatgatgtggcaaagctactatccttttttgcatcctgcaaaaaggataatccataa

SEQ ID NO: 649 - DNA, 600 bp, Zea mays
  Peptide Sequence Number=SeqID_44024
atggcaatcacctcagcacgtgcgccattgcgaaaaggtcctcgcccccgtcttcctacggggggcgacaacgaggccattaaagccaaagagtcagaggcccggcggcagatggcactgatggtctcgccagcggaggcaaccacctctgcagtggggagcctcaccagcggcggcgaccacctcagcatcgacgacagcggccacctgcgcaccagtgctgtaccggcaaatggcggccgccccagtgcgcgcgaagaggtcctcgcttccgtcctcactgcgggagtgaggacaagaccatccaagaacgcggacaccgcccccgcggcgtacgacatcttgtaccgcccccgccacgccccaaccaaacggcaggaagcagtgccggaggcggcgccggggccagccaagccggggaaccaggcatgcggcggccggcggcacccgcagttggccggtctcgcgtacccaaagttcacctcctccgcaaggctggtgaacgcccttctccctgaatgctggaggaagaagcaggccaccagcccatgcggaagtcgggaccccaactcggctcgccctcctccaaagcacggatga

SEQ ID NO: 650 - DNA, 324 bp, Zea mays
  Peptide Sequence Number=SeqID_44025
atggcgatgacatacacctgcaggaactccgacgggttcgatgttctgtcgtacttttccggcaggtgcggccggaacttgggtggccgcgcggagatgatccacaagagcggcgcagcccacaccagccaaggagacacccgtttgggaccgggtgcccattggcgtctgcggtgcaaccgcaacgaagtcttgatcgaggttgcgaccatctatgttttggcagcgctcgtgcgccctttccaaagagacccaggcatcctctctcgcacgcctgcggttgagttctgcccggaggtcgttggtctacgcaccccttactga

SEQ ID NO: 651 - DNA, 117 bp, Zea mays
  Peptide Sequence Number=SeqID_44026
atgggaaccagtgggcatctcgacctcgacacgggaggaccttcggcgacgaagcatggtcccaacagtagccccttcgcggtgctagatcgtttttgtaacgagcttgatccgtga

SEQ ID NO: 652 - DNA, 336 bp, Zea mays
  Peptide Sequence Number=SeqID_44027
atgggcaagaacaacaagcacaactcccaggggcttgcggcggaggtctggacgtacatccgggccgtcgagcgctccgggctcgagggctcggatgagtcggagtactcctcggatgaggaggactcggacggcggaggcgaggacgaggacgacgatgacgacgacggcgacgacgacgatgatggcgacggtgacggtgacggcagcggcaggggcagcggcggcggcagcaaggacggtgacggtggcggcagcaggggcagcaaccggggcggcagcagcaggggcagcaccaggggcggcggcggcggcagcaacagggccagtggctag

SEQ ID NO: 653 - DNA, 2640 bp, Zea mays
  Peptide Sequence Number=SeqID_44028
atgtcatcgtcttcgtcatcatcatcgtcatcgtcgttgtcaggcgtctccggcgacggctccctcgggagcccgtcccttctcctgcctccgacggcgcctctccaaggcgtcccgagcccgcatccgctcgcgagcctgagcctttttcgcgtccttcttctccttcttcttctccgcagcgaccctccgcgcggctcggtccaccgcgtcctccgggaccggtggcagggaaggcttgtgacaccccaattcctggagacggacggaaatctcgactatgagaaccaagggcaatctgacacaagaaagaaggagcggacactcaccagggatatgcacccgcgctcgggacgcatcaagggctgggtaagggcgccggcgtccagtctccctaccgtgccagctacccgcctgtggaggtcatcggcggagagggggaccgggacatctgcgaaccctccaagtcgacccccggcatcatctccgaaagcagcaaccgccgctctgccaagggaagcaccctccggcgatggatggcagcgaccacccccgcggcgccccatagcgccagttgctgccggcggcagtcaccactcgttgagaaaacgacgggagcctcccatcgtcattccggaggtaaaaccaccggcgctgccaccccttgttcgaagacacaaggatagtggggatgtactgttacgtgcgcgcctgcctcaactggaggatgcagccaccgacccgcaccgccatgcggaccctcctttcccccgtcgtcaaggcaaaaggctccgcagagaagagatgggtccacagatcccagtgtgggtcaatccccaaaaatccttcgcaaactgccgcgaagatggccgcttgcgcgatggagttggggttgagattgtgcagctccaccccattgtaatgcagaagcgcccgcatgaaacggcttgctggcactccgaacccccgctcatggaaggagacgaaactcagcacataccccgccggcggggtcaaggcggccccgctcggagggaccatccactccggctgcgggtcaccagagaggggacggagcaagccatcggcgacaagggcctccagatcgtccaccgtgacggtggagaaggaccacgggtcgcgcggcggaacgacggttacccggtctgccatcgccaagcgaagggggtggcggcggagcggacaaggtccgggcaagacccgttcaacgcttcgcccgaacccgctgcgaaattcagactcgaagacgaaacacccgttcctcgaacggctcatgcaacagctgccccgcgaaccactcgtcccgtcgcattaactccgcggcagggcaggcgacacctttggcaggccctgagccctcctactgatcaggggttcgaaggctggcccctcggaagggttcgacagccaccccagagcactcgggctccgcgcccactactcatcagaggttcgaaggttgtcccctcggaagggttcgatagccgcctcagagcactcgggctccgcgcccattactggtcagaggttcgaaggctggcccctcggaagggttcgacagccgcctcaggccactcgggctccgcgcccactactgatcaggggttcgaaggctggccccccgaagggttcgacagccgccttagaacacgcagagcgagggatgactctaggtacgtccgatacatggccgaggctcgggctacgctcccgaggggctacacccggcgggaaaacagcgccgcctgccctgctccgactgttgtgccacccgccagggtgaggctgacagcagccgagtccagcctcaggcgccataggaagctccgcctcacccgaccccagggctcggcccccgcctcgacctcggaagacgatctccgcctcgcccgaccccagggctcggactccgcctcgacctcagaagacggtctccgcctcgcccgaccccagggctcggactcagcctcgaccttagaaaacggtctccgcctcgcccgaccccagggctcggactcagccttgacctcagaggaatcaccgcctcgcccgaccttgggctcggaccgaccacgttacagggggtacatcattaccctacccctagctagctcaggctacggggaacaagaccagcgtcccatctggctcgccccgggctcgagcgctcctccgacggtcacgacaccacatgaacagggcaccaacacctctccgacagccacgtcggcatggccctcgtacgaaaaggtggccgcgcgggaggacgggctgacgagcaggctatctctctccctcgcgaacgcttggaccccccggggtcgaaacaccgacagccttcgagcaaaccgaagccagatgggacgccggtctggttccctgaggcccgagtcagctcggggtaaggtgatgatggcgcctcctgttgacgtggctggcctgcgccctaggttgggcgatgcggaggctcctccgaagccgaggtcgagtctgtcttctgtggccgaggccgagtccgagcccctaggtcgggcgaggcggaggtcgtcggctgaggccagggcggagtccgagccctggggacgggcgaagcggagttcgtcgtcttctgggacttag

SEQ ID NO: 654 - DNA, 489 bp, Zea mays
  Peptide Sequence Number=SeqID_44029
atgaggcgaaaagacggcgggtatcccccatccgggggcttggaaggtggaaagacacgatgcataagggagtgcgaagacatggtcgccttccaagggggtcaccctccttttaaaggcgactatctctactcgcgtccccagccgtcacgggctgagtcttctccaacacgctccaaggtccccccccctgcggcgcgggggctgggtcccacacgtcatgcaagccggctcagagcagaagaagccaaaccgccgcgcgcgggaccgggaaagggggataccccgaaaaggatccttccccgtgaaggaaccaggctccgagcctccctactgatcagaggttcgaaggctggccccccgaagggttcgacagccgcctcagatcgcgtgggccctacacccactactggtcagaggttcgaagggcggccccccgaagggttccacggccgcctcaggctactcgggctccgtgcccattactga

SEQ ID NO: 655 - DNA, 393 bp, Zea mays
  Peptide Sequence Number=SeqID_44030
atggagcaaaatataccgaaggcaaccctggtctggcgcaccagactgttcggtgtgccaccggacagtgtccggtgcaccaggaagatcgacgctgaacttgccagcttcaggaatttgggaggccgctccgctataattcaccggaccgtccggtgtagcaccggactgtccggtgtgccagcggagcaacggctacttcgcgccaacggtcgtctgcaaaaggcattaaatgcgctacagtgcacgcctgcgtgcgtagaagtcagagcaggcgccagaaggcgcaccagacagtctacaggacctgtccggtgcaccaccggactgtctggtgcaccaccggactgtccggtggccccacaagtcagagctccaacggtcgaaccctaa

SEQ ID NO: 656 - DNA, 141 bp, Zea mays
  Peptide Sequence Number=SeqID_44031
atggccatgatgggttcaacatcggaaaagatgtacctctaccaggtgaagaagcggcaaacttttgttgcttctgttcaaaggtggtaccaaaggaagaaaatcaagactaaagctacgggaggaaaggatcctccgtaa

SEQ ID NO: 657 - DNA, 707 bp, Zea mays
  Peptide Sequence Number=SeqID_44032
atggctagcaaacaggttaccccccctgctgcccctaactacgattggccaggctcgacacatatagaaggacgcgagcgatgtgtggagtcttcaccggcacccgcggcgaccagggcggtcgtgcctaccccgcacggcggagacgccataaccgggacaccattcgcgccccacggaggcacgcccgcggcgcacggcggaaatccaaggcagcgcgacgccggcgagcaattgtcgttgccacgcgggaccccgccggccagtgacagagtaaaggagacggcgcgagcgcgaggggatgagaggctgccccgtggggccctactgtcggcgcgcaattccaacgggataaggctaagcctcaaaaatggcggcggcggacaccgagcgaagcgctgctttccactgtgttccgtactccgccgttgtcttgctccctctcctcctctcggctacttcgatctcccttccatctcctcgctctccaccgcatcgtcgatcctcgccttcgccacatgcttcccgaacgcgcttgactctgtcggctcctgcgattgggaccctttcatctccgtcctcgaggccttcgcctcctgggacgccgctgggctgggcctgagctaccgacaccaggcagcggaaccaacaccacgaaggaccatgcagcgacatccgtcaccggcgtttctgcttagcgacaggct

SEQ ID NO: 658 - DNA, 234 bp, Zea mays
  Peptide Sequence Number=SeqID_44033
atgtcggctgaagcatcacgaaaagcattaagacctcagaggagtcaaaccactcctccgaggcctcgggggctacacccggcgggaaaacagcgccgctcaccccgctccgactgttgtgccagccacccgggcaaggctgacaacagtaagttcagcctcgggcgcaataggaagctcaacctcgcccgacctcaggcctcggcctcgggaggaggtctccgcctcgcctga

SEQ ID NO: 659 - DNA, 513 bp, Zea mays
  Peptide Sequence Number=SeqID_44034
atggatggcggcaaccacccccgcggcggtgtgcagaatcgcccgcatgaaacgacttgccggcactccgaaccctcgctcgtgaaaagagacgaagctcagcacataccccggcggcggggacagggcggctccactcggaggggccatccactccggctgcgggtcaccggagagaggacgaagcaaaccatcggcgacaagggcctccagatcgtccgtcgtgacggtggagaaaggccacgggtcgcgcggcgaaacaacggttacccggtcggccatcaccaagcagaggaggtggcggcggagcggacaagggaccgagaaaggggatactccaaaaaggatccttctccgcgaaggaagcgggccccgagcccccctactgatcagaggttcaaaggctggcccctcggaagggttcgacagccgcctcagagcgctcgggctccgagcccacctactgatcagaggttcgaaggctggcccctcggaagggttgagagcacctag

SEQ ID NO: 660 - DNA, 366 bp, Zea mays
  Peptide Sequence Number=SeqID_44035
atgagtgaggacaaagtgtgcacaaaagatccgtgttggtctgtggggacaatatatgatactagagagctgctaggagtaagtaccaccggtccagggattgaacgaggtgttacaagtggtatcagatccaaccctcgaggtttcacgggcgtgtgtgggctaggaggttcgggtatatggcgcaaggtgcatgtgggcccagagtggtcacatggcatgacatatgacgacactagacacacagacgtggctaagagggtaggttcttggattgtggttgaccgacgaggatgtcggtcttctaagggggtggattgtgatatcctggcccttaggatggtgatttcctggcccaaggcttaa

SEQ ID NO: 661 - DNA, 57 bp, Zea mays
  Peptide Sequence Number=SeqID_44036
gaggaggtcgtcgtcagctactgtcctggtggtggtggtggtgagcgccttctctag

SEQ ID NO: 662 - DNA, 1437 bp, Zea mays
  Peptide Sequence Number=SeqID_44037
atggctttcataatgttctcatggagtgaaaactatggagacccatctgaaagtaagcacttgatggccctgttcaaagttgcagctaaggaaattgctgcggatgtgaggattgcattaccgggagctatacagtcgctgtttgagtgcttgttgtacacatttctcttcctgtggactccagcattgagttcaaatgcagggtaccaaaacttgagcagattaatagctctcaattgccctgctgacagtgccaacgcaatggtgcttctaatgtaccatggtgcacccatctatgacagctggggcccgcgagcagccgcgaacgcatgcagtcaactgcggagaggagagagaaaccgtggaaaaggggagtgcaggtgtctaaaaccagtgaccctcgacttcaaagctggttgtctcaattcaaagtctttactgatcggaccaatattatttccgatcgcgacagtcttcaaaagcactttttggcaacaactattcagtgatcaggctgctgcgctcttgggagagcagcccgtctaccacgtcgtacagcgtaccattggctgtggggccgctatgcccccagtggcgctgcccggcaaggaggctggatttatccctctgttatcaaaggggcaccacattgccctggttggtacagactgcatctctaaatggattgaggttgttcctgtgaagaatataacacataaggaggcacaactagttcttgccgacaggctgcaaacgttacattcctcatgtctcccaaccctggtggctctgaaatcctggactgtcgtcgagaggctgtggatgatctggtacgctgaggaatggattggagagggatggaacacaccaaaatatgagggagaggaggctgtggatgcgggacgcgattttttttttggaaaaaatgaaggagctgttggactcgtggtctccagtcgatgctcacctaaaccatcacagcttcacagaaacaccatcgcctggtcccagctcgatgtcattttcggactggctacaagacctaacgaaattgaagatgctgcattcgagaacaagcgggataattctctaaagaagctgaaggttcctaaaggggaggacaggaccctacttgggaggagtaaaaggggatccaaacacaacccaaagggtaccccttactacaacattaaagacgcggtgcccgcgcaactatccctagtcgcgcgggaaaacagcacccaacctttccgcatgggcagctccggggccgtcgcatggccggagaaggtggtatactccaggataccgtcagtaggtccggacctcctcaagaaggcaccggacccctatactcacgacccggatctccgagtatggcccagggctcccatgcaagcaagccgggccccttgggtgaggtccggacccctttga

SEQ ID NO: 663 - DNA, 561 bp, Zea mays
  Peptide Sequence Number=SeqID_44038
atgtccggtgcacaccggacagtccggtgcccccttccgaccgttggctcgtccacgtgtctcgcgcagatcgcgcggccgaccgttggcccggccgaccgttggctcaccggacagtccggtgcacaccggacagtccgaaatggcccaaaggcacatttccctttcaccaacggcacaggcccggcggcgcagcacaccggcgatcgccgacccagcaacccggtgtaccaaacggacaacggcaaggccatacatgatgcggaggtggaagcgaagcggctggtgaaattcttaccgggatttgaggtacggagggagcctgcccacgacgcaggacccgaccacggcggcaaaacggacacggtgagaaattggaacgaccctggggctcctttctaccagaagctgccacgggagcacgcggtgcatcagggcgagtctcacatgccatacggagtggcccgagcggcggtgagcatgttattcatcaatggcggccctcgcctctctctctccctaagacgctcgggttccaggttcgtcgttggcacaggctag

SEQ ID NO: 664 - DNA, 246 bp, Zea mays
  Peptide Sequence Number=SeqID_44039
atggagatccctcgagggcgggccaggcggatgactatggccaaccatcgtcgtgtccctgaagcaggctctccctgctcccgttctcggcggctgaagcatgtcgcgaaccacctttctgtggctcccgaacgagtcctacgggcgatgcgggcggatcgcgcgatgggggaggggagcggcaaccagcagggcatgtcggggaagacagcgtctgcgccgtcggatccaatttggacgatgtag

SEQ ID NO: 665 - DNA, 696 bp, Zea mays
  Peptide Sequence Number=SeqID_44040
atgaagctgtggaaggagacttccaggagttccaagattacgacgagttctaggtgtgggttagcggcaacccccagtcggctgcctgtgaaggccgcgttatctacgtttcttttccgcactttgatttattgtaagaactatatggacgtctcagacatggctcgacttagacacactgcacgaaagtcagtcatccccttcttaccctcccgccttgctgagcgtccgcttcgccgtcccgtggccggacagtccagccacttggagagactacaccaccgcctgcgtgaggagcaggagcgtcgacgacaggagcagcggagctcttccctctcgctccaccaggagatagagtctgtgaggagctgctcccctgtgctttctctggagccgccccctgcaccaccactgggcgccccagcttctggagtagctgctggaggagacccagacgacggagatggcgacgacagctcgagccacgacaccgacttctctgctaatcctgagccggaaggatgggttgctcgacccatcactcgcgacgctgctcgcgggtgtcacttccatgatgcgctcgacaccctgctacgtcgggcatttgaccggcatacttggtccgtcgagtatcgctgtgtggtctaccagcatagtcgcggggtctacccggaccgctgggaggcgacttgcttg

SEQ ID NO: 666 - DNA, 586 bp, Zea mays
  Peptide Sequence Number=SeqID_44041
atggcgcctcctgttgacgtggtcagtccgcgccctaggttgggcgatgtggaggctcctctgaggtcgaggtcgagtctgtcttccatggccgaggtcgagttcgagcccccgggtcaggcgaggcggagaccgtcggctgaagccagggctgagtccgagccctggggtcgggcgaagcggagttcgtcgtcttctggggctgagcccgagtccaagccctggggtcaggcggatcggagctcgctgtcttccggggctgagcccaagtccaagccctgggtcgggcggagcggaggcctgactgcctgtcagcctcactctgtcgagtggcacaacagtcggagcggcgcaagcggcgctgtccttctgtcaggccggtcagtggagcagcaaagtgactgcggtcacttcggctctatcgactggaggacgcgcgtcaggataaagggcgagaggacggtcaaggacagactcaacttttttacatacgcccctgcgtcgcctttccgcaaggaggagggggagagcgccatgttgccctcggagggcgccgaacatggtgtctccggtgagctgctggcgg

SEQ ID NO: 667 - DNA, 915 bp, Zea mays
  Peptide Sequence Number=SeqID_44042
atgctggagctgacgacgcttgcggccaatcgaccccgcattgtcaaagtccgccccccagctaggccgccgggctgcctgatgaaaatccttgaagccgagcgatggctgaaaggtgccaacttccacgaagttgcgctcctccaacaacaacaagacgaaagcaacgcgggcgctccccatccgggggctcggaaggcgtcgcaggctaagtcttcaccaacgcgctcaaaggtcctccccctacgacacggggctgggtcccacacgtcgtgcaagctagccaggacagaagaagtcaaaccgccacgcgcggagcgtgtaaccgcccagcggttacaagcactcctccaccttcgcctaacccagcgggtgaaagggcggaccaccatgcaggcggcatgcaactgcaccacggggatgcaccctttcgacttcaacgcacccagcatggaggcccaggcccacacgtcatgtaaccggcgtgccggttactacgtgcgaaaaactgcacctccacttacgccaatactgcaccttctcgactgcggaactgttgccgcgactcaaggcgaccctgcacatagcccaacagtgccaaccatgcgcatcggtcatggatcagccagccgcaggagaaggcgcgacgatcgatatggccaaaagtgggtcgacagtaatggcggcagcaggcgagcggaagcggcggtcaaatcgtctgcaggctcacgtcccctcctggggcagcaggagagccctctcccacgacgtgaagacgacgcgcccgtgttccgttcctcgaacggctcgtgcaacggctgccccgcgaaccactcgtcccgtcgcattaactccgcggcagggcaggcgacacctttggcaggcgaagcgggcgacgcttcaccttcgccataa

SEQ ID NO: 668 - DNA, 696 bp, Zea mays
  Peptide Sequence Number=SeqID_44043
atggctgttcggccatgggagagtcggttccttggcacttacactgcagatgggattttcgtagtcaatgaaaccaagcaacctgacagaagtgcaaccaagaccccctacagaaaacctgttaaaaagcatgattcaacccttcaatcaaacatgttgaaccagaagggcttcccatcaaactcagagggtgttggctcctcggcaaaccgacccagtggtttggtatctactaaatctagactcaaggttttacccagagaaggtcctgaggaagccccatctcgtccttcgccacttgtgcggtccgctagtaatccgaaggagaggacttccggtattaattctgagagaactggggacttggattgtcaagttcataaaaggttctccttgctagggctgggcaaaaaacccgatacccgaaacccgaacccgaaaaacccgaacccgaacccgaacaacccgaacccgaaaaacccgaactacaatttgggtagcaacttccggtacccgaaattatttaggaaatttcgggttaaacaaaccggttcagaagctggtagacacctgacaaagaaaggcacagttaaccgatccctgaaggccacaaaagattcccacatgctggggtcaagacatcatcttgccagttgcattgatccagttcccactagagttgagctggagacttag

SEQ ID NO: 669 - DNA, 384 bp, Zea mays
  Peptide Sequence Number=SeqID_44044
atggttcagtgggttactcggtccacgtgctccggcggggttacgaattccggcgagcgtgatcgcactgttccggtggggctggtcctcggctcaagcttgagaaagcttcacggcctctcgaggaagctatcagatggctcggactgggtggaggtggacaaggttggtttggccacggtgggcgccctcgggcggctgacgagtcgcggggaggtcaccggcgctgcgggctggctcgggaaagctaggcgcggtgcggagggggtgacagggaaggtggccgtgcatgaggggtgttctagagggtctttaggcgctattttgttaattgggccctatggttttgaggtttggaaaaatgtgaacatgtttgatctttga

SEQ ID NO: 670 - DNA, 432 bp, Zea mays
  Peptide Sequence Number=SeqID_44045
atgggcaagaacaacaagcgcaagcgcgagccgactcctccatcggaggatttcggtgactcggaatacttggaggaggagttctcctctgagtccgaggggtctccggctcccgtctctcccccggcgtcgtccgatgactcggacgactcccaggggatagccgcggaggtctggacgtacatccgggccgtcgagcgctccgggctcgagggctcggatgagtcggagtgctcctcggatgaggaggactcggacggcagcgacgaggatgaggacgacggcgatgacgacgatgacgacgacgacggcgacggtgacggcagcggcagtggcaggggcggcggcgacggcagcaggggcagcaccaagggcgacagcagcaaaggcaacaccaagggcggcggcagcagggacagggccagtggctag

SEQ ID NO: 671 - DNA, 1350 bp, Zea mays
  Peptide Sequence Number=SeqID_44046
atgttcggccgcgcgccgaagaagagcgacaacacccggtactacgagatcctgggggtttccaaggacgcgtcacaggatgacctcaagaaggcctaccgcaaggccgccatcaagaaccaccccgacaagggcggcgaccccgagaaggctgtatcttctgatgaaaatgattgccaatctttatgtgaggaacagaggggcatgcttggttcagtttacctaacgctgtatagtgatctaccgttcaaggagctagctcaggcttatgaggtcctcagcgaccctgaaaagagagagatctatgaccagtatggcgaggatgccctcaaggagggaatgggaggcggtggtgggatgcatgatccctttgacatattccagtcattctttggtggtggaagcccttttggaggtggcagcagtaggggcagaaggcaacgacggggagatgatgtggttcatcctctgaaggtttctctggaggatttgtacaatggcacatcaaagaagctctctctgtcccgcaatgtcctctgctccaagtgcaatggtaagggttccaagtctggagcttcgtcgaggtgtgctggttgtcaaggttctggcttcaaggtccaaatccggcagttgggacctggaatgattcagcaaatgcaacatccttgcaatgagtgcaagggttccggagagaccatcagcgataaggatagatgcccacaatgcaaaggtgataaagttgtgccggagaagaaagttcttgaagtggtagttgagaaaggtatgcagaatgggcagaagatcacattccctggcgaagctgatgaagcgcctgatactgccactggagatatcatctttgttctccagcagaaggagcatcccaagttcaagagaaagggcgatgacctcttctacgagcacacactgatcttgactgaatctctgtgtggcttccagtttgttctgactcacttggataacaggcagctgctgatcaaatcgaaccccggcgaagttgtgaagcctgattctttcaaggcaatcaacgatgaaggcatgcccatgtatcagaggcccttcatgaagggcaagctgtacatccacttctcggtggagttcccggactcgttgagcccggagcagtgcaagaccctggaggctgttctcccgctcaagccagtatcacagtacactgatatggagctggacgagtgcgaggagacaatgccatacgacgtgaacatcgaagaggagatgcggaggcggcagcagcagcaccaggaggcctacgatgaggatgatgatgtgccaggcggtgggcagagggtgcagtgcgcccagcagtag

SEQ ID NO: 672 - DNA, 777 bp, Zea mays
  Peptide Sequence Number=SeqID_44047
atgtcatcccttaagcatggtccatattccagaaaaactcccaaaatactcttgtcctatattctgcctataactctcctgttcatactaagtcagacgattcattcgtcactattctcaccaacagtgaacttcactgtgctacaccacatacacccagctataaatacactcagctaccatctccctctccacacacactcaacaccctcaaccaaggcaaacaccccacccactcagttactccgctctgccggctacacgcatagtgtcgcttcgcctccagtccaccctcctgaaaaaggagatcgaggtcgggcgaggcggagaccgtcttccaaggtcgaggtggagtccgagccctgggatcgggtgaggcggagaccgtcttccgaggtcgaggtcgagttcgagccctcgggtcgggcgaggcggagaccgtcttccgaggtcgaggtggagtccgagccctggggtcgggcgaggcggagaccgtcttccgaggtcgaggtggagtccgagccctggggtcgggcgaggcggagactgtcttccgaggtcgaggttgagtccgagccctgggttgggcgaggcggagaccgtcttccgaggtcgaggtggagtccgagccctgggtcgggcgaggcggagcttcctatggcgctcgaggctggacttggctgctgtcagcctcaccctggcgggtggcacagcagtcggagcagggtaggcgacgctgttttcctgtcaggtcagtcagtggatggcgcgaagtga

SEQ ID NO: 673 - DNA, 249 bp, Zea mays
  Peptide Sequence Number=SeqID_44048
atggccaccgccaccgccgctccagcatctgtggcgcgacgacggatctggggacacgctcgcgacggcggatccctgaggcgcgacggcggatctggggacacgctcgcgatggcggatccctgtggcgcgacggcggatctagggacacgctgcggcatcggatcccgagggcacgcacgcggcgacagccccatgaggtgcgcacgacggcgatgtgccagcggtcgcgacgacggatttccctag

SEQ ID NO: 674 - DNA, 96 bp, Zea mays
  Peptide Sequence Number=SeqID_44049
atggactacatggtgtttgaggttgctgaattggatggagcagcaatgatttgtcacactaacagcaaaatgaaagtcttagagaaattttactga

SEQ ID NO: 675 - DNA, 936 bp, Zea mays
  Peptide Sequence Number=SeqID_44050
atggggtcgggcgaggcggaagtcgttcggccgaggccagggcgaacccgagtccgagccctggggtcgggcggagcggagttcgccgtcttccgggtcttagcccgagtccgagccctggggtcgggcggagcggagttcgccgtcttccgggtcttagcccgagtccgagccctggggtcgggcggagcggagttcgccgtcttccgggtcttagcccgagtccgagccctggggtcgggcggagcggagttcgccgtcttccgggtcttagcccgagtccgagccctagggtcgggcggagcggagttcgccgtggcgcctttgtcaagacctgactgccggtcagactcactctatcgagtggtgctgcagtcggagtggcgcaggcggcactgtccctctgtcagactgctttatgctgatgggggttaccagctgagaattaggcgtcttgaggggctcggactcgggctcggccccggaagacgacgaactccgctccgcccgacccagggctcggactcgggctcagccccggaagacggcgaactccgctccgcccgaccccagggctcggactcgggctcagccccggaagacgatgaactccgcctcgcccgaccccagggctcagactcgggctcggccccggaagacgacgaactccgcttcgcccgaccccagggctcggactcagccctggccttagccaacggtcttcgcctcgtccgactcgggggctcagactcgacctcgaccttggaagacagactcgacctcgacctcgacctcggaggagcctccacctcgcccaacctagggcgcggaccgaccacgtcaataggaagcgccatcattaccctaccccgagctgactcaggctacggggaacaagaccggcgtcccatctggctcgctccactatacgagtaa

SEQ ID NO: 676 - DNA, 1814 bp, Zea mays
  Peptide Sequence Number=SeqID_44051
agttgcatcaacaccttctggatgcaaatgtagaagttacttacacagaatacttagatctgatgaaagtggaagttgatcaacatcttaataagctctcggaggacataagggacctcaaaagctgtaacttggcccacaaatatgacacagatggttcatgctgtacagcatgccatgttgggaagctagctgagatagatgacaggttcaacagcttgaagtttctgctggctgtggtgttccgacaaattagagagatcctcacagtggtcaattcttcaattcatgatcttcagtgggagcatgagttacagtcagaagttaccggcatcattattggagactgtattagaggtcttcaggatgaactcgagaggaaactgtatgagcaaagttccatggtgaacagtctaagaaaaaactgccaggaaactgtggcgcagtttgcttccatacgtgaagagctgattgctatttctaatattctgttaccttctgaagaggaaccacaaatttccctctgtaggcatgaaagtttgggtaactggagtgacagatggaagttcagctttttcagaaagcgagcacaccaggatcactctttatcttccacgcaaaaccagaattctgcaacacagaaatctataagtcctagtgaagttatatcagaaagatccgacttccgacatctgaagggtatgactagacatgaaatgcttaactatttcagatctgagatcagtaaattaagaaggctgcatgagttggatttgcaagagaaaacagaagagctgtttaaattcaaacgagagaaatggtcattggctcttaagtatgatgtagaatttgagcctttaagaaggaaattccctgaggtcatttcaagatttgaccaaatcatgtccaatggaatggcagcagcagtacctacaatctgcagtaatagtgatgcattcgatgaaacgagcagattgagcagtataattgattcactataccgtgaaaaccagcatcttcattgtttgcttgcagagaagatgaagaatattcaggaattatcaagccaaatatctgattccaccaggaaaatgtcacttcaatattcattagaaaaacaaattttgagacaactcaacagcactcaagtagaatatgaggatctttttgttgaaagtactatcagagatgaaatttaccaaactgttgtgagaacattggttgatagtcataggaatgttttggaggataccacccaaactttccgtgcaaaagtgtcttcacttgaagccgcactctctgaaaaggacaaggcgttgtgtttatctgatgaggaaaatcaaatgctaaaggaaaagttgtcaacactagaaaaagagcattttatccaaaataatcagcaagatctcgagctaatcaagcaagaaagtgaggaaatggttctccgtgatattgagatggagccacaaagatcatgtgagatttctgatcgagatatacagtacgaagggctcatcaagctgaatcaggttttagaaattgcctcaaccacggcaaaagaaatagaaacaaaaaggttgaatctcagtgatatccaagaatgcaaaactaaatgtttcagcatgattttttacggctgtcagaccgtccatcagcttgatgtcaagaatgtattcctccacgacactctgaaagagacggtctactgtagccaacccactggcttcgtcgactccgctcgtccggatctgcccaaggggctgcagcatatgcttcctagagttgcgaatatgctgtcctacaaactgcactaa

SEQ ID NO: 677 - DNA, 207 bp, Zea mays
  Peptide Sequence Number=SeqID_44052
atggggtccaggcacagtgcttgctctgccgaggctgagtgtcgaggttctttcgttttgcttttgttagtcaccctcctgcggggagaggttgcctttggtgcaatctatgctcagatgagggttataggcatgccatttggcttgccttcagctagggatggtgtgctgatatcggtgaacgcctctacaaatgcacaacaatag

SEQ ID NO: 678 - DNA, 279 bp, Zea mays
  Peptide Sequence Number=SeqID_44053
atgtatcagtcggaccggacctccgcaagaaagcaccggacctctgtacgcacaacccggaccaccgattacggtcctggacttccaaatcctgtagatggcgcacctgtccagtccattgtcaaacagtgcgcccgtgccgcgcggcgcactgtgtccatcatcccttatacgagaagcttcccctgcacgccgaggctacgcagatcttggatgtcagggcgcaagaagattgctctagcagcaaacattagtagctccaagtactacatctgttaa

SEQ ID NO: 679 - DNA, 354 bp, Zea mays
  Peptide Sequence Number=SeqID_44054
atgcaggaatcccttgcaggaccgccatcacagcaaaatcctcccgagggcctccccaggaatcccttgcaggaccgccatcacagcaaaatcctcccgagggccttcccaggaatcccttgcaggaccgccatcacagcaaaatcctcccgagggcctccctacactgaccactcccctactgcccttgcccctttcgggaaagtgcagggggttctggcgcaagaatcccgagacacagggaacagggtccctggacggcgggttgaatactggaaaccagggggtttattttgtaaaatgtcgcgaggtcgaaggggtatcggccaccatgatccgtccgatccacattag

SEQ ID NO: 680 - DNA, 510 bp, Zea mays
  Peptide Sequence Number=SeqID_44055
atgaacaaacacaccggcattcgagatgccgtcacaaacggagctccggttccccctccgcgggtacgaacaacccccctccgagggggaaggcctgcggagcaacggaaggccgacgaatggtgcgccgtcacccgctccagcagcggcgacgacgacgccttctgctccgagggaccaagcagcggcaacgccgacctcaggctcgatgccgctgccaggaggcccccgcccatgccaaaacttgtgaggcaaggacgggcagaaggccatagagttggagggaccgggaaggggggataccccgaaagggatccttctccgcgaagggaccgggctccgagccccccattactgatcaggggttcgaaggctggccccccgaagggttcaacagtcgcctcagatcgcgtgggcccgacacccactactggtcaggggttcgaaggccagccccccgaagggctccatggccgcctcaggctactcgggctccgcgcccattactga

SEQ ID NO: 681 - DNA, 882 bp, Zea mays
  Peptide Sequence Number=SeqID_44056
atggaccgaaggtccatgacacctggtatcagctccaggttatcctcaccaccaccagccgccgcgccattaaccgccgcaacgccctcccacccgccatctctaactccaagagcattcactcggctcgaagaaagttttggccgtctcgcagagaagtgggatcagatcgttgtgatgttccaccgctacaaggagaagacagagaaggaactccaagcagcggtgcggcagcgcgagggttcctggcacgccgccagggccaccccatggccgtcatcacatgagcaggtcgtggtgcgcctgcaagccgcagtgcgcggcttccttgttaggcgggcggtgcggaagctgcacttgctgatcagctcatcgctgcaccaactcgcagcctgcgcgtccaaccaccaggtctcgtctataccttttgaaccccctgcagaagtcgagatctgggtgtgcagcccccctgcacggccaaagagggttgtctcctttattcgggcaactgctttggtgctggacagacccaacataagaacgggctggttcctccttcacctttcatccaacgtgaaatccgcagttcagctctttccttgggatccaggagggcaggaggacatagctgcagttcaaatttatattttagttccacaattattttgtattttcgtcttaaataataaaggtaagccgagatgtaaaaggcttaaccttaagtcgtgtcaggtaagtctatggcagctcgaggacgagctggtcctcaagggagggggagatgtcatgggcatcacagggaacggtcaccaccatgcagtccgcacccgcacgaaaggaaagaataagattgagatgagctgggataaggctagagaataa

SEQ ID NO: 682 - DNA, 999 bp, Zea mays
  Peptide Sequence Number=SeqID_44057
atgggttggcttgaaatgggtttcatggttgggttctcgggtgggcgtccacagttcccagtggcgcacggttctgccgtcgcgctccgcgcctgcatctccctccgcgctccctccaccctcccgcggccgcaccctgccccgcatcgcgcctgcatcccgcccgccgccgcacctcgccctgcatctcggccgcatcccgctggcggccgcaccccgccccgcatcccgcgaccttccatcaacggcgcatcaacacccgcgcgcggtccactccccccacccttctgcgctgctggccgagggggcatcgatccgcggaggagacacacggtcgtaccttctgcgctgctggcagaggcaggggagagctccatccgaggtgaaggcgcgcgcccgtggcttctgcgctggtggtcggggctgctggaagctcgatccacgatggggagccccatccgcgacctcccaaagtccccggccacgccagcagcgcctcccagattctcccccgttcatctcgcccccgcccgtgatcccctcgccgcgctcccctcggcgaccccatccatctcgccgccgtccacgaccatagtctgcgcccttccatcggacatattcacaggcattctcctcctgaagcctgaaggcctcaaggattcatgctactgcttcgtgatctgcccatcaagggaggaggctgataaggctgtgactgcataccacaacaagcgcacactacctgcccatcaagagacttgcattgttctcattggtgaaattggaggtatggctgaggaggatattgcaacattcatccaggtggtgagccggtgtacgggtattccaatgactcgacttggccataacgataaggagaggctggtcgtccttgctgacaggagggtggccatcgcattgccactgctgatgtacctatcaaatgttgagaagggtggccatcacattgccacggttgatgtacctatcaaatgttga

SEQ ID NO: 683 - DNA, 951 bp, Zea mays
  Peptide Sequence Number=SeqID_44058
atggctgaaaggtaccagctcccacggagttgcgttcccccaacgacaaggcggaaagcttgcgggtatcccccatccgggggcttggaaggcggaaaggcacgatgcataacggagcgcgaagacatggtcgcctttcaagggggtcaccctccttttaaaggcgactctccctacttgcgtcctcaaccgtcgggggctgagtcttctctgacacgctccaaggtcctccccctacgacgcgggggctgggtcccacacgtcatgcaagccggcccagagcagaagaagccaaaccgccgcgcgcggtgcgtgcaatcgcccagtggattacaagcggctctccacttttgcccagaccagcgggcgaaagggcgggtagccgtgcaggcggcatgcaaccgcgccaagtgggggcacttctccgacttccagcacgcccagcatggaggcccaagcccacgcgacatgcaaccggcgcgccggatgcttcgtgcaagcaactgcaccgccacttgcgccactaccgcgcctcctcgactgcggaaccgataccgcaactcgagacgacccagcgcacgacccggcagcgccagcctggcgcgacggagaagcaagcgacgctacaccttcgccataatgaccgcgtcaaaagaaaagggaccgggaaagggggataccccgaaaaggatccttccccgtgaaggaaccaggctccgagcctccctactgatcagaggttcgaaggctggcccctcggaagggttcaacagccgcctcagagcacgtgggctccacacccactactggtcagaggttcgaaggccggcccctcggaagggttcaacggccacctcaggctactcgggctccgcgcccactactgatcaggggttcaaaggctggcccccgaagggttcacagccgcctctgacacagagcgagggatga

SEQ ID NO: 684 - DNA, 1128 bp, Zea mays
  Peptide Sequence Number=SeqID_44059
atgccagcacttgctgctgtcagggacgaggcgggcgctgtgtcccaccggctgaaggagatgaaggaggcactaagtcaggcggctgacttcgcagaccgcgcggcgtcgggggccctcacgacatttgtgtctgccgaagtcgagagacttcggacgcaacatgccgacgccgtccggaaaaaatcggccgccgacagtaagtgccgcaagctggcggacaaggtggccgcgctagagggggagaagactgacctccggcgccaactggcggaggagaggagggaggccaatgaggccctcgccaaggcgcaggctgcacttgcggaggccaatttggcgcgggtggagggcagttttgccagggagcgtgccgagcagttagaggaggggctcagcgccctgcagagccgtgtggagagagccgaggccgcgacgcgcacggaggctgagcggacgcgcaaacatcttatggactcataccatgagctgggcgcgcggaccgctgacttcgaagtgccggaccgagagcccggacttcgctgcctggagtgggtacaggaggagttgcaggcgctccccactatcgtggaggggttcatgtcttatgcctccctggtcacctgcgagggggcgatgaacgcgctctctcgcgaagggtgccggcactatgaggtcttcaaccaagctgatgaggatttcgagcgtgacatcttcaaggttgaggaccctatagtgaaggaatccgcaggagccatctacgaccggatgtggggcccgcacgatcgagaggtggtcagggagcgggccgagacggtgaggggtcaggcggagcgtggcgagagggtggatgacttcggggctttgaacagcgcgctgcctgacccggagtcgaacccggcggaggctgtgtccgaggccgccctggagccgcccccggaaaccgccgaaggcgctcctgatgcccccgcagccgctgtggccggcgaaggcccgcccctggagaccgccgaaggcgctcctgatgcccccgcagccgctgcgccgatggctgaggatcctgtgacggtggcggcggaggcgacagcggaggctcccgcgacggctgggtcttcgcaggtggcgtag

SEQ ID NO: 685 - DNA, 711 bp, Zea mays
  Peptide Sequence Number=SeqID_44060
atggaggtagtggagttggttccctgcgcccgcaacaagtggggcaattggcaagatttttggttctacgtcgcggagggtaccgtcgaagaccatctggggctccccgtgtccgagatgtgctcacatttctactcagcatacatgccttttgaagtggcggaggaggatgcggacgaaggggcccttcggtgcgccgccgacctgagcagtgggcgcgatttggttgaggaatttattgcgtacggggtatggcctttggcgcatggctgggcgttgggcgaagtgtgccctcgccggatgccttcccatggtgggaagctggtgcgaagtcctgtcttcgcgctggatctgcatagccgcgatccggccgcctttgtgcgtgaggcagaggatggggcagtgcggatcgttggtcggatcactagggagctgcacagaagcaccaggcggtcgtcaggcttcatgaagccaggccgaagagacagcgggggctacgaaggctactgcccccggcggaggccagccgccgctggcggcgaagtcggccgtccctgcatccagcagggcgccggaggctgcggctgccgccggtggttccaagtctgcgaaggctgcaccggcgtccggcagggtgccggaggccacgaaggcggcccgagggttgccgccgccgggcaagcgcgtcgcagacttcgccaccgacattag

SEQ ID NO: 686 - DNA, 78 bp, Zea mays
  Peptide Sequence Number=SeqID_44061
atggggcatgaactgtccatgtcgcagaaactcagtctcgcctacgccgcgctcgtcggaggtcttcttgacccctga

SEQ ID NO: 687 - DNA, 2311 bp, Zea mays
  Peptide Sequence Number=SeqID_44062
atggcgcttcctgttgacgtggcgggtctgtgccctaggcagggtgacatgggggctcctccgaagccgaggttgagtctgtcttctgttgctgaggccgagtccgagccatggggtcgggcgaggcggaggtcgttcggccgaggtcagggcggagtccgagccctggggtcgggcgaggcggagtttcgtcgtcttccgggtcttagcccgagtccgagccctggggtcgggcgaggcggaggtcgttcggccgaggccagggtggagtccgagccctggggtcgggcgaggcggagtttcgtcgtcttccgggtcttagcccgagtccgagccctggggtcgggcggagcggagttcgccgtcttccgggtcttagcccgagtccgagccctagggtcgggcggagcggagttcgccgtggcgcctttggcaaggcctgactgtctgtcagactcactctgtcgagtggcaccgcagtcgaagtggcgcaggcggcgctgtccttctgtcagactggcttggatcctgacggctaaagggagcatctgcgcccccggcatcgacaacaccttcagcgaggcccgacctagcctcggacggcgacgcgatccaagggtctctgctctgaaggacaacgtcatcaccaagcccgggccattgccgccagggtcttctccgagaatccggcccgagcaggcggctcggccggtcaccccagggcctcggccagctgtcctccaaggacatcagcccggcccgaggcctcggcagcagcgagggcctcagggcggatgctgctgcaatcttgccctcgcccacgccgacgctcaaggggcgaggacaagtacaaagagccggaggcccgaagcgcggatggtggcggtgatcccgtcggcaacggggacttctcgagccgcctccacctcggcaccgacgaaaggggctgtcagccctccggtagatccccactcagatcctcccggacgagtggggcaccgacctccgcacggaggcgccgtaccggtgcaaaggcaggaccgccccagaacacgaacgccgccctggcagcgcgcgatatcttgggcggtcctcccgtgcacacggcgcggcagccgccttccggcaggagggggcaccgggagccaagccgacgagcccgacgcgctgaggctgacgacgcccgccgtcgaccggccccgcgttgtcgaagtccgacccgcccgcagggccagtgagcgccctctccctcgaacgccgaaggagaggccgacccacgaacccgcgcgggaggtagagctctggctcagcccggcctccaccccagcaaggatgatgaacatccttgaagctgagggtgggaccaagatcgcagcccggcctgcttctccccacccagggggctggtggtcaccgtctcaggtgaccaccggcgtaggggtacagccgggctggctgatgaaaatccttgaagccgaacgatggctgaaaggtaccaactcccgcggagttgcgttcccccaacgacaaggcggaaagacggcgggtatcccccatccgggggcttggaagccgtcgcgggctgagtcttctccaacacgctccaaggccctcctcctacggcgcgggggctgggtcccacacgtcatgcaagacggctcaaagcagaagaagccaaaccgccgtgcgcgatgcgtgcaaccgcccagcggttacaagcggctctccacttttgcccagaccagcgggcgaaagggcgggcagccatgcaggcggcatgcaaccgcgccaagtgggcgcacttctccgactcccaacacgcccagcatggaggcccaggcccacgcgtcatgcaaccggcgcgccgaatgcttcgtgcatgcaactgcaccgccacttgcgccaccaccgcgcctcctcgactgcggaaccaataccgcgactcgaggcgacccagatcacgacccagcggcgccagcctggcgcgacggcggcgcctctggcaggagaagcgagcgacgcttcgccttcgccataacaaccgcgtcaaaaaagggaccgggaaagggggataccccgaaaaggatccttccccgtgaaggaaccaggctccgagcctccctactgatcagaggttcgaaggctggcccctcggaagggttcaacagccgcctcagagcgcgtgggctccacacccactactggtcagaggttcgaaggccggcccctcggaagggttcaatggccgcctcaggctactcgggctccgcgcccactactgatcaggggttcgaaggctggcccccgaagg

SEQ ID NO: 688 - DNA, 2580 bp, Zea mays
  Peptide Sequence Number=SeqID_44063
atgaaggggcccttcggtgctgtccgcatgagcagcgggcgcgaccttgttgaggagtttgtcgggtatggggtatggcccttggcgcatggctgggcgctgggcgaagtatgccctcgccagatgccctcccgtggcgggatgctggtgcgaagtcctgcctttgcgctggatttgcatggccgagatcctgccgcattcgtgcgtgaagcggaagatggtgcggcgaggatcgtgggtcgctacgtgccgaagacagagggtccgcggagctgggatatccgtgggtccaatgacaagctgaatcgggttttcgaattgaaccgtttgccgtacgattgttatcctggggaagacaccgccgaccgccgcaggaagaaaccgatgggcggtaccgaggaagggccttcgcaagaggctgtcccggccactaagaagagaaaattaggtactatattggggagaaagggggtgtctgataattttgctgtggagttgatgggaacatgtgcggcccccgggggaaggatgtcttcgcccgagctccgggagtcttcggcgcgaatgctggaggttaccgggggtcggtggccaaagaatcttccgatcccttgggcagagggcgaagacatgtctacgtctcgtatagctcatggcttgaggattttctcttacggacgaaatattgctgctgttgtgtcgtcagtgatgaacaaggattgccaggatgctgcgcagaagcgtcgggcggtcatcaggcttcccgatcctaggcgtgaagcgaagagagcgtgggggagtgtgaaggctgtcgcccccggcggtagccagccgacgctggctgcgaaaccggccgcgcccggatccagcaaggtgccggagagcacgaaggcggtcgtcaccgacagaaccaagtctgccccgggtggagctgcgaaggtccgggagctgccttcgccggggagacgtgttgccgacttcggcatgaatattagcgtggacgactatttcgttgccacggcatcaaccgcggtggttggggtgaggggtgacgctttctgcgcgagcggcgagatttcgtcggccgctgctgtcaaggacgaggtgggcaccatgtcctgccggctaagggaggcgtcgcagcagttgtcgcagcagctaagacaagcggccgacttcgccgaccgtgtggcgtcgggtgcccttactgcagatgtgtctgccgaagtcgagagacttcgggcgcagcacgcggacgccgtccgggagaagtcggctgcggagagcaaaaaccgcaggctggcggagaaggtggccgccctagaggccgagaagacagacctccggcgccagctggtggaggaaaggagggaggccaaccaggccatcgccgaggcacaggctgcgcaggcggaggccaaattggcgcgggcggagggaagtctcgccagccaacgcgccgaggaatgggaggtgaggttcaacgctcgtggactcgtaccgcgagttggggcgcggactactgacttcgaggtgcccgaccgagaggcgggccttcgcttcctcgagtggttgcaagacgagccgctggtactcccgaccatcgtggaaggtttcatgtcctttgcctccctcgtcatctgtgaaggggctatgaatgcgctgtcccgcgaggggtgcaaacactatgaggtcttcggccggtccgatgaaaactttgagcacgaaatttttaaggtcgaagaccctgtggtaaaggattccgcgggggcactcttcgatcggatgtggggtcctcatggccgggaggcggttagggagcggagtgtgttgttgctattgatggcgcgtgccgaggatgtcgaagaccttggggatctgaacggcgcgcggcccgaggccgaggttaacctggtgctgcccgaggctgaagtcgaccctgtgctgcgctcgaaagctgttgagggctcctccgccggacctgtgtccactatgtctggtgaaggctctttgccagcccctgcaccgacggcggaggaccccccgaagggggtggcggagctggcagcggaggatcccatggcggcggccgggccttcgcaggttcaagattttgggcctgcgcacgcaaccgctactgacactgctaattttgtggcggcttcgaccgtggttgctgaaaatgaatcggatgattctgtgtctaagttttttgagtctcatgattctgggagttcggttgtgtggactgaagagtcttcggatgaggactttgattattttgcggccttggatgtggctgcggtggaggcttctccgcgtgtgatggatgctgaagtttttcctggtccgagtgcggggcgcaggcgacgaagggcggtggcgaagcgtagagtgagtgaggtggagggtgggcgtcttcgtgtggatagggctggcaagcaggaattgttgtcctcgccagctggggtgagtgtaagtgagggggagttgcgaagtctctttgagggtgaggagctgaggatgatgctgtttaactacagagagatgggtatcatcccgaaggttgaaccaatgtaa

SEQ ID NO: 689 - DNA, 177 bp, Zea mays
  Peptide Sequence Number=SeqID_44064
atggcgcaccggacagtccggtgcgccaccggtgcgccaacggtgcgccaccggtgcgccaacggtcacttccaacggctagttctgacacagagccgttggactcatggcgcaccggacagtgaacagtccactgtccggtgcacaccggacagtccgcctggtcccacctggtag

SEQ ID NO: 690 - DNA, 2389 bp, Zea mays
  Peptide Sequence Number=SeqID_44065
ccgcgcgctaaaagtctttttcctgtgcgctgtccggtggttcaccggacagctactgtgcgctgtccggtgtgcaccggacagccactgtagactgtccgcggcgatttcccagcgcccgccggcgtccttctctcaccggcggccaccgtcctcgccaggctccggcgacctcgcccgtgcccttcccctcgtgaccttgtgtgaccgtgtgccgtctctcgtcctgcctggatcgtcacctctcgtgatgccgcgcacgaagaatgcgtcggcatcagggggtggcgacgatgaggaccctcgtcgccccttcaggcaggtgaagggcaagactgtgtatctggagcagcaggaaggccgcaagaagcggcgttcagacagagaggctcgcgcagcagcggcagctgccgcagccgctgcacaggcagcacttggagatcagccggatattccatcagatcagattgctttccgtgctcatcgtctcgcctcccggtctcgctcctccactcacacctccgcttccactccgccacccactctgcctgctccagtcactcctattgctccatccacctccaccgccatacccactaccagcaccacgccagcttccactgcttcccctgcccccgctcccgcttcagctccacctgtccctccacctcgcttccgggagcgcgatgagactgaggtccgtccactgggttcggatcctcgtctatttgatcttcagcgtgccactgcagcccgggtacgtcggttcaggtacgtacccgtggagtcttggctgccagctcagagagacccagcagcaggagttcttttcagcactcggattcaggagtctttcttcagggcacagatgtcagctcagattgcgctgcgagtacaccgcctattggatcttccagctttcttgctagcagccggtgctgagtctgaggctcatctcacctatttgccagggcttctgtcctttctgactatcagcggcagatacgttgaggagtgggtccgcgtcttctatgcctctgtttggattgacccggatcatcattggatgaggttccgctttgagcgcgaggatgtcacgatcactgccagtcagatcagacagctttttggattccctgattcgtcgactcgcctccacagtctctgttacggcacttcagatcctccacgtcgccctcacggtggtgtagctccagggacagctcacgtcgcggctctgttccgcccgcctttcacagatgggtcgcgacgttctccagcagacttcactactgcagcgaagtgcttatatgagctcgtcagacggacactcctgcctaggatgggatacagggaggccaccactcatatccagctttggctccttggtgccttggtatcccactctgagtttgatgttgttgactttctgatctgtgagattgaggacactgttctggatgggattcgtgctcggcggcagctaccctatgctcactacttgtgccacatatttgcgcagctgatccagccacctcgctttcagagcacccttgaggcctctcgccttgtgtttggatcttaccgtcctgctccagagattccagtgccagcttttgctcctgtgtttgacactcaggctgaggatgcagcacttcgccagtttgacacccagggtgcagcagatgatgatgatgatgatgatgattttgggattcctcctccacctccgcctcctatgcctccacgctctcatgatcatgaggctgggagctctagtgctgcccctgctacccctcaggctatggaccctgctctagcttcgattcttcagactctcactcagcagcaggctcagctggcagccgagcaggcccgtatgtccgagaggatgctctcaatgtttcagactatgcaggacaggcaggattcacttcagcagcagcttattcaggatagggcagagaatagggcattcatggccctcatgcttcagcattctggtatctcagcgtccccagttcagtctgctccgccttcttcgcgtcacgctccagtagtgccttcgatcttgtctgcaccccctgctgttacctctccgctccggccggtcaccttggcgttcacttcaccagttctcagctctgtctgcccgcagccgccagtgccaccagcatctgctgtttccactaccgctgtggcagtatctgtgactgcttctgctccggtagctcctgcagcgctgcctgtgtccgagtcagtaccagctccagcttctaccgcagatcctggatccgagcctgactctgaccctccgtcggcgtttgctctgctacctcgacctcgaccggatgcgcccccgtcgcctcctcctgcatccgatgtttag

SEQ ID NO: 691 - DNA, 1053 bp, Zea mays
  Peptide Sequence Number=SeqID_44066
acggactcttctgccgaggatgggatacagggaggctaccacacatatccagctctggctcttggtgccctggtctcccactctgagtttgacgtcgtggatttccttatttgtgagatcgaggacaccgttttggatggcattcgtgttcgtcgacagttgccatatgctcactacttgtgccacatctttgcgcagctgattcggcctccacagtttcagggcacgcttgaggcctcacgccttgtttttggatcctaccgtcctgcgcctgaggctcctgtgccagcttctgctcctgtttttgactctcaggccgaggatgcatctcttcatcagttcgacactcaggatacagcagttgatgatgatgatgattttggggttcctcctccgcctcctatgcctccacgctcacatgatcacgaggctgggagttctagtgctgcccctgctgcccctccggctattgaccctgctattgcttcgattctccagtctctcactcagcagcaggctcacctggcagccgagcagacccggttgtccgagaggatgctcacgatgtttcagaccatactggacaggcaggattcccttcagcagcagctacttcaggatcgggctgagagcagggcattcatggctcttatgctacagcattctggtgtctcagttcccccagttcagtctgctccacctcctccgcttcaggctccagttgtgccagcgattcagaccggaccccctattccttctgttggtccttctccgctccggccggtcactttggctttcacctctccggttctcagctctgtctgcccgcagccgccagtgccaccagcttctgctgttaccagtactgttgtggcagtatctgtgaccacttctgttccggcagctcttgcagcgcggcctcagtccgagtcagtaccagctccagcttctaccacagatcctggatccgagactgactctgacccccgccggcgttcgctctgctgcctcgaccgcgaccgaatgcgcccccgtcgcctcctcccgctttag

SEQ ID NO: 692 - DNA, 375 bp, Zea mays
  Peptide Sequence Number=SeqID_44067
atgaggaccaagctcaagatgatgaaaatgaagatcaagaagagccacctcaagaggaggataatgatcaagggggagatgccaatgatcaagacaaggaagatgatgagggtccaaggccgccacacccaagagtccaccaagcgatacaaagagatcaccccggtggaagatgcattaagagattcggattgggtgttggcaatgcaagaggaactcaacaacttcacgaggaatgaggatgccaagcccatcaagacacccatgggaaccaatgggcatctcgatcccgacatgggaggtaaatccatagatcaaaagatcagcggcaactcccatactaagtatgatgtcgcatatcggttgtctaactag

SEQ ID NO: 693 - DNA, 72 bp, Zea mays
  Peptide Sequence Number=SeqID_44068
atgggcaagagggggagcgagggtgatgctggagactttgatggagattttatcgacgacgatgaattctaa

SEQ ID NO: 694 - DNA, 945 bp, Zea mays
  Peptide Sequence Number=SeqID_44069
atggatcctggcacacatatgatggttcgcactctccaaaccacccgcgtcaacaccagctatgcccctcagctccggcagatcccggtctacccagtggtagtcgagaaagttccggcgaatctccctcctgtccgagtggagaatgtaatcaacctggaggacagctcggaggagcagctgccgacccccaccccgttggccgagtccctggctttcgcagctgggtcatcgacgtcagcatcgtcggcaccagccttccaagcacctgcacctggaggcgacgaccccgatggagacagtgatgacgaggatgacgacgacgaagacgatggagaagatggacacgtcaacgaggaagctgactacgcccagcaggacaacttcatggggtttggtcctgttgtcgaacattacacatcaatgttcgagacggggcacttccccaacttgctgcaggaggtgctgcatgcgctaggcacctacgtccgcccctatacgaaacaaggcgagactttgtctgctcacgagtccctgataccactgtccacctacgctgcctcggtcagcgatgctacccgtcgaaccctgtggtcgctcagccacacctaccggcagcagctgcagaacacgaggttcaagcatcttcctcagcgtctgcgtggagaaagccagaccaacattgtcccaggtgaacctggtgaggatcgcctcaacaccctagctggtgtagtggccggtctcaacactgacctagacagtgccaccctggacctctacagggtgcacttggagctggagaatgcccacgccaggattgcagccctggaagcccaactgcaaggactggatccgccagaagctcaggtccccgccgtggcgctgtctcctccccgcaagaggctgcgctatggagagcccgaatcagtcactaggctgctttaa

SEQ ID NO: 695 - DNA, 1676 bp, Zea mays
  Peptide Sequence Number=SeqID_44070
tggcaaaagctcaccacgagtgctacactggcattcagaagcttatcgctgacgctatcgttgagaagcgagctgccaaagagcgcaggaggaaggtgaagaacgaccctagagcaggagcaggagcaggaactagttcaattgcaccggaggaccaatctagaggaggtgatggtgaagaaattatacggagtcccgttgcaattgaccctagagctggagcaggatcaggaactacttcaaatgtaccggaagaccaacctggaggaggtgatagtgaagaaatacagttggattgcagtggtggagatcttgatgacagcttagattttacgagaaccccatcgtgtggtgttgacattgatctggaagagggaaatttgaatagaacacctcctgatttacgtgggtcaacccgaagtattgatgatatattggaaatgatctattccccagagcactttgcaagcattgatggcgagtcccctcccaatagccagccgactcgtgcaccacgaattgctgttcgcaagaggaaggcttcctcaaacccccctggcaatgatcaaccgcctgtgggaccacctgagacagaagaggagcctctgagcagggacactgggatgcagcatcctactgcccagaaggcagaggctgagaagaaaaaggctgagattgagatgaagaatgctgaagctgaggaggctgagaagagaaaggctgaagccgaacaagctgataagaagaaggcagaagaagctgagaataagagaaaggctgaggccgaagtagctgagatcaagagaaaggctgctgctgaagaagctgagaagaagaaggaagtagaagctgagaataagagaaaggctgaggccgaagtagctgagatgaagagaaaggctgcagctgaagaagctgagaagaagaaggaagaagaagctgaggataagagaaaggctgaggctgaaaaagctgagattaagagaaaggctgaggccgaagaagctgagattaagagaaaggctgaggctgaagaagctgagattaagagaatggctgcagctgaagaagttgtgaagaagaaggctgatgccgagaagaaggttgatgcggaggagaaaaggatacaggttgcaatccagaaacagctaaaggacaacatcaaagctttgaaaaagccggtgcccgctgccaagttaaagaagatgttccagttacaaatgtcaaaagaatatgctgagcagcgccaacagtacgaggacaggttgaacatgcttcgtcaggaggccaaagctgagattgatagtttggagaagagcattgatggccaggcaggacccagctcatcatttgatgatatacagttcccggcggagtctgatgatgatatcaacaatttgacccaaccaatccgactttctcaagacgaagtctcagtaggccaggctgatttcagtgagtttcaaaggatgatattcaagcgcctaggtgatagagtgctgaagaagcctagggagtacatatccccgttcaagatccctcgtaatcgacctgagatacccctggccaaggctgttgcacttaggcggaagatcgcatctgatcctgagctgaaaaggtttttttttgttttcccaagttgcaattgctatttacattttattttgcaattctaa

SEQ ID NO: 696 - DNA, 456 bp, Zea mays
  Peptide Sequence Number=SeqID_44071
atgggcaagaacaacaagcgtaagcgtgagccgactcctccatcggaggagtttggtgactcggaatattcggaggaggagttctcctccgagtccgaggggtctccggctcccgcctctcccccggcgtcgtctgatgactcggacgactcccaggggatagccgcggaggtctggacgtatatccgggccatcgagcgcgccgggctcgaaggctcggacgagtcggagtgctcctcggatgaggaggactcggacggcggcgacgagggtgaagacgacgacgacgacgacgacgacgacgacgacggcgacggtggcggcagtggcagtggcaggggcggcggcgacggcagcagggacagcaccaagggcgacagcaggggcagcaccaagggcagcagcaggggcagcaccaagggcggcggcggcggcaggggcagggccagtggctag

SEQ ID NO: 697 - DNA, 1071 bp, Zea mays
  Peptide Sequence Number=SeqID_44072
gtggctgacttcgccagccgcacagcgtcgggggccctcacggcagctgtggctgccgaagtcgagagactttggacacaacacgctgacgccgtccgtgaaaaatcggccgccgacagcaagtgtcgcaagctggcggacaaggtggccacgctggagggagagaaggctgacctccggcgccagttggcgggggagaggagggagaccaacgaggccctcgtcaaggcgcaggctgcgcaggcggaggctaacctggcacgggcagagggcaatcttgccagggagcgcaccgagcagctgcaggagcggctcaccgccctggagagccgcgtggagagggccgaggccatgtcacgcgcggaggcagagtggacgcgccagctgcttatagatacataccgtgggctgggcgcggggaccggtgatttcgaagtgccggaccgagagcccggacttcgctgcctggagtgggtgcaggaggagttgcaggcactccccactgtcgtggaggggtttatggcgtatgcctccctggtcacttgcgagggggcgatgaacgcgctctcccgcgaagggtgccggcacttcgaggtcttcgaccaagacgatgaagattttgagcgagatatctttaaggttgaggaccccgtagtgaaggaatccgccggagccatctacgaccggatgtggggtccgcacggtcgcgaggtggtcagagagcgggccgagacggcgagggctcaggcggcgcgtggcgagagggtggacgacttcggggcgttgaacagcgcgctgcctgacccggagccgaccccaacggaggccgtgtctggggtcgccctggagccgaccccggagactgcggaaggcgcactggatgcccccgcatccgatgcggccggcgaagacctgcccccagaggtcgccgaaggcgcgcctgatgcccccgcagctgctgcgctgagtgctgaagatcccgcagcggtggcggcggaaacaacagcgggagcgacggcggagccaacggcggaggctcccgcaacgtcagggccttcgcaggtggcgtag

SEQ ID NO: 698 - DNA, 468 bp, Zea mays
  Peptide Sequence Number=SeqID_44073
atgggtcggcgtgagacggaacacaagggggaaaacagtaaggggaaccgtggctcgtgttgtcctgcgcccaaggcggatgcgcttgcagtagggggttacaagcgttcgcgagggagagagagagagagcctgctcgtcagcccgtcctcccgcgcggccaccttctcgtacgagggccctggaccttccttttatagacgtaaggagagggcccagggtaatgatgtacccctctgcgacgtggtcggcccgagcccaaggtcgggcgaggcggaggctcctccgaggtcgaggttgagtccgagccctggggcgatccttgcattgaatgctcctgcgatgcggtcggttggcgcggtgatctggccaaggttgcttcactgcgaagcctgtccgagctgggcctcgggcgagtcgaagcgtcgtgctgatggtggttatcagccgagtttaggagtcttgggg

SEQ ID NO: 699 - DNA, 2598 bp, Zea mays
  Peptide Sequence Number=SeqID_44074
atggccgaggagatccaccagaaccaggaggaggaggaggaggttgtggctgcgtccaccgccaagcgcagacgcaaggcggcgtcttccgggaagaagcccaagccgacgcccaagcaggccaaaccggccgtggcggggatgaagaagaagggggagaccgagaagacggagcccgttgtggacgacgtgtgcgccgaggagcccgacgaggaggagttggccatgggcgaggaggaggcggaggccgaggagcaggccatgcaggaggtggtggccgcggtcgcggccgggtcgcccggtaagaagagggtggggagaaggagcgccgccgcctcgggcgaccacgtgcccgagttcatcggcagccccgttgctgcggccgaggcgcacagcaactggcccaagcgctacgagcgcagcactgccgcaaataaaccggaggaggacgatgagctcaaggccaggtgccactaccggagcgctaaggtggacaacattgtctactgcctcggggatgacgtttatgtcaaggctggagaaaatgaggctgattacattggtcgcattactgaattttttgagggcactgatcgatgccactattttacttgccgttggtttttccgtgcagaggacacggtcatcaattcgttggtgtcgattaatgttgatggccacaagcatgaccctagacgtgtttttctttccgaggaaaagaatgacaatgtgcttgattgcatcatctccaaggtcaagatagtccatgttgatccaaatatggatccaaaagctaaggcccaactgatagaacattgtgacctatactatgacatgtcttactctgttgcatattctacatttgctaatatctcatcagaaaatgggcagtcaggcagtgaaaccgcttcgggtatttcttctgatgatgcgggtttggagacgtcatctaatatgccagagaggacagcaacccttcttgacttgtattcgggctgtgggggcatgtccactggtctttgcttgggtgctgctctttctggcctgaaacttgaaactcgatgggctgttgatcttaacagttttgcgtgccaaagtttaaaatacaatcatccacagactgaggtgcgaaatgagaaagctgatgagtttcttgctctccttaaggaatgggcagtcttatgtgaaaaatatgttcatcaagacgtggattcgaatttagcaggttcagaggatcaagaggatgctgacactcttgacaaggatgaatttgttgtacagaagcttattggaatacgctatgatggcactggaaggaaaaaaggcgtatattttaaggtccaatgggaaggatatggtcctgaagaggatacatgggaacctattgataacctgagtgactgtccgctgaaaattagagaatttgtacaagaagggcgcaaaagaaaaattctcccgcttcctggtgatgttgatgtcatttgtggaggcccaccatgtcaaggtataagtgggtttaatcggttcaggaaccgtgatgagccacttaaagatgagaaaaacaagcaaatggtgactttcatggatattgtggcatacttgaagcccaagtatgttctcatggaaaatgtcgtggacatactgaaatttgctgatggctacctaggaaaatatgctttgagctgcctagttgctatgaagtaccaagcacgccttggaatgatggtggcaggctgctatggtctgccacagttcaggatgcgtgtgttcctctggggtgctctttcttccatggtgctccctaagtatcctctgcctacatatgacgttgtagtacgtggaggagcacctaatgccttttcggtcgaaaaccatcaacctaacgatgtaatggagtatggtggttcccccaagacagagttccagcgctacattcgacttggtcgtaaagacatgttggattggtcgtttggtgaggaggctggtccagatgaaggcaagctcttggatcaccagcccttacggcttaacaatgatgattatgagcgggttaagcaaattcctgtcaagaagggagccaacttccgtgacctaaagggtgtcaaggttggagcaaataatgttgttgagtgggatccagaagtcgaacgtgtgtacctttcgtctgggaaaccactggttcctgactatgcgatgtcattcatcaagggcaaatcactcaagccattcgggcgcctgtggtgggacgagacggttcctacagttgtgaccagagcagagcctcataaccaggttatattgcatccgactcaagcaagagtcttgactatccgggagaacgcaaggttacagggcttccccgattactaccgattgtttggaccgatcaaggagaagtatattcaagtcgggaacgcagtggcagtccctgttgcacgggcactgggctactgtctgggtcaagcctacctgggtgaatctgacgggagtcagcctctgtaccagctgcctgcaagttttacctctgtggggcgaaccgcggttcaggcgaatgccgtttctgttggcactcctgcgggggaggtagtcgagcagtaa

SEQ ID NO: 700 - DNA, 951 bp, Zea mays
  Peptide Sequence Number=SeqID_44075
atggcaagggatgcgggttgggagacgaggggtttggcaagctctgggggtgtagaaatcgaatcgaagaggatcggtcaaatgtggaaacagggcagagaggaggcgggagcggcagtgggaaaacgaaacccgaaccaaaaagatggagggagcgggaacgtccaattttttacggcgcggagccttctgcaggctgcagcggccagcgggagagcccggattcgaatttttgttcgtctcccgcgagcgccgcaggctttcggatgttggcccctctacctccagccctgtctgtcacatgaaccagctgtagggtggcccaaactgcgtgcacacccgccgtgttctgcctctctacagctgtctgcccgcgcgccccctctcctccgcgatcctcccccagcgcgtctacagctgtctgcccgcgccccccctctcctccgcgatcctcccccagcgcgtagatcccggctccgcgacgaacgcctccgccccacgccatccgtgccgccatcaagggatctcctaccaccagcgcgtagatcccgtcaaccaagcgagtcccgccgtgaatgtcgcccacctccctccgactccgaacgcggggcttcaccagacaagaacgcgccaagcccgatgctcccaggaccacaccgcccaagccgtcgagcaaatccgcattgtgcaagtggtggcgcagcctcgcgcccgccctgctcgctgccgccgctgtggttcgggccaggaggagtgttcaaagtggccctgtttgcggacctgcattatggcgaggacgcgtggacggactggggccccgcgcaggacgccgcgtccgaccgcgtcatggccgccgtcctcgacgtcgagaacccaggtgcgtgcatgcgcacgctctccttttgctccccttaccctttcccttttcctccgaaagaatcaaagaactga

SEQ ID NO: 701 - DNA, 123 bp, Zea mays
  Peptide Sequence Number=SeqID_44076
atgccaaattccccaggagacgtgacaaacaacaagatagagaggaaaaaggattgtgatgcgcgttttagtgccgaatgcaacttgagccttgtcatgctccatatcattgagagcctttag

SEQ ID NO: 702 - DNA, 661 bp, Zea mays
  Peptide Sequence Number=SeqID_44077
atggcttcacgccaaaatacatgtttaggccccgacaaccacaatgaacagacaccatcactcaaggtgccattacaaacggaacttcggttccgccccgcgggtacgaacaacctccacatcggagagcctgcggggcgacaaactcctggtgactcgtcggcgacctctgcagcagcagcgatggtcccaggacgggcgctgctgccggaaggctctcgtttgcgtccccactcaagggacgagaaccagatattaaagccagagagccggaggccgctgccaccacctcagcaccgaaggcggcgaccacctgtccgccaacatcgcaccagcgagcgccggccgccccaaagcgcacgggcaggtcctcactcccgtcctcgccacgagagcgaggacagaggacggaatgttgcaccctggctgggcagcaacagtttgccttccccggcatggctggagggcgcctcctccgcggagctggaggacggtttccacccccaggagctggaagaagaggtggctagccgacccgtgcaggaggtagagctctggctcgcctcgctctccgcctcagcaaggatgacgaagatccttgaagctgagggcggggcggagatcgcaacccggctcgcttctccccgccatcgaactggag

SEQ ID NO: 703 - DNA, 699 bp, Zea mays
  Peptide Sequence Number=SeqID_44078
atgccgcgccttctcgactgcggaaccggtgccgcaactcgaggcaaccccgcgcatggaccaacagtgccagccgagcacgtcggtcacgggtcagtcagccgcgagagaaggcgcgacggtcgatatggccaaaagtgggccgatagtcgtggcggcagcaggcgagcggaagcggcggtcaaaccatctgcaggctcacgtcccctcctggagcagcaggggagccctctcccaaggcgtgaagacgacacgcccatgttccgtccctcgaacggcttgtgcaacgactgcctagcgaaccacccgtcccgtcgcattaacttcgcggcagggcaggcgacacctttggcaggcgaagcggggaccgggaaaggggataccccgaaagggatccttctccgcgaaggaaacgggccccgagccctcttactgatcagggccgcctcagaccacttgggctccgcgcccactactgatcaggggttcgaaggctggccccccaaagggttcgacaaccgccctagaacacgcagagcgagggatgactctgggtacgtccgatacatggccaaggctcgggctacgctcccgaggctcggggctgctctcgcaaacccagctctggccaaaccgttgacagcgtcaacataccagcccgagaactcggaacctgaccatgcacccgggctacggtaa

SEQ ID NO: 704 - DNA, 141 bp, Zea mays
  Peptide Sequence Number=SeqID_44079
atggcgatggtgggtgcgctgcaaaggggcgtgggcggtggtagtgcgcatggaggcgaggcacgcatgcagggggcacagggctctggccaaagtgaagaaaaacttcactgcccaatgcatgcagagtactgggcataa

SEQ ID NO: 705 - DNA, 90 bp, Zea mays
  Peptide Sequence Number=SeqID_44080
atggcgcacgagaggcaaagcgaggctgacggggtggccccgcctgtcggcgccgagtggaggtgcaatgggctgcgcgtattttcttag

SEQ ID NO: 706 - DNA, 141 bp, Zea mays
  Peptide Sequence Number=SeqID_44081
atggggctcggtgtggcaatgagattgatggttcttggttttgactctggtaatggttgtcagcattgcaaccactgctcaggagaatatgaagccgtggaaggagacttccaggagttccaagactacgacgagttctag

SEQ ID NO: 707 - DNA, 59 bp, Zea mays
  Peptide Sequence Number=SeqID_44082
atgccatccaacgacgctttggccgagtggttaaggcgtgtgcctgctaagtacatggg

SEQ ID NO: 708 - DNA, 1074 bp, Zea mays
  Peptide Sequence Number=SeqID_44083
atgatgagtaaggtgttcatacctataaacattcgtgaacttcactggtatcttgttgtgcttaacgccaaaagacgagacatacaaatactcgattcactgggttctttattgggtcataaagatctagattgtgttctaaagggtttgcaaaagcaaatagatggtgtgtcgcattgcatgaaacttaaagaccataattggctagaccttcaagttgcctattggctttggaaacttatagagtttaaagatgccaagcacacagatagttcttcgtgtggacttttcctacttaattatatggagtactggacaagagtcgaactatcagataattttacacaggccgatataaaaaactttaggccaaaattggccgctattttattgtcttcggatttgaacaagagaaagggatgtccgttatataaaaataagacaaatacaagtacagaagacaatgagactgactccagtggtgttgagattttagaaccctccccaaatcctaacaagaggaaacgaagccctccgattaaccccgaagatgatcctatatcattatattttgaagaaatatgtgccaaagaagagaatgatgtcatccctactccaacctctgttaatgagtctggcaaggactctttaattagtggtcttcccacgaaggatatgccagcaagaaaagcatatatgatagagtttctatgcgattatatcatgacaattcatgatgccacaattttagaggctaaatgggtccgaagcttcaaaccatttcggatagatttgactgtcaagacactacaggaattgttaaatgtgaataaagatatgcctatagattgttttaacatggatgttcaaattcttgcctataatgaaccaaagaggttgtctctcgcaaaacgaaagattacaaaacactatatggatctgcgtttctgtgatggtgcgactctgcgtaggaatttgtttattgatctgttgacatacgaggggaacacatatcgatttaacgttcctgtaaatatacgagagtaccttgatcgtattatggaaaaagattag

SEQ ID NO: 709 - DNA, 1548 bp, Zea mays
  Peptide Sequence Number=SeqID_44084
atggagaggaagggagggtgctgcctcgccccgaggtacgccgccaccgcggccgcgcagcaggcaggcgcggcctggcagatggggaggatcatgctcaagttccgcccgattgctcctaagccggcggccatggcgcccgcgccgacaccgactccggtgacgggaccggccgtgagtgccgggaaagggaagcgaaaggccgcgtgcggaggcggcgggaggaggggccggaagcccaagaaggcggccaaagttgcgatggtgactgcagcgcctgcggcgacggcggcggcgcaagatgtgggcgactgccggaagcactgcgacaaggagaagtcgtcttcgtcgccgtcctcgtcctcgtcggggacgtcatccgtggactcgtcgccgccaccccggccgcagcagcgccagctcgcaacgctgccgctcatgcccgagacggcggcggataagaccgttgcttgtccagcgatacctgagacgcgtctccactatcggcggataaggccgtgccgctcatgcccgaaacttcttgttgactgggcagtcaatttgggcttccatcttgttcagctccttccaatcaacgatacttcagttcatgggatgaggtgggattcttatccgtacagctccctctctgtgtttgctttgcatcccttgtacctgagggtacaagcactttcagatgcaattcctgtgttaaggtatacctttgttatgctttcaaatttattcattgaagaaattcagcaggcaaagaagcatttggataaaaaggatgtcgactacgaggcagcattgtccacaaaattgtcgattgctagaaaaatattcaatttagaaaaggaaaaagtgctaaactccagttctttccagcagttcttatctgaaaacgagcttgacaaacttatgtctgaaggtactttacaccatgatgttatacgttttcattactatgttcagtaccatctatatatacaattatctgaggcagcaacatatgcaagaaagaaaaatgttatcctaaaaggtgatttacctattgatgttgataggaatagtgtcgatacttgggtatacccaaccttgtttcgcatgaataccactactggagcgcctcttgattattttgacaagaatgaacaaaattggggttttcctacatataactgggaggagatgtcaaaggataattatgggtggtggcgagctcgtctgacacagggtggtgcagtttcactaaaagaagctacagttcctaccccacggttcttcaggcctcacattgaaataaagcgcgatcgtcagactagcgaagtttttgaagtacttgatgctgaagggccttacaggagcaccagagaacaacttttctctattgggcagatgttgcgcattagaaagggtcctttgaagggctacctctgtcgagtagttaggatatttcggaatgatgtgactgttaagctagactctctactaaaaattgttacagtacaagctgatcttctttcagtcccagctaatagggggtaa

SEQ ID NO: 710 - DNA, 545 bp, Zea mays
  Peptide Sequence Number=SeqID_44085
atggtacagtacccggctgggatcagaccgccagcgcaaaatgctcactgccgacgacctatccgtgccgcgatttgcgccggggtcgagatgatcgggcggcgagcatctccccgcgaagacctctttgctccggataagaccgccgcggtggagggcactaactccggctgccacgcggccatctctccttccggccatgtccggtcaccggcgccgccctcctctgttcggccacgccatcacgaatttgactgccttacggccgtggttgaacgtggcaagctcttggggagcgacgtgctcggtgccatcgctgatcgccagctagggccagcaatggttatcatcccaccgccaatcgaggctgcaacaagtcgcatggtgctcggcgtcgaccacgccgtggccagggagaacgatgaagagagtgaagtgactgaagagaagacaccaccacctttggaatctcgggcaaggacttggctctacttcgacatctgcgggtccgagcctgactcacctgtaaacgaaggcaagccccg

SEQ ID NO: 711 - DNA, 405 bp, Zea mays
  Peptide Sequence Number=SeqID_44086
atggccggaaggagagatggccgcgtggcagccggagttagtgccctccaccgcggcggtcttatccggagcaaagaggtcttcgcggggagatgctcgccgcccgatcatctcgaccccggcgcaaatcgcggcacggataggtcgtcggcggtgagcattttgcgctggcggtctgatcccagccgggtactgtaccatggcgatagccattcagtcaacctgacagacagagtttgggtctcatttcctctcagatttctatggcaacaagatcaacactctgcagcaaagtggtggagcaatattccatctacaagattgctatatggtgttaccacaaaaagtcactggatcatgtctgaaattgggtttgaagttggtagtaattcactgttagtctga

SEQ ID NO: 712 - DNA, 417 bp, Zea mays
  Peptide Sequence Number=SeqID_44087
atgacggtggcaggcgcgtgcgagcagcggtcacgtcgtcagccaagctcacgtcccgtccgggggcagcaagagaaccccctctcacggcgtgaagacaacgcgcccgtgatccgttcctcgaacggctcgcgcacgcgcaacggccgccccgccaactactcgccccgtcgcattaactccgcggctggacaggcggcgcttctggcaggagcagcgggcgacgcttcgccttcgccgaaacaaccgcgccaaaagagaggctcgggggctgctctcgcaaacccggctccggccaaaccgttgacagcgtcaacataccagcccgagaacttgggccccgaccgtacacccgggctacggccagctcgcatgagggaacaaccagaccagccgaagcatcacgcaaggcattaa

SEQ ID NO: 713 - DNA, 372 bp, Zea mays
  Peptide Sequence Number=SeqID_44088
atggcgcttcctgttgacgtggctggcctgcgccctaggttgggcgacgtggaggctcctccgaagccgaggtcgagtctgtcttccatggccgaggccgagtccgagcccctgggtcgggagaggcggaggtcgttggcagaggccagggcggtgtccgagccctggggtcgggcgaagcggagttcgtcgtcttccggggactggctccttgtcagcatcactctgtcaagtggcgctgcagtcggagtggcgcaggcggcgctgtccttctgtcaggccagtcagtggagcggcgaagtgacggcggtcacttcggctctgccggagggcgcgtgtcaggataaaggtgtcaggccacctttgcgttaa

SEQ ID NO: 714 - DNA, 224 bp, Zea mays
  Peptide Sequence Number=SeqID_44089
atgggcacattagtaaggagtgctttaaggtttccgggggcttatttggcctcgggagtccaagtgaagcgttcggtcttccttaagaggcggtacaaggttaatcccttcttgccaaggcacgagatgaagcggttcagagctgcaaggcatcccatgaccctttgtactccttttaaatctttgatgggttccatgttggtgatggctgcgattatcttcgg

SEQ ID NO: 715 - DNA, 651 bp, Zea mays
  Peptide Sequence Number=SeqID_44090
atgaccagtggaggcgctctcgtggcggccgcagctcctgttcaaccaccaagagcgaggcccacaagtccaccattgatggagatggatatggtgacaaaattggcaggcggtgcttatcatagagatggggacgctggttgccaggacgatgtgacgaaggtgacatgcggcactgcccatggagatgggaacgccagttgccaggacgccgccgcgaaggataacaacactattcaccccgttccgactactgtgccaaccaccagggtaagactaacaacagtaagttacgacctctcccgagttcagcctcaggcgaaacagggggctccgcctcgcccgaccccagcctcggcctcgagaggagtcatcactacgcccgacccaggcctcggcctcaacctcggcctcgggagaaggtctccgcctcggccgacctcagcctcggcctcgggaggtctccgcctcgcccgacctcagcctcagcctcgggagaagtcaccgcctcgcccgaaacggcttcggaccgactacgctacagggaatatgaagcgtcccgatcctttgggactcaaatgtgatacaattactagtcccaggaggctagtaaacacattccttacttcaaatagtacagagtttagataa

SEQ ID NO: 716 - DNA, 399 bp, Zea mays
  Peptide Sequence Number=SeqID_44091
atggactccaagcccagggcatttcgagacatgatcttctattccactgcaacctactcgaaggatctttcattccactgcgatctggagacgaggaaatgcagttgggagagttacgacgacaaaggagaggtgatgcgcacaatagagtccaagagactaatgggacagaagatgcgttgtggatctcagctcgttgattcgtacattaacgatcgcatatgcgatatgcgtaggtacgcaaaatctgccctttttgacagcccgaagcgtgcagagcagaggaggttgaaggtggtagatgagaagagagcacaggatgcaagggaatgggaggcggctagagccgagaaacagatgttggataatcttgctgatcgtctcaagggaagcgagtga

SEQ ID NO: 717 - DNA, 201 bp, Zea mays
  Peptide Sequence Number=SeqID_44092
atggcgacaatggagctgatggaggaggaggacgacgatacatctagattgagtgagcttatcgctctcgcagaggcaggattatatggggaagaggagaacgacacatcaaggttgagtgagcttatcgcactagctgaagtactgtttggagtacatggggaagaggaggacgacacatatattagaacatacaaataa

SEQ ID NO: 718 - DNA, 1623 bp, Zea mays
  Peptide Sequence Number=SeqID_44093
atggcccaaggacgtccctatcccccgcgcggccggcgaagacttttttacgtccgcatggctcctgacttgagagtgtttccttacagacgaaatattgctgctgttgtgtcggcagtgatgaacaaggatcgccaggaagctgcgcagaagcgtcgggcggtcatcaggctccccgaagccaggccgaagagggcgcgggggactgcgaaggctaccgctcccggtggtagccagccgacgctggcggcgaagacggtcgcccctgggtccagcaaggtgctagagagcgtgaaggcggccggcgccgacggatccaagtctgccccggacggatctgcgaaggtccaggaattgcctttaccggggaaacgcgttgccgacttcggcacaaatattagcgtggacgattatcttgttggatcgggcgaggggcaacttgttgttgttccgcctgcagtggcgaccacggtgtctgccgccgtgcctggggtgaagggtagcgctgtcagcgctggcggcgagatttcggcggtcactgccatcaaggacgaagcgggcactgtgtcccgccggctgagggaggcgtcgcagcagctgagtcaagcgaccgacttcgccgaccgcgtggcatcgagggcccttactgcagatgtgtctgccgaggtcgagagacttcgggcgcagcatgctgacgctgtccgggaaaagtcggctgcggatagcaagtgtcgcaagctggcggagaaggtggccgccttggagggcgagaggacggacatccggcgccagctggtggaggagaggagggaggccaaccaggccatcgccaaggcgcaggcggcgcaggcagaggccaaattggtgcgggtggaggggagtctcgccagccagcgtgccgaggaatgggaggtgcggttcaaagctctgcaggcccgcatggagagggccaaggcctctacgcgctcggaagttgagcggacgcgcaaacagctcgtggactcataccgtgagctgggcgcgcggactgctgacttcaaagtgcccgaccgagaggcgggccttcgcttcctcgagtggctgcaggagaaattgttggcgctcccgaccatcgtggagggattcatgtcctttgcctccctcgtcacctgcgaaggggcgatgaacgcgttgtcccgcgagaggtgcagtcactatgaggtcttcgaccgatctgatgaagattttgggcgcgagatttataaggtcgaagaccctgtggtgaaggactctgcgggggccctcttcgaccggatgtggggcccctacggtcgggaggtggttagggagcagtctgaccgggcgagggatcagatggcgcgtgccgaggacgtggaggacttcggacccctgaacagcgcgcagcccgaagcggaggccaacccggtggtggccgaggctgaggtcgacccggcaccgccctcggaaaccagtgaaggctcccccgctacccctgcggctattgtgtccggtggaggctcgtcgccagccgctgtgccgatggtggaggatcccctaaaggcggcgacggagctggcagcgaaggatcctatgtcggcggatgggtcttcgcaggtggcttag

SEQ ID NO: 719 - DNA, 288 bp, Zea mays
  Peptide Sequence Number=SeqID_44094
atggctcgcgcacgcgcaacagacgccccgcgaatcgcccgtcccgtcgcattaactccttggcagggcaagcgacacctccggcaggagaagcgggcgtcgtttcacctccgtcatgatgaccgcgtcaaaaaagggaccgggaaaggggatattttggaaaaggatccttcccagcgaagggaacgggccccgagccctcctactgatcaggggttcgaaggttgcgccctccggggttcggcaaccgccctagagcacctgggctccgagccctttactgattag

SEQ ID NO: 720 - DNA, 414 bp, Zea mays
  Peptide Sequence Number=SeqID_44095
atgacagatgcagagaaggaggtagcaacagaaagaaggatggactcaccgcctcgatgcgattgtggagatcgtgctgtcatcgatgaagacactgcgaagcacttcgtgtgtccgaacattgattatccatacgggtggcgtaagtgtcgtttcagagagaggttgtatggtcctttgttccattggccagaggcagagacaaccgatcaagccaaggatggaggcaagaagagcttcgaggtaccgagtgcatgggagaaggtcaaggagatcaggaacccaaagccaggggtgaagaagaagacttgcaaagtcaaggatgttggagctcagaaatgtcaatctagatcaagtcaagttgatttgatggtttatgagtccaacatcaatctcaatcatgccaaatactaa

SEQ ID NO: 721 - DNA, 228 bp, Zea mays
  Peptide Sequence Number=SeqID_44096
atggacatcacaaagacaaccgatcaagccaaggatggaggcaagaagagcttcgaggtaccgagtgcatgggagaaggtcaaggagaccaggaacccaaagccaggggtgaagaagaagacttgcaaagtcaaggatgttggagctcagaaatgtcaatctagatcaagtcaagttgatttgatggtttatgagtccaacatcaatctcaatcatgccaaatactaa

SEQ ID NO: 722 - DNA, 576 bp, Zea mays
  Peptide Sequence Number=SeqID_44097
atggcacccaagagagctagctcgaaggctaacgaggctgcgaaggcagcactgctggccgagaaaaagggcaaggccctcgtcgacaccacccaccaagaggccaccgaagacgacgctctcagcaagaggcagcgcaacgaacaacccactcccgaaggcagtctccgcacctacagctctggaggacaaccgcaacttcccccaggtttcgctccaccggagggcgcggacgtcatcgaggacggcgaagtcatcggcgtctcagtggaggagcagttacagctgcgcgccttgcgcatcaagaaccgcaacctccagaagcaaaaagaaatccttgaggccaagcgccaacgtgtgtctgcacaagctaaggtgcgacagatgatacgcgacgaagagcagaaggccctggagctcgaacaagagattgcgctcatgcagcgcgaaggccacctcggcttgcaacacggccctctcctgcagcagcgcgcacaaattcgaagacctgtacttccctcagcacagccacgccatcccacacgccgcggcattccaaggtgtcaactaccttga

SEQ ID NO: 723 - DNA, 1107 bp, Zea mays
  Peptide Sequence Number=SeqID_44098
atggatggtgctccccccatcttttccgttgttgggaggtcatcgttgctagccccgcggcgtctcacgccggtgccgcccctaccgtgggcgcggactcccacgcgggactcgccacgttcgtcggtgcggtcgtcaggcaccctcgtcccatcggcacgccccccccccccccccacgctgccaagagcgagtgcgccctctcccaccatcgtcatgggcgccgtagcgcaccccccgcccgagggcatggcaccctgtgcctttgcgaatccaggcgcgagcgagcctcatcctgccgcagccatgggcctgacagccacagccttggccgccagcacattccctcaccccccctgggagcatgagtgcactgctactgataccctcgccaagcagcttgcagaggttgtgcgtcgcctactcggctactccagcatcaagcccctctcggcgtctcatgtggtcaccccttcttccaagtacgaggtcgccatcatcgccaaactccacgcccaggcgacagcaatgaagggcatggtgggcccccactccgacctcgaggagcctgtctctaatcgtaggctcgtacattatcctccatcatggcctcaacgggcgctatggtcacatacatacctagatcactcctcagtctcgttcccgtccttccacaaggtctgcaacaacctcatcctcgaaaagatgaccaagggacataccctcgctccgatggcactaccgcactctacagctccaccaagaggggcttggcatcatgacctccctcctctactcccacctagcgggctcttcgtcacgcgtgcatgcccctcctgtctctgccccttcatgtcctccccagccgcctgcggccgaaggaggcgctctaggggtggcggtggtcgtggagatagcctaggggccactccttggccctccatctacaacccgtggaccaactgcatcaccatgtggccgggcccagccctggtggcccttcccagcgtctcggtcgccacagccggctcacagtatcccctcaaccatctaccctctacgccaccagcgcctcagccacaaccaccccaatctgctttgtcctag

SEQ ID NO: 724 - DNA, 115 bp, Zea mays
  Peptide Sequence Number=SeqID_44099
acattgtggtacaggtggttatgagattgatggttctggttatgattatggtgctggcgaagatgaagctgtggaaggagacttccaggagttccaagattacgacgagttctag

SEQ ID NO: 725 - DNA, 180 bp, Zea mays
  Peptide Sequence Number=SeqID_44100
atggggctcggtgtatgcggctcgctctgccaagtttgggttcgccccttggggaggagtgcgagacattgtggtacaggtggttatgagattgatggttctggttatgattatggtgctggcgaagatgaagctgtggaaggagacttccaggagttccaagattacgacgagttctag

SEQ ID NO: 726 - DNA, 1104 bp, Zea mays
  Peptide Sequence Number=SeqID_44101
atgagtggcagatatattgaggagtgggtcagagtgttctatgccatcgtttggattgaccctgaccatcagtggatgaggttccgttttgagcgagaggatgtcactctgcatgccagtcagattcgacagctctttggatttctagagtcgtcgactaggctccacagcctgtgctacgacactttggatcctccgtgtcgccctcacggcggagttgcacctgttacagctcatttcgcagtcctgttcagaccgcctttcacagatgggtcacgccactctcctaccaacttcactcctgcagcgaagtttctatatgagctgatgagacatacactcctacccaggatgggatacagagaggccaccactcacattcagctatggctacttggtgctttgatctcacattcagagttcgatgtcgttgatttccttatttgtgagatcgaggacacaatgttggatggttttggtgctcgccgtcagctgccatatgctcattacctatgtcacatctttgcgcatttgatcaggcctcctcagttccagggcaccctcgaggcctctcgccttcagttcgacttctatcgtccagcccctgaggacctaggtgctgttgccgattcttcttccgacaatgatgaggacttggggattttgccatcgcctcctgtgccacctcactcacatgatcacgaggcgggtagttccagtgttgctcctgctgcccctccagctattgaccctgctctagccgctatccttcagtcacttacgcagcagcaggctcatctggcagcagagcaggctcgacaggcagctatccagcagcagatgtccgaacggatgctctccatgtcggtcactttggatttctcgtcaccggtcgttggacctgtcagctctcagccgccagtgccaccagcgcctactgttaccactgctgtcgtggtggtgtccatgactgcaccagctccggtggatcctgcatcgcagcctatgttagagttagtaccagctccaacttctactgtagatcctggattcaagactgactccaatcctcaacttgcgtttgtgcttctgcctcgaccgtga

SEQ ID NO: 727 - DNA, 342 bp, Zea mays
  Peptide Sequence Number=SeqID_44102
atgacctcgacgcgcggtggcggaggttcctcgatccggagtagtggcggcggttcccaggtcggtggtggcggctccctgatccagagggcgagtgacagcggggcccttgtgcgggcaagcggcggcgtccccgaggtcctgaggaggcggcacttcaaggccgacgagcaagcgacgcccgtcgatgtgcgagtagcgacggcgacgcatgaggcgcgatgttcaagcgagcggcatcacggaaggcccgagatgcgcgcagcgatgatcgtgcgtgacatcctccgatccggcgcagttttcttttcgattattgtgttttatgcctaccacatgtaa

SEQ ID NO: 728 - DNA, 114 bp, Zea mays
  Peptide Sequence Number=SeqID_44103
atggtggcgcgacgacggcggtgggcgcggcggtgctcgccgcgggtgcgagcgggtggcggcgcgacggcggcgagcgagcgggtcactcgaaacttgggaaaccgtgcatga

SEQ ID NO: 729 - DNA, 435 bp, Zea mays
  Peptide Sequence Number=SeqID_44104
atgaggcgtaattccctatgtcatgtgggattctggaggttcttttgccttgtgtttgagggtttacaagtgattgctaaagacttagatcaacgtgaagacttcaagtggatggtaatgagccctttgaagataagctttgctatggaaaggccgatgtgtgaggcgagcgaagctgctgacgaatgcctcaaggcttttggtgaggttgtgaagaagattaggtcccgagacttgattaaagaagcactcgcgtacaatatttatctaactcggactgggtggaagctgccgaaggaagtgaagagcagtgatgaagggcttgttaccttggcttttgatttcaaggagcagtctacatacaaatctccttcggctaactggttaaagtttattgaagagaagtgcaatgagatgtgtggaaactttgattga

SEQ ID NO: 730 - DNA, 315 bp, Zea mays
  Peptide Sequence Number=SeqID_44105
atggcggcaacagaggaggggcgagctagagtgggggctcggcggctggaggatggagacagtcagcgcgcgaggaggcaagctgagggtaggagaatggcgtggaggagaagggagagggaggtggctgccatttatggaggagaagctccagagcacggctgccacttttctccattgcagcaattcatcgaacacgtgggaacgcgagacgtcgacccgaacggcactgatttcagacttagaagaattcaaatcctgaaatcagatttttattctttcttgatggcactgtttgagattcttagagattga

SEQ ID NO: 731 - DNA, 554 bp, Zea mays
  Peptide Sequence Number=SeqID_44106
atggaagaaacacacctccacgtgttcgacgcttcctgcccgcgccagatcacgctcgcgcgcgcccccgcatgcccagcgccgcgcccgagccaagccagcgccatgacccgcgcccgcgcctataaaaccctcccaggcttcgactgcactcttcctcgcaccctcaaacctcatcggggtctagctcgccgccgtttgcccgtgcgcagcgtgtccgcggccgcccaatccttctgtcaccgtggaccggccgatagagccattcccaaccccgtccagccctcggagaagactgtgcacacctccgtgaagctccccaagcaaggaatcggagtttgcttcgccggagaggccagtccacgctcgccggagctctcaaccccgccggattcgccgtggtttggccggtacactcgccaccgacgaggacacccgcctgcgcgcgtggaccgggcgattccggccatccccgacgtcaagccgtacctcgacgtgaccgccagagtctccccgagccaaccccacccttcaccggacctccctcgccgccg

SEQ ID NO: 732 - DNA, 504 bp, Zea mays
  Peptide Sequence Number=SeqID_44107
atgaagactctgacgactttctgtggctaccatcccctggagatggtgatgcaccccttgggactcttccctgctgagaagaaggatgatcccatgtggtgtaaccgcagcgatgctatggcactccttgctaacagcgctcaaactgccaagctcactctcgacagtcgagaagattttgtggtcggtctatccatcgagttggtagagaaggatctgcaggtggaaaggctgagccagcgcattaccaccttggagcagcaggtggagatccgagacaacactattgatgtcttggagaaccagcttcacgatgtgcagagggaactcgaagaagcgaatgaccacttggacatgcaccacctggagatggaggccaatgaagccggaagcgagggagaagaggctctcgaggagctaggaccagcccctggtgccaatgggattacctccgcgatgcctccttcacccgtatccagcgtcgcttccaccgctcagggttaa

SEQ ID NO: 733 - DNA, 315 bp, Zea mays
  Peptide Sequence Number=SeqID_44108
atggcggcaacagaggaggggcgagctagagtgggggctcggcggctggaggatggagacagtcagcgcgcgaggaggcaagctgagggtaggagaatggcgtggaggagaagggagagggaggtggctgccatttatggaggagaagctccagagcacggctgccacttttctccattgcagcaattcatcgaacacgtgggaacgcgagacgtcgacctgaacggcactgatttcagacttagaagaattcaaatcctgaaatcagatttttattctttcttgatggcactgtttgagattcttagagattga

SEQ ID NO: 734 - DNA, 456 bp, Zea mays
  Peptide Sequence Number=SeqID_44109
atgggcaagagcaacaagcgcaagcgcgaaccgactcctccatcagaggatttcggtgactcggaatactcggaggaggagttctcctccgagtccgagggatctccggctcccgtctctcccccggcgtcgttcgatgactcggacgactcccaggggatagccacggaagtctggacatacatccgggccgtcgagcgctccgggctcgagggctcggatgagtcggagtactcctcggatgaggaggactcgaacggcggcggcgaggacgaggacgacgacgacgacgacggcgacgacgacgacggtggcgacggcgacggcagcggcaggggcagcagcgacggcggcaggggcggtgacgacggcagcaacaggggcagcaccaagggcggcagcagcaagggcagcaccaagggcggtggcggcagcaggggcagggccagtggctag

SEQ ID NO: 735 - DNA, 231 bp, Zea mays
  Peptide Sequence Number=SeqID_44110
atgcccaaggagtatgactcgtgggcccgggcccccgtgtcagaggctgccgccatggccttgctagaccctcccaagcgcttccagtccgaggtggcactcaacttggtgcgcaacctgctcggatggggtgtgccggcgttcgccggaaggatccatgtcggcgcctctccccacagcgatctcgctaccggggagttcgtgctcttcgtctccaacctcccctgctaa

SEQ ID NO: 736 - DNA, 354 bp, Zea mays
  Peptide Sequence Number=SeqID_44111
atgtcgggcggcaggaggagggggcttgtgtggagcctccccgtggcgaggtcggatgcgctcggcaaactgggccctgccttcggcatcggcgctggctgcggcgtgggtcttggcttcggcctcatcggaggtgcaggcatcggagctggattccctggtttacaattggggtttggagctggagctggatgtggaataggaataggttttggttacggctttggaaaaggcgttgcatatgatgaaagtggaagtgagaagttcgatatcatgtttgacgaactgatggagagcaccaggaagctggtcaaagcaacatcaaaggagatcgacaaatggaggcgaatgtag

SEQ ID NO: 737 - DNA, 186 bp, Zea mays
  Peptide Sequence Number=SeqID_44112
atggtgcttgcggtcgtggtgctgctgggcgccgtggccgtccttgtggtggtgctgctactgcagccccgcgtgccgtacgtggcgggcgccccgctgggcgacgccggcagcgccgccatggaggccgcgctccgcgacggcgtggtgccgtttcgggtggatggggaggcccggacgcgatag

SEQ ID NO: 738 - DNA, 234 bp, Zea mays
  Peptide Sequence Number=SeqID_44113
atgagaaaaaggactcggctggggctagcatggaggcgagaacgccatggagtccggggcacggatgagcacagtggacccggtgtccaagcgccgagccggggcagactgaagaagccgaagctaggaacggtggtcgagcgctttctgggcgtgatgcagcggcagccaattgctaggggaaggagacgaccgtgggagagggagcccgctggaaatccggcgcgggaatag

SEQ ID NO: 739 - DNA, 585 bp, Zea mays
  Peptide Sequence Number=SeqID_44114
atggaggcccaggcccacacgtcatgtaaccggcgcgccggttactacgtgcaagaaactgcaccaccacttgcgccaatgccgcgcctcctcgactgcggaaccggtgccgcgactcgaggcaaccctgcgcgtggcccaacagtgccaatcgagcacatcgatcacggggaccgggaaaggggatatttcgaaagggatccttctccacaaaggaagcgggccctgagccctcctactgatcaggggttcgaaggctggcccctcggaaggccgccccagagcactcgggctccgcgcccactactgatcaggggttcaaaggctggcccctcggaagggttcgacagccgcctcagagcacgcaaagcgagggatgactctgggtacgtccgttacatggctgaggctcgggctacgctcccgagaggctcgggggctgctctcgcaaactcggctatggccaaaccgttgacagcgtcaacaaaccagcctgagaacttggaacctgaccatgcacccgggctgcaatcagatcgcatgagggaacaaccagattggccgaggcatcacgaaagacattaa

SEQ ID NO: 740 - DNA, 510 bp, Zea mays
  Peptide Sequence Number=SeqID_44115
atggccattttcaacattcgcatagtgaggaccctagggaaaggccacgtagtgaaaccttgcctactcaccttggaagtgtttaagggtccatacaacccgagcccagatgggttggcgcgagatggaacacaaggggggaagaacgcggctcgtgttatcctgcgccagggggatgcgcttgcagtaggggttacaagcgttcgcgagggagagagactatacgctaatgtgtccggcagagaggagccagagccctatgtacatgccaacgtggctgtcggagaggtgctagagccctatgtacgcggtgtcgtggccgtcggaggagcacttgagccctgtagaagcacaactgtcggggctgctgggaccttgctgacgtctccttgcttccgtagggggctgagaaccgccgtcgtcatggacgcacgcggggagccatcattacttgttaccggggcgagcctggatgggacgtcggtcctgttcccccgtagcctgagctag

SEQ ID NO: 741 - DNA, 175 bp, Zea mays
  Peptide Sequence Number=SeqID_44116
ccgtgctcacggttatgagcggccaagggagctccagagattagtgatacttgatcagagacattgtggtacagatggttatgagattgatggttccggttatgattatggtattggagaagacgaagctgtggaaggagacttccaggagttccaagattacgacgagttctag

SEQ ID NO: 742 - DNA, 552 bp, Zea mays
  Peptide Sequence Number=SeqID_44117
atggaggcccaggcccacgcgtcatgctaccggcgcgccggatgctacgtgcgagcaactgcaccgccactcgcgccactgccacgcctcctcgactacggaactagtaccgcgactcgaggcaaccctacgcacgacccagcagcgccagcctggcgcgacggtcaatgcggccaaaaatgggccggcagtaatggcggtggcaggcgggcaggagcagcggtcatgtcgtcagccaagcttacgtcccatccgggggcaggaccgggaaagggggataccccgaaaaggatccttcctcgtgaaggaaccaggctccgagcctccctactgatcagaggttcgaaggctggcccctcggaggggttcaacagccgcctcagagcgcgtgggctccacacccactactggtcagaggttctaaggccggcccctcggaagggttcaacgaccgcctcaggctactcgggctccgcgcccactactgatcaggggttcgaaggctggccctcgaaaggttcacagccgcctcagacacagagcgagggatga

SEQ ID NO: 743 - DNA, 487 bp, Zea mays
  Peptide Sequence Number=SeqID_44118
atggatagtgccaccccggcagccgagagggatccgccggcgggaggggggagctcctggcagggtgggggatccgccagcgggaggggggagctcatggctgcgttggagatccgtcgacaggaggggggcggagctcctggcggggtggtggagttgctggcaccgtggtccgtgatgggagctaacggagctcctggcggggaggtggaggggggccttctccggtccagaaccttcgcgagcatcgcagaacgaagatgggcgtcgttggcaaacttcatcgcccctacgcacgcgcggacgtctgaccgccacacgctgacggtcaggctcgtcaggcaggaccctagcccctgcgtcaggtcgtggaccagagtacctaattcctctgagggaggcatgatagagaaacttagggatctcgacaagttaggacaagggtttacatcagtcgatcctttggaggagatcgacatagaagatg

SEQ ID NO: 744 - DNA, 360 bp, Zea mays
  Peptide Sequence Number=SeqID_44119
atggccgagccaacggttagtagggggcaccggactgtccggtgtgcaccggacagtgtccggtgcgccaacggctccaaggctgccactgccaacggttggcttctgttgggggccttcggcttccgaaggtatcttcggactcgaatcggtaccacagccgaagcccaaagaatacgaaggttgatacagcgccgaagatatgagcaggaaagcttcggcgtgatagcagaaaaagaaaccgacttaaagatgaaaaggctattcagacctcggtggattactatagaattactaccaaatgtaaagggtatgggtgtaattttacatgggctgtgtcccacgcctataaataggtga

SEQ ID NO: 745 - DNA, 594 bp, Zea mays
  Peptide Sequence Number=SeqID_44120
atgacggtggcggctctcagctctcttacggaagcaggtggacgtcagcaaggactcgaccgctccgacagctgtccttccgccaagctccgttgctcctccgacagccacgacatcacgccagcagggtgccaagatctctccgactgccacattggcatggccttcttagagaaggttggccgcgcgggaccgaggatgggacaggcgctctcttggggccgctcgcttccctcacccgcgtggacgcttgtaacccccctactgcaagcgcacccgacctgggcgcgggacgaacacgaaggccgcgggacttccacctctctcacgcccgtctccggccacctcgcctctccccccttcgcgctcgcccacgcgctcaacccatctaggctggggcacgcggcacactcactcgtcggcttagggaccccccggtctcgaaacgccgacacgtgggctatggggtggccagactggtgcaacactgcccctatgcctgtgtcgcttgcatctgtttccacttcaaatggcttggaaaattttggaagtgctagaactggagctgtgaccagagctcgttttaacgcttga

SEQ ID NO: 746 - DNA, 141 bp, Zea mays
  Peptide Sequence Number=SeqID_44121
atggccatgatgggttcaacatcggaaaagatgtacctctaccaggtgaagaagcagcaaacttttgttgcttctattccaaggtggtaccaaaggaagaaaatcaaaactaaagctatgggaggaaaggtcctcagttaa

SEQ ID NO: 747 - DNA, 966 bp, Zea mays
  Peptide Sequence Number=SeqID_44122
atggaggtccgttgccaaaccagcttttgccagaatgaagatggtttccccaagttgttgagagcatgcacagttcgcctcggaatcaggagccagccagagtatgatggtcgtgaattcatcgagcatggcacagagaagtgtgtcgtgactgtatacattggatccagtccgcaccatgtggaatggagtgtcactgctgcagggcacagattcaaagacacctgccaagtcgtcgctcgcaaggcattgagggccctgtgtcagatctatgaagaagaagtggccgacaccccgctcagattctttccgccctttcagagagaccgtccagtttggatggccaggatgcgggcattggaagggaagaagatgcttgaggacgaccccacagtcgtgtacctcactgcatacctgctcacccttgatgcacatcgtgaagtcattgcggttgaagccctgaagcaagccaaggatgagcacgcccagaagttgatggaggcctacttggtaacccataaccaacgtagagccctgcggatccaagagcccgcttcatccaacctagttcaacccataagagctgaagatccccagattcttgaaggtcacccggtctctatcagaggagagaagaaggcttgggaactcccggaaggagccatagtcttggaaggaattccagtcttccctcaggctatggataagcaagagcaccccgagtcctcccaagatcccccgccagagttggttgagcccctaaccatgaagaagattccagtaccgtcccgtgagatcaaagaagaagctgcaagcaccccgccagcaccaccgccctctgaggagctacaagagccagtcccgcttgaagaagagttcgaccgcgtcttgccatctcagtcgccaccagaagaagttatcaacatcagctccctattgacccatccaggagatgtctcagattga

SEQ ID NO: 748 - DNA, 405 bp, Zea mays
  Peptide Sequence Number=SeqID_44123
atggccggctcggccgcccccgcaccctgccccatgcccgcccggctcggccgcccccgtgcccgcccggcctcggccgcccctggccggttcaaccgcccccctggccggttcaaccgccctggccccagctcgcccgcccgttcccccgtcccggcctcgcccgaccgtatcttcgctcgcccgcgctcgcgggggctcgagtggtttctcgagtgcctctccgtaaggacctgttctatggatgaccgcccgggaaaacagtgcaaccatgagggtggttatgagattgatggttttggttatgactatggtgctggttgtcagcattgcaaccactgctcaggcgaagatgaagctgtggaaggagacttccaggagttccaagactacgacgagttctag

SEQ ID NO: 749 - DNA, 825 bp, Zea mays
  Peptide Sequence Number=SeqID_44124
atgggagcgggaggtggaatagtggaagctagagtggtggaggtggtgggtatggcggaagtggtggatggctctagagcgacaggagctagggaagtgggaggtggagtagaagctgtggcagaggcacaagattgctctccgccccggatccgtgttctgcttcggaaccatctcgttcgtggcagacaaagaagggactctacatcgtattgcggatccgccggagaaaaagccttccttgaaaatctccgggaaagctggaacgaagcaggaaatagcgcaacctcccacgctccgagcgaagatcgcctcctgcaaaccaatagtagagagttcattcacccggagaaccatgttgtccacctcatccacagaaaaatggacacggattacaaggaaaaaaagaaacaaagacccgtcaagctgcccttctggtacctccaccctcaaaggagaacaaaaagaagcttgtcgtcacgacaactccattctaccccgacatcctcttcatcggtgggagagtggaatcgtcccccatcttcgacgatgaaccaactgtgcctggggaagaaccacctcaacgggaagctcgccgacgaagaaactgacgtcgtaacgcccggcgacatcatgaagccggagaacgagattcggcgcagcctgtatcgcgagacgagatctcggaggtgggagaaactccagatgaacaagtcttcagggaaaggaggaactcctgccgacgtgatcgtcggcaagctgaagagcaagccgagcaggaagcgagacagcgtcgcgagaaccctctcttcggacgaaacctga

SEQ ID NO: 750 - DNA, 240 bp, Zea mays
  Peptide Sequence Number=SeqID_44125
atgaagaaggcggccaagttggcgagcgaagcggaggcccgtcgccgggaggcttcgatcggaaccccaaaacatattgatattcgttatcacttcgttcgtgatatcattgaaaaatggttggtgaaggaagcatcagtccgtcgagagtgcagtggtggtgggaaggagatcaatgtcaatcttctccaagcctccgggcagttggaggctgcgtgctacagcggcgtcgagttctag

SEQ ID NO: 751 - DNA, 715 bp, Zea mays
  Peptide Sequence Number=SeqID_44126
atggtggagaaaggccacgggtcgcgcggcgaaacaacggtcacccggtcggccatcaccaagcagaagaggtggcagcggagaggacaaggtgcgcagtttcctttctctggctattccctcaggttgcgaagacctaagtgggaggcgagcagcagagtaaagaaccgtcaccggtccctctcccgaatatataaaggcccaggcgagacccattcaacacttcgcccgaacccgccgcgagattcaaaactcaaaagcgagacgcccgttcctcgaacggctcgcgcacgcacaacggctgccccgcgaaccactcgtcccgtcgcattaactctgcggcaggacaggcgatacctttggcagccgaagcaggcgacgcttcacctccgccgcaatgaccgcgtcaaaaaagggaccgggaaaggggacactctgaaagggatccttctccgcgaaggaagcgggtcccgagcccccctactgatcagaggttcaaaggctggcccctcggaggggttcaacagccgcctcagagcgcttgggttccacgcccactactggtcagaggttcgaaggccggcccctcggaagggttcaacggccgcctcaggccactcgggctccgcgcccactactgatcaggggttcgtaggctggcccccgaagggttcgacagccgcctcagagcacgcagagcgagggatgaccctgg

SEQ ID NO: 752 - DNA, 469 bp, Zea mays
  Peptide Sequence Number=SeqID_44127
atgtccggagcattaaatgcgcgccagagcacgcagaagtcaggcacgcgcgaagtggcgcaccagacactctacagtgcatgtccggtgtgccaccggacatcctggcgggcccagcggtcagagctccaacggtcggaacccaacggcctggtgacgtggctggcgcaccggacactgtccggccggcgcgctataattcaccggactgtccggtgtacatcggacagtgtccggtgctccaaggaagcgcggcctccggaactcgccagcctcgggaacgcgcagcagccgctccgctataattcaccggacatgtccggtgtgcaccggactatccggtgcatcctcggagcaacggctatttcggcgccaacggctacctgcgatgcatttaatgcgcgcgcagcgcgcgcagaaggcaggcgcgcccatactggcgcaccggacatggaacagtacatgtccg

SEQ ID NO: 753 - DNA, 324 bp, Zea mays
  Peptide Sequence Number=SeqID_44128
atggcggctctcagcccccttacgaaagcaagaggacgtcagcaaggactcgacagccccgacagctatccttccgccaggctccagcgctcctccaacggccacgacaccacacgaatcgggtgccaaaacctctccggctgccacgatggcattgttagaaacaggaagaagaaaagaagtggagagtggctgtgtgcagccaaaggctgcttcgggctggggcaccggactgtccggtgtgcaccggacagtgtccggtgcgccagaccagcgcggagcaaaccagccgctctcgggtttttctccggcgacttcggctaa

SEQ ID NO: 754 - DNA, 922 bp, Zea mays
  Peptide Sequence Number=SeqID_44129
atggctgaaaggtaccaactcccgcggagttgcgttcctccaacggcaaggcggaaagactgtgggtatcccccatccgggggcttggaaggtggaaaggcacgatgcataagggagcgcgaagacatggttgcccttcaagggggtcaccctccttttaaaggcgactctccctacttgtgtccccagccgtcgggggctgagtcttctccaacacgctccaaggtcctccccctacggcgcgggaactgggtcccagacgtcatgcaagccggcccagagcagaagaagccaaaccgatgcgcgcggtgcatgcaaccgcccagcagttacaagcggctctccacttttgcccagaccagcaggcgaaagggcgggcagccatgcgggcggcatgcaaccgcgccaggtgggtgcacttctccgacttccaacacgcccagcatggaggcccaggcccacgtgtcatgcaaccggcgcgccggatgcttcgtgcaagcaactgcaccgccactcgcgccactaccgcgcctcctcgactccggaaccaataccgcgactcgaggcgacccagcgcacgacccagcagcgccagcctggcgcgacggtcaatgcggccaaaaatgggccggcagtaatggcggtggcaggcggacaggagcagcgggaccgggaaagggggataccccgaaaaggatccttctccgtgaaggaaccaggctccgagcctccctactgatcagaggttcgaaggctggcccctcggaagggttcgacagtcgcctcagatcgcgtgggctctacacccactactggtcagaggttcgaaggccggcccctcggaagggttcaacgaccgcctcaggctactcgggctccgcgcccactactgatcaggggttcgaaggctggcccccgaagg

SEQ ID NO: 755 - DNA, 726 bp, Zea mays
  Peptide Sequence Number=SeqID_44130
atggcgcctcctgttgatgtggccggtctgcgccctaggttgggcgatgtggaggctcctccgaagccgaggtcgagtctgtcttccgtggccgaggtcgagtccgagcccctgggtcgggcgaggcggagaccgtcggctgaggccagggtggagtccgagccctggggtcgggcgaagcggagttcgtcgtcttcaggggctgagcccaagtccgagccctgggtcgggcggagcggagttcgccgtcttccggggcttagcccgagtccgagccctgggtcgggcggagcggagttcaccgtcttccggggcttagcccgagtccgagccctgggtcgggcgaagcggagcttcctatggtgcctgcggccgggcctgactgcctgtcagcctcactctgtcaagtggcaccgcagtcggagcggcgcaggcggcgctgtctttctgtcaggccggtcagtggagcggcgaagtgacggcggtcacttcggctctgtcgactggagggcgtgcgtcaggataaaggtgtcaggccacctttgcattaaatgctcctgcgatttggtcggtcggcgcggtgatttggtcagggttgcttcttggcgaagacagggcctcgggcaagccggaaatatgttcgccgctagaggggggcttcgggcgaggcggagatcctccggggtcggctgcccttgtccgaggctaggctcgggcgaggcgtga

SEQ ID NO: 756 - DNA, 417 bp, Zea mays
  Peptide Sequence Number=SeqID_44131
atgacggtgtccccgggcatcgcagggccggccgtcgaccgtggcgtcggggcacttgttaatgcgttgcgaggcgacggggacgacggacggctcccgggctccaggctccaggtgcagcgcatgtggcgccacggacagcggctgctgcctgccctgcagctacgaggacacggacagggacagtgccgcgttggatgctggcaccggcaccagaccggacgaacgtaccgcaccgcgtgccagtgccacgccaccgacgcctcggcctcgctcccggcgttgcgtgcgggcgcggaggaccgggcggccggctccggagcacaagggccaggtggacggggatggcagcgtgtgcaggggcgacgccgacggcaatgccagttcatgagtcacgagttcacggcgatgcgttga

SEQ ID NO: 757 - DNA, 1386 bp, Zea mays
  Peptide Sequence Number=SeqID_44132
atggatccatatttttttagtatgcacggcaaattgagattaaaaatagtaatgtatttatgcagagctataagcaagggatctgtggctccacatttcattgccgagagttcgcatcaaaaggatttcttcctttgcttctgttatactcttttgtcactgcctactggatcagttactgattcttctcttgcctatgtagcaaaaaagaagtcaagtggaacagactctggggaggagaacatgtcaaagaaagacttggctttacaccaggctattgatcagataacgtctgcatttgggaagggggcaataatgtggcttgggcgttcacaaggccatagagatgtaccagtcgtgtctactgggtctttggatttggatatggctctaggaactggtggtcttccaaaggggcgtgttgtagaggtatatggtccagaggcttcaggcaagacaacgcttgctctacatgtcattgcagaagcacaaaagaatggaggttactgtgcctttgtagatgcagagcacgctttggatccagctctcgccgagtcaattggtgttgacactaacaatttactcctttctcagcccgattgtgctgagcaggcactcagtcttgtggacacactgattcgaagtggatctgttgatgttgttgtagtagacagtgttgctgcgcttgttccaaagactgagcttgatggtgagatgggtgatgcacatattgctcttcaggctaggttgatgagtcaagcccttcgcaagcttagccactccctttcactttcacaaacaattttgttatttattaatcagatcagggccaaggtagccacatttggatttggaggaccaactgaggttacttctggtggcaacgccttgaagttttatgcatctgttcgcttgaacatcaggcgtattggtttggtaaagaaaggcgaagagacaataggtagtcagattgctgtgaagattgtaaaaaacaagcatgccccacccttcaagactgcacagtttgagcttgaatttggaaaggggatatgccgcagttctgagctttttgaacttggattgaagcacaagcttatccgaaagagtggtggttcgtattatagtttcaatggtaaggctttcaatggtaaaagtaaccttaaatcttaccttactgaaaacaagagtgttgccaatgatctggagatggaactaaagagattgatgggaactgatgcgtctaaagagcaggaggcaggagacagttcgcagagtgattttcctgaagagagtgtcacacctgaagcatcgtcagaagaggatctgggagccataattgaagtagtgcagcaggaagagaattcacattgtgtgaaatcatggtga

SEQ ID NO: 758 - DNA, 660 bp, Zea mays
  Peptide Sequence Number=SeqID_44133
atggctgaaaggtaccaactcccacggagttgcgttcctccaacgacgaggcggaaagacggcgggtatcccccatccgggggcttggaaggtggaaagccacgatgcataagggagcgcgaagacatggtcgccttccaacggggtcaccctccttttaaaggcggctctccctacttgcgtccccagccgtcgcgggctgaatctcctccaacacactccaaggtcttcccctacggtgcgggggctgggtcccacacgtcatgcaagccggctcaaagcagaagccaaatcgtcgtgcgcggcggtgcctctggcaggagaagcgaacgacgcttcgccttcgccataatgaccacgacaaaaaagggaccgggaaagggggatatcccgaaaaggatccttccccgtgaaggaaccaggctccgagcctccctactgatcagaggttcgaaggctggcccctcggaagggttcgacagccgcctcagatcacgtgggccctacacccactactggtcagaggttcgaaggccggcccctcagaagggttcaacgaccgcctcaggctactcgggctccgcgcccactactgatcaggggttcgaaggctggcccccgaagggttcacagtcgcctcagacacagagcgagggatga

SEQ ID NO: 759 - DNA, 147 bp, Zea mays
  Peptide Sequence Number=SeqID_44134
atgaaggccaagtcacaccatcaaccaaatcaaggaggcctcaccgccttggcatacaatgctccactgaccccggccaccgtcgtgcagtggccgcacttgtacccaccatatctagaatgggagacccagtctcaggtcgcgtga

SEQ ID NO: 760 - DNA, 745 bp, Zea mays
  Peptide Sequence Number=SeqID_44135
atggctgccgctaccgtgtccgtcccccgcatcaagctgggctcccaggggctagaggtctccgcgcagggcctcggctgcatgggcatgtccgccttctacggtccgcccaaacccgagcctgacatgatcaagctcatccaccacgccgtcgccgccggggtcaccctccttgacacctccgacatgtacggcccgcacaccaacgagatcctgctaggcaaggcgcttcaaggcggtgtaaaggagaaggtcgagctggccaccaagtttgccgtctccttcgccgacggcaagcgcgagatccgcggtgacccggcgtatgtacgggcagcctgcgaggccagcctcaagcggctcggcatcgactgcatcgacctctactaccagcaccgcatcgacaagaaggtgcccatcgaggtcacggacacaaacattgccaagggcaacatgttcccgaacgaaatgaatgtcgatctccacatgtttggtgcgctggtgctgaacggggttggaggacatgtagacaaaactgatgttgtcacagtataccaaggtcttcttcggcataggagcatgcaattcagtcaacagctgtcgaagccaagtggcctcagcaacggcattagcaatagcacggtattcggcttcagcactgaagcgagaaaccgtattctggcgcttggaagaccagtagatcaggttgtcgccgaagaagacaacatagccagaggtggatctgcgg

SEQ ID NO: 761 - DNA, 660 bp, Zea mays
  Peptide Sequence Number=SeqID_44136
atgactttggagcctcatcccctgcagcctggatggcgctccttggactccgagtccttcggataccgagcggaggacacgatcgaggcgatcgcgctgcacggattgactactttctgcggatttcatcccttggagctggctacccaccccattggcttgttccccgctgagaaggaggacgacccaatgtggaaggatcgggtggagcatgctaaggatatctgggccatctacccaggacagactgcgcacttgacagtgatgcgcggtgaggccatgtcccatctgatggcactgctggaggccaccaagatcacgttggataaccgagaggagcttgtggtcgacttgtctcaagaaatggtagagaaagatttgcaagtggagcagctgtctggtgagattcatgagttggaggagctagtgggcacccgggagaacaccattgaggtcctagaggatcagctcctcaacactcagcagcagctggcagaagcaaatgagcacctagacatgcatcaccaagagatccatggtggggaggctgacgaggacgtggacatcgagggaggagacgagtctgcttccagtatagacactgctggctcgggaagaccaccttcccccgagtccagtgttgcttcgttcgctcactag

SEQ ID NO: 762 - DNA, 333 bp, Zea mays
  Peptide Sequence Number=SeqID_44137
atggcgcatgtgggcccagagtggtcacatggcatggcatatgacgacactagacacacagacgtgtctaagaggggaggtggagctagagaagatcgcctcaacaccctagctggtgtagtggtaggtcttaacaccgacctggacagtgccaccctagatctctctagggtgcacttggagctggaggatgcccatgccaggattgcagccctggaagctcaacttcaaggaagggatccccctgaagcccaagtccccgccatggcattatcccctccccgcaagaggattcgctatggggaactaggatccatcaccaggctgctttaa

SEQ ID NO: 763 - DNA, 1068 bp, Zea mays
  Peptide Sequence Number=SeqID_44138
atggacaatattgatgaagtaaccgacaagagggtgacagccttaggagaaatagaaaaggacaagatcatagtagccaaggcctacaacaagaagctccaccaaaaggtaggggcatatgttgagcaccaaaatgagccgccggacggtccggccctggggccggacgaaaaccctaagccctgctttaggacgtggaccgtccggcccctggtcatagaccatccgtacctgtgcagagagcaccgtcaccggttctcacgtagtgattggcgccaaaaaaaagacaccaacacactgctggagctacgagcggcggaggcggagcaccagcaccaacaccgcaatggcgggacagcaggaggcggggcagccggcaaggcgagggaggcagagtggtcggcgctgccgcttccatgcgtggaggagaacaagctgctgcgggtgatggcggggtgcaggcggctttgcttgcctggcatttccatagaatattgcgaggtgcaggcggcctggcatttcctgatcatcgacgtgggttcgattttgggtttagggattaatttggtgaccgtttggtgtatcgggctcaaggccaaggctccgctcaagggacacgatcccgcctcgcccgagcccgacctcgggcaaagacagccgaccccggaagattcacgcctcgcccgagggtcccctcaagcaacggacacaccgtcgactcgcccgaggctcagctcggggttcggcccccgtctcgacctcggaagatggactttgcttcgcccgaccccagggctcggactcaaccacgacttagaagacgacgaactccgcctcgcccgaccccagggctcggactcagcctcggctccggaagacgacgaactccgcctcgcccgaccccagggatcggactcagcctcagctccggaagacgatggactccgcctcacccgaccccagggctcggactcaacctcgacctcggaggaatcgccaccgcgcccaaactcgggcccggaccggccatgtcgccaggggcgccatcattaccctgcccctagctag

SEQ ID NO: 764 - DNA, 681 bp, Zea mays
  Peptide Sequence Number=SeqID_44139
ggcaggcggcacctttggcaggcgaagcgggcgacgcttcacctccgccataatgaccgcgtcaaaaaagggactgggaaaggggatactctgaaaggaatccttctccgcgaaggaagagggccccgagcccccctactgatcagaggttcgaaggctggcccctcggaagggttcaacagccgcctcagagcacttgggctccgcgcccactactggtcagaggttcgaaggttggcccctcggaagggttcaacggccgcctcaggccactcgggctcagcgcccactactgatcaggggttcgtaggctggcccccaaagggttcgacagccgccttagagcacgtagagcgagggatgactctgggtacgttcgatacacaaccaaggctcgggctacgctcccgaggtaccctaggacatttccgagaccagcgggaacgattttgtaacggaatcccaccagagggaggcatcgagccctcggaccccgtcaaaaggggaccgggtccggcgaatcacccgcaggcgaagcaggggcgtatgaaaaaagctgagtctgtccttgaccgtcctctcgctctgcgcggaggctcgggggctgctctcgcaaacctggctccggccaaaccgttgacagcgtcaacataccagcccaagaacttgggacctgactaa

SEQ ID NO: 765 - DNA, 297 bp, Zea mays
  Peptide Sequence Number=SeqID_44140
atggacttcgcttcgcccgaccccagggctcggactcaaccacgacttagaagatggcgaactccgcctcgcccgaccccagggctcggactcagcctcggctccggaagtcgacgaactccgcctctcccgaccccagggctcggactcagcctcggctccggaagacgatggactccgcctcgcacgaccccagggctcggactcaacctcgacctcggaggaatcgccaccgcgcccaaactcgggcccgaaccggccacgtcgccaggggggccatcattacccttcccctag

SEQ ID NO: 766 - DNA, 400 bp, Zea mays
  Peptide Sequence Number=SeqID_44141
atgcagtcggcatgcaaccgcgccaagtgggcgcgccccttcgactccaacgcgcctagcatggaggcccaagcccacacgtcatgcaaccggcgcgccggttgccacgcgggcaggagcagtggtcacgtcatcagccaagcttgcgtcccatccaggggcagcgagaggaccctctctcacggcgtgaagacgggaccgggaaagggggataccccgaaaaggatccttctccgtgaaggaaacaggccccgagcctccctactgatcagaggttcaaaggctggcccctcggaggggttcaatggccgcctcagagcgattgggttctgcgcccactactggctggccctcgaagggttcacagtcgcctcagacacagagcgagggatgaccctgg

SEQ ID NO: 767 - DNA, 321 bp, Zea mays
  Peptide Sequence Number=SeqID_44142
atggggtggccctggaggccacagcaagttggagagggcgggtgggagggcgttgcggcggctgatggcgcggtggctggtggtggtgagggatgggcggctggtggtggtgaggataacctggagctgataccaggtgtcaaggaccttcggtccatgacgatagctatcttctccggcgaggttatacccctctgccgcaggcttggttctagggtaggtgtcaaggaccttcggtccatgacgatagctgtcttctccggcgaggttatacccctctgccgcaggcttggttctagggtagcagccctaggcgcttga

SEQ ID NO: 768 - DNA, 114 bp, Zea mays
  Peptide Sequence Number=SeqID_44143
atggcgtggtggtggagcggcaacaatggaagggggtggaggagggctttgatggcggggatcgtggagcagaggggtttgatagttcatcgtttcattgccaccatcaattag

SEQ ID NO: 769 - DNA, 588 bp, Zea mays
  Peptide Sequence Number=SeqID_44144
atgcccgaggggttcggtcccgagacctccaggtgggcgacctggtgcttcggctgtgacaagacacccgagggcggcacaagctcacgcctccctgggaagggccgttcgtcgtcgccaagaaaaagatcttttctgccagaatgtctttcgtgcttttcgactacttcgaaagtggatcctgaaaacgacggagtacacttgaagggagcagcagcaccctcggcatcaactacaccttcggcaaggtccggcctagcctcggacggtgacgcggttggaggatctccactccgaaggacgacatcagcaccatgcctgggacatcgccgccagggtcttctccaggaatccggctcgagcaaacggctcggccggccaccccgaagcctcagccagctgtcccccgaggacatcagcccggctcgtggcatcggcgactcaactccggcgtcggtcccgccagtggacgacccggccaggctccggccgaccaaatcttcttttcgagccaactctgcctctgtccgtgctgacaccgctgcctccggcttcggctcatcgaagagcggccgaggtttcctttaa

SEQ ID NO: 770 - DNA, 771 bp, Zea mays
  Peptide Sequence Number=SeqID_44145
atggctgccccgcgaaccactcgccccgtctcattaactccgcggcgggacaggcggcacctttggcaggagaagcggacgacgcttcgccttcgccataatgaccgtgtcaaaaaagggaccgggaaaggggataccccgaaagggatccttctccgcgaaggaaacgggccccgagcccccctactgatcagaggttcgaaggctggcccctcggaggggttcaacagccgcctcagagcgctcgggctccgcgcccactactggtcagaggttcgagggccggcccctcggaagggttcaatggccgcctcaggccactcgggctccgcacccactactgatcaggggttcgtaggctgccctcgaagggttcacagccgccttagacgtagagcgagggatgaccctgggtacgttcgatacataaccaaggctcgggctacgctcccgagctcactggagacaccatgttcggcgccctccgagggcaacatggcgcttcccccccccctcctccttgcggaaaggcgacgcaagggcggctcagactcgggctcagccccggaagacgacgaactccgcttcgcccgaccccagggctcggactcgggctcagccccggaagacgacgaactcctcttcgcccgaccccagggctcggactcgggctcagccccggaagacgacgaactccgcttcgcccgaccccagggctcggactcgggctcagccccggaagacgacgaacttcgcttcgcccgaccctag

SEQ ID NO: 771 - DNA, 465 bp, Zea mays
  Peptide Sequence Number=SeqID_44146
atgggtcgacgcgagacggaacacaaaggggggaagaacagcaaaggggaagccgcggccttcgtgttgtcctacgcccagggcggatgcgcttgcagtagggggttacaagcgctcgcgtgggagagagagagactgtccgccagcccgttctcccgcgcggccaccctctcgtacgagagccctaggccttccttttatagacgtaaggagagggcccaggcgaggcgaagtccgtcgtccgaggtcgaggttgagtccgagccctggggtcgggcgaggcggagtccgtcgttcggcgtcgagtcgatccttgcattaaatgctcctgcgatacggtcggttggtgtggcgatctggccaaggttgcttctccgcgaagcctatccgagctgggcctcgggcgagtcgaagctggtaacccccatcagcataaagctgcaaaggcctgatgggtgcgattaa

SEQ ID NO: 772 - DNA, 701 bp, Zea mays
  Peptide Sequence Number=SeqID_44147
atgacttcccacggatcctcagatgatggaaatgcactgacccacactgacgggcttgcacgagagggctttccccgcattttgtgggaggtacttcagggggccggatacacgacaccccctcagtacgcggtgcagcagtttgagaagcatacagtgccccgctgtagggtgaggatgaccttggagcctcatcccctgcagccaggctggcgctcattggactccgagtcttttggataccgagctgaggacacgattgaggcgatcgctctgcatgggttgaccactttctgcggattccatcctttggagctggctacccaccccattggattgttccccgccgaaagggaggacgacccaatgtggaaggatcgggtggagcacgccaaggacatctgggctatctacccaggacagactacgcacttgaccgtggagcagctatccactgatatccaagagttggaggaattagtgggcaccagagagaacaccatcgaggttctcgaggatcagcttattaatactcagcaacagcttgctgaggctaatgagcacctggatatgcatcaccaggagatccaggacatggaggccaacgaggacgtcgacatcgagggaggagaggagcctgcctctagtgtggacactgctggctcatggagaccaccttcccccgagtcgagtgttgcctc

SEQ ID NO: 773 - DNA, 270 bp, Zea mays
  Peptide Sequence Number=SeqID_44148
atgaagcggctcgccggcatcccaaactcccgctcatggaagggggtgaaactgaccacgtaccccggcggcggagtcggttcggcctcgctcccgggggccaaccagtcaggctacggcccgccggagagaggacggagcaaaccctcagtaacaagggcctgcagatcctccacagtgatggtggagaaaggccacgggttgcgcggcggaatgacggtcgccttgtcagccatcgccgagctaaagcggtggaagcggaggggatga

SEQ ID NO: 774 - DNA, 393 bp, Zea mays
  Peptide Sequence Number=SeqID_44149
atggagaagggcgcgggcacgcggcggtggcggctggtggaaagagggtcggatcgtctcgccttcatcaacagccagacacgcagcctttcctgcgacccgattccagtacatgccttcaccgtggagatctcggattcgttgaattctccaacgagatatgatagctgcttttgttatgatatttggaagcatggcagctttaattatattctgcgttttctgggattactggatcacgggtcgggacgaagaatgtcgacaacagaaatctgggaaaattccaaacccccacccaatctgggaaatgtcagtctctggctcactgccactcaataccctgatattcagcttggtttgttggccgattggtacacacagaactatttttag

SEQ ID NO: 775 - DNA, 954 bp, Zea mays
  Peptide Sequence Number=SeqID_44150
gtttttcctctcctcccctccgccgccggcgagccgcaattccctctctcctcccccgccgtcggcgacccttttccccctctccctctctcctaccgggcggccctcgccgcgcccctggcggccgcgcgcaccaccaccaccgtcggcgcgccgccggggcacgtcctggttgccgccaccgcgccctctccccctgctgcgccctccccaccaccgccggtcctagcaccgccgctcgcccccacgccgtcgtcgtctcctctggccccagcgcccgtcctcgcggtacccgcctcgccgcccccagctgcggcgctggcaccggcgcccgtgggagcgagcgctcctacgctctcccaccagtacatcggcaacgccgccactcacggtgcagcccctgctctgaccgccaccatcctctccctcggcttcccttccatcgccttctccctgccggatgccgccttgcttcgctctcagctgttggcgccgggttttccccatgtcccgctcggcacaatggttggggctcccgtgcgtgactgcacttcaccgatgaccgcctacagccagccctccgccatcacctcatccctgtgcgctccttcggatgacgctgccgccatcctcgccgccacccgggcagccgttacgacggctcgccagcgggcccaggacgccgctcgtgctcttgagcaggagcaggcggttgttgacgccattgagcgccactacactaagacctgccgccgtctcgccggcaagggcgtgtcggatggttctcccacgtccgcccatcactgcgtcgacaccttcaagtctgcgcccgccccagcctcaactcttcgcgcctctcttcacgctcaggcggcggcctttacaagcatccgggcaaccatcaccgacgttctcgtgccggactccagtcagtaccctcggtggcacgactag

SEQ ID NO: 776 - DNA, 726 bp, Zea mays
  Peptide Sequence Number=SeqID_44151
atgaggaaaaaacacggctccgtgccgaaattacatacatgttcaggccccgacagccgcaatgaacaaactcaccggcattcgaagtgccattacgaacggaactccggttccccctccgcaggcacgaacgaccccactccatggggagggcctgcggagcaacagaagactgacgagcggctcgccgccgcccgttctgactacggcgacagtggaccggcgttgctgcgatcttgttctcgcccccgccgacgctcgaggggcgaggacaagtacgccggcgcgatggcccggggcgcgggtggtggcagtgatcccgtcggcgacgaggacttctcgagccgcctccgcctcggcgccgatggcaggggacaccagccccccggcagatccccactcaaatcctcccggacgagtggggcaccggcctctgcgcgagggcgtcgtcccagtgcaaaagcaggaccaccccagaacacgaacgccgccctaacggcgcgcgacatcgtgggtggtcctcccgtgcacgcggtacggcggtcgccccccggcaggaagggccgccggaagcccagccgacgactccgacacgctggaggtgacgacgcccgccgtcgatcagccccacgttgtctaagtccgcgccgtccgcagggccagcgagcgcctccgcccccgaacgccgcggaaaagggtgacccgcggacccgcgcggggaggtag

SEQ ID NO: 777 - DNA, 702 bp, Zea mays
  Peptide Sequence Number=SeqID_44152
atgaaggaagcagtagtggaagtaacgaccccatcagggatttggaggccagggtggatcgcctcagtcgaagttaatcgcctgcagtacaaaatttcggaacgcgatacagccattgattgggccataaactcgcgctctttcgcttgggactgtgaagccaaagttctagctcgagtagcagaacttagcgcatccctcgaaaacctgcaagcgtactacaacaccttgcatgaagaagtgcatgtattgtatgattggctacacccgaacgtgccacttgatgtggcagctatgggagttggaccatctagaacaacaaatggaggatctaatggggggattgacctttttggagcccctccttccatgaatcttgcagatgaacggtctcctaaagcaggtacatcccgcggcggggaggacactcccaatccgccacctgtacctcctaccctggccgaggctatcgctgccttggtcaacgccaccgtcgacaacatgcgctttctgcacgaaatggcgggcaagcaatttcaacaacacggaggaagagttccccctcaaggaccacaagacactacctatctggagttctccgaaacctgcacaccgctcttcgtcaaggcggaggaacccttggaagctgatcaatgggtgcgagtaatggaacagaaattcgggctaatccaatgcaccgag

SEQ ID NO: 778 - DNA, 648 bp, Zea mays
  Peptide Sequence Number=SeqID_44153
atggccaccacaccggaggaattcttcatcaaggatctcatggagcagccaccattgtccccacctgtcttccttgaactcccccacaagcccaatgccagcaatgaggaccgacatcaagtccctaacaatgacatgacgctcccttacatctcacgcatgctcatggaggacgatgacaatgagcttggtgatcaccctgcgctactccaggtgcagcagtccttcgctaagatcctctcctcccctccccttgttggcactaacacaaacaacagcgaggggacgaatgatttcttgcatgaagcatgtagccctagggacaccgtcctcagcaacatcaggaagatgaggccagacgtgttcatccagagcgttgtgaaccagtcttatggttcctccttcctgtcacggtttcgggagatactcttctactgcacggcgatgttcgacatgttggacgcaaccttgccgagggagagcgaatctcgactggtgttcgagaaacttgttctgggatgctacgtgttcaatggcatctcctgtgagggcagcgaccttgtgctgcgccctaagaagtatagacagtggcaggcaagaaacgaacgagcaggcctcttctggatggctacaaagacgaggtcatga

SEQ ID NO: 779 - DNA, 315 bp, Zea mays
  Peptide Sequence Number=SeqID_44154
atggcgcgcatgctgaggtggtcgccactgctggggaggctgcttggcgcagaggtggtcgccgccgctagtgaggctgcctgttgcagaggtggttgcctccgctggcgagccgctcggagtcgaggtagtcgccgccgctggcgagccatcggtgcagaggtggtcgctgccgtcggtgcagaggtggtcgccttcgctgaccaacagaccgggcatatgagggcggacctcaccgggttggcgtacacgtatgcgtttcctagttacaaaagggaaataaactcgacccctcagacttgctcctatggatag

SEQ ID NO: 780 - DNA, 1047 bp, Zea mays
  Peptide Sequence Number=SeqID_44155
atggacacccagagtaacacctggggtgttacaaagttcacctccttcacaaggttggtgatcatccttttcctccgaatgctggaggaagaggcgggcaccagcccatcggtcaaggaggcgaaccgccgcacaaggagcgtgcaaccgccccctcggcttcactgcaaccggtggtccaacctctggcatgggggcctagacccacatgtcatgcaaccggcgcaccggtttctgggtgcagaaaagttgcaccgccgctcgcgccaatacctcgcctcctcgaggccgtcgcagaagactgaggtgataaattttcaaaaccaatgcagcgactcgaggcaccccgcgcatggcccaacaaagacattaagtgcggaggtcacgggccagtcagccgcggggacaagcgtggcagtcggcgtggccatgggcaggccggcagtaattgcatcaacaggcgcacaagagaagcgagccaatcgccagtcaaactttggccccacctgcaggttcgcatactcctttgaggcgggcccgggggccactgtcggtaccctgaatcaggggtaccccttactacagtatgaagacgcggtgcccgagaaaccctggcatgagcaggggtccggtactgacacgtatccgggccttactctgcgcatgtgctccccgctcaggcggagacccgatgcggccacgtggctcgttgcccatgacataagccagcgggcggagcctgacgtaaggcccctagactgcgcggactctgcatttattgcgaaaaggacgcgccgcctgaccaccctgctgacaggcgatgtgccccctcagcatttattgcgtcctgtccactccgctggcaggcggcaccagggccaccctacagacggcgtacctgtccagtccatagtcggaactgtgcgcccatgctgcgcggtgcactgtgctcatcatcccttatacgagaagcttccccctgcacgacgaggctacgcagatctcgggtgtcagggcacaagaagattgctccagcagcaaacatga

SEQ ID NO: 781 - DNA, 720 bp, Zea mays
  Peptide Sequence Number=SeqID_44156
atgtcttgcttttttcccactcgcggcgtccttttgcctccgagctctctgtgcccctttgccttcaaggtttttgctttgcgttgccgtagtttgccatggccttgtgacttcaccccgagcacacccaaactgagtgagtgctcgaaatggtataccacttgcttggatggaatgcgccggcgctcagcggaaggatttgcgctggcgttatccaccccgatgagcttgctgctagagagtttgtgccttttgtccttcctagcgggccggtgctaccggtcttgtttttcctctgctggaggtgtgtggccttgtgggagcagcgctcttccaccggtgcttggcttcaaggatgttcatcagcctcgcgatggtggggaacgagctgagccacggtttcgcctcccacatgggctggtgcccgcctcttcctccagcattcggaggaaaaggatgatcaccaaccttgtgaaggaggtgaactttgtaacaccccagggcagacagacaagacttggcgctaccgtatctcttcaaccagaccacatctacccttggaacttacatgaactagactgtaatcttgctgacggagagtacatcctcgtgccggagcaaggagctgctcaggaggtagccccagatccagcaccagagccagctcaggaggacctgcctgccactgctttagaaggcaagccccggttttatgcataa

SEQ ID NO: 782 - DNA, 309 bp, Zea mays
  Peptide Sequence Number=SeqID_44157
atgctggtagactacacaacgggtctcctccagcagccgggatgccttgaggtggtgcagggggcatctctggctgaggtgcaggggaaggcggcctctcagactccacctcctactgaggcgagggggaagagtcctgctgctcctggtcctgctcttgctcctagcgtcgacgctcctgctcctcgtgcaggcgacgatgcagtctctccacctgactggactgacctggcaccatgcgacgaagggggcgttccaccaggcgagaaggcaaaaaggggatcacagacttatgtgcagtgcacctga

SEQ ID NO: 783 - DNA, 285 bp, Zea mays
  Peptide Sequence Number=SeqID_44158
atgacgcttcctgttgacgtggcggtctgtgctctaggcagggcgacgtgggttgccgtggccgagcccgagccaaggggtcgggcgaggcggaggtcgttcggccgaggccagggcggagtccgagccctggggtcgggcggagcggggttcgtcgttttccgggtcttagcccgagtccgagccctggggtcgggcggagcggagttcgccgtcttccgggtcttagcccaagtccgagccctggggtcgggcggagcggagttcgccgtcttccgggtctaa

SEQ ID NO: 784 - DNA, 288 bp, Zea mays
  Peptide Sequence Number=SeqID_44159
atggccgatgaagctataaagaagagtgaaatagaatctcacgatgcacaagtggaggcaaaggaagctgaagaagctgttgaacgcgcattaattatagcttcgaaattcaccaatatgctctttattacagccgacctctcgccaccaccggagccatacaatcctgaggtggatccaattatgaaagaggctttagatgtaatgaaaattgctaacgaagttgtcgaccaagtcattgacagacttttacatgaagccgccgaaagaatactgaaagaagactaa

SEQ ID NO: 785 - DNA, 651 bp, Zea mays
  Peptide Sequence Number=SeqID_44160
atgtggcaggacgccaagaaaagcctcacacaaatgaacgtaaatggaaatttgcataatagaattgggattcagatgagtcaagttaaggcgatagaaatcaaggagaccgcggaaaaagggagaaatggggagagcgagaccgcggagaagaaaaggaacgtaaatcacggattcatgggtatcctctgtcgggacagtgaccccatgacaaatccgccaagaacaaagctccctcgggggaaggaccccgatggacacgaggtggagaagtggcatctagccactggccttgttgctgcccttgctgatgtcgccgtcgccgctgcccctactgttgccgccgtcatcgcccctgctgccgccgttgctgcccctgctgccgctgttgccgcccctgccgccgccgtcaccgtcgtcgcctccgtcgtcgtcgtcgtcgtcaccttcgctgtcctcctcgggcgagtcctcctcgtccgaggagtactccgactcatccgagccctcgagcccagagcgctcaacggcccggatgtaagtctagacctccgcggaaatcccctgagagtcgtccgagtcatcggacgacgctgggggagagacgggagctggagacccctcggactcagaggagaactcctcctctga

SEQ ID NO: 786 - DNA, 240 bp, Zea mays
  Peptide Sequence Number=SeqID_44161
atgggtttgttaatgggttcaaatggaaacccaacggtgggtatgggaaacccgttggatatccgaaacccgcatgggtatgggtttggacaaaactttatacccgtcatgggtatgagttttttagcgggcgtatttttctttcgcgggtatgagtttgggcaagtaatacccagcggatttttacccattgccatctctatctacaaccacacaaaagcaaacacagttctgaattaa

SEQ ID NO: 787 - DNA, 1602 bp, Zea mays
  Peptide Sequence Number=SeqID_44162
atggacaaggatcgccaaggggcggcgcaaaaacgccaggcggctgtccggctgcatgaagctaggccgaagcggcagcggggggctgcgaaggctgcggcccccgacggaggcaaaccgccgctggcggcgaaggtgggcgcctctgcacctagcaaggcgccggaggcaacggcgggcgccggaggctcaaagtcaacgaaggtggtgccgccggccagtggagtggcgaaggcttcgaaggcggcccgagcgttgccgttgtcgggcaaacgtgttgccgacttcggtaccgatattactgtggacgactatcttggagggccggacgagggccagcttgctatagttgcgcctggcgcggcgatcgcgacggccgccatagcgccgaaggcgaggggcgaggtgtcgaagtctcttggcgccggaggcgaggtgtcggccctcgcggtggtcagggacgaggcgggcgcagcgacccgccggctgaagggagtgacggaggcgctgagtcaggcgacggaggcgctgagtcaggtggctgacttcaccagtcgtactgcgtcgggggcccttacggcagccttgtctgccgaagtcgagagacttcggtcgcaacatgctgacgctgtccgtgagaaatcggcctccgacagcaagtgccgtaaactggcggacaaggtggccgccctggagaaggagaaggccgacctccggcgccagctggcgggggagaggagggaggccaacgaagccatcgccaaagagcaggctgcgcaggcggaggccaagctggcgcgggcggaaggcaatattgccaaggagctcgccggacatctgcaggagcggctcgccgccctggagagccgcgcgaggggggccgaggccgcgatgcgtgcggaggccgaacggacgcgcacacagcttatggatacatatcatgagctgggtgcgcggaccggtgatttcgaggtgccggaccgagaacccgggcttcgctgtccggaatgggtgcaggaggagctgcaagagctccccgctgtcgtgggggggttcatgtcgtacgcctccctggtcacctgcgagggggcggtgaacgcactctcccgcgaagggtgccggcacttcgaggtcttcgaccaggcagatgaagattttgagcgggatgtctataaggtcgaagaccccgttgtgaaggaatccgccggggccctctacgaccggatgtggggtccgcacggtcgtgaggtggtcagagagcgggccgagattgcgagggctcaggcggcgcgtggcgagcgggtggacgacttcggggctctcaacagcgcgctgccagacccggagccgacccttgcgaaggccgtgactggggtcgccctggagccaaccccggagaccgcagcgacggctgcccccacgtccgctgcggccggcgaagacctgcccccaaaggtggccgaaggcgcccctgatgcccccgcagctgctgtgccgagtgttgaagatcccgcggcggtggcggcggaggcaacggcggaagctgcggcggagccaacggcggaggctcccgcagcgtcagggccttcgcaggtggcgtag

SEQ ID NO: 788 - DNA, 1266 bp, Zea mays
  Peptide Sequence Number=SeqID_44163
atgcaggcggcatgcaaccgtgccaagtgggcgcgccccttcgacttcaacaagcccagcatggaggcgggcagaagcaacggtcacgtcgtcagccaagcttacgtcccatccaggggcagcgagggagccctctcccacggcgtgaagacgggaccgggaaagggggataccccaaaaaggacccttctccatgaaggaaataggctccgagcctccctactgatcagaggttcgaaggctggcccctcggaggggttcaatagccgcctcagagcacgtgggctccacacccactactggtcagaggctggccctcgaagggttcacagtcgcctcagacacagagcgagggatgaccatgggtacgttcgatacataaccaaggctcgggctatgctcccgagtgctaccctctccaacgaacgccgaggatggcggaacgtagcggaggacgcgcggtcatgcggccgtgggatggtgcgcctgcccaccgagatccgcgggggcacaaacgacggtgctcgtcgtcggcgttgctccgcgagccaattctggtcaccagtggaaccttggcgaactgcgtggagcgaattcatcgccgtgggtcgctgcacgatcctctccgacctccgtaagagctggggaccgccgtcgctgtggccgaccacctccgcggtcctcttcgattcagccggccatgtcctcgccgccgcacgggccaagggcgctgccgtgtgtgtgggggccgccgcacggctgatttgggggaagaagaaagaaactccgcctcgcccgaccccagggctcggactcgggctcagccccggaagacggcgaactccgctctgcccgacccagggctcggactcgggctcagccccggaagacgacgaactccgctccgcccgacccagggctcggactcgggctcagccccggaagacgacgaactccgcctcgcctgacccagggctcggactcgggcttagccctggaagacggcgaactccgctccgcctgacccagggctcggactcgggctcagccccggaagacaacgaactccgccttgcccgacctaggggctcggactcggtgaaagggaaatgcgaactcgtcgttctcgggaattcatcgtcgacgtacggctataattcaccggactgtccggtgtgcaccggactgtccggtgagccaacggtcgacagggccaacggtcggccgcgcgatctgcgcgggacacgtggccgaaccaacggctag

SEQ ID NO: 789 - DNA, 885 bp, Zea mays
  Peptide Sequence Number=SeqID_44164
atggcgctcgttgttgacgtggcgggcccgcgcccgaggccgggcgacgtgggggctcctccgaagctagggtcgaatctgtcttccgttgccgaggccgagcccgagcccctgggtcgggcgaggcggaggtcgttcggcagaggccagggcggagtccgagccctggggtcgggtgaagcggagttcgtcgtcttccgggtcttagcccgagtccaagccctggggtcgggcggagcggagttcgccgtcttccgggtcttagcccgagtccgagccctggggtcgggcggagcggagcttcctatggcgcctttggcaaggcctgagtgcctgtcagattcactctgtcgagtggcactgcagtcggagtggcgcaggcggcgctgtccttctgtcagaccgcttcatgctgatgggggttaccagctgagaattaggcgtcttgaggccaactctgcctctgtccgtgctgacaccactacccctagcctcggctcatcgaagagcggccgaggggttcctttaactaagcaagagaagcctcgaacagcaaggccgaccgagccgagggactcctacgcctccgagatatggatacctcactcgtcacctttgcacggggccccgacagccacaatgaacaaaagaccggcatccaaggtgccactacaaacggaactccagttccacctccgcaggtacgaacaaccccacccgatcggggggcctgcggagcaacagaagaccgacgggcggctcgccgtcgcccgctccggcagcaacgacaacgacccccgctccgggtggccgaactgcagcagcgatggcctcagggctgtgatatcctggccctgggatgggatgtcctggcccaaggcttaa

SEQ ID NO: 790 - DNA, 687 bp, Zea mays
  Peptide Sequence Number=SeqID_44165
atgggggaaaccgccgtcttttcgccccatcgttggaggaacgcaactccgtgggagttggtacccttcagccatcgttcggcttcaaggattttcatcaaccagcccgaccgctccccctcgccgggggtcacccaagacggcaaccaccagcccctggatggggaggagcggctggactgtggtctttgccccgctcccagctggtcttcatcatcccgaccgggacaggacctgggccaagccggtgctctgccccttgcgtgggtcggccgaccgcctcctcttccagcttctggcggtggagaccatcccccagttccgcggaggagacgtcctccagtcatgctgggggaggcgggttgttgctacccagctaggatgcagcattccgtcctcttcctcgcttgcgtagcgaggacaggagtgaggacctgccgatgcgccttggggcgacccgcgtttgctggtgattcacccagagctcgtcgctccacgggcttctctggcggggaggttgtccgtacctgcggggacggaaccggagttccgtttgtaatggcatttcgaatgccaaggttttttgttcattttggctttcggggcctgaacacttatgtaatgtcggcacagagccgtgttttttcctcatttctgagcactaagactcgtctgttgtttgtctga

SEQ ID NO: 791 - DNA, 1041 bp, Zea mays
  Peptide Sequence Number=SeqID_44166
atggatgggaacggcaactgggacacgatgaaaggcaataagttagccgccgaggtcgccgtcgcgcgtgaggtcaggtcggcaacgtgttgcgcgtgtatgtccagactccaaatcgacctgcacctgcacatcagcacatcagcccaagtccccagcagcaatggaaatttccggacgcggttcatcacgagcggaggaaacgtcctcgctattcatcatgaagttgaagaagagtacgttgtgcgatggatgcttggcaaacaaggaacagatcagagtccagcaccaggattctgtctcgatttactagcaggtgccttgccaatgcacctgcccttctcgtatggagccgatgcggaagaggaattgactgagcgcggggaagctgatgtagttccagaggctggaacgaagatgggccgtagccgtcgtgtgcgccggctcagtggacgttttccttctgatgaaaatagcgttattcaccccgctccggctactgtgccaaccaccaaggcaagactagcaacagtaagtcgtgacctctcccgagttcagcctcaggcgcagcagggagctccgcctcgtccgacctcaggcctcggcctcaacctcggcctcgggagaaggtctccgcctcgcccgaccccaggcctcggcctcagcctcggcctcgggaggggtcacaacctcgcccgaccccagcctcagcctcaggagaagtcttcgcctcacccgacctgggcctcggaccgactacgctacaggggatacatcattaccctacccctagctagctgcctcaggctacaaaggaacaagaccggtgtcccatctaaggttactctggtaacaggtaatgatggttcaccgtgtgcatccatgacgtcgagggttctcagctccctacggaagcaagacaacgtcagcaggatccatgccgcaccgacagctgtgcttctacagggcccaaggcacttctctgacagccacgttaaaacgcgtacagggctcaaggcgcttctccacgagccacgttag

SEQ ID NO: 792 - DNA, 585 bp, Zea mays
  Peptide Sequence Number=SeqID_44167
atggaacaccaccacaagccaggcctgcgtgtgcgcctccgcatcaccgccgcgcggcgccgcgcgtggctctccgcctgtctgcgccccccctgccgcaagccgccgcgccgcgaccactcggactccgtccacaaggtcgcgcgccgcgagatcggcggcggccaccgacgcccgccgcggcccgcggcgccctcatcctcctcattctcgtgccctgagaaattccgcaacttccagctccagtgtaaagataaactagtgaacgacaaatattcgaggcagtatgtatgcttctgggtttccttgacatggattccgcataacatacctggtatgacaaagtttgcaatgactggacgcatagttgtcaatagtaattggagtgtggacaacatagagaagtacaagatagaaaagaagactacaagacgagttgtaagtgtggcaaagggtaggccgcatgagggtctttacgaacgtttgagtgcgaaggaaggaaagaatgacatatatgggatgactagggttcgtgagaggaagacaagggacttcaccaagttaagtgcactaaagatgaaataa

SEQ ID NO: 793 - DNA, 1809 bp, Zea mays
  Peptide Sequence Number=SeqID_44168
atgccgtgcggctcgggccccggcgcggctgacctctgggcgatggccgccgagctggagcgccagttcgcggggtacaagcagcgcctggcggagcggacgaccaccggggccaccgccaccgcacgcgagcgccacgacgccggggacggcgcggaggaggcgggtgatgatgacgaggcgggaggcggcggcggcgacgtgcggggcaggaagtacgaggcgtacgcgcggcggagggacgagcggctgcgcgacgggtggcgcgcgcgcatggagcgcaaggaggccgaggtcaaggcgctctgggcgcagctcgagctcgccgccggccgcgccggacccggtgacccgacgacgaccgcgacggaggacggagacgacgggaggaagactgaacggaacgacgccgacgacgacaggaggagaagctcatcgggcgcggctcttgccccgaggagggtcaccggcaagaggcacgtgcggaccaggagcttctcgtcgtcaaccatgagcaggaaccgcaccgacgtcgggaggcggcgggcgctgtcgcacgaaccgccgccgtcggagccggacgcatcctgcggggaagccgacaggaaaagccgagcgtggccggccggccgcgcggcggcagcgactgcagacacgatgagacccagacccaagacgtctctgcggcgcaggagcacctccgtggaagggcacgggcccgcgaagacggcggcggggcggaagctcccgcggcctctgccccgacgagatgacagctccggcggacccgaggatctcggcagggatgtggcgctggcggtggctcagccaagcgccgagacggttgcgccacctgtgccgagtcgttcggccgagtatgctgccactggcggcgggacccccggggcttctccgacgaagatgtcgctcgctggcagggacgacgacggcagcggcggcaacggtgcggcgaacacacgagctacctcgccggagccagatcgcggagcggtggacgaagccgtgtcacacggcgaacctgacgcgacgcacgacgctggtgccaacgaacacggcggagaagagaaggtcgacgccgacggggaggtcactagtgagtcggaacccgagccgagctacgtctacgtcaacaacaaggacgccgccgaggagcgagccgtggcggcgctctctgagccttggacactggccggttcggccgctgcggttggtccggacgtcaagtcaagcggagagacgccggcggcactagcaccaccagccgaagctactaccgcggccgcagcagaggtcgcgacgacgaacgccgaagaagcgccggcgagggagagctccgacgagtcctatctgtcggccaggtcgtcggtgccgagcgcgcgggcgtcgtgcagctcgcgggaccagtccgccgagcggctgctagaggcggacgccgccctcgcgcggaagaagcgcgccgagaagagcgcgccggcgccgagtacgccgccgggcagcaggtcctccggcgcggcgaggtccccgagacaggcgacggtgagggggttcaagaggttcctgagcttcgggaggaagcacagggggagggaggtcactgtcatcgactgcacgtcgccgcccgtgccctcgccggtccacgacgccagcggccggtggcagcccgctgatgggtcagtcaagcgcaggatgggctcctctgatgctgcctctgatgatacaaaacatggctatccggtgtctccacaagtcggagttgagatgctctcacttctcaaggaaattggatag

SEQ ID NO: 794 - DNA, 741 bp, Zea mays
  Peptide Sequence Number=SeqID_44169
atgaccagatctcctctccccattacagcgtgcgttacggggacctcctcctcggcctcggccaccgccagcacctggtatggaaggtcccagatctcctctccccattacagcggaccatggatttctcgagtcactgggaggtccaccatccatggaagaggcggcgacattatgagcgctgaggtgccgcacttccaccccgacgtgcttcttgaccagggcggcttcgggttcggcctcggcaacacggcggtcggcggcggatctgggcgcgcactacgcggcgaacaacatcgtgctggcctccttcgccagccagctggccagctcctcactaacgcccccgcgccgccgcgggatgatcgtgccggcgggaggacgcgtgccggcgggaggacgccgccggacgagatggacgacgagctatacggcgtcgccggctgcgacagccgcgtcgcggcgagcttgcggtgccccagccaatccggggccatggcggtctggtcgtcgtccaagaagccgtacggtatctggaccagtgccggcggaccagtacccgtgctggcccatgagacataccacctcgccggggccaggctctccgatgtaggaggactccactacccgctcgccgcctgcagtggcgccaacgcgtccacggcggtggtggcgagcgagctgacgctgtgccccaactccatcgcttcctcggacagcacgctgaacgcgacggagtag

SEQ ID NO: 795 - DNA, 303 bp, Zea mays
  Peptide Sequence Number=SeqID_44170
atgtacgacaagctcccgcgaagccgccgcttggacgcggtccagagcagctgcaccgcgctgtccatcgttaagcaggggagcctcatggttgtcgccaacgtcgacgactctcgggttgttctggacacccccaaccaagagtcatcggtactcgtcatgtcgcgtgcgttcgacgactactatatcgaggattgtgtcgtcatcttggcgccggaggtgacacagaggaggatcgacaacagtgaccagtttgtcatcctcgccaccgtcagggtagcttttatgtcggcctacctttaa

SEQ ID NO: 796 - DNA, 54 bp, Zea mays
  Peptide Sequence Number=SeqID_44171
atgggcctgccgccgccgctgctgctgctgcgcggccagacaacggagatttga

SEQ ID NO: 797 - DNA, 807 bp, Zea mays
  Peptide Sequence Number=SeqID_44172
atgtcaggtgggttcaaggccgcggccgcgccagcaatctccttcggcacgacgaccgcctcgacagagggcgaccctccgcgcgggtcggtccaccgcatcctccgagaccagtggcagggaaggcttgtgaaaccccaactcctggagacggacggaaatctcggctatgagaaccaagggcaatctgacacaagaaagaagaaggagcggacactcaccagggacatgcacccgcgctcgggacgcatcaagggctgggtaagggcgccggcgtccagcctccctaccgtgccagttacccgcctgtggaggtcatcggcggagagggggacagaggacatctgcgaaccctccaagtcgacccccggcgtcatctccgaaagcagcaaccgccgctccgtcaagggaagcaccctccggcgatggatggcggcaaccacccccgcggcgaatcgcccgcatgaaacgacttgctggcactccgaacccccgctcatggaaggagacgaaactcagcacataccccgacggcggggacggggcggctccgctcggagggaccatccactccggctgcgggtcaccggagaggggacgaagcaagccatcggcaacaagggcctccagatcgtccgccgtgacggtggagaaaggccacgggtcgcgcggtggaacgacggttacccggtcggccatcaccaagcgaagggggtggtggcggagcggacaagggaccgggaaagaggatactccgaaagggatccttctccgcgaaggaagcgggccccgagcccccgctactga

SEQ ID NO: 798 - DNA, 214 bp, Zea mays
  Peptide Sequence Number=SeqID_44173
gcgcccgcccgcctgctcgccgcggcggccactcgccgcgtcgggccccctccccacggccgtgcccaccacgcccgccgcacacgcccgccgcaccgtcgcgagcaccgtcgttagcatttttgttagagaagatacttgtcttcctagccactgcgggtctgcctacaccgcgtcgcgtcgccactgcaccgacccgccacagccccactag

SEQ ID NO: 799 - DNA, 516 bp, Zea mays
  Peptide Sequence Number=SeqID_44174
atgggcaagaacaacaagcgcaagcgtgagccgactcctccatcggaggagtttggtgactcagaatactcggaggaggagttctcctccgagcctgaggggtctccggctcccgtctctcccccggcgtcgtccgatgactcggacgactcccaggggatagccgcggaggtctggacatatatccgggccgtcgagcgcgccgggctcaaaggctcggatgagtcggagtgctcctcggatgaggaggactcggacggcggcgacgagggtgaagacgacgacgacgacgacgacggctggggtggcggcgacggcagcagggacagcaccaagggcagcagcaggggcagcaccaagggcggcggcggcggcagcagggacagcaccaagggcagcagcaggggcagcaccaagggcggcggcggcggcagcagggacagcaccaagggcagcagcaggggcagcaccaaaggcggcggcggcggcaggggcaggggcagggccagtggctag

SEQ ID NO: 800 - DNA, 147 bp, Zea mays
  Peptide Sequence Number=SeqID_44175
atggggagtcatgatccccgggcaaaatgggaatcacggctcatggatgatgatgatgatgatggttatgactatggtaatggtaaagaagaaggcgtcgaggcgaatctccaggagttgcaggacttcgacgagttcgaggattag

SEQ ID NO: 801 - DNA, 1149 bp, Zea mays
  Peptide Sequence Number=SeqID_44176
atggggtgttctagcatcgccttgctcttgctgtcgttggaggagcgcggcctcgtggagatcggcacctttcagccatcgctcggcttcaaggatttttgtcgtgcagcccggctgcattccctcaccaatgggcagtttggtggggggaagcaagccgggctgtggcctccgccccgccctcagcttcaaggatcttcgtcatccgggctgaggcagaggagcgcaccgagtggggggttgcctcctcatgggccggtaacccttttcttcccccagcgtttgggggagaaaggcatcctccagccctgcggaggcgtcctccagccatgcgggggaaggcgaaatgctgctccctggacagggtgcagctttccatccttcttccgggcggcggtcgtgctgcgcacgggctggccacgtccaggtcttcctcgcaccgtcagccgcgccagagggttgcccaacacgtcgtacgccgcgagggcagtgctcgcgttctggggcggcctcggcgaggacgggagtgaggacctgccggtgcgctttgggacggctgttgttcgccggcgcggtgtcggtgggttcaaacccacggtcggcgcccttcgactcttcagccttaatggcttgtcctcgcccctcgtgtggggacgtgggcgagggcctcttcacagcagcgtcttccctgaagccgttgctgtagctgtctggtcgcccgaggcggaggtcattgtcgctgctgtcaggggtcgccggcaagccacttggagttcgttgtcccgctggccccccggtgtggaggttgttcatacccgcgggagtgaaaccagagtcccgtttataaggagatataccagagccggagacagcagtgttagcgcggacagacgcagagttggctcggaaagagacttcgtcggcccaagagatggcggcttcctaggccgaggaagatgtggtagcagccgctggagcttggccaagacacctgctggcgcggtgctggcgtcctcccttaggtggaggtccttttgccagggtcaccgtccgaggccgggccaggttccgccgagggtggaaacaatgccgagggtgctgttgttccccctgccgacgcccgaacctgcaggaacagtttgtctgtag

SEQ ID NO: 802 - DNA, 411 bp, Zea mays
  Peptide Sequence Number=SeqID_44177
atgggcaagaacaacaagcgtaagcgtgagccgactcctccatcggaggagtttggtgactcggaatactcggaggaggagttctcctccgagtccgaggggtctccggctcccgggatagccgcggaggtctggacgtatatccgggccgtcgagcgcgccgggctcgaaggctcggatgagtcggagtgctcctcggatgaggaggactcggacggcggcgacgagggtgaagacgacgacgacgacgacgacgacgacggcggcgacggtggcggcagtggcagtggcaggggcggcggcgacggcagcagggacagcacccagggcgacagcaggggcagcaccaagggcagcagcaggggcagcgccaagggcggcggcggcggcaggggcagggccagtggctag

SEQ ID NO: 803 - DNA, 579 bp, Zea mays
  Peptide Sequence Number=SeqID_44178
atgcaggcggcatgcaaccgcgccaagtggacgcgcttctccgaccccccgacacgccagcgcggaggcccaggcccacgcgtcacgcaaccggcgcgccggatgctgcatgcaagcaactgcaccgccacttgcgccaccaccgcgcttcctcgattgcggaaccagtaccgcgactcgaggcgacccagcgcacgacccagcggcgccagcctgacgcggcagtcaaacgcggccaaaagtgggccggcagtaatggcggtggcaggcgggcgggagcaacggacaggcggcgcttctggcaggagaagcgggcgacgcttcgccttcgccgaaataaccgcgccaaaaaagggaccgggaaagggggataccccgaaaaggatccttccccgtgaaggaaccaggctccgagcctccttactgatcagaggttcgaaggctgcccccccgaagggttcaacagccgcctcagatcgtgtgggccctacacccactactggtcagaggttcgaaggccggccccccaaagggttccacggccgcctcaggctacccgggctccgcgtccattactga

SEQ ID NO: 804 - DNA, 585 bp, Zea mays
  Peptide Sequence Number=SeqID_44179
atggagcttggcggagggacagctgtcggagcggttgagtccttgctgacgtcctcttgcttccgtaagggggctgagagccgccgtcgtcacagagcatgcggggcgccatcattgcctatctggcggagcgagccagatgggacgccagtcttgttccctgcggcccgagttgggcgatgtggaagctcctccgaagccgaggtcgagtccgagcccccgggtcgggcgaggcggagattgccggctggtgccggggcggagtccgagccctggggtcgggcgaagcggagttcgtcgtcttctgaagccgagcccaagtccgagccctgggtcgggcgaggcggagatcgtcgtcttctggggccgagcccaagtccgagccctgggtcgggcggagttcgccgtcttccaggacttagcccgagtccgagccctgggtcgggcggagcggagttcgccgtcttccgggacttagcccgagtccgagccctgggtcaggcggagttcgccgtcttccgggacttagcccgagtccgagcccctggtcgggcagagcgaagttcgccgtcttccgggacttag

SEQ ID NO: 805 - DNA, 528 bp, Zea mays
  Peptide Sequence Number=SeqID_44180
atgggtacggactggaaccaagttatggcacaatatggaactttcctatccgaggatgatggcactcagtttcagaacactgcatttgctcctccgcctgagataccagcccagggctcaccagcaccacctccagtgaagaaggctcctcaacgcacaaagctagcaaatttcacgtctgaagaggatatgagggtttgtcaagcttggttggctgtaagttgtgatcccattgtcaacactggtcagaagcgtcaaggattttggaatcggattacagaggcatacaactctcgcagaggatcaatgccagagaggtctacaaaatctctcatgagcaggtgggacagtatcaaaactcaatgttctacatttgctggatacatgatggttgtgcttcgacaaaacccaagtggcatgactgatgcagataagcatgacacattgaacaaccagaaatctgatgaagaagttcatctgtttgcagtacacatagtagcttgggagaaacagaacctacgacattag

SEQ ID NO: 806 - DNA, 1134 bp, Zea mays
  Peptide Sequence Number=SeqID_44181
atggcgttgccaacgttaggcaaccgggaaagttcaaagcagaccagggcaccaaaagttaggcacaccggcgccatctctcgcctcggtgctcgcctccgcctccacgccgacccctctccggcctctcctcgcctccgcgtcctctccacccgccgcggtaaacgctcctcctccaccctgtcgcccgcggactgcgatgacgagggatccctgcgccacctcttcgtgctatcccgcgaccccgagtgcccaccgcggctgctggtggtgcagccgcgcctccgccccggaagcctcctcgagtccaagctcgccgaggcactcaacctcgccaactccctcgaggagcgccgcgacggcttctaccacagcgagttcggcgccaagcgcgcgccgccgcaccttgtcgtccagaaccccgcctcccgtggtcgctcacacgctggtatccagctatatgcctcggacggcggcggacgaggcttcgtgtgcggcctgcaggcggggggcgtcgcgctcttctgctggccgtccacgccggcgccgcagtgggggcagctccggcggatctacaacgggcccaccccgctcgcggacctcgccgtcggcgccgaccacgtcgcggcctacgacgcctccgggaaggtggtcctatggtggcgcggcgggggccggttccccgcgcgggccgacggcgcgttccgctccctcgtctctggggacggcttctcctgcgccgtccaggccaacgcgtctgccgccgtccgctgttggggtccacagggtagcaccgtgcaggagggcctcgccaacgcgtccgccgccccgtacctcgccgcggggggcgcccacgcctgcgccgtgcttgcctccggcgccgcgctctgctcgggcttggatgcctccgccggcgcgctgccgcgggacctcttcggctacggcctcgccgtcggcgactcccacgcgtgtgcgctccgccggcccgaccacaccgcggtttgctggaccctcggaggacccaccaccaccctgtacgagccggccatggggatctccttcggcttcctcgtcgccggagacaacttcacctgcggcaactccagaaaaaggcgcattcagacctgtccttag

SEQ ID NO: 807 - DNA, 444 bp, Zea mays
  Peptide Sequence Number=SeqID_44182
atggcggtcacttcggctctgccgggaagggcgcgcgtcaggataaatgtgtcaggccacctttgcattaaatgctcctgcgatttggtcggttggcgcgacgatttggtcagggttgcttcttggcgaagacagggcctcgggcgagccggaagtgaagcgtcgcttgcttctcctgccagaggcgccgcctgtcccgccgcggagttaatgcgacgaggcgagcggttcgcggggcggccgttgcgcgtgcgcgagccgttcgaggaacggctgtttcgctttgagtttttgaatcccgcggccgatctgggcggaccccaagcgcgagaacattttaggtcgtcgttgccgctgtacaattggtttgaaggggactccgttgggtggctcgacgacgccatcaacgacaagccccttcctgcgtcatgggcgtaccgatga

SEQ ID NO: 808 - DNA, 426 bp, Zea mays
  Peptide Sequence Number=SeqID_44183
atgacggtggcaggcgggcaggagcagcagtcacgtcgtcagccaagctcacgtcccatccgggggcagcgagggaaacctccctcacggcgtgaagacaacgcgcccgtgttccgttcctcgaacggctcgcgcacgcgcaacggtcgccccgccaaccactcgccccgtcgcattaactccgcgggaccgggaaagggggataccccgaaaaggatccttccccgtgaaggaaccaggctccgagcctccctactgatcagaggttcgaaggctggccccccggaaggaggttcgaaggccggccccccgaagggtttcacggccgcctcaggctactcgggctccgcgcccattactgatcacgggttcgaaggctggcccccgaagggttcacagccgcctcagacgctgagcgagggatga

SEQ ID NO: 809 - DNA, 201 bp, Zea mays
  Peptide Sequence Number=SeqID_44184
atgacgccatacatggagcaatttcttcatgaattctggcgtcgatcaagggacccaactccacaggaatatgatacccttcttagaaagggtgcgggaaatggattgcccgatttcatttcctggttcaaacgtaagggccaaagagagtcgtctatgagtgccgagttgagacaagtagccaatagctttgcctattga

SEQ ID NO: 810 - DNA, 1386 bp, Zea mays
  Peptide Sequence Number=SeqID_44185
atgagcagccatgatgccaaagtggtgcaaaacttggtcctcaatcttgcatcctcagtggaaagtcgtgcagtcaatattaggacctttttagaagaggctttccgtcatttgggtgacgagcattaccttctaaatgctctacttgctattcgaaaggaggtagacttgatggagcaggatgcaattgagagcaaagcaaggtctgacccagagaaggagaggatggaggaacaaattaaccttgctcaggatgccaagccagtgcctagacaaataactttcacccccccatcctcaccagaattgtatgaggccagtgacaatgactcctacgactccgacaggtccactagaatggctgacaacaacacaaacacaccttttcgaccacctgctgccagccccaatacaggtaaccaaattttccccccacccatgtgggaccctcagatgtggcagccccaagggttggacccaacacaggcttcaacatttacaactccttcaaattcccatatgaccaatcctacctggtcccagggacctaatgacccatctggatatacctttcgtactccatggaacacatattttggtatgacaactcctgggggtcctcctacacaaacatgtttcggtcaaccacaattggtaccacccattccatgtccactggtgtccacccatgttcccaaccagactgaccctataacctttgaatccgaagcagaacacagcgtccaggaagttaacagccctagcaaggcgtcagatacaccagggacatttaggaggacgaaggaacagaacttcaaacctgatgaagacctgttgctttgcaaaacatggttagagattagtagtgacccagtgattagcacagggcagaggaaggagggtttgtgggctagaatagagaaaaggtacaatgaacttagaggtgagtttccattgagacttaatagggctctcagcagcaggtgggacaaaataagagctgaaacaggcaaatttgccggattctacgcaagagtcctcagggaaaaccaaagtggccttacagataacgacaagagaggcaatgcggggaccgagccagtacaaagtcttacacctacaggttctgttaatgaagtacactctgatgaaggtggttcaaaaggcaagagaccattaggacgtgactcgacgaaagcatcaaggaagaagtcaatgtccaattcatcccaatctactgactacctgtcaagaatccatgacattcaaatagcaagattgaagcaaagtgaagaaaaatcagacctgaaacaacagaacattgagttcatgaaggaagttgaattgaagaagttggaggttcagtccaaggaaatagaagtgtag

SEQ ID NO: 811 - DNA, 243 bp, Zea mays
  Peptide Sequence Number=SeqID_44186
atgagacaaaatcgcatgtgtaatgctgctactgtgacagaaaagcacggacacagtatgcatcatcagccgcaacaattcgcgctgggccattcagccgttccaaaatgtgtcttgctcatccaaacaccaagagtgaacggaacggagcgtgactgtgagagcgggattggaacagagcggctccgtcccattgattttttggagcggaatggttccggatctgaggagaatattccctaa

SEQ ID NO: 812 - DNA, 117 bp, Zea mays
  Peptide Sequence Number=SeqID_44187
aataataaagagcaagtagagaaagcaaactccgtggatgacaccggtatttttacggagacgagtatgaggctcttcgcgctaacgacaccaggcgcctcgtcccacacccgctaa

SEQ ID NO: 813 - DNA, 99 bp, Zea mays
  Peptide Sequence Number=SeqID_44188
atggcggattcctgtggcgcgacggcgaatctagggacacgctgcggcatcggatcccgagggcacgcacgcggcggcggccccatgaggattttatga

SEQ ID NO: 814 - DNA, 246 bp, Zea mays
  Peptide Sequence Number=SeqID_44189
atggctggctggctgctggtcttgagtgcagatctgctgtggggtaggcggccagcggtggcgcagataagactatcacaccttgtatcacaccctaatcctactctactgcacaatggcgacagatggctagaaagaaggtgcacagacaattcaggtaaggttcaactgcttggtgttgctggttacctggctgctatggaaggagagaaactagagttttcagagaactactgtggtggctga

SEQ ID NO: 815 - DNA, 1905 bp, Zea mays
  Peptide Sequence Number=SeqID_44190
atgcagaacaggttggtccgttggtgcagccggaagatgccgacacacccgccagggaaacgaacgcccagatatgtctcgctgatgtatggggaccaccgtggcgtggccttcgtcctccgcggcctctgtttcgtagactcctacggtttgggggtggtagatgacacggactggattctgttggttttggtctgcgttatcatggtttcgtacaaatggctcagtcggaacttctctgtgtcatcaaatgatgccaagaggttgcttcaggactttgtcaacaaacatggaactgacctccaagtgatttacagtgtgtcggggtggttgaagagcaatccccaaaactattgtgtaaagctcatttcaggcccaaaacttgaagaagcaaggcaaattttcaaagattcttgttcagttcagatctacagtatccaggcctgtattccaaaagatacagctgtactttggaatcctgaatttgtgcaggcagaggagcttttcaaccagccttttgattatgagaactgtttgagagataataggttttgtggtgttttgaattcttttgtcaagcgaacatccaatggaaagcatgtgagttcattgccaccaaagcccttgaatagtgctgcagccgccgcgcagtctaagcctagtgttactccaaaggagcagtttgttactgctcgacggcaagatttgcctgtaagttcaaagcagggagcagacactaagtccgagaaggataattccacagtattagataaggctggcaatggtcctgttgtcaaagaacaatcagttgatgcccatgcaagcaaaagtaaagctcaaaatggaaaggccatgcctagtaatggtggatcactggctaacatgtggggccgtgcatcagcaaaacctaagcctccaagtaccactaattctacagctgtagcaagtgttgcagctactgctgatgcacaaatttgtgcaaaggaagaagcagatggaaatagcagcgatgatgaacatgggataaagtacaagaggggatccactaatgcaaataacagaaagagaagagcggtatttgattattcggatgatgaggaagatgacaatattgtaagcattgcatctcctgagctaccaaaacagcataccccagaccctgttgttggaattgctgaagacgctgaagtaaatcaaaagaacttggaaactgaacaccatgtaccaaacaatgggaaaggttcctcaacgggggtggattctgacttcacatctgaatgtaaaatcaaaacgatcgatcctatgaacgattctgggattactttaaaagaaaagagcagtgatcctccaatcaatgacaagaagcaggattctgctgctgagcctgcctccacctcaccaaagaggagaaaggttttgaagacacgcatagatgagaggggaagggaagttaccgaggttgtctgggagaatgaagcttctgcagatgacaaggcagagcagaatgtcaacactattgatgcgactgcaagcgggcagcaggccagcagctctgccaatcaattaagaggaagaagagtaaaggtccaaggtggaagggcggaacagtttgagtacctgtgtctggttggtatggaccccactggaagagagtgcacacaccatcatggtcttggagggtgcgagctgggcaccggtggcgtagcaagccagcaaacggccgacagcaacgtagggagggagttggagagccagagccaccccatcgtatcggtatcgcgactcgtcaacacatgtttgctgttggtcctacaagatgacgattcatataccagcttggagttggagagccagagccacccctgcggccgaccgaagccagcggctaagcagctaaatgcctga

SEQ ID NO: 816 - DNA, 1380 bp, Zea mays
  Peptide Sequence Number=SeqID_44191
atggagagtcatgatctccgggcagaatgggaatcacggcttgtgggtggttatgagactgttgaatctggttatgattatggtgctgctagtccactacagccaaacaggatacttgctgagtatgttgatgtgtactcacccttgctctacacaccaaacccccccccccaggttgtcagcattgcaaccactgctcaggcgaagatgaagctgtggaaggagacttccaggagttccaagattacgacgagttctaggtgtgggttagcggcaacccccagtcggctgcctgtgaaggccgtgttatctacgtttcttttccgcactttgatttattgtaagaactatatggacgtctcagacatggctcgacttagacacactgcacgaaagtcagtcatccccttcttaccctcccgtcttgctgagcgtccgcttcgccgtcccgtggccggacagtccagccacttggagagactacaccaccgcctgcgtgaggagcaggaacgtcgacgacaggagcagcggagctcttccctctcgctccaccaggagatagagtctgtgaggagctgctcccctgtgcttcctctggagccgccccctgcaccaccactgggcgccccagcttctggagtagctgctggaggagacccagacgacggaggaggcgacgacagctcgagccacgacaccgacttctctgctaatcctgagccggaaggatgggttgctcgacccatcactcgcgacgctgctcgcgggtgtcacttccatgatgcgctcgacaccctgctacgtcgggcatttgaccggcatacttggtccgtcgagtatcgctgtgtggtctaccagcatagtcgcggggtctacccggaccgctgggaggcgacttgcttggtgcgctgcccggaggacagtctccagggtgcagaggcctgttcagagcactattctatctctgagcgggactcagctgaggcagccatgcaagatgctgcacggcgtgcgctttcgcactactgctcggttttcggtggggcagctgacggtcttgacctgaagtattacccccgccgttcatctggcagcacaggaggcgtgattgtctcacccgtcggtgagggcaatcctaggttgagcagcacagtcaacctagccgccgtgctaaacacggagctggaccatgcattagacgagctgagtagggctcgtgctgagatcgccctgctgcgggctgagcgcgcggaacgtcgttttctggacggtggatcccccgctcccgttgggactcagcacccgtaccgctcacctcagcgtggacaccagtcttatggcaatcccgcctgcaagaccaagataactctagaaccatag

SEQ ID NO: 817 - DNA, 183 bp, Zea mays
  Peptide Sequence Number=SeqID_44192
atgggccccgtgccggcccagccgacctcccggcccagccgcccccgccgccccccccccgctccccacgcgcgcccactgcgcgtgcggttaggaaccgccaccgcctttcagccatcctctttggtcaagaacaggtaccgcaggatgaggcgcatggaggatgctgcgatgagtttgtga

SEQ ID NO: 818 - DNA, 453 bp, Zea mays
  Peptide Sequence Number=SeqID_44193
atgacggtggcaggcgggcgggagcagcggtcacgtcgtcggccaggctcacgtcccatccaggggcagcaagagagccccctctcacggcgtgaagatgacgcgcccgaggagcgggcgacgcttcgccttcgccgtaataaccgcaccaagaaaggctggccccccgagggattcaacagccgcctcagatcgcgtgggccctacacccactactggtcagaggctggcccccgaagggttcacagtcgcctcagacgccgagcgagggatgaccaggggtacgttcgatacataaccaaggctcgagctgcgctcccgagggctcggactcgggctaagccccggaagacggcgaactccgctccgcccgacccagggctcggactcgggctaagccccggaagacggcgaactccgctccgcccgacccagggctcagactcgggctaa

SEQ ID NO: 819 - DNA, 282 bp, Zea mays
  Peptide Sequence Number=SeqID_44194
atggcgcttcctgttgacgtggcgggcatgtgccctaggtcgggcgacgtggaggctcctccgaagccgaggtcgagtctgtcttccgtggccgaggccgagcccgagcccctgggtcgggcgaggcggaggtcgttcggcagaggccagggcggagtccgagccctaagcctgagtccgagccctgggtcgggcggagcggagttcgccgtcttccagggcttagcccgagtccgagccctgggtcgggcggagcggagttcgccgtcttccggggcttag

SEQ ID NO: 820 - DNA, 318 bp, Zea mays
  Peptide Sequence Number=SeqID_44195
atgtgtgttgagcggaggaggttgaaggtggcaaatgagaagagagaacaggatgcaagggaatgggaggcggctagagtcgagaaacagaggttggggaatcttattggtcgtctgagtgcaagtgaattggatgtgccaagaactatatcgcatatgaggctcgtgcaagatacgtacgttcaggaaaaactggcgacgatggagctgatggaggaggaggacacatcaaggttgattgagcttatcgctctcattgagacagaattacattggaaaggggaggacgacacatcaaggcggacagagcaaagctga

SEQ ID NO: 821 - DNA, 175 bp, Zea mays
  Peptide Sequence Number=SeqID_44196
ccgtgctcgcggttatgagcggccaagggagctccagagattagtgatacttgatcagagacattgtggtataggtggttatgagattgatggttctggttatgactatggtgctggagaagatgaagctgtggaaggagacttccaggagttccaagattacgacgagttctag

SEQ ID NO: 822 - DNA, 135 bp, Zea mays
  Peptide Sequence Number=SeqID_44197
atggggctcggtgtatgcggctcgctctgccaaggtggtgacaaggatgatgtttatgcttatggtaatggtaaagaagaagacgtcgaggcggacctccaggagttccaggacttcgacgagttcgaggattag

SEQ ID NO: 823 - DNA, 57 bp, Zea mays
  Peptide Sequence Number=SeqID_44198
atggaggctcgatcagtgcacagggtgctgctgtgctggtggtgctggtgcgattag

SEQ ID NO: 824 - DNA, 120 bp, Zea mays
  Peptide Sequence Number=SeqID_44199
atggcggaggcggaggagaaggcgagggtcgtggtggttggcggcggcgtcgccggctccctcctcgccaagactatgcagggccacgccgacgtcgtcctcctcgaccccttagcttaa

SEQ ID NO: 825 - DNA, 187 bp, Zea mays
  Peptide Sequence Number=SeqID_44200
atgcaattacctttgactgctccaaccaccctgagcacgtccctcagcctgggtgtggaaagacagaaggaggaacgagcgcacaggatgcaacgcctcgtctacttcataagcgagatactaactgacacaaaggcttgctaccctcagatacaaaaacttctgtttgtagtcctcatcaccaagg

SEQ ID NO: 826 - DNA, 519 bp, Zea mays
  Peptide Sequence Number=SeqID_44201
atgcagacggcatgcaaccgcaccaaggggacgcaccctttcgacttcgacgcatccagcttggaagtccaggcccacacgtcatgtaaccggcgcgccggttactacgtgcaagaaaccacaccgccactcgcgccagtaccgtgccttctcgactgcggaaccggtgccgcgactcgaggcgaccctgcgcatgacccgatagtgccaattgagcacatcggtcacgggcggcacctttggcaggcgaagcaggcgacgcttcacctccgccataatgaccgcgtcaaaaagggaccgggaaaggggatactccgaaagggatccttctccgtgaaggaagcgggccctgagccccctactgatcagaggttcgaaggctggcccctcggaagggttcaacagccgcctcagagcactcgggctccgcgcccactactagtcagaggttcgaaggctggcccctcagaagggttcaacggccgcctcaggccactcaggctccgcgcccactactga

SEQ ID NO: 827 - DNA, 996 bp, Zea mays
  Peptide Sequence Number=SeqID_44202
atgcgccaaaggccataccccatacccgacaaactcctcaacaaggtcgcgctcgctactcatgcggacagcgcaccgaagggccccttcgttttcatcatcctccgctacctcgaactgcggggcaccaactccatgacttccatcgaagtcttgccagtcttcggtggccaccacagcattcggtgtcagctggtggacctggacctcgaatctacgcaggacctccgccacgaatcgatgcgcaggcagacgaaggccagcggcgaaaaaggcctcgaagacgaccaactcgccttctggctcggggaccatctccgcccccgggacacgcgccacctgccgccgaaatacccaagttgttgcatgttgtgcacgcgaaccaaggacatccgcgacacgccgaattccactgtgtcaccaggatgcaactcctccgccgccacattgctcagcgtgtcctcggacgacgcgccggccggtagtgtatcggcagcagaagaggaagaggacggcatggctacgtaccgtcggcggcggcgggcggtctgcttcacacgggccagatctccgacgagcaggagcaaggagggcaggcgagcggttggtttcaaaaggaggctagggttttgcggcgcgcagaaagagtacctaacccgcgccgccccgcccccttttatatacaggacacgacggttcgggaaacccgcagtccaacagtgccacgtccatcaacggtcacatcaaaaacccccgcggaaccacttcgagcgagggcagcatctccaccatctagcgaagccttcggcaccagatgacttagtcaaactggtccctcggagggcaaatgttggggcgaaggcgaagacgccacccttcgctcgatgccttcgctgcctcgtccgatgcgaaggcccacatagaattcggcccattgtaacaggccccacgcggctgagcgcattacgggcccagtttgtgaaggcctttctgtaa

SEQ ID NO: 828 - DNA, 524 bp, Zea mays
  Peptide Sequence Number=SeqID_44203
cgatcaacggcccagatttaatgaggccgagatcacgccacagccctccgattgagtcctacggtccagatcggcccagcgaaggggacccgcccacggagaagagcggattcacggtggagcttgctcgacgacgagcaattccttgcgtcacggtggcgcccaacccgaattggaggcgcggacagcttccccgggcgaagacgatactccctgacccaactccaagagcggagaccctccaaccacgacgttccacggcggcggcgctcctctccggcggatacgggaggggaggcgagcttggtgagcttttatacccggagcaaagtccgagcgagggggaggcggtgaccggtaggagcgcgatactcggcggcgagcgcgcggctccgtcaagctcgggattccgttgcgaggagggagacgtcctgacaagcggggcccgcgcgccagtggaacagcgtaggaaggcacgaggtggagcaaatggcaagtgggtccgtgttgtcggcgccagctga

SEQ ID NO: 829 - DNA, 564 bp, Zea mays
  Peptide Sequence Number=SeqID_44204
atgcgcctcatcctgtggtacctgttcttgacctgtggggggtgtgagacagcaagagtgagctcacatacgttcattgctcaacaagttgtggggaataatgtgcatgaactcatcaaatatgggagctcacgtgaagtgataactcaagggcaagagcgcataagtgtccgtgactcagccacctccgtgcaggacggcgagtttatatcaataaaacctagggactcttttcggttcaccacgcccatagaggatgacgaatctgaggcggaggagagcttcgacgagaaattactcggccatggcaagcccatgcccaacttcccaattcaaaagagcgtcatacagaggataatgcgacaaataacatggataggtttctcacctgcaataggctgcaaaggagcccgcccacggtgcgagcggaacccacagcgacatcagagaaatttggtgagctcagcccggcgcttcaatcgatccccaggtcaccaggttgtcagccccacaaggcaaggccgcaatccatcatcggagctgcgcagaagctcccacgattga

SEQ ID NO: 830 - DNA, 219 bp, Zea mays
  Peptide Sequence Number=SeqID_44205
atggcggcggtgggtgcgctgcaaaggggggtgggtggcggtagtgcgctgcaaagggggcatggggcggtggtagtgcgcatggaggcgggcacgcgtgcgggggcacggcttgttccaggcttcaagggtaagcttcctagtatcttcttgggcaagggctctagccaaagtgaagaaaaacttcactacccaatgcatgcagaggactgggcataa

SEQ ID NO: 831 - DNA, 501 bp, Zea mays
  Peptide Sequence Number=SeqID_44206
gctgaggacgaagacggcgaagctgaggatgacgagcttgacgcagacgcagaagacaaggagaacatcgaaagcaaggcaggatcttccctgccaaataagaggaaaaggaataacgaggatgatgccaatggatacaacccacagaaccacactctcccgcacccgctcaccgacgattgttccccggagggcaccgaagtggggagcagtgggcgtcgtggtggatggtggtcgggcatagaggaattcgtcgccggacttggattacggcatggcgaccacggtgtcgcgtgggcggagccccctgttactccaatcggaggggggccaaccatggcgaccgccgagggactcggtgcgccagcacggctcgggttgagggaagaagaaagggtgcgtgtcgttgatcttgcaatctacggtggggatttgaagccaagtgaacggttcggctgggacccgatggccgttggatgggaaaggagcgcccgagattag

SEQ ID NO: 832 - DNA, 693 bp, Zea mays
  Peptide Sequence Number=SeqID_44207
atgccgtccgcaccgtcttctcctcgcattgccgcgtttccttcacccttttcctctgtccgtatggttgccgcagtgacgccgacgcccttgctccgtcctcaaggttccgcgtcgtcccaaccatcgcgtctgcatcttcgtaagattgtcgtatcacttcgagttcaaggtgttcggttccaagatcatctgggattcgaggacttcggttgcaacctccagttaagcaaagggttcagggataccctccatgattgccaacctcattatctttatgattgtatattgaacccaaatttggtagagtatctgaatggatcagactccatagccgacaaggcaattggaaggatgcaagagattgcggacaagattttttgcgtagctcgtgaaactattcgtccaggacgcgggttgacctcatttgaggcaaccaaattacgtgtagcattggaggacattgcttgcatgcttgagcaagactctctggtgttgcaagaaaaattggacaacgtgaacaacgtaaacaaccctgcggacaggagctatgaaccgtctgccttgtcctcaccacccccagctgacgagtaccttagtccggattgggactttgctgagcactttgcaaacttctggggtgttgaatatgactcggaccagatgccatcgtttagtgacaatgaagtttaa

SEQ ID NO: 833 - DNA, 423 bp, Zea mays
  Peptide Sequence Number=SeqID_44208
atgccttccactttgtttgcttcctcgatagcttataatcttagcgctaagaggaggagcggagcggagctcgcgccggagcggaagacgagtgaactagaagatgggctcccggtccctggttgcgatgaggaggaaactcttatgaccaagatagtgctggagcaagcgagcaggcggactggccctgcttggcgggtggcggacgtccctgttgtggccttgtgggggcggcggatgggcggacgcggacagggatggcgctgcctggcacaggcgatggcggcctggactcctggaggcgccgcggcggctgcaccagatgggcgtgggcggacagggacagggacggcgcggactggaggcaccgcggcggctacagcggactggacggactgggcaggcggaatccctattccctaa

SEQ ID NO: 834 - DNA, 81 bp, Zea mays
  Peptide Sequence Number=SeqID_44209
atggggaaccaaatgggcattcttggcctcgacacgggagattccaagtcgaccctaaggaagctcaccttaagaccgtaa

SEQ ID NO: 835 - DNA, 243 bp, Zea mays
  Peptide Sequence Number=SeqID_44210
atgcccatgtttgtcgagagtgggactctgatgagagctccaccgactcctcctccgacgagggacaccgcaaacatctccatcaacaagggtctcctcttccccaacgttagccacaagtgcctcatggcgaaggacgacaaaaagaagcaccggacagtgtccggtggcgcaccggactgtccggtgtgccagcggagcaacggctacttcgcgccaacggtcgtctacagaaggcattaa

SEQ ID NO: 836 - DNA, 775 bp, Zea mays
  Peptide Sequence Number=SeqID_44211
atggcgccccgcgcgctccctgacgacggcagctctccgcccccttacgaaagcaagaggacgctccggcgctcctccgacggccacgacatcacaagaaccaggtgccaaaacctctccggctgccacgacggcatgttcaatagcagcaaaacagcaagcttacttgcaatattagcagcatatgcacctgaacacgggcacaacagaaagtttcagcagcacatgttcaacagccccaacgacggctgcttcgggcctactgacgtcagtgcgcggctcggggaagaaggcctactgaccgtgctccgagggatgattcagcaagtcgcgcgccgtcgggagggggcttcggccggcgttgctgctcgggaagacgaaagtcggtcaagcgcggctgctcgctctagacgtggggggtggtcgggaagaagaagcccacggataggcgtcggcgtcggggacgaaagccagcattcaggcgctatggtcggctgctgcttcagcgagcgcgccgacgccgctgttagggcaagtgccatgcttgcttgcgccgctgcggcacggccacgccgagcacaccacccgtcgatgatatcggaggttgcgcatacggatcttcggtgggcgctgcttggggaagatgagcgcataacgaagcatcagccgtccattaggttacgggcaggcagcactagcctgctggggaagatggcctgctggctggcactgtacgggaagaagatagcacgatcgagcatccaccatggatctg

SEQ ID NO: 837 - DNA, 828 bp, Zea mays
  Peptide Sequence Number=SeqID_44212
atggagttccctcgaatgtcttgcacagaacttcgatgggatctagaaatcatacctagggcagcatccaacgaatcacgacgggatttgggtgcttgtcgtccatccatcgcgaacggtggggaggggcgactggatagaccagaactaagcacctatgatggaaaggggaggaggggaagatcaggcaacaagttcctgtatcgtcgaggaaggaggctgcgaggaagatcaatggatgaaggagagatggagaaaggaggatgcgaggtggagatatgtggagcttgcctgggatgggatggacggacgggggcgacgtgggatggacggaggggcagcatagttctagataggcgtgtatataacggagaagaaaggcagttggtgaagtttcctcggcaaggtcgaagtgaccgcagtcacttcgcccctttactgaccgttctgataggaaaacaacactgtacgccccgctccggctactgtgccaaccaccagggtaaagctgagtcacgatctcccacgagttcggcctcgggcacaacagggagctccgcctcgcccgacctcaggcctcggcctcagcctcggcctcgggagaaggtctccgcctcgcccgacctcaggcctcagcctcagcctcggcctcgggagaaggtctccgcctcgcccgaccccaggcctcgacctcagcctcggcctcgggaggagtcacaacctcgcccgacctcggcctcggcctcaggagaagtctccgcctcgcccgacctcagcctcagaccgactacgctacaggggatacatcattaccctactcctagctag

SEQ ID NO: 838 - DNA, 726 bp, Zea mays
  Peptide Sequence Number=SeqID_44213
atgagggaccgggaaaggggggtatttcgaaaagggatccttctcagcgaaggaaacgggccccgagccctcctactgatcaagggttcgaaggttgcgccctccggggttcggcaaccgccccagagcactcgggccccgagcccattactgatcaggggttcgaaggctggcccctcggaatggttcgacagccgccccagagcacgcagagtcagggatgaccctgggtacgtccgttacatggccgaggctcgggctacgctcctgaggtaccctaggacatttccgagaccagcgggaacgatttgtaacggaatcccaccggagggaggcatcgagccctcggaccttagcgaatgggtccggggcctcgtctaccaagggacgcaacctcatccgagcccagcctcggcctcgggcaggaacattagtcctgggcggattcacgcctcgcccgagggcctcctcaggcaggagctccgcctcgcccgacctcaggcctcggcctcgggagaaggtctccgcctcgcccaacctcaggcctcggccttgggagaaggtctccgcctcgcccgaccccaggcctcgacctcagcctcggcctcgggaggagtcacaacctcgcccgacctcggcctcggcctcaggagaagtctccgcctcgcccgacctcagcctcggaccgactacgctacaagggatacatcattaccctactcctag

SEQ ID NO: 839 - DNA, 594 bp, Zea mays
  Peptide Sequence Number=SeqID_44214
atggagagattttttgctccagccgactactcagcgacctcggtgcaggtttccaagaaatgggcgccctttttcttatccaacttgatgcacgaggattcctttagctggtccaaaaagtttatgtcctcagatattccttcagctttgctggagccggagtctatgtcactcccttttgtcctccccaggaagtgtcctgaggacaagctccctgatttggctgtttctgaggaatctgctgatgacacctctgtccctgcggacacaacctcctccaagcccaatattgctattgtggaatcagacctgagaagaagtaagaggcttcgtgacgcccgggctggtttcaggcaaggctcttgccataagaagaattgtttgatgtgtcagcacaaatgtgagggccccccctcgctttctgctagagctatcaggcgcttaggagagcgcttttgtaatctgtcagaggaagatttggctgacaaagttctgaagaaaaagaagaatccgcctggctgtgttggctctagcaagtcaggcaagaaagatgagggagacaggaatcaagaatcttcagatgatgacaaatga

SEQ ID NO: 840 - DNA, 1356 bp, Zea mays
  Peptide Sequence Number=SeqID_44215
atggctgaaagggaccgggaaaggggatactccgaaagggatccttctccgcgaaggaagcaggccccgagccctcctactgatcagaggttcgaaggctggcccctccgaagggttcgacagccgcctcagagcactcaggctccgcgcctactactgatcagaggttcgaaggctggcccctcggaagggttcgacaaccgcctcagaccactcgggcttcgcgcccactactggtcagaggttcgaaggctggcccctcggaggggttcgacagccgcctcagaccactcgggctccgcgcccactactgatcaggggttcgtaggctggcccccgaagggttcgacagccgcctcagaacacgtagagcgagggatgactctaggtatgtccgatacatggccgaggctcgggctacgctcccgaggtatcctaggacatttccgagaccagcaggaacgattctgtaacggaatcccatcagagggaggcatcgagccctcggaccctatcaaacgggaccgggtccggcaaatcacatgcagagtgaggctggcaacagctaagtccagcctcgggcgccataggaagctccgcctcgcccgaccccagggctcggactcaacctcgacctcgaaagacggacttcgcctcgcccgaccccagggctcggactctacctcgacctcggaagacggactccgcctcgcccgaccccagggctcggactcaacctcgacctcggaagacggactccgcctcgcccgacccccagggctcggactctacctcgacctcggacgacggtctccgcctcgcccgacccccggggctcggactctacctcgacctcggacgacggatcgcctcgcccgacccccagggctcggactctacctcgacctcggacgacggtctccgcctcgcccgacccccagggctcggactctacctcgacctcggacgacggtttccgcctcgcccgacccccagggctcggactttacctcgacctcggacgacggtctccgcctcgcccgacccccgggcccggactcagcttcgacctcggaggagcctccgcctcgcccgacctcgggcttggaccgaccacgtcacaggggggccatcattaccctacccctagctagctcaggctacggggaacaagaccagcgtcccatctggctcgccccggtaaaacaagtaatgatggcaccccgcatgctccatgacgacggcggctctcagccccttacggaagcaaggagacgtcagcaaggatccgacagccccgacagctgtacttccacagggctcaagcgctcctccgatggccacgacatcacatga

SEQ ID NO: 841 - DNA, 171 bp, Zea mays
  Peptide Sequence Number=SeqID_44216
atggcgctggggagcggcggcggtgtgcgtgcactcccaggaggatggcagattaacgcaggagcggcggcggtggaggaggggttcaccgtaacagcggatgatatcgtcggcagacttagctctgccttactgcggatcaccagcattggcggctgcaaacggccctga

SEQ ID NO: 842 - DNA, 774 bp, Zea mays
  Peptide Sequence Number=SeqID_44217
atgccgggggaggcgaattgttgctgcccagccagggtgcaacattccgtcctctgtcctcgttttcgtggcgaggacgggagtgaggacctaccggtgcgctttggggcggccagcgctcgccggtgcggtgttggtggacaggtggacgccgccgtcggtgctgaggtggtggcagctggagaaagcttctccaccgtcgagatcgtcagcgccacctgcggaccgacctccggctctttggctttaatagcttgtcctcgcccctcgagtggggacgtgggcgagggccttgtcgcagcagcgtctgccctgaggtcatcgctgctgctgtttggccgcccggagtggaggtcgttgtcgctgctgccggagcgggcgaaccctcggccgctctacgatgagctggagccggaggcagcggtgtcagcatggacagaggcggagttggctttgaaaagaagcttcgttggccggagcctggccgggccgttcactggcaggaccagcgccggagtcgggctgatgtcctcgggggacagctggctgaggctacggagtggccggtcgagccgtatgctcgggccgggttcccggaggagaccccgacgacgatggcccaggcgtggtgccgacaggttccttcgaggtggagatccttcgaccgtgtcgtcgtccgaggccgggtcggattccgccaaaggtggagtcgacgccgagggtgctgctgctcccccactgatgtctgatcctgcagaaacagtttatctgtag

SEQ ID NO: 843 - DNA, 237 bp, Zea mays
  Peptide Sequence Number=SeqID_44218
atggacttggacgtgggttacatggctttaggatcaaggaagctgggccgatacagcaccatgcttgaccttcgtcatcaccttaagttgaagttgtcatccttcggtagaagcttcgtttcatttcaaaaaatggaccccaacctcgccgccatcatcattggcgtcaacataattggcgccaacttttcctacgtggctgccgatgtggcaagtcccagggggtcggcgtcatag

SEQ ID NO: 844 - DNA, 222 bp, Zea mays
  Peptide Sequence Number=SeqID_44219
atggaggagaggctcaccggagaagacgaccctcgccggagccgagcacaaaatcgtcgattaaggatgaaccgttggttcttcttcctgagctcttctgctatccgtgctggaagacccctggtgattcctgatcaccaacgaccaaaggaaatcaccattggtatcaaagccattcatcgtggggagttttggtgtcgtgctggaggtttgaagacttga

SEQ ID NO: 845 - DNA, 210 bp, Zea mays
  Peptide Sequence Number=SeqID_44220
atgccctccctcccccctgtgcgcgcaaccccctcccccttctcccctttcatgtttcatttcaaaaaatggaccccaacctcggcgccatcatcattggcgccgaggggactcgggctgtttcctgagtacctctccgtaaggacctgttcgttgagagaccacccgagaaaacagtgcaaccatgaggatggtatgggatgcccttag

SEQ ID NO: 846 - DNA, 456 bp, Zea mays
  Peptide Sequence Number=SeqID_44221
atggagcacgatgcgcacgccgaggccccaccacacgccgtcccgccaccggaggtcgccaccgtcgatgattgggctcgcgacgacgcggagcccatgtccgttgaatctggcgttgccgctgcggagctaactgcggcagattcgggcgctgatgccccgctcgcgcccgcgccctcggccgcggtcgcggcagaagttgctactcaagaaggtgctcatgtggttgaagacgatgtagatgaaacaaaaagacacttgaacgtggttttcatcggccatgttgcccgcgccggccagctccgctgggagcccacactcgtctccttcagcatgtgccggctagatccgtgctcctccagcccgcgccggccagatccgcgctgggattctgcgcccgtctgctttgctaagaagtctgcgcccacgccctccaacgcctccttcgtctgctag

SEQ ID NO: 847 - DNA, 291 bp, Zea mays
  Peptide Sequence Number=SeqID_44222
atggcgcccgtccggctcggcgcggacggcccggcgcggcgcgcagcagcccgccccggcgagctcgccctcgccccggtggtgatgagaataatggttttggtattgactatggtaatggttgtccgtgttgcaaccactgctcaggagaagatgaagccgtcgaggaagacttccaggagttccaagattatgacgagttttaggcgtgggttagcggcaacccccagtcggctgcctgtgaaggccgcgtgtatctatgtttcattttcgcgctttgattattgttaa

SEQ ID NO: 848 - DNA, 828 bp, Zea mays
  Peptide Sequence Number=SeqID_44223
atggcgaaggcgtggtcaccatccgtgcgcacccgtgaacatccccggaccatgccccgcaaccaaacgccggtgaatcgtgatcacggcgacggcggcagatctccccggttccaagcgaggcgcacacggtggctgggttcctggtgcatatgtagaatggaggtgtgcaaggtgatgcccgaggggtcgctacctcgacatttatacaccgacgtgggggtcatgagtgagtttgttgcgatggcccgacgtccccgcagttctgttagtattgggaagaagaacagtggaaccgagccccacatggcagagacacttcccgagttcgcgccgcgagggagtttgagctgtgggccttgtgggcagtggcatgcttcacaggagcgtgggccacgcaggaggctgacccagccgtcccacatggcagaggcagtggggagcggcccgcaacaagaaagcaggggaacatggagttcggctggcgcgagcgctgggctacgcgtgataggagttaattgggccagctcgtggaaattggcccaggtggctgaaactgaattgtatctagttcactgtaaactgaaattcagcacaagggtgtctggtttggagctctatgttttggactgttgtatggcctgtgagcagccaaagatcaggactgaagtcaaaaagatctcaagaaaagatatcttcccactatccactagctatttctgggatgttatggataagaagggttgctgcttggagagcaggttgttgggggtctccttctctaccgaaggtcctcaggatgaagaaaccatttgtgattcatcttga

SEQ ID NO: 849 - DNA, 588 bp, Zea mays
  Peptide Sequence Number=SeqID_44224
atgaatgccatcattattgagggtgatcaacctatgcgtcatgaagatgatgtcacttgtgaaaagaggcagaagaagttcacatctaatcgggcccggcctgtcggcgcggccgccttccgcgcgcccgctccctcgctctctctctgcccgtgggcccaacccgtcagccccgcttccctcgcgcccgcacccgctttcttctctctctgcgtcgcgggcccgggctgtcagccccgtcgtccccgcgtaaccgccgccgagctgctcgcgcccgccttccccgcgcccacgtcgcgcgtggaactcgccccacctcgccctcggccacttgtgccccgagccccactcgccctcaccctctccccccatttgcgccccaccgccgccgtcgacccgggtccccgtcgcgtctccgtcgccgccgaggagtccccggagcccgccttgagaccccaccaatggagtccccgtgccctctccgacctccccgaccactcggattgccccagagccccgccagtcgcccgtgcctctcgtctccggcgagccctccgccgcggggacgagcgccgccgccccagctag

SEQ ID NO: 850 - DNA, 306 bp, Zea mays
  Peptide Sequence Number=SeqID_44225
atgaagtatcacttccttagtgattgtgttgatggacacattgtcctcgagttcttcgagaccatccggagttcgtgtactcaccttgtatactcagcatgcaaagagttacacaccagggattcatcaaaaagttggcgtcaggctggatcagatggaagcagtcagctgattctaaaagaaccttctaccaatgttgtcctagctgatcatgttacaacaaagaaatgggagaaaattgttgatttcgatgaccaccttgatgatattagcaaggattggtcgaacccaggcctccttgactga

SEQ ID NO: 851 - DNA, 396 bp, Zea mays
  Peptide Sequence Number=SeqID_44226
atggagaacctcgtcgatagcgctgcaatcctaggcgcgacatgtagaatgcttgatgatgaggagatacttctcatgagcgtcgatgagccgcccacattttctaatgttgagcgtgatccactgctcgggcgttggtccattgggctcaagtgggccttcaaggtgaagcaagatgacctcgtcgccattgccaagcacaagtgggaggggattgaccttgagcaagtcttcacgccggtggtgtgcatggaatctgtccgcctcttgatggcgtcgacgacaacgaaggattggtgggctaaggagtttgtcgctaacttgctaaggggcaggagcagcgggtgcgcaaggccctctacgggttgcagcaggctccacaagcctagaacatga

SEQ ID NO: 852 - DNA, 270 bp, Zea mays
  Peptide Sequence Number=SeqID_44227
atggcgaagatcgacgttgatgaagaatcccgagcgatgcatccggttggcagggggagcagagcggtcttccaactaccccgcgaggttctcgatggggacgacgactttgacgggacagccccgcaggtcagtgcaacgtgcgtgccacaacaggtaccttcggacatggacccttcggacttgagtcaaaatcacagtatgaagaaacacaaggggaacgaaggatggaacagagccgaagctgtgcgcaagggagcttcagcatga

SEQ ID NO: 853 - DNA, 1023 bp, Zea mays
  Peptide Sequence Number=SeqID_44228
atgggggacacccgcaatccttcctccttgtcgttgggggaacgcaactccatgggagttggtacctttcagccatcgttcggcttcaaggattttcatcacgcggcccggctgcgccccctcgccggtggtcacccaagacgcttcaaggatgttcatcatcctcgctggggcggaggccgggctgagccggagctctacctctcgcgcgggttcgtgggtcagcctctccttcagcattcaagggagagggcgctcactggccctgcgagcggggcggacttcgataacgcggggctggtcgacggcgggcgtcgtcagcttcagcgcgttgggctcgccggcttggctcccggcgccccctcctgccgcaagggcggttgtcgcgtcgtgcgcatgggaggaccgcccaagacgtcacgcgctgccagggcggcgttcgtgttctggggcggtcctgcctttgcaccggtacggcgcccccgcgcggaggagtccctcggcttggtcggccttgctgtccgaggcttttcttgcttagttaaaggaacccctcggccgctcttcgatgagccgaagccaggggtagcggtgtcagcacggacagaggcagagttggctcgaaaagaagacttggtcggccggagcttggccgggtcgtccgttagcgggaccgacgccggagtcgatctgccgaggcctcgggccgggctgatgtcttcgggggacagctggccgaggcctcggggtgaccagccgagccgcctgctcgagctagattcttggaggagaccctggcggcgatggcccgggcgtgatgatgaagtcatccttcagagtggagatcctcggaccgtgtcgccgtccgaggctaggttggacctcgccgaaggtgtagtcgacgccgaggctgctgctgctcccttcaactgtcaagatccaagcctgcaggatcggattatcttgtacgttgttgtagacctcgccttgactgttggccagcttgtacgttccgggctttag

SEQ ID NO: 854 - DNA, 282 bp, Zea mays
  Peptide Sequence Number=SeqID_44229
atggtgctcggcggcggcatggaggtggtcgtcgtagttggggacaacaccgttgtgatgctgctaggcgccgccgagtgcgacgatatcaccgtcactgtcaactgccccaaccagaatgacctggctgcgacctctgccacaccatctcgagttcggtctccccatcactcgcggcaatccggggcacctatattgaagtttcgatctactctcaacctttggcgtggtgtgattctgactgttcgttgtcctctacccacagcgagaatgctagactga

SEQ ID NO: 855 - DNA, 306 bp, Zea mays
  Peptide Sequence Number=SeqID_44230
atgggcaagagcaagaaaggtggaagtttgtcgcatcactccggcgacaagcggaagcgcgagccgagtcccccctccgaggacttcggtgacttcgagtactcggaggaggagttctcctccgagttcgaggggccgccagcctacgcctctcccccggtgtcgtccgatgactcggacgattcccaggggatcgttgccgaggtgtggacgtacatccgggccgtcgagcgctctgggctcgagggcttgaatgagtcggagatttcctcggacgaggaggactcctccgactcgtccgagtag

SEQ ID NO: 856 - DNA, 774 bp, Zea mays
  Peptide Sequence Number=SeqID_44231
atgtcttcatcccgtggtctgggtggtattcggaagaagcttgccggtcgcttcaaatcaaagcgccctcgtgcagacgatgcagactacactccaaccactgactcagagacccaatcttcagctggaggcagtgtatctatagacatagaagacgttccgcatactcatcctgactatccaattgacaacacaggatggacatttccaaagaggaggttctctatggcagaatactgctccaggagaactgtcaatcaatatactctgccatcagacacaaatgttcaattctttcacactcagctccaatttgatgttttggggcacattgatggataccaactttcacaaacattagttatggaggacctgattccaaagtttgagacatgtggtctgtatcactttatgggtcagaggactgatttcagtgagatggcagtaaagcaattcctggccacagctgagattgatatagaagaggaatccatcacttggatgactgggttcaagagatattctgcaacatttgctgaatttgcagctgccaacagtctgaattatggtaccatttcagctgggattgatctatacactaaagatagttttgaagactttgtgcaattttatgagccaacgaggctgggaatacctaggaggtttggagagacagcaggactaaggcatcatcctgctgtgatcaacaaaattgcaagagtcacaattcttcccaagagtgggaacaagagcaaaattagggataagttctag

SEQ ID NO: 857 - DNA, 156 bp, Zea mays
  Peptide Sequence Number=SeqID_44232
atggggctcggtatatgtggctcgctctgccaaggtggtgatgaggaggatggttatgattatgcttatggttgtcctcgttgcaaccactgctcaggtgaagatgaagtcgtggaggaggacttccaggagttccaagagtacgatgagttctag

SEQ ID NO: 858 - DNA, 87 bp, Zea mays
  Peptide Sequence Number=SeqID_44233
atggcgtacggaggtggccgtggattgtgcggacgtgggcgcgtccacggcgagggcatgggcgagagggttttcaattcaaattga

SEQ ID NO: 859 - DNA, 351 bp, Zea mays
  Peptide Sequence Number=SeqID_44234
atgatctctggggtgcagaggccttctaagagcattattctatcactgagagggatactgccgaggcagccatacaagatgctgcacgacatgcacttcgtagtattgctcgttgttcatgttggaggtgtgattgtctcgcccgttggtgagggcaatcctaggctgaacaacatggtcaacctggtcaccatgctcaacatcgagctggaccacacccttgacgagttaagcaaggtttgggcagaggttgcggaattgcgtgttgagtgcgcagcgcgccactatcaggacaatggttctctcgctcctgtcgggattcagcacccttaccgctcgccgcccctgtga

SEQ ID NO: 860 - DNA, 915 bp, Zea mays
  Peptide Sequence Number=SeqID_44235
atggttgcgctgttatcccgggtggtctctcaacgaaccagtccttacggagaggaccgcccgatctgggttgaacgacggagatcggatgggcggcctgggtcttccctacggctagctggggcggcggtgctcgtccccgcggcggagggctcgccggagacgaggggcacgggcgactggcggggctctggggcaatccgagtggtcggggaggtcggggagggcacggggactccattggtggggtctgggtcggggcagaggcaccggaggggggcggttcacggcggggcggctcggcggcggggttattctactccggcgagcaatcaaacgcaacagagagcaaaacaaggggcgataggggcgggagaggtcccttacctcaaggcgggctccggggactcctcggcggcgacagagacgcgacggggacccgggtcgacggtggcggctgcacggcggacgacgggtgagcgcgggcagagagaaatagggagggggagagggaattggggcgcgttctgggttgcggacgtcggggcggagctcaccggggctaagggcgcggtggagctccaacggcgacgagaaaccgagctcgggacggcggggttatggcggcggcgctctgcgtgcgcgcagcgagggggaaagagggtctactgggcgcaaatggggggagagggtgagggcgagtggggctcggggcacaagtggccgagggcgaggtggggcgagtcccacgcgcgacgtgggcgcggggaaggcgggcgcgagcagctcggcggtggttacgcggggacgacggggctgacaagccgggcccgcaacgcagagagagagaagaaggcggctcttcctgcatggccaacacctagtctggattatgcaaggcttcttctatcctga

SEQ ID NO: 861 - DNA, 453 bp, Zea mays
  Peptide Sequence Number=SeqID_44236
atgggcaagagtaacaaacgcaagcgcgagccgactcccccgtcggaggacttcggcgactcggaatactcggaggaggagttctcctccgagtccgagtggtctccggctcccgtctctcccccggcgtcgtctgatgattcagacgactcccaggggattgccgcggaggtctggacttatatccgggccgtcgagcgctccgggctcgagggctcggatgagtcggaatactcctcggacgaggaggactcttcggactcgtccgaggagggcgacagcggcgatgtcggagtcgacgacgacgacggaggcgacggtgacgacggcgacgatggcggtgacggcggcagcaggggcggcaacggcggcagcaggggcggcaacggcggcagcagcaggggcagcaacggcggcggcagcagcaagggcagcaacaaggccagtggctag

SEQ ID NO: 862 - DNA, 159 bp, Zea mays
  Peptide Sequence Number=SeqID_44237
atggcgcaccggacagtccggtgcgccaccggtgcgccaacggtgcgccaccgggaaaagactctgccgtggaccagcctggccccacctggcagagggtgcaccggacagtccggtgcacaccggacagtcccggtgcccctaagccagaaacactaa

SEQ ID NO: 863 - DNA, 255 bp, Zea mays
  Peptide Sequence Number=SeqID_44238
atggctgatgaagcgattagaaaaaatgagaaagaacctcacgacgctcaagaagaagctaagcgagctgaagaagctgctgagcgcgcaaggcttatagctcaactttcacctccaccggagccatataaccccgaagctgacctggccatgaaggaaatgttaaacataataagaatcgctaatgaagctgttgacgaagccgtcgacaaactgctaaatgaaggtgctgaaaaagtgttgaaggaagactaa

SEQ ID NO: 864 - DNA, 462 bp, Zea mays
  Peptide Sequence Number=SeqID_44239
atgcctttacaaattaggcccgtaacacaaaggcggccacgcagggcccgttacaatgggccagatcacacgtgggcctcagagctgaacgaggccgcgccgcgggaaggcgtcgtcgcaggccttcgtctggtgccgaatggagcgaagggtgtccctgcccgttttgtctctgtcagaccagcgactgcggcgaaggcctcgagcgaagggtggcgtctttgccctcgccccaacacctgccacgggtactacctcgctgatgagcccggggtgcacttcgtttggcagcccaaccaagagtcatcggtacttgtcatgtcgtgcacgttcgacgactactatatcaaggattgtggcgtcatcttgccgccggaggtgacgcagaggaggatcgacaacagtgaccacttcgtcatcctcgccaccgtcagggtagcttttgtgccggcctgcctttaa

SEQ ID NO: 865 - DNA, 996 bp, Zea mays
  Peptide Sequence Number=SeqID_44240
atgggctgctccgcatgccaccttcgtcacgtcgtggcaaccgacgtccccatctccatgggctgcgtcgcatgccaccttcgtcacgccatcctggcaaccgacgtcaccatctccataggcagcaccgcctgccaattttgtcaccacatactggatgccggtgtgcccatctctaggggcagcgccaaatttcgtcacatcatcttcgctgacggcgtctccgtccccatgggcgatgccactaggggcagccacgactcaacattcatcagctccatcgatgggagacttgtgggccaacataagggcaaatctcgcaaagatgcaagcctcgctcctgttgacctcgacacacaggggcgcgacctcgccctgtcggacggccatcagcaaccgcgttggcctgctatctccaagtgcgagcatgccgctacgagggcgcctctgctggtcattgttgcgacctgctctaggtggctatccatgtgctcccctttcgtccagatggcgtccatgggatccaggtggctgcacacgtgcaagtccaatgcgcagaggattgctgtgctcgcggatgacatattgaaaaatgtggaatatgatgctctaagggttattttcaacaagttccattctgtcatatcgtttaagcccacaatggtaacgatactgtcccctgaggttgcagaaaaagaagcagaagctggtgggaagacgggtgacctagattcttatgagattgaaggcggtgagacaaaagcagagatattgcaaaacctagctgagttccagttttcttgtgtcatgtacaatggtgccctagagaatgcatgcagtgagcttggagcccgtatgtctgccatggacagctctagcagaaatgctggcgatatgcttgatcgtctcacgcttacttacaacaggacacgccaagcatccatcaccacagagcttactgagattatatctggtgcatcagcccttgaaggatag

SEQ ID NO: 866 - DNA, 984 bp, Zea mays
  Peptide Sequence Number=SeqID_44241
atgaacgcactctctcgcgaagggtgccggcactttgaggccttcgaccaggcagatgaagattttgggcgagatatctataaggtcgaagaccccgtggtgaaggaatccgccggggccctctatgaccggatgtggggtctgtacggtcatgaggtggtcagggagcgggccgaggctgcgagggctcaggcggagcgtggcgagcgggtggacgactttggggcactgaacagcgcgctgcctgacccggagccgacccctgcagaggccgcgactggaatcgccctggaaccaaccccggagactgcggaagacgcaccaggcgcccccacatctgctgcggctggcgaagacctgcccccaaaggtggccgaaggcgcgcctgatgcccccgcagctgctgtgccgagcgctgaagatcccgcggcggtggtggctgaagcagcggcggagccaacggcggaggctcccgcagcgttagggccttcgcaggttcaagattttgggcctgcgcacgcaaccgctactactgagtttttggcggcttcgaccgcggaaggtgggaatgaatatggtgggtctgtatctgagttttttgattttactgactctgggagctcggttgagtggactgaggagtcgtcggaggaggacttggattattttgcggccttggacgtggctgcggcggaggcttcgccacacgccgcggacgcgccagacgtgccaggtcctagcaccggacgccgacgacgaagggcggttgcaaagcgtagggttagtacggaggaaggggctcggcttcgcttcggctgcgcccttaggcggcttctgcgcggggtctttgcgatagacttcgggttttttcgcacttgttgtgctagtccggctgcacccttgggcgacttctgcgcggatagtcttcgcgatagacatcggattttttcgcacttgttgtgcttagtccggctgcacccttag

SEQ ID NO: 867 - DNA, 336 bp, Zea mays
  Peptide Sequence Number=SeqID_44242
atgagacaaaagcaaaggaaacaggacaaaagcactctcaacgactatcaaccaagacacataggaccttgggtctcctctattttcagatttagcaaaggattcagtttcctccctgattttgcacgagctcaagcggctgctgtttggaacctcgacagcttcacggcagccttcctctccttcccagtccgggaaggtggtggtgccggaaggcctctgcgcaaacggaaagtgaagagaaataaggaagaagcgggttttgagcatcaggctgcaatcatgcctgatgttcctccgccagaacaggcaaggatttttctctcttttctttga

SEQ ID NO: 868 - DNA, 333 bp, Zea mays
  Peptide Sequence Number=SeqID_44243
atgatcccctcgctagcaccaccccagtccccacccagcagctggctccggcgggtcaccttccttctcgtcctctcgctagcacaaccaaaccagcaaggtttgcaggaattctttgctgaactcctcacactggcgaggccttccggcaccaccaccttcccggactgggaaggagaggaaggctgccgtgaagctgtcgaggttccaaacagcagccgcttgagctcgtgcaaaatcagggaggaaactgttgttaaatctatatcaaatggcaaacgacgagagccccttatttgtgacaatggaactaacatgttcaagattccgtag

SEQ ID NO: 869 - DNA, 996 bp, Zea mays
  Peptide Sequence Number=SeqID_44244
atggagtgggtggacaggaccaaggcctccgccgccgccgccgcagcggcggcggacgagagggctgggggagcggaagggctcgcgggatacgtcaaggtcatgaccgacgaacagatggaggtgctccgcaagcagatctccatctacgccaccatctgcgagcagcttgtcgagatgcaccgcgccctcaccgagcaccaggacaccattgcaggaattaggtttagtaatctgtactgtgatcctcaaattatccctggaggccacaagatcacagcaaggcaacgatggcaaccaacaccaatgcagctgcagatcttggagaacatctttgaccaaggcaatggaacaccaagcaagcagaggataaaggagataacggcagagctctcgcaccatggccaaatctcggagacaaatgtgtacaactggttccagaacagacgggcacggtcaaagcggaagcaggccgcttctttaccgaacaatgctgaatctgaagctgaggtggacgaggagtctctcaccgataagaagccgaagtcagatcggtcgctccaggacaacaaggctatgggcgctcacaacgctgacaggatatctgggatgcatcacttggacactgatcatgaccaaatcggtggcatgatgtatggatgcaatgacaacggcttgagatcgtctggcagttctggccagatgtccttctacgggaacatcatgccgaatccaagaatcgatcatttcccggggaaggtggagagctcccggagcttctcccatctccaacacggggaaggctttgacatacgcgggcgcgaagctgcctctgcctgcttcggtgactgccgcctgacctctcccatcccatggcggcatcgccctcctggtcctggcagctcgagttcgccagtcggcagtcgccaccccaacctcggctccgaccgtgctcccatcagctcgaccaaactggccagcccttccggcgcttga

SEQ ID NO: 870 - DNA, 354 bp, Zea mays
  Peptide Sequence Number=SeqID_44245
atggcgcggcaactccggcaagcggtccgtgccgtgcacgtctggaccgcggcctgcgggcactgtcccatgacagacttcccccttgactgcctcgcagcgaagaggagtctccccgcgtctacttttggatccggtgcttggtacagattacttggtagaggtagcaaggccttgatcctagcacgaaatgagaaaaaagttgacgtcaccttattgtatgaactatacactttaggatcccttcttcctaaacggtatgttgcggcttatggcaattctgagccaacatatactacattgtatggaaaccctgatgcaacatatactacacaagcctatccagatgtttaa

SEQ ID NO: 871 - DNA, 222 bp, Zea mays
  Peptide Sequence Number=SeqID_44246
atggacatcatggtcgatcagttcgagcactgtgcatctaccaaaatattccagtctaacctgggaagttttcagagtgcattcatctcattcatcactgctggtgatcctgacctggcaaccacatcaaaagcattgaagattctcaattcctgcgattctgatgttatagaggttggtgtgccatactcggatccactagctgatggaccagttattcag

SEQ ID NO: 872 - DNA, 681 bp, Zea mays
  Peptide Sequence Number=SeqID_44247
atgaagccccaaccaccaaaacagccgttggggagggatgctgtcgatgagcgcactggacagtccgcacctgttgttggtgttttgggtccgaccgcgcacccggggttgcccctcaagtgttctttcttctccaccattttcacatctcttaccactgctcgctgtttactttcttctctttccttctactccactacgggcaagagcaagaagggtggtagttcttcgcatcactccggcgacaaacagaagcgtgagctaactcctccctcggaggatttcggcgactcggagtactcggaggagaagttctcctccgagtccgagggctcaccggtccatgcctctccccctgcgtcatctgatgactcagacgactcccaggggctcgccgcagaggtgtggacctacatctgggccgtcgagcgcgccgggctcgagggctcggatgagtcggagtactcctcggacgaggagaactcctcggactcgtccgaggagggcggcggcggcgatggcggtgacggcgacgatgacggaggcgacggtgacagcggcgaaggcgacggcaagggcggtgacggcggcggcaaaggtggcagcggcgacggcagcaagggcagcagcaggggcagcaacaagggcagcaacaagggtagcagcaaggccagtggctag

SEQ ID NO: 873 - DNA, 561 bp, Zea mays
  Peptide Sequence Number=SeqID_44248
atggatgcggcctcgcctttgcagccccattcgccacgcgctccgttgccgcagcccccgcccgcgccgtccaggaggtatgttccaatgtttgtggagatagagtatgatctgaactgccagtacacatctgttctaatggaagagcaactggaggctcttggaagagcaatagttgctggcaagtcgtgggagcagtttgtgttatgctatatatgggtccatgaggttgtgtatgcaagtggtggaaaagctcatgaaaggtgcggactctacatatcttatattgttttattggttgaatgcaatatatgttctaaatctgtcgtgatgttatttgtttgtaagtacacaatgtttgataacatcatcgactcgagccaggtgagggctcagcgtggaggttcgtcgaggtctgctgctcatagttcccatctctccactcaagatcgagcaaaagtggagcaactgcgtgaagaacttaatggagtatcgaccatcactcgtcgttgtaccctgatggtgatcagcgatagtgaccttccattttatgtgttgtga

SEQ ID NO: 874 - DNA, 1602 bp, Zea mays
  Peptide Sequence Number=SeqID_44249
atgggtcttgatgaagataccaccagaaaaggatcttcccatttcagttcttcgtcctccactgaagctgttgttcttattgattctatctttgcttcttctggtgttattgcttcgttaccgaacaagagctttaaagaatcccaagaccctgttgagggtgacccggaccctacacagagaggtccagaacccgtcccaggggttcggtctgtacccgcggaggtcctggaccccgcccagaggtctggtccagatatgcaggggtccgacactttcccttggggtccgggcccactgttgataccttggaggatattgtcttccctgccacgtggcagccctagagccgtcctcgtggtggggtcaggtgttgttcaccacgcgactaaagatagctgcatggacacatcaccttcatactgtagtaacgggaaccggcgcccaaggaggatgactcgtgggcccggcccccgtgctagagactgggctgtcggtttcggcggaggtgaagaggcacaataccgcaggcgggggcgtactcctctcgcgacagactggtctgctcctttcgacggaggtgaagagacgcactaccgcaggcggtggcgtgctcctcatgcggcggttcgccttctccgtacacggaggccgatgcccaaggagtatgactcgtgggcccgggcccccgtgtcagagactgggtcactttggcgcacgtcgggcgagcgccctttcgccttcgagttctctgcgctcttatgccatcgtagccaccatggctttgctagatcctctcgagcgcctctagcccgaggtggaactcaacttggtgcgcaacctgctcggatggggagtgtcggcgttcgccagaaagatctatgtcggcgcctctgcccgcagcgacctcaccaccggggagttcatgctctttatctccaacctccccagcggtctggcgctgccgaatctgtctttcttcgtactgttgctagagaggcttggcctccaacctcaacacattacgccctgcttcatccttcaggaggccatcatcgcctgcctccgcaggatgtccgtggaggcaacgctccttcccgcttcttcctccagcattcggggggaaggatgtttaccagcctcgtgaaggtgggtagcggactgagctgcggctccatccctcgtgcctccacctctttggggcccgccgcacccgcagcgccccctgcgccgtcggccaccgcaggccacgccgctccggtgccgcccgaggggtcgtacaagacgtcgtacgccgtggaggtggcgaccgcgtgccccctgctccttggcttggatgaggtggccgccgccgctagtgcagaggtggtcgccgccgttggcaagccgctcggagctagctttcaacgtgaccctgctggccaacaggccgggttcatgagggcgggcctcaccgggctggcgtacacggttaggaagaggtactccctcagttttagcgaggtggtcacccttgggtcggcatatttctgtcgccttgaagggtccttcccagctgggggagagtttgcggagcccttctcggttcagtatttgccttag

SEQ ID NO: 875 - DNA, 300 bp, Zea mays
  Peptide Sequence Number=SeqID_44250
atggcaaaggtgggtgggatgttttcaaaaataaaacttgatggtgaatctgtcaaaggccttgatagattcaacatcggaaaagatgtacctctgccaggatccactttagtgaggaagtggcagatttctgctgcttctgtgccagtggtcccaaagaagaaaaacaagactgaagtgcgggaggactcggtcctccacataggatcttttgcttataacttatcgggaggagttgtgcctcccttggtttgtataatattactactcagcactcgcctttttagttctggtctgtaa

SEQ ID NO: 876 - DNA, 321 bp, Zea mays
  Peptide Sequence Number=SeqID_44251
atggcgtccaacgacgttcggatcctgtgggagttacaatgtctagcggactatgactggaggaccccacctattgatcctcaggttgtgtatgcaagtggtggaaaagctcatggaaggtacacaatgtttgctaacgtcatcgactcgagccaggtgagggttaagcgtggaggttcgtcgagccgcgactgcgacctgggccgtcctcgttgctctgcgggcatttttgtgaagggagcagaagccgcacgccaggagttcgggatctgggccatagatctcggatccaatagttctcagcacgtaccggttcggtga

SEQ ID NO: 877 - DNA, 1113 bp, Zea mays
  Peptide Sequence Number=SeqID_44252
atgtgtcggggagaggagccaacttcctcaaagccatatgcttttgcatgtgatgaaagaaagggtaaaacgaaggctccaactccaagttcctcaagtgaagaagaggaagaagaagaaagtgatgataatgaagataatcaaccgtgcacatcatcctccaaggacgaagaagcaatccgacgtgtcggaaaggtaatggggatgatccgcaagattaatctaatgggtgtgcccctgcaggtcgaagatcttctctttaacattgacaggaaaaagcaaagaaagagagggtgcttcgcatgcggggagaagggccacttcagggacaactgtccaaatatggccgaacccaaaaaggagaggagcaaaggcaaggcgctaacaagtgtcagaacttgggatgattcttcaagtgaagatgaactgccaaggacacgcagccaccagtcctcatcacgctcatctcgatcatcgcacaaatgccttatggcaagaggtttgctagaaaaatttgaaacttttgcaaacttaaattgtgagttatcaactaaaattgagctactagagtctagtgctccaaccactgctaccaatgatggcctcattaaaaagaatgaaaaacttaaggctaagttagctagctcccaagatactattgaaaatttgctagagaaaatggaaattcttagcatacacaataatgagctaagtactaaggtagaaaacattggtagcaccccaggagcatctttagttgaaattcctgaaattattaaaaagaatgcttctacttcttgctttgatttaattgatgattctaactcctacaaccaagttcttgttgagaatattgttgtagaaacatgttcaggtgaggttgcaaaggaaaaggagaaattaaggaaagaagtggctcgtcttggcaaggctttgtatgacaagaaatgcaaagccaaacaaatccgacctccacaggataacaccactgcgggagtgaacaagcctatggaaggagaaactgtgatttgtaggctttgccacatggaaggccacaagtctttccaatgcaaggcgatgactcaggataagcaaaggcaaaagctcaagtaa

SEQ ID NO: 878 - DNA, 861 bp, Zea mays
  Peptide Sequence Number=SeqID_44253
atgtcgccgattccgccgccggcgggcgggttgtcggccgccattgtcgttgtcgcgcggcggtggaaggagtatcatgtcgtagctgccgtcgaaggacatgaactcgagactcccgaaacggagcaccgtcccgggccggagaggttgctggagactgcccatctggagcttgacgggaagctgttcgtcagcacgcagcaggcccctacctggcgcgccaactgtcggcgtttcgagaccggggggtccccaagccgacgaccaagtccgagccatcgggtcgggcgaggcggaggtcgttcggccgaggccagggcggagtccgagccctgggtcgggcgaggcggagtttcgtcgtcttctggggctgagcccgagtccgagccctgggtcgggcggagcggagttcgccgtcttctgggtcttagcccgagtccgagccctggggtcgggcggagcggagttcgccgtcttccgggtcttagcccgagtccgagccctgggttgggcggagcggagttcgccgtcttccgggtcttagcccgagtccgagccctggggtcgggcggagcggagttcgccgtcttccgggtcttagcccgagtccgagccctggggtcgggcggagcggagtttgccgtcttccgggtcttagcccgagtccgagccctggggtcgggcggggcggagttcgctatggcgcctttggcaaggcctactgcctgtcagactcactctgtcgagtggcactgcagtcggagtggcgcaggcggcgctgtccttctgtcagactggtcagtagagcggtggagtgacggcggtcacttcggctctgccggggggcgcgtgtcagaataa

SEQ ID NO: 879 - DNA, 1656 bp, Zea mays
  Peptide Sequence Number=SeqID_44254
atggaatctctatttgtaggcttgtctcataacaagccaaaaaaatcggtggcaaccgcaatagttcgagaagttttatctcatgactggttgctcctagactatatttgcacgcaaggtgatcttgctctcatcgattttatcaaggaaatctcttgtgaaccaagggtagaagtcgttcttattgatgatgcctttgttgaaaggaagtggatggagtgtttatttcagtcgagcgcatatttaggtgacgaggttatagactattacataaatttgataaaagctcaaaagcatctaaagtgccgatctggaggtcgcgttcacatagaaaatgctttccagttcaatttcctgaagcgagatggtgatcttgaaattaaaacagaggagctatatccaattaaagacatggcacacatatgtagcgctgaacgaagggtgttactttacctagaccatgacatggtgtttattccgataaacatccgagagacgcactggtatcttgctgtgatccatgcaagaaatatggagatacaagtgcttgattcacttgatacttcacaagaccgcaaagacctcactgactctattaaaggactgcaaagacaaatagatatgatatctcaacgtaaggagttaaaagaccacaggtggccagacctccaagttgcttcttggccgctcagagaaatagacatgggatatgcaaagcagacagatagctcttcatgtggcctcttacttttgaactatatcgaatactggacaggggatgaattgtctgatagttttacccaggaaaaaatggctgctatattactatcttcagacctgaataagagaagggggtgtctgttatacaaaaatgaaaaagaagttgactctggaagcccatctgatgttgagatattagaaaacccaacagattctaataagaggaaactactccacgtgcttgatcatagcgaagtagtgtatgaagatgaggaaggccctattactcaagcagacttgcaaaggtggtttgttgatgattgggataaaagagctcctgtaaaagtctctaccgatggttgcaccaatgactttttaatggttggtctttccacaaaggacatgccagtgaccaaagccgattcaatagatgttttatgtgattatatcatggcaatagaagacgatacgacactagaatatgttctcatgccatggaaattcaatggatgtcatgcccttttcgtaatagatcatgttaaaaagcatgtgacttttatcgattttacaccgactcaatattggtgtaaacacatgccatacaagaggttcgcggaagcgattatcatggcctcaaaaaaatataagattgcttacaacaagaaacgttctggatgggcggaggatatctttaagtgggaacatacaattcagactggtgttccaattgacttaagagggtttaataccagctacctcgttctacaagctatggccacgtgggggaatgacagacgactgaaatttgttggggatgcaaagactcttcgaagaaactttgtgattgatcttttaagttatgaggacaattcgtgccgatatgccatccctgcaaacatacaacaaagacttgtcgatatcgctaaaaaggattag

SEQ ID NO: 880 - DNA, 1434 bp, Zea mays
  Peptide Sequence Number=SeqID_44255
atgtcttcttcctcccttatgcgtcacgtccttccatcttccaagcccccggatggggggtacccgccgtctttctgcctcctcgtcggaggaacgcaactccgtgggagttggtacctttcagccatcgttcggcttcaaggattttcatcacgcagcctggttgttctcctccgccggcggtcacccaagacggtgacctccagctcctggatggggagaggcaaaccaggctgtgaccccgcccccagcatcgggggtgttcgtcatcctcgctggggcggagagcgaggcgagccggggctctacctcctgcgcgggtcggcggaccacctcctcttccagcttctggtggtggcaatcgccctcccatgctacgacggagacgtcctccagtcatgccggggaaggcgaactgttgctgcccagctaggatgcaacattccgtccttcccctcgcatttgcggcgaggacggcagcgaggatctgccggagcgcttgggtgcggcctgctctttggctttgatggctggttcgcgtcccttgagcgggaccgcgaacaagagccccccggtggccgcgtccgcccgggaccatggctgccgccgcagaggtcactagcgagcctcccgatgatcgtcgccccgcaggcccgaggccgctcgtacccgcggggacggaaccggagttccgtttgtgatggcacctcgaatgccagctcctctagcttggttaaagagacccctcggccgctcttcgatgagccgaggccaggggtagcgatatcagtacgaacagaggtggagttggctcgaaaatgggaacctggttggccggagcctagccgggttgcccgtcatcggggctcgatgtcggagtcgatgacccgaggcctcgggtcgggctggcgcccttggaaaatgcttggccgaggccccaggggtaaccggccgagccgcctgctcgggccggattcccggagaagtccctggaccgcgtcgccgtccgaggctgggtcggaccttgctgaaggcatcgtcgatgccgagggtgctgcagcccccttcagcgtgaagacccgagcctgcaggatcagattgtcttgtagcgtgtgccttctgcggccgccgaggccagaaaacacaccctcgctccgttgtaaagccgcgtcttccttcctcttatttcgagcatctggactttccgtcggtaacagggatgtttgtgtgggtgagagttgcttctcgcggaaggtgacgagtgagaaggtgatgagtgaggatccgctttttgaagcagtcaaaaagcacgaaagaaattctgctaaaaagagatcctttttcgaggaaaatttcgacgcagagggggtctccccccttttagcccccgagggagggtcgggcttcgccgaggctaggccgacccttccttga

SEQ ID NO: 881 - DNA, 267 bp, Zea mays
  Peptide Sequence Number=SeqID_44256
atgaccgggaaaaagaccacggcttcctctgacggcggcactccaaagaaagctaaggtggtggtggaggatgaggaagaggcggggttggaggatgaggaagaggcgactgtgacactatccgtggagaaggacgcgctggagtgcgacatctgttgcctacccttccagtccgaagttttcatggcaagtcagattaccatgcattgcaagaacgggcattctggatgtgcaaagtgctgcatccgcacggacgaaagtcactag

SEQ ID NO: 882 - DNA, 471 bp, Zea mays
  Peptide Sequence Number=SeqID_44257
atgtgccagtgtataaaagaatgctttccttgccccagatctggacagacatttgagtacactcctccagaggcactccttaattcaagctggtttcaaggatcaagaagtgcaaggcttaagtatgacatctggagcgttggagttgtcatgctagagttgatgatgggttctccccatgtttttcagataagtgaccgtacacgtattttattggatcggcatctcggagggtggagtgaacaaacaaaggagcttgcatacaaaggtttcatggccgtgacagctgatgttgtaattcttttttactttaagggtgaatttgggttagcttcttggaaatgctctgaagaatcatttgcacatcaagtgaagatcagagatcctctcaagattgggttggtgtttctattcttgtccacatcttcattgcccccagaatgcttggatcatcaccattttcatatctaa

SEQ ID NO: 883 - DNA, 357 bp, Zea mays
  Peptide Sequence Number=SeqID_44258
atggtgtctccggtgagctgcaagcgggtgatccgagtggacgtccgtgccccgttcgttgggggtcggctaggggcccagaggcacgcccaaaagtacctgcgggtgatttgccggacccggtcccctggcgacggggctccgcaaccgaagaggcgcgacggtggcacaagtggcggtgcggttactcgcatgcagcagctggcgcgctggttgcgcgacgcgtgggcctgggcctccaagccggcgcgtcagaagtcggagaagcgcgtccacctggcgcggttgcgtgccgcctgcatggctgtccgcccctcccgcccgttggtctgggcgaaagtggggaatcgcttgtaa

SEQ ID NO: 884 - DNA, 471 bp, Zea mays
  Peptide Sequence Number=SeqID_44259
atggcgcctcctgttgacgtggtcggtccgtgccctagtttgggcgaggtggaggctcctccgaggtcgagatcgagtctgtcttccaaggtcgaggtcgagtctgagcccccgggttggacgaggcggagaccgtcggctggagccagggctgagtccgagccctggggtcgggcgaggcggagttcgtcgtccttcggggctgagcccgagtccgagccctggggtcgggcgaagcagagttcgtcgtcttccggggctgagcccgagtccgagccctggggtcgggcgaagcggagtttcccatggcgcatagggccagacttggctgctgtcagcctcactctgtcgagtggcacagcagtcggagcggcgcaggcggcgctgtccccctgtcagaccggtcagtggagcggcgaagtgactacggtcacttcggctctgtcgactggagagcgggcgtcaggataa

SEQ ID NO: 885 - DNA, 447 bp, Zea mays
  Peptide Sequence Number=SeqID_44260
atggagaggtcagtggcaccgaatctgggtgtttgcagtccgctctcgcgccagatccaaggctcttctccctcccctctctcccctgagccagatcaaattggtaagctcctgcgccagtgcatcaatactccgctgagcgtactctcgtcctgtgccaagtccaagagcctagagtcactgatacgcccggacaacgtgatgacggacagcttcaggatcctcggagaggaagacgtcggcgcgcgcacctgcccgaagctgaggccgggaaagatcgtgcctgctagaggccctaacaattttgggtgggatcctgtgttccagccagatggttttgaacaaacatatgctgagatgcccaagtcagtgaagaacgaaatatctcacagagggaaagctcttgctctggtgaaagaacactttgcaaagagatggtccggctga

SEQ ID NO: 886 - DNA, 621 bp, Zea mays
  Peptide Sequence Number=SeqID_44261
atgggtcggcgcgagacggagcgcgaagggggaggcagccggagggagacgggcgtgagaggtggaatcccgcggccttcgtgtttgtcccgcgcccaggtcgggcgcaaggaaaggatccagcctgagtcagcttggggcagggtaatgatggtgcctcctgttgacgtggtcggtccgtgccctagtttgggcgaggtggaggctcctccgaggtcgaggtcgagtctgtctcccaaggtcgaggtcgagtccgagcccccgggtcggacgaggcggagaccatcggctggagccagggctgagtccgagccctggggtcgggcgaggcggagttcgttgtccttcggggctgagcccgagtccgagccctggggtcgggcgaagcagagttcgtcgtcttccggggctgagcccgagtccgagccctggggtcgggcgaagcggagtttcccatggcgcctagggccggacttggctgctgtcagcctcactctgtcgagtggcacaacagtcggagcggcgcaggcggcgctgtccccctgtcagaccggtcagtggagcggcgaagtgactacggtcactttggctctgtcgactggagagcgggcgtcaggataa

SEQ ID NO: 887 - DNA, 330 bp, Zea mays
  Peptide Sequence Number=SeqID_44262
atgaccgcgtcaaaaaagggaccgggaaagggggataccccgaaaaggatccttctccgtgaaggaaacaggccccgagcctccctactgatcagaggttcaaaggctggcccccagaggggtttaacagccgcctcagagcgcttgggttccgcgcccactactggtcagagaggctcgggggctgctctcgcaaacccggctccggccaaaccgttgacagcgtcaacataccagcccgagaacttgggacccgaccgtgcatccgggctacggccagctcgcatgagggaacaaccagaccagccgaagcattgtgcgaggcattaa

SEQ ID NO: 888 - DNA, 429 bp, Zea mays
  Peptide Sequence Number=SeqID_44263
atggccgcagaaaacatacacacactacaagataatccgatcctacaggctcggatcttgacagttgaagggagcagcagcaccctcggcgtcaactacaccttcggcgaggtccgacctagcctcggacggcgaagcagtcggagaatctccactctgaaggacgacatcagcaccccgcccgggccatcgctgccagggtcttctccaggaatccggctcgagcagacggctcggccggccaccccgaggcctcggccagcgaattgtggcctcggcaactcaactccggagtcggtcccgccagcggacgacccggccaggctccggccgaccaagtcttcctttcgagccaactctgcctctattccagctgacaccgctacccccggctccggctcatcgaagagcggccgaggggttccttaa

SEQ ID NO: 889 - DNA, 636 bp, Zea mays
  Peptide Sequence Number=SeqID_44264
atgtcttcgcgctcccttatgcatcgtgtctttccaccttccgagcccccggatggggaacacccgcaatccttccgccttgtcgttggaggaacgcaacttcgtggaagttggtacctttcagccatcgttcggcttcaaggattttcatcatgcagcccggctgcatcccctcgtcggtggtcaccgaagacggtgaccaccagcccctggatggggagaagcaagccgggccgcgaccttggtcccgccctcagcttcaaggatgttcatcatcctcgctggggcggaggccgggctgagccggagctctacctcctgcgcgggttcatgggtcagcctctccttcagcattcaagggagagggcgctcactggccctgcgagaggggcggacttcgacaacgcggggctggtcgacggcgggcgtcgtcagcttcagcgcgttgggctcgccaacttggctcccagtgcccctcccgccgcaagggcggttgtcgcgccgcgcgcacgggaggaccgcccaagacgtcgcgcgctgctagggcggcgttcgtgttctggggcggtcctgcctttgcaccggtacggcgccttcgcgcggaggtcggtgctccactcgtccgggaggatctga

SEQ ID NO: 890 - DNA, 549 bp, Zea mays
  Peptide Sequence Number=SeqID_44265
atggcttttctttctttcaacccgggctccttccccaccgtaacagtgactacggagaggaaaagggtggcacggcttaccggtgacgagggaggttcggtgaagggctggaataaggctgaccgcaagcaggcggtcgggctcgtcggcagcgtgtactctggcctgctcacggcggtagggctcaatcaaatggcacatggagctttacgggatgctaaggatgttataggtacaaggaatcgacgaatggcttaccgtggggctcggactacgtgcggcggcgaccggttgaagtccggcgacgtggatctggcgtctccggcgaggtattgttcaatcctcggttcggggagcttcactaaggtctggagaagctatcccaagggtcggatagggtggaggatggctgtcttggctggtctacggtggtcgtggcttgtgcggccgctggcacgaggttctttgggcaaatgctggcgaactcgtgctcgggctgggtcagggacgcgcaggggtgtacggtcgagaccgaggtgggatttatag

SEQ ID NO: 891 - DNA, 603 bp, Zea mays
  Peptide Sequence Number=SeqID_44266
atgacttctcatgtatccacggaaggagggaacgcacagtcccacacagacgggcttgcacgagagggctttccccgcattttgtgggaggtgctgcagggagccggttacgctacgcccccacccggctggcgttccttggactcggagtctttcggtttcagggccgaggatactattgagtccacggctctgcacgtgctgacaaccttctgcggctttcaacccttggagttgtcgacccaccccattggcttgttccccgctgaaaaggaggatgacctaatgtggaaggattgggttgagcacgccaaggatgtgtgggctctctaccctggacataccgctcacctgacggttcggtgcatgagtgccctgtatcgtctgcaggccttgcgaggtgaggcgatgtcccagctcatgggcctagtggagtctaccaagatcaccctggataacagggaggaccttgttgtagacttatccactgagctggtggaaaaggatctccaggtagagcagatggtgactaaaatccaagagctcgaagatcaagtggaggccagggagaacactattgaggttttggaagatcagctctag

SEQ ID NO: 892 - DNA, 513 bp, Zea mays
  Peptide Sequence Number=SeqID_44267
atggtctcccattccggttatggtgggtacaagtgcggtcactgcacgacggcagtcggggtcagtgagacattggccgaggatactattgagtccacggctctgcacgtgctgacaaccttctgcggctttcaacccttggagttgtcgacccaccccattggcttgttccccgctgaaaaggaggatgacctaatgtggaaggattgggttgagcacgccaaggatgtgtgggctctctaccctggacataccgctcacctgacggttcggtgcatgagtgccctgtatcgtctgcaggccttgcgaggtgaggcgatgtcccagctcatgggcctagtggaatctaccaagatcaccctggataacagggaggaccttgttgtagacttatccactgagctggtggaaaaggatctccaggtagagcagatggtgactaaaatccaagagctcgaagatcaagtggaggctagggagaacactattgaggttctggaagatcagctctag

SEQ ID NO: 893 - DNA, 873 bp, Zea mays
  Peptide Sequence Number=SeqID_44268
atgcatgacttcctccttgagctggcgctgcttgattgttctggttggttaatggggcaggaagacgagctgcctggttgcttggacgctggtattgatttcctccctgctggttattctgacggtactgctgctgctaaggaaactgcctctgttattgctgcgggtggttctgacgctaatgctggtgctggtagagaaggtgtggtacatcagctggtactggaggggatcaaccaatcctctcagaaagcggtactacctcttggcatccgtgttgacatcctccagggcataacgcgacagctgcagaaacttgtccctgtactctctaatggacagtggaccttgcttcagggcgagaaactcttccttcttcactatcatcagtccctcaggcacatggtagcgacgaaagttatccctgaactcctctcaagtgatggcttcagggttggcatgggtggcaaggcacttgaggcatctggacttgcactagaggatgaggtggtggtggttgctgctatgcttgctgcattgctgctaaagtctgaccaattgcctggactgcttgagtctgcatcaagaacatctgctcaatggtcatcggtggtggcggtggcaattgctgctgcgactgagctgcatcctcctagggtgcctactattcaggctaagcacgcctcgcacctctacgcctgttctcagacatctgtagaaatcactcatattagatctgactctgtagtctttcagcataagaaaagatgtatagaagatcttcatagaactgaacaattgaccatcttcactgacagcttctcagataaagaggaaagtggagacaaatgggttacccaactaaataactaa

SEQ ID NO: 894 - DNA, 363 bp, Zea mays
  Peptide Sequence Number=SeqID_44269
atggctcatcggagtttctccggcccgcctgaggccacctcaccgccggtctcccctctctgcccgtggattcatggcctcttccccgccatcgagttcgtcgtggcaccctcttcccctctgcccaactccggtgaccccgaagccaccctagctcgcgcctaccttagctccagcgacctcaccgccatggagatgagtggcgcctcccgcagccatctgttttccctcggtctgatttcccctctgtctgattcagatcgaatggcccggaccacgggataccgcttcgcgcacgcgcgcctgacacgccctagcccgtctgtcagtgccattcgtagccgctcatcattcccggtctga

SEQ ID NO: 895 - DNA, 435 bp, Zea mays
  Peptide Sequence Number=SeqID_44270
atggctcaccggagtttctccgacccgcccaaggccacctcaccaccgctctcccctctctactcgtggattcatggcctcttccccgccatcgatggggtagctgatggccttgacctgaagtactatcctcaccgtttgaccggaagtgctggaggtgtgattgtcttgccagttggtgaaggcaatcctaggctgaacaacatggtcaatctggtcgtcatgctcaacacagagttggaccacgcccttgacaagttgggcaaggtttgggcagaggttgcagaattgcgtgctgagtgcgctacacgccactatcttgatggtggtcctcccgcccctgtcaggattcagcacccttaccgttcaccgccctgtggtcgcttcgactatggtaccccagactgcaggacccacatagatttggatccttag

SEQ ID NO: 896 - DNA, 231 bp, Zea mays
  Peptide Sequence Number=SeqID_44271
atggggaagcctagcccgtcactcctcgtgccctctccagctcagtacaatggatcaagtagtctcattagctgcgagaagcagacgattcgaatcgagtttttaaaccttgcaagaccacgcatccccatggatctgtgtccacagaccttcatcattccattatcaaaatggatacaaccaattcctgacctcgcgcgagtgctagaaaaatcactcgacttctactga

SEQ ID NO: 897 - DNA, 246 bp, Zea mays
  Peptide Sequence Number=SeqID_44272
atggcttcgctcggtcaccccgaccgcttccaatccgagggggagctcaacctgtctgggaaggctagggaccatcttggtgcctactactttcatacgaggccggattcagccgtagcctacatctccacctttggcggcgtgaggtgggaaaattggcacggcgactgggtgattgccagcgccgaggccaacgaccgcctcgtcctgccgagcaacgggctagccctcgatcgcaagcactag

SEQ ID NO: 898 - DNA, 102 bp, Zea mays
  Peptide Sequence Number=SeqID_44273
atggcgaaggcgaagtggtcgttgtcgatgtttatgacccaactgcgcaccacgaggtgcacgtcagaacacaagagagtttatacaggttcgtgccgctga

SEQ ID NO: 899 - DNA, 1764 bp, Zea mays
  Peptide Sequence Number=SeqID_44274
atgcgcggccccggggggaaggatgtcttcgcccgagctccgggagtcttcggcgcggatgctgaggtgatggacaaggatcgccagggagctgcacagaagcgccaggcggtcgtcaggcttcatgaagccaggccgaagaggcagcggggggctgcgaaggctactgcccccggcggaggccagccgccgctggtggcaaagtcggtcgtccctgcatccaacagggcgccggaggctgcgaaggcggctgccgccggtggttccaagtctgtgaaggccgcccctgtgcccagcggggtgccggaggctgcgaaggcggcccgagagttgccgccgccgggcaaacgcatcgccgactttgccaccgacattagtgtggaagattatcttgttgggtcggacgaaggccaacttgtagttgttccgcctgccgggggcgaaggggcggtgcgtttagtgccggtggcgagatttcggcgctcgctgcagtcagggacgaggcgggtgctgtgtcccgcccggctgaaggagctgaaggaggcactaagtcaggcgactgacttcgctgaccgcacggcgtcgggagccctgacggtagttgtgtctgccgaagtcgagagacttcggacgcaacatgctgacgtcgtccgggagaagtcggccgccgacagcaaatgctgcaagctggcggataaggtggccgcgctggagggtgagaaggctgacctccggcgccaactagcggaggaaaggaaggaggacaatgaggccctcgccaaggcgcaggctgcgcaggcggaggccaacttggcgcgggtggagggcagccttgccaggcagcgcgccgagcagttggaggagcggctccgcgctctgcagagccgtgtggagagggctgaggcctcgacgcgcacggaggctgagcggacacgcaaacagcttatggattcataccatgagctgggcgcgcggaccgctgaatttgaagtgccggagcgagagcccggacttcgctgcctcgagtgggtacaggaggagctacaggcgctccccaccatcgtggaggggtttatgtcttatgcctccctggctaatgaggatttcgagcgtgatatctacaaggttgaggaccctatagtgaaggaatccgccagagccctctacgaccggatgtggggcccccacggtcgagaggtggtcagggagcgggccgagacggcgaggggtcaggcagcgcacggcgagagggtggatgatttcggggctttgaacagcacgctgcctgatccggagtcgaacccggcggcggctgtgtccgaggtcgccctggagctgcccccggaaaccgtcgaaggcgctcctgatacccccgcagccgctgcggccggcagaggcccgcccctggagaccgccgaaggcattcctgatgcccctgcagccgctgcggccggcggaggcccgccgccaactgctgcgccgagggctgaggatcctgtgacggtggcggcggagacgacggcggaggctcccgcgacagctgggtcttcgcaggagtcgtcggatgaggacttggactactttgcggccttggatgtggcagcggcggaggcttcgccgcaagctgcgggtgctgaagttgtgcctggtccgagtactgggcgtgagggggagttgcgaagtctttttgcgggtgaggagcttaggataatgttatttaactatagggagatgggaattattccgaaggttgagccgatgtag

SEQ ID NO: 900 - DNA, 1431 bp, Zea mays
  Peptide Sequence Number=SeqID_44275
atggggccggactcgtcgcccaagaagttgagcctcaaggagcagcgcgctgcctacctccagtggttcgccctcgccgacgaagacggagatggccgtctgacggggaacgatgcgctcaggttcttcgccatgtccaacctctccaagcccgagctgaagcaggtttgggcgatcgctgattccaaacgccaaggatatcttggattctacgagttcatgactgccatgcagctggtttctctcgcacaagcagggaacgaaatcaatcaagacacccttccaaatgcagatctcgagaagttgcagctccccacaatggatggtctggctaaaaaactaaaaaagaactctgggagcaaggtcgagtctgctattgttgcatgtcatccatcagaagcacctactatgactgccagctggtttaactccaagtcaggaaagaagattcctttgaaatcagtcacttcaatcgtcgatgggctaaagaaatcgtacattgagaagttgaggcccttggaaaaaacctatcagttccatgacttcgtgtctcccttgctgtttaatttgttctacaacaaaggcgctcatattgggccagagcctacaacggacaggtttgttgtcatcactctgttagagcacgtgaccttcgtggacactccaggagttttatcaggggagaagcagcggacgcagcgcagctacgatttcaccggagtcacgtcgtggtttgcggccaagtgcgacctcatccttctcctgtttgatccgcataagcttgacatcagcgatgagttcaagcgtgtgatcgggtctctccgcgggcatgatgacaagatacgcatagttctcaacaaggccgaccaagttgatgcacagcaggcgagtattctgatgagagtgtacggagcactgctgtggtcgctcgggaaagtcctgaacacaccagaagtcatgcgtgtctacataggttcattcaacgacaagccgatcagggagacagcggctgggccgctgggcatggagctgttccagaaggaacaagatgacttgctctcggacctgaacgacatccccaagaaggcctgcgaccgtcggatcaacgagttcgtgaagcgggcaagggcggctaaagtccacgcgcacataatcagccatctgaagaaagagatgcctgcactgatgggcaaggccaaggctcagcagaagctgctcgacgggctggatcaacagttcgccaaggtccagaaggagctgcacctgccgccaggggacttcccgagcgtggaggagtacagggagctcctgagcgcctacaacttcgacaggttcgagaagctgaggcccaagatggtccagggcgtggacgacatgctggcctacgacatcccggacctcctgaagaagttcaggaacccctacgactga

SEQ ID NO: 901 - DNA, 102 bp, Zea mays
  Peptide Sequence Number=SeqID_44276
accagtcaacaagtacaatgggcatcgtattgcccgaacagataaagctagcatgccaacggttacggccaagttcggtaagagtgagagttttacagtcaa

SEQ ID NO: 902 - DNA, 363 bp, Zea mays
  Peptide Sequence Number=SeqID_44277
atgcccgctgggatccggtggctgcgggctcggcttctcgggcggtggcgactggccgactgggaggcgaggcgacgaggaggaagaggacgcgtaactacctggaccgggagagatgtgtggggtcggcttcggctggaatctggggctcggatcgggtctgacggacctgtgcttccggcttcgatcgcatcgaaactacattttttctccgaagcattatcttttttcggatataatgatcttcagacgaaagtcatgaaggacacaccttcatcattttatggtataataaataagaatataaacaagaagacgaaggagtacaaaggaattgagataatgtctgttatatatccataa

SEQ ID NO: 903 - DNA, 58 bp, Zea mays
  Peptide Sequence Number=SeqID_44278
tacaattgttattgtcatgaatgaaaacatgagctatgtcaacatgagctatgtatga

SEQ ID NO: 904 - DNA, 228 bp, Zea mays
  Peptide Sequence Number=SeqID_44279
atgaggtccttagaggttggctcgtcgacgtcaagagtggatgtggggcttgctcatggggatccatgctttagctcttgcgacgtcattgcttcagatctatacatcaagcggaaaggttattgtggatacagctttggcctcgatccacttggtgaagtattcaacagcgacgaaggtgaatttgaggttgccttgggctgtgggcagtggtccaacaatatctag

SEQ ID NO: 905 - DNA, 159 bp, Zea mays
  Peptide Sequence Number=SeqID_44280
atggcgagagtagcgtgtaccctccatggcaagaggctggatggtggtgtatctgtgctctcggtgaagaagcagcaaacttttgttgcttttgttccaaggtggtaccgaaagaagagaatcaagactaaagctgcaggaggaaaggccctccgataa

SEQ ID NO: 906 - DNA, 891 bp, Zea mays
  Peptide Sequence Number=SeqID_44281
atgggaggacttggggtttccgatggttttgctagagagttgatgaggacatgcgcgaccctggggggaaggatgtcttcgcccgagctccgggagtcttcggctcggatgttgagggttgccgggggttgttggcctaggaatgttcctatcccccgcgcggctggcgaggacttttttacatctcgcatggttcgtgaatggagggtttttccttacgggcggaatattgctgctgttgtgtcggcagtgatcgacaaggatcgccagggagctgcgcaaaagcgccaggcggttgtcaggctcgttgaagccaggccgaagaggcagcggggggctgcgaaggctgcggctcccggcggaggcaagccgccgctggcggcgaagtcgggcacccctgcgtctagcaaagcgccggaggcaacgacagcacagtgccgggaggccgcaaaggcggcccgagcattgccgtcggcaggcaagcgtgtcgtcgacttcgccaccgatattagtgtggacgactatcttggtgggtcggacgaaggccaacttgctatagttgcgcctgccgcggcgaccacgacggctgccgtagtgccgaaggcgaagggcggggctcttagcgccggaggcgaggtgttggccctcgcggctgtcagggatgaggcgggcgctgcgtcccgccggctgaaggaggtgacggaggcgctaagtcaggtggctaacttcgccaaccgcacagcgtcgggggccctcacggcagttgtgtctgccgaagtcgagagacttcagacacaacatgctgatgccgtccgtgaaaaaatcggccaccgacagcaagtgccgcaagctggcggacaaggtggccgcgctggagggatagaaggctga

SEQ ID NO: 907 - DNA, 585 bp, Zea mays
  Peptide Sequence Number=SeqID_44282
atgaacgcgctctctcgcgaagggtgccggcacttcgaggtctttgaccaagctgacgaagactttgagcgagatatctacaaggttgaggaccccatagtgaaggaatccgccggagccatctacgaccggatgtggggtctgcacggtcgcgaggtggttagggagcgagccgagacgacgagggctcaggttcaagattttgggcctgcgcacgcaaccgccactactaaatttttggcggcttcgaccgcggatggtggtaatgaatgtggtggatctgcatctgagttttctgattttgctgactctgggagctcggttgagtggactgaggagtcgtcggaggaggacttggactactttgcggccttggatgtggctgcggcggaggcttcaccgcacgccgcggacacagaagatgtgtctggtcctagcaccgggcgccggcgacgaagggcggttgcgaagcgtagagttagtggggcggaggggggtcggcttcgagcgtcttctgcacggatagtcttcgcggtagacttcggtttcttcgcacttgttgtgctagtccggctgcacccttag

SEQ ID NO: 908 - DNA, 633 bp, Zea mays
  Peptide Sequence Number=SeqID_44283
atgggccaaccctctattagccccaggcgggaccctgcatatgggccaaactatacatggacccacctttacaatatggaggactgcaacgcacttcgcttgtgcggttcgaccttcagggccttcatggtcttcggtcttgaatacgctggcgtggggagcttgagcgagggggacgtgttcgccttcgtcccaacatttgccctacgagggaccagttcgaccaagtcagctagtgtcgaagactatcgtctagcccgcatcaagcaaacgacgtgccaccgccgacggtacgtgaccatgccatcctcttcttcatcgtcgtccgctgcgagcgcatcgctggctatgtcgtcatttgagaagacgctgagcgattcggcggtggtagatttgcagcccggtcacacagttgagttcgggacctcgaggatcttcttgggccatgtgctggagatgcaacggctaggttactttggaagtggtgttgggcgggctctaggggctaaagatgtccctaagccagagggggaattggtcgtgtttgaatctttctttgctactggtcttcgcctgccaacgcatcaatttgtagttgaggttctgcggagattcgaagtacaaattcattag

SEQ ID NO: 909 - DNA, 855 bp, Zea mays
  Peptide Sequence Number=SeqID_44284
atggagctgcgcgtgcgagatgtggctgcattcgtgcgtgaagtggaggcagaagctatcaagattgtcgctgttcgaaagagaaaattaggtatggcagatgatgagacggggctgagggctactgggcgttttgttgaggaattgatggaaacgtggggcgagcttaccactatcgccattgctgctggcgtggccacgtcagttgtgcagcagctgaaatttgtgactgccttcaccgagcaggttgcctcgggggcactgacctcgcagtttgtttctgacaggagatggctcaaggtaaggattgagcgcctccgcatgcaacatattgaggcagtgagggataagtcagcagttgagaataagagccgcaatcttctggagagactatcaacggtggagaaagagagggaagacattggccgccgacttgccgaggagaaggaagatgtgaagaaagcccgcgtggagtcccaagccgctcgcaagcgcgccgtcgacctggagctaaagaacatatgtggccatcgtgagaagacggagtcctccacccacgctggggtcgagcgggcacacacacttttcgtggatgcgtatagtgagctcggcgcgcagaccgctcccttcgatgaatcaggggaggaagtggggctttgtttcttgggtggttgcaggaagaactggagtcgctcccatctatcgcaatgggccttatgttctatgcgtccctcgttacctgtgaggggcctacgaatgccttgtcctgagagggatgcaggcatttcgaagtcttcgactgggcgaatgaggacttcgattgtggagtgttctagattgaagacgatgtgctaa

SEQ ID NO: 910 - DNA, 708 bp, Zea mays
  Peptide Sequence Number=SeqID_44285
atggacagcagcagtcaccctgctgcagataatcaaggccacctcaactctgcccgcaatggcagccacctgcgcagagacagcaacggcgcagatctgcagccctgcccacaagacgaggtgactgcgatggtgacgagggacagcgggacggcagatgcggcaggatttgacagcagccggatctgcgcactccctggacgtcggatcttgcgcagagcaggccgtgcgcaggaacggcgggcggatctgcgcaaatctgcgattggcgcagggacagcaggtggaccgggcgcggcagacagacggcggatccggcggacggcagcaggtcgacggggagcggcagagggcggatccggcggacggcgggatggcagagggcggatccggcggacggcggaatgcgcaggtcgacggcgcggagagagcggatccggcgggatgcgcaggtcgacggcgcggacggcgcggatgtgcgcgaatctggacggcggatgcgcagggacgatgaatcctcgacgaagcggcggccagcaggccgcgacggcggccaggaaaagggacccgcggccgcgacggcgggcgggagtggaaggactgcgacagcagccggagaagaggaaggagctggctgcgaggacagcacagcgacggcgcgacggcgacgaaaaattggatcagggtgggcttagacgtaaaccctaa

SEQ ID NO: 911 - DNA, 315 bp, Zea mays
  Peptide Sequence Number=SeqID_44286
atggcgcctgaggctggtcttggcggctgtcagcctcaccctgacgggtggcacagcagtcggagcagcgcaggcggcgctgttttcctgtcaggtcagccagtggagcggctaagtgactgcggtcactttggccctgtcgaccgaggagcgtgcgtcaggataaggtgtcagacgatccttgcattaaatgctcctgcgatacggtcggttggcgtggcgatccggccaaggttgcttctccgcgaagcctgcccgagctgggcctcgggcgagttgaagaatataccgtttatagagtggagtatgaaatag

SEQ ID NO: 912 - DNA, 138 bp, Zea mays
  Peptide Sequence Number=SeqID_44287
atggggtccaggcacagtgcttgctctgccgaggctgggtgccgaggttgcctttggtgcaatctatgctcaagtaaagaagaaggcgtcgaggcggatctccaggagttccaggacttcgacaagttcgaggattag

SEQ ID NO: 913 - DNA, 162 bp, Zea mays
  Peptide Sequence Number=SeqID_44288
atggtgggtacaagcgcggtcactgcacggcggcagtcggggtcagtggagcattgtaccatgcaggatgtagttgatggtgtgacttggcctactaccctgccaccgggttggacgatcgagtgggatgttgctccggcaggagaggagcctgaggagtag

SEQ ID NO: 914 - DNA, 156 bp, Zea mays
  Peptide Sequence Number=SeqID_44289
atggctcgccgtggccactgggcggcgccgccgcgctctgttgaccaaggttctctggaggacatggttgctggagtgacttggccgtccatcttgccaccgggttggactatcgagtgggaccctacctcggctgaggaggagcatgaggagtga

SEQ ID NO: 915 - DNA, 360 bp, Zea mays
  Peptide Sequence Number=SeqID_44290
atgggacaaagccctaagtacgaagtgtacttttgcaagacttacccgacaaagttgcaggatgaaaagagcatcacaaggaactttgcagtaagatcttaccatgctcccaatgaaaatatattcttgcagaaagacccctctggttctatttctttgcacgatgaggtccccgacggcgcaccgaacaggggggcgagctctggcgagctagaccagccgtatgacgctacggcaggagctccaaagctacagggaccaaatcagatgcctaccgtacctttccccccaatcaatttcgctagaggtggtctatcaagctctgtccacggtgacagtgcgggtgatcaagtgaactaa

SEQ ID NO: 916 - DNA, 624 bp, Zea mays
  Peptide Sequence Number=SeqID_44291
atgggtcaaagagcttcactgggtgctagggaagacgtgagtgcaaggaatttgaaaatggcttaccggaatgctcggtccacgcgcggtggcaggcgaccgaagtccggcgaggatgatctcggaattccagtgaagttctgccgggtccgaggacttggaaagcttcacgggctaatggtgaagctaaccaggtggttggcgcggcttggacgtgactggagggagctgggccacagtggtcgaggctcagaaagcttggcgggcgatggcacggcgtgctcggggcaaattccggtgatctttggctcgggcaggacttgtgagcgcgcggggagtgctagaggagtgattgtctcgccagttggtgagggcaatcccaggctgaacagcatggtcaacctggccgtcgtgctcaacatagagctggaccacgcccttgacgagttgggcaaggttcgggcgaaggttgcggaattgcgtgctgagtgcacagcacgccactatttggatggtagttctcccgcccctgtcgggattcagcacccttaccgctcaccgccccatggtcgctttgactatggtaccccagactgcaggacccggatagatttagatccatag

SEQ ID NO: 917 - DNA, 462 bp, Zea mays
  Peptide Sequence Number=SeqID_44292
atggcccgtatcaggtgcactgcacgtaagtctgtgattccctttttgccttctcgcctggcggagcatccactgcgttgcacggtgtcaggtcagtccagtcacctggagagactgcatcgtcgcctgcacgaggagcaggagcaccgacgccaggagcgtgagcaggagcaacaggactcttccccctcgcctcagctggaggtggagtctgagaggccgccttcccctgcacctcaaccagagatgccccctgcaccaccacagggcatcccggctgttggaggagaccctgacgaagacggagacgatgatgccggttgcagttcaagccacggcacaaagcgttcagaggagccggagccggaggggtggatcgctagacccatcactcgtgacgtcgctcgcgggtgtcacttccatgacgctctcgacaccctgttgtgtcaggccttcgactaa

SEQ ID NO: 918 - DNA, 282 bp, Zea mays
  Peptide Sequence Number=SeqID_44293
atgcaagatgcagcacgacgggcactttctcagtattgctcgttgttcagtggggtggctgacggccttgacctgaagtactaccctcgccattcgaccgacggtgctggaggtgtgattgtctcgcaagttggtgagggcaatcccaagctgaacaacatggtcaacctggccgtcgtgctcaacacagagttggaccacgtccttgacgagttgggcaagatgtctgagaacaagcgcaaaggtgcaaggcatgctcagctgaaacagcaggcaccctag

SEQ ID NO: 919 - DNA, 87 bp, Zea mays
  Peptide Sequence Number=SeqID_44294
atggggaatcttgtcccatcactcctcatgctcctcctctgccgagtgggtaaacccttacctgtgtgggttattctagaagtttga

SEQ ID NO: 920 - DNA, 354 bp, Zea mays
  Peptide Sequence Number=SeqID_44295
atggcagtcgcccctttgtggcatcccgccgtgggccaggcgaatggaaacaatggaagtaggtcgacctcagggcttgaagggctcacgggagactggaatcatcgcccatctctgacgatgaacccaccgtgctgggggaagaacctccctagcgcgacgctcggcgacggagaaacagaggctgaaacgtgcggcgacatcatgaagctggagaatgggatccggctcaacccatctcacgagacgaagcctcaaagatgggggaggcccctaatgaaagaacacatcgagaacagcgcaactcccatcgccgtgaccgtcgtcaaactcaggaatgcgagcgggagctag

SEQ ID NO: 921 - DNA, 315 bp, Zea mays
  Peptide Sequence Number=SeqID_44296
atgcagttggtggacgacctgaagaaggatggacttaaccagtggatgctcgccaagcgagtatatggtgggtacaagtgcggccactgcacggcggcggccggggtcagtggagcattgtatgccaaggcgcgccctctggtgctcccgcgccggcgtgatacccatggtcgagtccgccagaccgccctgaacgcgccggcgcaagtccccaagcctctagagccccgtcgtggccagccccctcgtctctggcgagctctcgccacgggaccaagcggcgccaccgcgcctgtgtccgcccccagccgttag

SEQ ID NO: 922 - DNA, 312 bp, Zea mays
  Peptide Sequence Number=SeqID_44297
atgaagaagaattccaagagcataaaaatcaagaaggccacggaaaaagggagaagttggcagggccagtcctcggatgagaatgggcacaaagacgacagcttcgtgggtgtcctctgtcagaacggtaaccccgcgccagattcgctaggaacacaactcctttggcggaagaacaccagtttcgacgaggtgcaaaagggggagatcgttacaaacttgataccgactcatcatgagttagcatcttcattccttggtcattacattacattacgctacactactacttacactatgctatactactaa

SEQ ID NO: 923 - DNA, 456 bp, Zea mays
  Peptide Sequence Number=SeqID_44298
atgtcgaccgactgctcggtgccaaaggttcacaacaaaccaataaaaagaccgaaaaaggattcaaaaatagagagcaaaggtcagccgaagtgtgctctggtctggcgcaccggactgtccggtgtgccaccggacagtgtccggtgcaccagggactccaactccgaactactctccttcgggaattctggaggccgctccgctataattcaccggactgtccggtggcgcaccggactgttcggtgtgccagcggagcaacggctacttcgcgccaacggtcgtctgcagaaggcattaaatgcgctacagtgcgcgccagagtctgagctgagccagatggcgcaccggatagtgaacagtatctgtctggtggcccagaagacagaagctccaatggtcggaatccaatggccaggtgacgtggcaggcgcaccggacaatgtccgttga

SEQ ID NO: 924 - DNA, 648 bp, Zea mays
  Peptide Sequence Number=SeqID_44299
atgaggctcactgatgctggtgatggtcaggatgctgctggtgaaattgctgctgaattacaaggtactccagacttcataattggaaactacagtgatggaaatcttgtggcatcgttgctatcttacaagatgggaattacccattgcaacattgctcatgctctggaaaagactaagtatccagattcagacatattttggaagaattttgatgagaagtaccatttctcctgtcagttcactactgatataattgctatgaacaatgctgattttatcatcaccagcacataccaagaaattgctggaagtgggcatctggatgaccggtcaaagcccatcctcttctccatggcaagactcgacagggtgaaggacataacagggctggtcgaagcttttgctaagtgcgctaagctgagggagctggcaaaccttgttgtcgttgccgggtacaatgatgtcaagaagtccaaggacagggaagagatcgcggagatagagaagatgcatgaactcatcaagacccacaaattgttcaggcagttccgctggatctctgcccagacaaacagggcccgtaacggtgagctctatcgctacatcgttgatacccatggtgctttcgtacagatatattcttga

SEQ ID NO: 925 - DNA, 920 bp, Zea mays
  Peptide Sequence Number=SeqID_44300
atgaacaaaacaccagcattcaagatgccattacaaacggaactccggttccgtcctcgcgggatggacgcggccaccgtaaggctctcgttcgcgtccccgctcaagggacgcgaactagacatcaaagccaaagagccggaggccggccccaacagttcgccttccccggcatggctggaggacgcctcctccgcagagctgggggatggtttccgccaccagaagctggaagaggaggtggccagccgacccgtgcgggaggtagagccctggctcgcctcgctctccgccctagcaaggatggtgaccactggcgaggtggtgcagccgggccacgtgatgaaaatccttgaagccgaacgatggctgaaaggtaccaactcccacgaagttgcgttcctccaacgacaaggcggaaggattgcgggtgtcccccatccgggggctcggaagccgtcgtgggctgagtcttctccaacacgctccaaggtcctccccctacggcgcgggggctgggtcccacgcgtcatgcaaactggcccagggagaagcaagcgacgcttcgccttcgccataatgatcgcgtcaaaaaaggctggcccctcggaggggttcaacagccgcctcagagcgcttgggttctgcgcccactactggtcagaggttcgaaggccggcccctcggaagggttcaacggccgcctcaggccactcgggctccgcgcccactactgatcaaggcgggaacgatcttgtaacggaatcccatcagagggaggcatcgagccctcggaccccgtcgaaaggggaccgggtccggcagatcaccagcagctcaccggagacaccatgttcggcgcccgccgagggcaacatggcgctccccccctcctccttgcagaaaggcgacgtaggggc

SEQ ID NO: 926 - DNA, 327 bp, Zea mays
  Peptide Sequence Number=SeqID_44301
atggccgaggcagagacgcccaggtcgttcgtgctcccacggctgtcgcggccgaagctgagcctgaaggagcggaaggagctggcctcatttttagtaccacttatgtcattaacattagcaatgaacttatatgtcgtcgtcgccatcagcgactgctcgaacaagcaattggaaaagagatatgatcttttttatgggcgaagtgttgaagatggctttggtgaaggaaatgtcttgttagcatcaagttttgtgaatgattttgttgtggtgcttgttgatggtttatgtgatgtggatctatcattgtgcaatactaattaa

SEQ ID NO: 927 - DNA, 1245 bp, Zea mays
  Peptide Sequence Number=SeqID_44302
atgtcttcgcgctcccttatgcaccgtgtctttccaccttccgagcccccagatgggggacacccgcaatccttccgccttgtcgttggaggaacgcaacttcgtggaagttggtacctttcagccatcgatcggcttcaaggattttcatcagtcagcccggctgcatcccctcgctggtggtcacccaagacggtgaccaccagcccctgggtggggagaagcaagccgggctgcgatcttggtcccgtcctcagcttcaaggatgttcatcatcctcgctggggcggaggccgggctgagccggagctctacctctcgtgcgggttcgtgggtcagcctctccttcagcgttcgagggagagggcgctcactggccctgcgagaggggcggacttcgacaacgcggggctggtcgacggcgggcgtcgtcagcctcagcgcgttgggctcgccggcttggctcccggtgccccctcctgccgcgggggcggttgtcgcgccgcgtgcacgggaggaccacccaagacatcgcgcgctgctagggcggcgttcgtgttctggggctgtcctgcctttgcaccggcggaggcggctcgagaagtccccgtcgccgacgggatcaccgccaccatccgcgcggcgtccgccctgaggccatcgctgctgcagttcggccacccggaacgggggtcgttgtcgctgctgtcggagcgggcgacggcgagccacccgtcggtcttctgttgctccgcatgccccccaatcgagtccctcggctcggtcggccctgctgtccgaggcttctcttgcttagttaaaggaacccctcggtcgctcttcgatgagccgaaaccaggggtagtggtgtcagcacggacagaggcagagttggctcaaaaagaagacttggtcggccagagcctggccgggtcgtccactggcgggaacgacaccgaaattgagttgtcgaggcctcgggccgggctaatgtcttcggaggatagctggccgaggcctcggggtgaccggccgagctgtctactcgagccggattcctggagaagaccctggcggcgatggcctgggtgtggtgatgatgtcgtccttcagagtggagatcctcggaccgcgtcgccatccgaggctaggtcggacctcgccgaaggtgtagttgacgccgagggtgctgctgctcccttcaaccgtcaagatccgagcctgcaggatcggattatcttgtag

SEQ ID NO: 928 - DNA, 354 bp, Zea mays
  Peptide Sequence Number=SeqID_44303
atggaatcacttgtgggtggacatggagtagaagggaaagaatccaagacccctatagaagcagttgctcaagtgttggcttcatcaaaatttcttcaaaatattggtcttgtacctgccacaaagaaaagcggcaatggtggtgatcctacacgtgtggcagaccttgaggcagaacttgaatcagagaagcaaaatactttagaagttagagctcagttagatgccctcaagaagaaggtagaagaatcagaacgagcaagggataaggagttagaaaagattaatgatctgcaaaaaggagcagatgagaccaatgctctccttcgtcgtctctttagcctcaataagtag

SEQ ID NO: 929 - DNA, 1083 bp, Zea mays
  Peptide Sequence Number=SeqID_44304
atggggagcgcccgtgttgctttcgtcttgctgctgttggaggagcgcaacttcgcggaggttggcacctttcagccattgctcggcttcaaggattttcatcacgcagcccggctgcattccctcaccaatgaagcaagccaggctgcggcctctgcccccccagcttcaaggatcttcatcatccttgctagggcgggggggcgagctgagccggagctctacctcccgtatgggtcggcgggccacctcttccttcagcgtatagaggagagggcactcaccagcctagcggagggggcggacttcgataacgcggggccgatcggccacaagcgtcgtcagctcgagcatgcctggttcgctggcccagctgcctctggcgcagcttccggtgccacctcccaccgctgggcggagtgtggctatctgcccaccgtacgggcggctgttgcgccgcgcgcaccgggggaccgcccaagacatcgcacgccgctagggcagcgttcatgttcttgggttgtcctgccctcgctccggcacgacgcctccgcgcaggggtcggtgctcgcccgtccgggaggacttgagtggggatctaccggtcgacaagtggctattgtcgtcggtgctgaggtggtggcagctggagaaggcttctctgctgacgagaccgtcagcgccacccgcagaccgatctccggctctttagctttgatagcttctcctcgcccctcgagtggggacgcgggcgagggccttgttgcagcagcgtctgccctgaggtcatcgctgctgttgtttagccgcccggagcggaggttgttgtcgctgctgatggagcaggtggcggcgagccaactggagtttgtcgtcctgcaggccctccgatgtggaggttgttcatacccgcaggagtggaaccggagttccgtttgtaatggcaccttgagtgtcggtgtctgttcattgtggctatcggggcctgaacatctaggtatttgggtgcaataccgtgtttcttcctcatttcgagcaccaggactcgcccgtcggctagctaaaccgcttaaccaagtgtga

SEQ ID NO: 930 - DNA, 3552 bp, Zea mays
  Peptide Sequence Number=SeqID_44305
atggcgatgagacagcgaaggcggtggcgatcatctccggatggcgaggagctaatcggagtcgcagaggccgtcaacgaggagaacgatcttcgttgcaccttgttttttgacgggtggatcaacattgacactggtgtgactgagaacgactcaatgacgaggcatgaggcacatagcggtggggaacgggggagcaggaatggaggcagggatcaccgaggctgggagttcttgcgcgtggcggggcatcggggatcacgagtgggacagtgggcgggggttgcgtcgggggtcgcaactactcggggtgccagggcgggggcatgtcgggaaatgtcagaggggtgggtggggtggggggtagtattgtccatggagggagaagagagtaatgacatagcgcttgagcacttgactgaggcgggcgctgcttttccatcggcggcctttcgtttcatcagatcctccgcctctattgggcgccgggcagccaagctgcaggcggatgggcgcgatagcgggaccacatcctgccgccgccgccgccgcctgcccctcttccactccgatccatggagcagcagctcctctgtggtggttgccacacgcacacgcctccgccgccaagcctcccctgcccctgcctccgccgccgcccacggaccctctctgtttcatcgaggtgccacgcgattcatccggaccagctgctgcgtgcccgcctcgtccccgacgtcaccaccagcgccaagctacaaccacgcgacgacgctctccatcggatccgagtcggagtcggagtcgctcatgactttagtttcgactccagacttaaatcaaggcttctatcctaccaagcatgctttcaagcgtatattgacgagcctgattaagcctggcggtggtgaatacggcaagttcttcagccttcccgcactaaatgatccaaggatcgataagcttccctactctatacgtgttctcctggaatcagctatccgccattgtgataacttccaagttacagagagtgatgtcgagaaaatcattgattgggagaacacatctcccaagctggctgagatacctttcaagccagcgagatgcattctaatggacaacactggagtcccagctgttgtagaccttgcagctatgcgtgatatgatgccaaagttgggttgtgatccctacaagatcaatccattgattcccgtggatgctgttattgaccatgcagtgcgagtggatgtagcagggacctatgatgcattggatagaaacgaggagttggagttccaacgcaacaaagaaaggtttgcttttcttaaatgggcatccaatgctttccacaacatgcaggttttccctcctggttcaggcactgtacaccaggtaaaccttgagtatcttgcccgagttgtcttcaacgaagatggcattctttacttcgacagcgtggttggcacagactcacacaccactatgattaatagtcttggagttgctggttggggagtaggcggtattgaagcagtcgttgcaatgcttggccagccaatgggcatggttttgcctggtgtggttggattcaagttgagtgggaagttacaggatggtgtcactactactgacattgttcttactatgacccaaatgctaaggaagcacggtgctattggcaaattcgttgaattctatggtgttggtgtgggcgagctatctttgcctgctagggccacaattgccaacatgtctccagaatatggagctaccatgggcttcttccctgtagaccaagtagcattggactatctcaaattgacaggccgaagcgatgaaactgtgtcgatgattgaagcatacctgcgagctaacaaaatgtttgtggacaagcatgagcctgagacggaacgagttttctcttcatatctggagctggaccttagtgaggtggagccttgcgtttcaggccccaaaaggcctcatgatcgtgtccctttgaaggaaatgaagtcagactggcatgcttgcctggacaacgaagttggtttcaagggctatgcggtgccaaaggaacagcaaggcaaagttgtgaaattcgacttccatggaaggccagctgaaatcaagcatggcagtgttgttcttgcagcaatatgtagctccacaaacacatcaaatcccagcgtcatgattggtgctggccttgtggcaaagaaagcctgcgaattgggccttgaggtgaagccatgggtaaagacaagccttacccctggatctgtggttgctaccgagtacttgaaacatagtggccttcaagattatctgaaccagcaagggttccatgtcgctgcgcatggctgcgccacttgtgtgggcaactctggtgacctggatggatctgtatccgctgctatcacagaaaatgatatcgttgctgctgcggtgctgtcggccaaccgaaacttcgaggggcgtgtgaaccctctcactcgggctaactaccttgcctcgccgcctctggttgttgcctatgctcttgccggcactgttgacattggttttgaggaagagcccattggagttggaaagggtggcaaggaaattttcttgagggacatatggccttcaaaccaagagatcgatgaggttgtggagtccagcgtgcagactcacttgttcaagaaagtgtacgactccatcatggaacgtaaccctaggtggaaccagctgccggttccaaaggaggcactgtacccatgggacgacaggtccacctacatccgcaagcccacttacctggagggcatgtccatgacgccgcctggcccgcccacggtgacggaggcctactgcctgctcaaccttggagacagcatcaccacggaccacatctcctactcggggaagatccccgagggcacacctgcggccaagtatctgctcgagtatggtgtggagcccaagaacttcagctcctatggtggccgccgcgggaacaatgaggtggtgatgaggggagcgtttgccaatatgaggatcgtgaataagcttcttaatggcgaggctggtccctggacgatccatgttcctaccggggagaagctctacgtttacgacgcggcaatgaaatacaagtcggaaggtcatgacatggtcatcatcgctggctccgagtacggcagtggcagctctcgtgactctgctgccaagggaccaatgctactgggtgtcaagtcggtgattgcaaagagcttcgagcggatccaccggagcaacttggtggggatggggatcattcctctctgctttcaagcaggagaggatgccgattcactcggcctcaccggacgtgagcgctacaccatccacctccctaccagcaccgccgagatcagtcctggtcaggacgtgaccgtcacgacccacgacggaagatcattcacttgcactcttcgcttggacacacagcttgaggtcacatacttcaaccatggaggcatccttccctacatggtccgcaacctggcggcacaaatgaaataa

SEQ ID NO: 931 - DNA, 297 bp, Zea mays
  Peptide Sequence Number=SeqID_44306
atggccgcgccaccggacctcgacgccccggcaacccggtgctcccaaccaaatcccatatgcgctacacgaagcacagggcaacgtgaaccggtggggaaggaactcacccgaaaacgcgacacagtagggccaggccacgatcggttgattttgttggagtccgcctcgatcggaagctgggaggcgactctgaccgcggggtttgttacgccagcagggaaagagctgaccacctgggcccgccaatcagcgacagaacggggagagcatgtaatccacagtggagaccgatag

SEQ ID NO: 932 - DNA, 450 bp, Zea mays
  Peptide Sequence Number=SeqID_44307
atgaacacgaaccccaaggcacggcggacacctcagggcatgcctcctacggcgaatcggtcggcggtgggccatacccacgccacggcgtggctttccccccttctgagcaagcttttgctcctcgagatttctgtggcgtctcaagttgatgtgggtgaagggaggcatcggttgattttgttggagtccgccgcgatcggaagctgggaggagactctgaccgcggggtttgttacgccagcagggaaagagctaaccacctggacctgccaatcagcgacagaacggggagagcgtgtaatccagtggagaccgataggtggcccctggatgtcggcgcaaggcattgctgggctgcgcaggtcttgtgcggctgccaccccgggcccgcgtgtcggcgtgcaggtgacgagctgggccgagggttcaagggaagtgggccggtga

SEQ ID NO: 933 - DNA, 726 bp, Zea mays
  Peptide Sequence Number=SeqID_44308
atggccaccgttgttgctgtcgcgcggcggaggaaggagtaccatgtcgtagctgccgtcgagggacatgaactcgagactcccgaaatggagcaacgtcccgggctggagaggttgctggagactacccatctagagcttgacgggaagctgttcgtcaacacgcagcaggcccctacctggcgcgccaactgtcggcgtttcgaccccggggggtccctggaccgacgagtaaattttcgctgcgtgccccagccgagatggcccaaggtcgggcaaggcgatgactcctccgaggtcgaggttgaggccgagccctggggtcgggcgaggcggagaccgtcttccgaggtcgaggttgaggccgagccctggggtcgggcgaggcggagaccgtcttccggggtcgaggttgaggctgagccctggggtcaggcgaggcggagactgtcttccggggtcgaggttgaggccgagccctggggtcgggcgaggcggagaccgtcttccgaggccgaggcgggggctgagccccggggtcgggtgaggcggagcttcctatggcgcttgaggctggactcggctgctgtcagcctcaccctggcgggtggcacagcaatcgaagcagggcagacggcgctgttttcctgtcaggtcagtcagtggaggggcgaagtgactgcggtcacttcggccctgccgactaaggaacgcgcgtcaggataa

SEQ ID NO: 934 - DNA, 342 bp, Zea mays
  Peptide Sequence Number=SeqID_44309
atggacatggcattgcccgttgtgaatgccacagcggcggtgctcgcccgtgtctcggctgccttcaatggccccctgcccgcgcagtcgtctttggggtccatattgatgtggccatgggagttttcaggtcacttggtcgtggaagggcttcttattgcagtcatagtgttccagctctccaggaagagctacaaaccaccaaagaagccactcactgaaaaggagattgatgatctatgtgatgattgggagccagagccgctatgccctccaatcaaggagggggctaaaatagatgctccaacattggaaaggtttgcactacagcttagtttctga

SEQ ID NO: 935 - DNA, 408 bp, Zea mays
  Peptide Sequence Number=SeqID_44310
atggcgcaccggacagtccggtgcgccaccgtttataataagtctgatctcaactcatacaacttccaaactggcatcatcacctccatagtggcaaaacagtgcaatagcaatgaatgctgtggtaagaaggtgaatcgtcaggatttttacaccaggcaaacagctgcttgcacccgctgcgcggtgggccgcaaagaccaaatagtaaacctgcagggtgggaccgctacacgctcggaaactgtatcgtttctcgacaacgagctcagggaaggtgtttttcggaccttcggcttcctgaagcctaagagacttttttcacggatcaagctcgttacgaaaaacgatctagcaccgcgaagggggtactgttgggtccatgcttcatcgccgaaggtcctgtag

SEQ ID NO: 936 - DNA, 147 bp, Zea mays
  Peptide Sequence Number=SeqID_44311
atggcgcaccggacagtccggtgcgccaccggtgagccaacggggaaagactctgtcgtggaccagcctggccccacctggcagagggtgcaccggacagtccggtgcacaccggacagtccggtgccccaaagccagaaacactaa

SEQ ID NO: 937 - DNA, 1590 bp, Zea mays
  Peptide Sequence Number=SeqID_44312
atggcggcggcgctgcgcttcccgggggtcgcgagggagtctctgtctctggacgcgcccgtcgccgcctccaagctcgggagggagcggcgcccggcccccgcgagcgcgaacccggggccgcaatgctggaggcggaggaggggcctggcggtgcgctgccagacggggtccaccgcaccgcccgtccttaggacggaggaggcccccgcggctgcggcgggggcaaggaatgcccaggcggggttcaccgtcgtcatgaagttcggcggctcgtcgctcgcgtcagccgagcggatgcgggaggtggccggcctcatccttagcttccccgacgagacgcccgtcgtcgtcctctccgccatggggaagaccaccaataacctcctcctggccggcgagaaggcggtgagctgcggcgcccccaaggcgtccgaaatccctgagctcgctgtcatcaaggacctgcatcttaggacggttgatgagctcggtttagataggtcgattgtttcaggtttattggatgaattggagcaacttcttaaaggagttgctatgatgaaagagctgacccttaggacaagagattaccttgtttcctttggtgaatgtatgtcgacaagaatatttgctgcatatttgaacaaacttgggaaaaaagcacgccagtatgatgcatttgatattggctttataaccaccgatgatttcacaaatgcggatattcttgaagccacttaccctgctgttgcgaagaggctacatgaagactggatggatgaccctgctattcctatagtcactggttttcttgggaagggatgtaaatcatgtgctgtcaccactttaggcaggggtggtagtgacttgacagctacaaccattggcaaagccttgggattaagagaaatccaggtttggaaggatgtagatggtgtgttgacatgtgatcctaatatatatgcaaatgctatacccgtgccctacttgacttttgatgaggctgctgagcttgcctactttggtgcacaggttttgcatccccagtcaatgcgaccggctagggatggtgatattccagtgagagtaaagaactcatacaatcgtcatgcacctggtactgtcatcactaaatccagagatatgagcaagagcatattgactagcattgtgttgaaatctaatgttaccatgctggatatagtgagcacaaggatgcttggccaatacgggtttttagcaaaggtattctcaatatttgaagatttgggcatctctgttgactgtgtggctactagtgaagtcagcatctcgttgactctagatccatcaaaactatggagtcgtgaattgatccagcaggcattcaacgttctgcgaagaaatggtgttaatgtccagatgatctcacaaggggcgtccaaggtgaacatttccttggtagtcaatgacagtgaggcaaaacagtgcgtacaagccctccattcagcgttctttgagaatggcttcttgtcggaggtagagggagctgacgttccccagaacggagcctctctgaactcaaatggcgctgtctatggaaactag

SEQ ID NO: 938 - DNA, 576 bp, Zea mays
  Peptide Sequence Number=SeqID_44313
atgcaagatgtcacacgacgtgcgctttcgcactactgctcagtgttcggtggggtggccgatggtctcgacatgaggtattacccccaccgtccatctggcagcacaggaggcgtggttgtctcacctgtcggtgaggacaatcctaggttgagcagcacagtcaacctagacgtcgtgctaaacacagagctggaccatgctttggatgagctgagtagggctcgtgctgagatcgcccagttgcgggctgagcgcgcggagcgccatcacctagaggatggctcccccgctctcctgccccgctatgcttctgaagatgtcaacacagatgccaagaggcagtatcgtttcttgaggggcttagtcgatcccatgcactatcagctgatgaatcataccttacccacatttcagcacttgattgacagagaaatcatgacagagaagaagtgcaaggagatggaggatcgcaagcgcaagattggtgggcctcagcctggaagcagcaatcgcccccgtttcttgggcaacccgccccagcagttcaagcacaatcagcgcctgcctcagtag

SEQ ID NO: 939 - DNA, 582 bp, Zea mays
  Peptide Sequence Number=SeqID_44314
atggctcatccgaggaaaaatgggcaagtggaacgtgccaacgacatgatcttacaaggcctcaagccaaggatcttcaacgagctgaacaagttcggctccctcgacttcctcgccatcgccacaggtgaactccgcctcgtcgacctcgacatgtctgctgtcacaagtgtaggacccacgcgctccactaggagcaaggcgaagaagcagcgcctcaagaggtgcgccaccgccctgaagcagcaccttaatcgactcgtcgccaccatcaagaagcaagtggaagcaacctccctttcaacactcgtggctgtcatcggccaccaaccaacatacatcctggacctaatcaaggaagactcaagccacggcttgactaagccagactttgatgtcaatgaggtggctgaaagggcctgtttcatggcaacaccaccatggaacgataatggtggaggggatgaggagtcccctaaccgagaagaagagtgccaacaccaggcgtgcatcctcatccgtaaactcgatcagatttatggcaacatcgagcggaagcgccttgaggtcgagaagccttag

SEQ ID NO: 940 - DNA, 393 bp, Zea mays
  Peptide Sequence Number=SeqID_44315
atggctgcacgacgacgaggcgagtcgggcaagatgcgaatgcggacagcgagcgtgggagctgtgcaggcggctgtgcaagcgcacggacgcagcggggacgcggcgaagcacaggacgacgcggggacgcggcgaagcacaggactacgacgcgatgcgcttgcagtgcggcgaggcgttgtgcaggctcgatggctcaactccgggtgcgaatgcaggtgtaaaaggttcacactcagccaataaaaagatcaagttttggattcaacaaaggagcaaagaggcaaccgaaggccctctggtctgggagcaccggacaatgtccggtgcaccagaggactccaactcaaacttgccaccttcgggaatttccaaggcactcgcgctataa

SEQ ID NO: 941 - DNA, 609 bp, Zea mays
  Peptide Sequence Number=SeqID_44316
atgaacaaaacaccggcattcaaggtgccattacaaacggaactccggttccacctccgcaggtacgaacaaccccacacgattggggggcctgcggagcaacagaaggccgacggacggctcgccgtcgcctgctccagcagcagcgacgacgatgacttctgctccggggggccgaacagcagcagcgatgacctcagggcggatgctactgccataaggccctcgcccatgccctcactcgagaggcaaggacgggtagaaggccgtagagttggaggtcagtccgtgggcggcaccggctatctcgtcggtggagaaacctcttccgactgccgtggcggaagacggcgccggaagcggcttcgaagccactcgggtcggagagccgggcacgcggcagctgccagcgcctcgaacggcgaacgcccttccctccgatcactgagggaaggagcgggccgccgcccgcgcagggaccgaccccaactcggcgcactcccctccccagcactgatgatgaaaatccttgaagctaagggaggggcagaggccacagcccggcttgcttctccccacccaggggctggtggtcaccgtcttgggtga

SEQ ID NO: 942 - DNA, 642 bp, Zea mays
  Peptide Sequence Number=SeqID_44317
atgaccgcgttaaaaaagggaccaggaaagggggataccccgaaaaggatccttccctgtgaaggaaccaggctccgagcctccctactgatcagaggttcgaaggctggcccctcggaaaggttcaacagccgcctcagagcacgtgggctccacacccactactggtcagaggttcgaaggccggcccctcggaagggttcaacgaccgcctcaggctactcgggctccgcgcccactactgatcaggggttcaaaggctggcccccgaaggggatcagtccattcgagggactcaatcgcgcctcgcccgagcccagcctcggacaagggcagccgaccccggaggatctccgcctcgcccgaggcccccctccagcggcgaatacgttcccggctcgcccgaggccctgtcttcgccaagaagcaaccccgaccaaatcgcaggagcatttaatgcaaagcgccgcctacgccgctccgactgtggtgccacttgacagagtgaggctgacaggcagtcgggcccggccgcacaccatgggaaactccgctccgcccgacccatggctcgaactcgggctaagccccggaagacgacgaactccgctccgcccgacccagggctcggactcgggctaa

SEQ ID NO: 943 - DNA, 321 bp, Zea mays
  Peptide Sequence Number=SeqID_44318
atggcgcctcctgttgacgtggccggtccgcgccctaggttgggcgatgtggaggctcctccgaggtcgaggtcgagtccgtcttccatggccgaggccgagtccgagcccctgggttgggcgaggcggagttcgtcgtcttctggggctgagcccaagtccgagccctgggtcgggtggagcggagttcgccgtcttccggggcttagcccgagtccgagccctgggtcgggcggagcggagttcgccgtcttccggggcttagcccgagtccgagccctgggtcgggcggagcggagttcgccgtcttccggggcttag

SEQ ID NO: 944 - DNA, 444 bp, Zea mays
  Peptide Sequence Number=SeqID_44319
atggccttggttgccccgcctcctcctcctccgtcgacggggaagaggacggggcgagctcgaaggttgttcttccaccacgcggggaagacgtcgtcgatcccaccgccggcgggcggactgttggtcgccactgtcgctgtcgcccggcagtggaaagagtatcatgtcgtagctgccatcgagggacacgaactcaaggctcccgaaatggagcaccgtcccgggccggagaggttgctggagactacccatctggagcttgacgggaagctgttcgtcaacacgcagcaggcccctacctggcgcgccaactgtcggcgtttcgagaccggggggtccccgagccgacgagtgaagtgtcgccgcgtgccccagcccagatgggtcgacgcgaggccaagcgcgaaggggggaaagcgaggtggccggagatgggcgtga

SEQ ID NO: 945 - DNA, 909 bp, Zea mays
  Peptide Sequence Number=SeqID_44320
atgaaggggtattcaccctcatcaccttgtgagtgggatgaccagggactccctggtttaggggagggcctcaggtgttggctcagccggtcactcaatctgaactcgtacggtccaaaccccagggttatgaaggctggggagcaccgggaggataaggagggggaatgttttgtccggtttggacatggcggtggccttactcctttcggtataactgttaagatggaaggctctttggtcattaggacatcctactgctcagaggtggaaggattccctcatcacttgcggagttgtgcgcttcgcatggggatccgcaagaagccagacaacaaaaatacccctacctggaggaaaagacttcaggccctgtcaagaagagatcctactgaggatgaccccaccatcgtctacatggccggatatctccacactctcgataaccactatgacgacctttcctcccactgcacccacctaaactcccgggtggaaagcttagagcaacaggtcaaggaacttaaaaaggagaaggtgtccctccaagaaagtctcgaaatagcagaaggtgaagaggccaacactcgtgaagcctaccgaaccctgaagatggattacgataagaagctaaagaagctcgcccccacgaagaaaatccggaagaagaccaagaaccaaggatgccagactgagcggaagaaggaagcccctccagcactacctccctccaggatagagaacttgtccgacgtcgaggatatgtccctagctagccttgacgaccttctcaaggaatttggggacactttagaaagggagttcagaaggtttcccctaggagctgaaggagaagccggtggagaagggagtgagacccaccccccgcacctccggagctgccattag

SEQ ID NO: 946 - DNA, 321 bp, Zea mays
  Peptide Sequence Number=SeqID_44321
atggcgcctcctgttgacgtggccggtccgcgccctaggttgggcgatgtggaggctcctccgaggttgaggtcgagtctgtcttccatggccgaggccgagtccgagcccctgggtcgggtgaggcggagttcgtcgtcttctggggctgagcccaagtccgagccctgggtcgggcggagcggagttcaccgtcttccggggcttagcccgagtccgagccctgggtcgggcggagcagagttcgtcgtcttccggggcttagaccgagtccgagccctgggtcgggcggagcggagttcgccgtcttccggggcttag

SEQ ID NO: 947 - DNA, 609 bp, Zea mays
  Peptide Sequence Number=SeqID_44322
atgcaggcggcatgcaactgcgccaagtgggcgcacccctccgacttccaacgcacccagcatggaggcccaggcccacacgtcatgcaaccggcgcgctggttgctacgtgcgagcaactgcaccgccactcgcaccactaccgcgcctcctcgactgcggaaccaagtaccgcgactcgaggcaaccctgcgtatgacccaacagtgccagccaggcgcatcgatcacgggccagtcagccgcgggagaaggcgcgacggtcgatgcggccaaaaatgggccgacagtaatggcagtggcaggcgggcagaagcagcgggaccgggaaagggggataccccgaaaagggatccttctccgcgaaggaaacaggccccgagcctccctactgatcagaggttcaaaggctggcccctcggaggggttcaacagccgccttagagcgcttgggctccgcgcccactactggtcagaggttaggtcggcccctcggaagggttcgacggccgcctcaggccgttcgggctccgtgcccactactgatcaggggttcgtaggctggccctcgaagggttcacagtcgcctcagacacagagcgagggatga

SEQ ID NO: 948 - DNA, 765 bp, Zea mays
  Peptide Sequence Number=SeqID_44323
atgacggtggagaaaggccacgggtcgcgcggagcaacaatggtcacccggtcggccatcaccaagcagaggaggagaagcgggtggcgcttcgccttcgccataatgaccacgtcaaaaaagggaccgggaaagggggataccccgaaagggatccttctccgcgaaggaaacgggccccgagcccccctactgatcagaggttcgaaggctagcccctcagaggggttcaacagccacctcagagagctcgggctccgcgcccactactggtcagaggttcgaaggctggcccctcggaagggttcaacggccgcctcaggccactcgggctctgcgcccactactgatcaggggttcgtaggctggccctcggagggctcgggggctgctctcgcaaacccggctccggccaaaccattgacggcgtcaacataccagcccgagaacttgggacccgaccgtgcacccgggctacggccagctcgcatgaggcgccataggaagctccgcctcgcccgacccagggctcggactcgggctcagccccggaagacgacgaactccgcctcgcccgacccagggctcggactcgggctcagccccggaagacgacgaactccgcctcgcccgacccagggctcggactcgacctcaacctcggaagacagactcgacctcgacctcggaggagcctccgcctcgccctacccagggctcggaccgaccacgccacaggaggagccatcattaccctacccctag

SEQ ID NO: 949 - DNA, 1098 bp, Zea mays
  Peptide Sequence Number=SeqID_44324
atgtcttcgcactctcctcatgcatcgcgcccttccaccttccgagcccccggatggggagcgctcgcgttgctttcgtcttgttgtcgttggaggaacgcaacttcgcggaagttggtacctttcagccatcgttcggcttcaaggattttcatcaggcagcccggctgcatcccctcgccggtggtcacccaagacggtgaccaccagttcgagggtggggacaagcaagctgggctgcggcctctgcccctccctcagcttcaaggatgttcatcatcagtgctggggaggggagtgcgccgagttggggcctatctccgcgcggacagcggcccgctccttccctcagtgatcggggggaagggcgttcgccgtccgtggcgctggcagctgccgcgtgtctggctctccggcctgagcggcttcggcgctgcttccggtgccacctcccaccgaggcagccggaagaggtttctccgccgacgagatagtcggtgccacccgcggactgacctccagctctacggccttggtagcttgtcctcgcccctcgagtggggacgtgggcgagggccttgtcgcagcagcgtctgccctgaggtcatcgctgctgctgtttggtcgcccgaagcgaaggtcgttgtcgctgctgcaggagcgggcgtcggcgagccatctagggaatccctcgactcagtcggccttgccgcccgaggcttcacttgcttagtcgaagaaaccctcggccgctctgcggtgagccggggccgagggcagcggtgtcagcgtggacagaggcggagttggctcgaaaaaggaagcttcgtcggtcgaggcctggccgggtcgtccactggcgggatcaacgccggagtcgagttgccgaggccacgagccgggctgagtggagatcctccgaccgtgttgccgtctaaggctcggtcggacttcgccgaaggtggagttgacaccgagggtgctgctgctcccctgcccttgttgtctgaacctgcaggatcagctttgtctgtagtggcttgctcgtcggtagcagaatcatttgtccgagctagagttatttctcacgaaaggtga

SEQ ID NO: 950 - DNA, 513 bp, Zea mays
  Peptide Sequence Number=SeqID_44325
atgcaggcggcatgcaaccgcaccaagggggcgcaccctttcgacttcgacgcgtccagcatggaggcccgggcccacacgtcatgtaactggcgcgccggttactacgtgcgagaaactgcaccgccactcgtgccagtaccgcgcctcctcgactacggaactggtgccacgactcgaggcgaccctgcgcatgacccgacagtgccaaccgagcacatcggtcacggggaccgggaaaggggatacttcgaaagggatccttctccgcgaaggaagcggccccgagcccccctactgatcagaggtttgaaggctggcccctcggaagggttcaacagccgcctcagagcactcgggctccatgaccactactggtcagaggttcgaaggctggcccctcggaagggttcaacggccgcctcaggccactcaggctccgcgcccactactgatcaggggttcataggctggcctgaaagggaattaggcttacacctagtccctaattaa

SEQ ID NO: 951 - DNA, 420 bp, Zea mays
  Peptide Sequence Number=SeqID_44326
atgagcaaatctgatcccctcttcatggagcggtcgcggttcccaggcgaagtcgaccgtggtcgtcgttcgctgtcgatgcaggagccggaggccgatcatgccaagcatatctatcgtatttgcaatgagaagctacccttgggtaagggcttgactgcatttgaggttaaagaacttcgtgaagcacttgaatttgccgccgaaggattggagctggattcccttttttgccaagaggatttggatgctactgttaaggaggaacaattggagcatgacgagaaggtggctttagagatgattgaaagcccgctaccttctcctgattcggactgcttcctatcccttgaagaacacattgagaagttttggggcgttgattacaactcagaccagatgcctagctactccgactag

SEQ ID NO: 952 - DNA, 192 bp, Zea mays
  Peptide Sequence Number=SeqID_44327
aggatccggggtgtagttcgcttcgtcgtcgtgccgtcaatggggctcggtgtacgcggctcgctctgccaagagacattttggtttacagatggcaatgagactgatggttttggttatgactatggtgctggagaagatgaagctgtggaaggagacttccaggagttccaagactacgacgagttctag

SEQ ID NO: 953 - DNA, 984 bp, Zea mays
  Peptide Sequence Number=SeqID_44328
atggctcgacttagacacactgcacgaaagtccgtcatccccttcttaccctcccgccttgctgagcgtccgcttcgccgtcccgtggccggacagtccagccacttggagagactgcatcaccgcctgcatgaggagcaggaacgtcgacgacaggagcagcagggctcttctttctcgctccaacaggagatagagtctgtgaggagctgctcccctgtgcttcccctggaggcgccccctgcaccaccactgggcgccccagcctctggagtagctgctggaggagacccagacgacggaggtggcgacgacagctcgagccacgacaccgacctctctgctgaccaggagccggaaggatgggttgctcgacccatcactcgcgacgctgctcgcgggtgtcacttccacgatgcactcgacaccctgctacgtcgggcacttaaccggcgtacttggtccatcgagtatcgttgtgtggtctaccagcacagtcgcggggtctacccggaccgctgggaggcgacttgcttagtgcgccgtccggagaacagtctccagggtgcggaggcctgcttagagcactattctatctctgagcgggactcagctgaggcagccatgcaagatgctgcacggcgtgcgctttcgcactactgctcggttctcggtggggtagctgacggtctcgacctcacaggaggcgtgattgtttcacctgctagtgaggacaatcctaggttgagcagcacagtcaacctagccgccgtgctaaacacggagctggaccatgcactagacgagctgagtagggctcgtgctgagatcgccctgctgcgggctgagcgcgcggaacgtcgtcacctggatgatggttcccccgctcccgtcgggactcagcacccgtaccgctcacctcggtgtggacaccagtcttatggcaatcccgactgcaagaccaagataaatctagaagcatag

SEQ ID NO: 954 - DNA, 1239 bp, Zea mays
  Peptide Sequence Number=SeqID_44329
atggagctcgccgagcgccctctgcctgctagcgccagcagccacgccgctgcttgctccccttccttctcccttctctgcttcccctgctcgccatggaactccctgcgtcgagctcggctcctgctccagattgctcggctgcttcgggcagatgctggggcgctcgattccccagcaaaagttatccgctgcatgcccctatttgccgagcacttcaggtgggggcgccaggaggatgcatacgagttcctccgctatgtcgtagatgcctgtcacactgctgacctccgcatgcacaagcggttacgtgcagcagctgctagtggaaactgtggtgaggatgtccgggggcagggggtttgtctgtttatgagggagacatttggcggggcattactgcgtcaagtgaagtgccttgagtgcaagggagaatctgacgagactgatgagataatggatatcagtctcgatctacctgggagcagttctgttgctgatgcccttgctcggctctgtcctatgctccagctcaccccctctgtttgttctcactactgggtcgggtctgcttggcgggcacaccaccatgcccgtggaattcctcggacctctctcctccgtgttggccgaagccatagaaattctttgctgcgcccagccgagtttgcccaggtcacaagcatctatgtcctcgcctcgtcgtgctcgctggtcgtgcatccttgcagttccttgcttgtgatcgcaagcgctcgaagtggaaaaacagagttgataaagaagaaagcaaaaccgtatagttcgtgcattcatttagtgtggaattggtgctatgaattttggggaaggaattccgagaaattagtggacggtgatgatgatgttcgtgcgatactcgtcagacgctcgaccaaaaagcctaattcgggagtggctactccgtcttcttcgtcatgtgggaatcgtcgtgctgacacgccaataccgtcgatcgtcatcccctgttcgatctcgtcgtcaaacttcgcctcagccctagtcgtcgtctttcacccaccagctcgtcatgagacctggtgtcgagctcctttcctaacaaatgccgaacctgcccctgctcctgcgttcgccaacagccttaactcgtcaatcacgctcgcgagatgttcaattgaggacttcagcggaaggccatcgtcgttcaggcaactaccaagtcaaattgcgacgtggtga

SEQ ID NO: 955 - DNA, 1896 bp, Zea mays
  Peptide Sequence Number=SeqID_44330
atgaccaaggaccatcaagacgctgcgcagaagcgccgggcggttatcaggatggcggatctgaggcgtgaggcgaagagagcgcgggggagcgcgatggctgctgccttcggcagcagccagccggtgccggctgcgaaatcggccgcgcctgggtccagcaagtcgtcggcgggcgtgaagacagccgctgctggcgggaccaagtctcccctggccgaagctgcgaagggacgggagctgccctcgccggggaaacgagttaccgacttcggcacgaacatcagcgtggaggactattttgttgggtccggcgagggacagatggttgttgtcccgccttcggtggcaactgctttgccattggcggaggtaagggcgagggggaccgcgcaggacccgtgggccgccttctgcgtgagcggcgagattctgacagccgctgccgctaaggacgtggcgggcaccatgtcccagcggctgagggaggcatcgcagcggctgtcgcagcagctaagtcaagcggctgacttcgccgaccgcgttgcgtctggtgtcctgactgcggacgtggctgccgaagttgagagacttcgggcacagcacgcggatgtcgtccgggagaagtcggtcgtggagagcaaaagtcgccggttggcggagaaagctgcgcaggcggaggccaaggtggcacgggcggagggaagtctcgccagccaacgcgccgaggagtgggaggtgaggttcaacgccctgcgcggccgcgtggataaggccgaggcctctacgcgctctgaggttgagcggacgctcgcacagttcgtgagctcgtatcgcgagctgggcgcgcgtactgctgacttcgaagtgcccgaccgggaggcgggccttcgcttcctcgaatggttgcaggaggagttgttggtactcccaaccatcgtggaaggtttcatgtcctttgcctccctcgtcacctgcgagggggccatgaatgcgttgtcccgcgagggctgcagacactacgaggttttcgaccaagcagatgagagctttgagcgcgaaatcttcaaggccgaagaccccgttgtgaagcagtcagcggggggcctttttgataggatgtggggggcacatggtcgggaggctgtcagggagcgatccgactgggcgagagagcaggtgaagatggagcatgtcgaggatgttgaggactttggaagtctggtcggcgtgccgcccgaggctgtggaggtcaatccggtgctgcccttggacgccggcgaaggcccctcgaccgtggtcgttcctgctatggccggcggcgaagaccctgtgtcggcccctgcgccgacgatcgaaggtgccctgacggtggcggatgagccgccagtcgaagaccccacgaccgcggccgggacctcgcagggttttgggcctacgcacgcaaccgctactgacactgctaattttatggcagcttcgaccgtggtcgctgaagatgtttcggatgattctgtgtctaagttttttgagtctggtgattctgggggttcggttgtgtggacggaggagtcttcggatgaagacttggattattttgtggcactggatgtggctgcggtggaagcttctccgcgcgttgtgggtgttgaagttattcctagtgcgagtgctgggcgtaggcggcgaagggcggtcgcgaagcggagggttagtgaggtggagggaagtcatcttcgtgtggacggggctggcaaacgagaattgttgtccttgccgactgggacgagtgtaggtgagggggagttgcggaatctttttgagggtgaggagctgaggataatgctgttcaactacagggagatgggcatcatccctaaggttgagccaatgtaa

SEQ ID NO: 956 - DNA, 264 bp, Zea mays
  Peptide Sequence Number=SeqID_44331
atggaggcaaaacgaccgacagctagggatggcagcgggtcgggtaaagtgcgggtaagccatttacccgcccgccagcatatccgcgtctctggtgtttacccgtacccgcgagagcttgcgggtaaaattttcgacccgtatccgtacccgcaggatatccgcggatatcgggcaacccgttacccgccagaaaataacatgtgtgtatgtgaccatgttcatttcactaaatgcatcaacagtttgacagacataatataa

SEQ ID NO: 957 - DNA, 519 bp, Zea mays
  Peptide Sequence Number=SeqID_44332
atggcgcaatgctcagctctaaccatcctctttggtaagccttacacttcacgtgagctcccacctttgaaggttggacagctacgacgtgacgctatcgaagggcctcatggaccacgacaccaagttggatctacaactgttggcacgggacgcggacctcaagcgccgcctctccgatctcgacgccaagtgggatacacgcatctcaacgatgtccgaggccagagagacacgagtgtcgcgcctgaaataggccgcaacatccttcgacgcttggcgcccagacatggaaggcgtcgaggacgacattcgcctccacgtcaccaagttgtccaagctatgcaagcgctccgccatcgatcaacctacagtcatgtcaggggtgctcgctccatctccatcgtcaacaacgccgccgtgcgcccatctgctgttggcgttatggccgcccgaccaaagggcagcacattcaacatactccacaggatgatggttttggagttgttacaactttaa

SEQ ID NO: 958 - DNA, 54 bp, Zea mays
  Peptide Sequence Number=SeqID_44333
atgatgctttttcagaaaaggagaacgatgcttacggaattggaatcttactaa

SEQ ID NO: 959 - DNA, 816 bp, Zea mays
  Peptide Sequence Number=SeqID_44334
atggcggatgctggggatgccgtggtccgcgtcccctcgctttcccttgccgtcggcgagcctttggccggctattttgctctcctcgtggagatacctggagagaacgatctggttgaggagcccgaagaactcgcaggagaagcccctgagcagcagtcgattggtggaggcaaccacttggagaggctgcaccaccgcctgcatgaggagcaggagcgtcgacaacaagagcaggagcagcagggctcttctttctcgctccagcaggagatagagtctgtgaggagctgctcccctgtgcttcccctagaggcgccccctgcaccaccactgagcgccccagcagctggagtagctgctggaggagacccagacgacggagagcactattctatctctgagcgggactcagctgaggcggccatgcaagatgccgcacggcgtgcgctttcgcactactgctcagttctcggtggggtagccgacggtctcaacctgaagtattacccccaccgtccatctggcagcacaggaggcgtgattgtctcacctgttggtgaggacaatcctaggttgagcagcacagtcaacctagccgccatgctaaacacggagttggaccatgcattagacgagctgagtagggcttgtgctgagatcgcccagctgcgggctgggcgcgtggagcgtcgtcacctggatgatggttcccccgctcccgtcgagactcagcacccgtaccgctcacctcggcgcggacatcagtcttatggcaaccccgactgcaagaccaagataaatttagaaccatag

SEQ ID NO: 960 - DNA, 159 bp, Zea mays
  Peptide Sequence Number=SeqID_44335
atggtgctcggcgtggcgtggccctccctcgcaccctcctctccccagcgcggctcggcgcgcgcggtgcccaggatatggatgtatgtttgcactcgcatagataacggtctggttgcggagtccgaagagatcgcaggagaagaccctgagcagtag

SEQ ID NO: 961 - DNA, 630 bp, Zea mays
  Peptide Sequence Number=SeqID_44336
atggcgcttcctgttgacgtggctggcctgcgccctaggttgggcgacgtggaggctcctccgaagccgaggtcgagtctgtcttccatggccgaggccgagcccgagcccctaggtcaggcgaggcggaggtcgttcggcagaggccagggcggagtccgagccctggggtcgggcgaagcggacccgagtccgagccctgggtcgggcggagcggagttcgtcgtcttccgggacttagcccgagtccgagccctgggatcgggcggagcggagttcgccgtcttccgggacttagcccgagtccgagccctgggtcgggcggagcggagcttcctatggtgcctttggcaggacctgactgcctgtgagtctcactctgtcaagtggcactgcagtcggagtggcgcaggcgacgctgtccttctgtcaggccggtcagtggagcggcgaagtgacggcggtcacttcggctctgccgggggcggcctcgggcgagccggagatgtgtccgccgttggaggggatcctcgggcgagacggaaatcctccgggctttatgctgatgggggttaccagctgagaattaggagtcttgagggtacccctaattatggtccccgacagtag

SEQ ID NO: 962 - DNA, 1580 bp, Zea mays
  Peptide Sequence Number=SeqID_44337
agatggaaaaagagccacttgacatggttgagagctcagttcgagtcatcgagacacatgtcgacatcattcgcagtctagtgactgatggggttgtggatactagtgaaccagaatcagtgtacacacttaagaccactttgtttcaaattggagatgtttgtgacatgcttgagaagtgtgctctgtccatcaaaaagtatgctgactccaagagggctaaaattattcaagatgaagccctgcaatatgctgaagatgatgaagctgcagatgatttggaggaactcccaagcccagatctccttactcaagccgacatattggaaaatattttggaattgagacttgttaactacaaggataatcctgtcccgccacactatgttgtggtccaagttctagagatcacagacagtggttgtgaagattgggagataggctttccagttgaggggatcataactttgcaggaggcaatgaacgagttggtcctttggcatcgacgcaacatcaagttgggtgatgagccgatcttaagccatgtatcacgtcataagtcaccaacaccgaattcaacaccagtgcaactgaaagatagttcgatcattccataccccatggtgcaggaaaatatagcaccgacctccacaaaaatcgttgaaacaatcatatcacctcttgcgaaggaactcgacgagggggacgtagacaaaattgttcctcagaatgtcgacgcaaacatcaaaaaggaagcaaaggttgacaccaatgttgaagggccaactacttcaaagaaaattcatcagcgaatcgccactgacgatgtcaagaaaccgtcagaatcaatggcacgctacctgcataaattgcagagagttatgacaaatcaatcaaaagcggaatcagcatctcgtggagtacgcacacggtcccaaatagacaatttcgaagtatgggaagaagatggaatgattcatactcgagaatcattacgccttaaaatcaatatcccggtatacaagaaggaggctgttcctcctaaatttgtgaatgggaggccattcttgatgatggtgcaactttctaagttgtcgactccggagattagaatgcatgagtggtacatggtggctagcaacaaatacaaactcgaggacttcacatttgttgtgccagaagatgcattttggagcaaagataatatagatcctgtgcggcatttattctttgatgatctctggtcgttgtaccaccgacaaaggatggaaaccaactacctaaccctcttttgctttgcataccgtttttattggaaagatcttgccggcgaacatccagaggacaagcctaatttgtcaatatcattatttccatatggtgacaaacaacctccgggtactatactgtgcggttattatgtatgcgaatggtgtcgtgtcaccttccattacatggtcaatcgtgaggatgttcctaaatccaagatcaatgctgaatggttagaaagagatatggtttccgtcggcgtggctaaggttgcgctgcaccacaagcggttcctggaaccacctgtgtag

SEQ ID NO: 963 - DNA, 531 bp, Zea mays
  Peptide Sequence Number=SeqID_44338
atggcgcttcctgttgacgtgactggcctgcgccctaggttgggcgacgtggaggctcctccgaagccgaggtcgagtctgtcttccgtggccgaggccgagtccaagcccctgggtcgggcgaggcggaggacggcggagtccgagccctggggtcaggcgaagcggagttcgtcgtcttctggggctgagcccaagtccgagccttggggtcgggcggagcggagttcgccgtcttctggggctgagcccaagtccgagccctggggtcgggcggagtggagttcgccgtcttccgggatttggcccgagtccgagccctgggtcgggcggagcagagttcgccgtcttccgggacttagcccgagtccgagccctggggtcgggcggagcggagttcgccgtcttccgggatttagcccgagtccgagccctgggtcgggcggagcggagttcgccgtcttccgggacttagcccgagtccgagccctgggtcgggcgaagcggagttcgccgtcttccgggacttag

SEQ ID NO: 964 - DNA, 828 bp, Zea mays
  Peptide Sequence Number=SeqID_44339
atgtcttctcgctcccttatgcatcgcatctctccaccttccaagcccccggatgggggatacccgccgtcttttcgcctcatcgttggaggaacgcaactccgtgggagtcggtacctctcagccatcattcggcttcaaggattttcatcatgcagcccggctgcacccctccaccggcggtcacccaagatggtgacctccagcttgatggtgggggaaagcgagccgggctgcggcctctgcccctccctcagcctcaaggattttcatcaccagggctggggaggggagagtgccgagttgggctgcagcgtgcctggctttcggacgcgagtggcttcggagccgctcgtggcgccggcgtctgccacggcagctggaagaggttcctccgccgacgagatagccagggctgcccacggaccgacctccaactctacggccttctgcccgtccttgcctcacaagtttgggcatgagcgggggcctcctagcagcagcacccgccctgaggtcagtgctgccgctgttcggccccccggagcagaagtcgtcgtcgtcgctgctgctggagcaggtgacggcgcgctgttcgtcggtcttctgttgctccgcaggcccacccctatcgagtggggttactcgcctgttgattatctgaaccgcttcaccaagcatgagtcgcctcgtgtcaaggtgacgagtgagaccgcgtcgccgtccgaggctaggtcgaaccttgccgaagttgtcgtcgatgccgagggtgctgctgccccctcccagcgtcaagacccgagcctgcaggatcagattgtcttgtag

SEQ ID NO: 965 - DNA, 339 bp, Zea mays
  Peptide Sequence Number=SeqID_44340
atggcgcttcctgttgacgtgactggcctgcgccctaggttgggagacgtggaggctcctccgaagccgaggtcgagtctgtcttccgtggccgaggccgagtccgagcccctgggtcgggcgaggcggaggacgttcggtagaggccagggcggagtccgagccctgggcccgagtccgagccctgggtcgggcggagcggagttcgccgtctttcgggacttagcccgagtccgagccctggggtcgggcggagcggagttcgccgtcttccgggatttagcccgagtccgagccctgggtcgggcggagcggagttcgccgtcttccgggacttag

SEQ ID NO: 966 - DNA, 852 bp, Zea mays
  Peptide Sequence Number=SeqID_44341
atggccgccgccgtcccagccatctccctggtggccgacctcgcccctgccccagccacagctcccccttcggccctgctgctgcaagcactcagcctctcccatggcacacggagaaatcccatgatttgggggaagacgaagtccaagcacaacccctgccaatcgctcgatgaaaaatctaaaccaaaaccctcagcgttttcatgggttccggtgggattttatgttggtaaggatgatatggactcccgcccaaagctgtttggtattcagaagcaggttttggcgctgtacaggggattccttcggacagcacgccttaaggcccctgaagaacgccgcaggatcgagtctgttatcttggcagagttccgtgacaacgcaaggagtgttgaccgtaggaactttgtacacatagagtacttgttgaggagagggaagaagcagcttgagcagctcaagaatcctgatattactagactcgctacccttgtagtaaagaatgaggatcacttggatgtggtaaatgctatactggacactgatgatagctgcataaggattgtgcggaaaaacgggaagacatccctacatactgctgcaaggattggataccatcgtattgtcaaggcactcatagagagggatccaggaattgttccgatcaaggataggaagggacaaactgcacttcacatggctgtgaaaggcaagaacacagatgtagtggaagagttactgatggctgatgtttccattctcaatgtgcgggacaagaagggaaatactgctttgcacatagctacacggaaatggaggccccaggggtctggaataacaggagcctga

SEQ ID NO: 967 - DNA, 369 bp, Zea mays
  Peptide Sequence Number=SeqID_44342
atgcaagatgcagcacgacaagcactttctcagtattgctcgttgtttagcagggtagatgatggcctcgacctgaagtactaccctcgtcgttcgattggcagtgctggaggtgtgattgcctcgccagttggtgagggcaatcctagactgaacaacatggtcaacttggctgtcgtgctcaacacagagttggaccatgcccttgacatgttgggcaagatgtctgagaataggcacagaggtgcgaggcgtgctcagcctgaacagcaggcaccccaagaggaggcagcctcgcagcagcatttgccaccgccaccaccgatgaccattgagcaaatgttcttgatgcagacccaagcagtctag

SEQ ID NO: 968 - DNA, 567 bp, Zea mays
  Peptide Sequence Number=SeqID_44343
atgtccttaagcttctgccacgacgtgatggtccctggccgaagagaagaataccatgtttgggctacattctggactgccatgacgaaggacttcgccatgactacagtgttgcccccatacgaagatatagttgcttcgtatctcatcagaaactgctttggatctaagtgtccatcatacatgtggagctggggtggcttgtatgatgggggctatggggtagcctgcagttctgctgccaagggagaagcatcatcaaaagccttcttgacgaagctccctgtgttggggccttcgatcttattcatcttgaacaagatgacacacttcttcagtggcttcgtcgatcttactttgaagatcagccaatcgcgccatcttctcctacttcctttgtacttgctgatggatgatctccatatccctgatctctggtccaactcctcttctggagtgttggatggtggctttccttttttgggtttcgagccttttcgaagagaaagagttttctgggtttggggtcccagcgggctgcagtgcagcgggtccctgggtgcttga

SEQ ID NO: 969 - DNA, 756 bp, Zea mays
  Peptide Sequence Number=SeqID_44344
atgacagagaggtcaccctggatcttagaagaagagaataaaaggggagtcaaggtggagagcgtgagcctcccagttgctgaggaactaggtctcgagggcaacctaggcctagtgagtggtgccccccccccatttgtggacaacgtcctagagctcgacgacgagggtgccaaaaagccacaacagggccacgttgtccatttggtgccgagacgagagcaggtgggtagcgtcttcaacaagaatgtggtcgcgccagggggcgtagtgtggggatgtgaggtcgaggatgacgaaaacaagcgcggtggactacatgttctggacacccaccgcctaaacttggaggttagcaatgactacggcctcatactccgagggaaggggaaccacagaagaggggggcgccgaggccagtgtgatcgagcagctgacgcttcgcctcggcgagttgcctggcgagagtatcaaccgcagtgcactcgtgctcccatgtcagagcagcaagccacgatggccttggccatcaagatagccacaacaagggtggactgggccacagcaacctcagaagaggacacgataggcgacggagatatgaagcgggtgctctgggctttgaaggggtacgagcagaggccagtagttgcgccgaggctagccaatccactagcaagaacccaatggagatctccggtggcagtcgagctgggcgcggctgtgagaagtgaggcccgacagcaaggaggttag

SEQ ID NO: 970 - DNA, 504 bp, Zea mays
  Peptide Sequence Number=SeqID_44345
atggggctcggtgcatgtggctcgctctgccaaggtggtgatgaggatgatggttatgattatgcttttggtaatggcgccgccttccgcactcctctctcccagctcgctgccgtagtgtcgtcagcccgtcactcccaggcgccggcgcgccgccgtccgccctcctgctctgtgcggctttgcctctctcagctcgcctcaccagtcgccaggccagagtgccatcgcagcttcccaggctcccagctcgccagagtgtcggacgccacgccagcccggtccggtctccggtcggcggtcggtcgatcgccgctgctccagctggctgcccaggcgaccaggcgaccagacgtccgcgacggctcggcgatcggcaggcagctcgctccacctccacaggccacgactccctctgctgctgctgtcctccacggatccactgctggctgctgctccctccacagagaattgcctcgctacaccatgcgagccgtcctgtag

SEQ ID NO: 971 - DNA, 234 bp, Zea mays
  Peptide Sequence Number=SeqID_44346
atggtgccctacttcctcgttgaggcgcccacaaagagtcgggtctcttacaaccctaatcctccctttgcctaccacaaaggagagaaaaccccagctcaactgcccggaggcaagttcagctggtgtatggtcaaagagctgaagaagctcaactcagctgaagtcaagttcagctggaaacctcagctgcagttgaagaagttcagctgcttttcagcaagaacactctag

SEQ ID NO: 972 - DNA, 384 bp, Zea mays
  Peptide Sequence Number=SeqID_44347
atggctggttctaaagatcacaccgatatttcttcggacaatatcctgaagccaactgttgaaagtctaacaaccgaggggcaacaacattacaaagactacatgcgtcaagcgaaggagaaattcttgtcacaatacatggtagatcgccgccagaaggttgtcaaacatggagagacccatgtcgcatctcttctatattcgcttcatgtccccaacccccaaccattatatggtatgccgatgaactcatatccagggaaaataccaccaccgccgtccctgcttagcagatcggcgcccctagacacggtcggaccatctgagcttgtgcccaggcagtccagcccttacgcgaactgtctgtctttccctgccgggtag

SEQ ID NO: 973 - DNA, 492 bp, Zea mays
  Peptide Sequence Number=SeqID_44348
atggcgcttcctgtcgacgtggctagcctgtgccctaggttgggcgacgtggaggctcctccgaagccggggtcgagtctgtcttccatggccgaggccgagtccgagcccctgggtcgggcgaggcggaggtcgttagcagaggccgagtccgagcccctgggtcgggcgaggcggaggtcgtccgcagaggccgagtccgagcccctggggtcgggcgaagcggagttcgtcgtcagcagaggccgagtccgagcccctgggtcgggcgaggcggagagaccgagtccgagcccctggggttgggcgaggtggaggtcgtcagcagaggccgagtccgagcccctgggtcgggcgaggcggaggtcgtccgcagaggccgagtccgagcccctggggttgggcgaagcggagttcgtcgtcttccggggcttagcccgagtccgagccctgggtcgggcggagcggagttcgccgtcttctggggcttag

SEQ ID NO: 974 - DNA, 831 bp, Zea mays
  Peptide Sequence Number=SeqID_44349
atgtcttcttcctccctcatgcgccgcatctttccaccttccaagcccccggatgggggatgcccgccgtcttttcgcctcatccccggccgcacccctccaccggcggtcacccaggatggtgacctccggcttgatggtgggggaaaacgaaccgggctgcggcctctgcccctccctcagcctcaaggattttcatcaccagggctggggaggggagtatgccgagttgaggtcggcccccgcgtgggcggcagcccgctccttcactcagtgactggaggggggagcagttgtcgtccgcggcgctggcatctgcagcgtgcctggctttcggacgcgagcggcttcggagccgctcgcggcgccggcgtctgccacggcagctggaagaggttcttccgccggcgtgatagccaaggttggccatggaccgacccccaactctacggccttctgcccgtccttgcctctcgagttttagggcatgggcgggggcctcctggcagcagcatccgccctgaggtcatcactgctgctgtttggccccccggggcagaagtcttcatcgtcgccgctgctggggcgggcgacgacgagccgctcgtcggtcttctgtcgctccgcaggcctacccccatggagtggggttacttgtctgttgattatctgaaccgcttcaccaagcgtgagtcgccccgtgtcaaggtgacgagtgaggagtccctcggctcagtcggccttgctgtccgaggctcctctagctcagttaaagggacccctcggccgctcttcgatgagccgaggccaggggtagcgatatcagtatga

SEQ ID NO: 975 - DNA, 474 bp, Zea mays
  Peptide Sequence Number=SeqID_44350
atggcgcttcctgtcgacgtggctagcctgtgccctaggttgggcgacgtggaggctcctccgaagccggggtcgagtctgtcttccatggccgaggccgagtccgagcccctgggtcgggcgaggcggaggtcgtcagcagaggccaagtccgagcccctgggtcgggcgaggcggaggtcgtccgcagaggccgagtccgagcccctggggtcgggcgaagcggagttcgtcgtcagcagaggccgagtccgagcccctgggtcgggcgaggcggaggtcgtccgcagaggccgagtccgagcccctggggttgggcgaggcggagcgattcagtcagggttgcctcttaacgaaggcaaggcctcgggcaagccggagatgtgtccgccgttgaaggggggcctcgggcgagacggaaaccccttcggggtcggctgcccttgcccgaggctgggctcgggcgaggcgtga

SEQ ID NO: 976 - DNA, 492 bp, Zea mays
  Peptide Sequence Number=SeqID_44351
atgccccggctcagcctttgcgtggtctcggcgcagcaacaaatgtcgtcgaacaaggagacgcgccgcatcaacacatcgcgcccaaagcctgtatgcgtcgagcgtatctcatgccgtggtgagaacgctgtctacccgttgcagtctacccatgcgcgtagtccgtcgtcgcctagctggggtccaaagcccgggcgcgaacataatcaccagaggtggtaccctttacccacaagtcatgttacccatttgccaagggatcgcgacttcccatacacctctaccgaggaggcgaggcaggaacatgagtgggtaaaagaagtgatcaagggcacaacttgcctgggacttgagattccagtttatcatggcactggactgggcgtcaaattcataaaagtccagggggctcggggtaagaatccccagacacagagaacaggatcactggactgcgggttgatttctctgttttacggggactcttaa

SEQ ID NO: 977 - DNA, 603 bp, Zea mays
  Peptide Sequence Number=SeqID_44352
atgtgcgagataaacgaggacctttacttaatgaggttcgacagacagaggcagaaggaggaggcggacctaaactacgggaacgaccagccgcacacggactaccacttccgcaagtatttgacttggtatgctggtgtcactaggtgcaagattaaaggccaatggacagctgcagactatgtggagcaagagtcctcagacgacgaagacacttcattcgacataactgctcggctagggtcccaaatcaaggctgctccaatcctagatagagtggtacgaagttgtttactcaatttagttatgttaattcgatacaatatgtcttgttttgtggatgctaatgttttaacttttgaatatggaaactctatgctggtatctgtgggtgaacttgagcgtatctcatggaggacttcagacaccacgacactttatttactatcagtgagtcaagacgtgattggaccgtcccagctgcaggacgctcccacaactcagctgtcacagttcacaccacgtagacggtgtccacgtgacccatacactccaggcaccgacgctcttgcggccaagggcaaggcttgggagaattgctga

SEQ ID NO: 978 - DNA, 1638 bp, Zea mays
  Peptide Sequence Number=SeqID_44353
atgggttcttgggaggagcatgttaggcggtttttgttggaggaggaagaagatgatgacgaactgttctttgttattctccctgctataatcccatacctctcagaggagttcgccattgcatttcacaacataattagagggcataatggtgatgaaggatggctggacaaccaaccagattatatgtctccaagtcaatatgttgatgtccctgaggtagacaacatctatcctaatgacacagagtcaagtgatggaacagcattagcggatggagaggcggattattcttcttgggacagtgacgacgagtaccagaaattcatccaaaacatgaaccctccaagggtcaccatcgacaacacatcatgtccaaatgctacagtcatccatgtggacagcgcgaacaagtatgggatactgttggaggtagtgcaggtcctcaccgacctcaagctcatagtcaagaaggcatacatatcctcagacgggggatggttcatggacgtcttcactgtgacgaaccaaagtgggcacaagataacggacgaatctgtgctgcaaggaataaaagactacatttacaagtctatcgggcctgactcctgcttccttccctcgcggaggagagccgtcggggtggagccgtcctccgaccacaccctgatagagctaacggggaccgacaggccgggcctcctctcggaggtgagcgcggtgctcacgagcctggagtgcaacgtggtgagcgcggagctgtggacgcacaacgggagagccgccgccgtgatgcaggtcaccgacagggagtccgggctggcggtctcggacgcggagagggtcggcaggatcaaggggcggctctacaacgtgttcagagggaggagccgggacgccaagaccgcggtcgcgacgacgggcgccacccacccggagcggaggctgcaccagatgatgttcgaggaccgggactacgagaggcgcggcaaggacgatggcagggcggcggcgagcggcagcaaccccggtccggtggtttcggtcgtgaactggcttcagaaatactactccgtggtgacggtccggtgcagggaccggcccaagctcctgttcgacacggtgtgcaccctgacggacatgcagtacgtggtgttccatggcagcgtggataccgagggccccgaagcttaccaggactactacatcaggcacatcgatgggtgtcccgtcaattcggaggccgagaggaagaggatcatccagtgccttgaagcagccatagaacggagagtgtccgagggcctgaagctagagctgtcgacaggcgacagggtgggtctgctgtcggacgtgacgcgcatcttccgcgagaacggcctgacggtgacgagagcggaggtctcgaccaggggcgacgaggcggtcaacaccttctacgtccgcgacgcggccgggagcgccgtcgagctgaggacgctggaggccatccgccaggagattggccagaccgttctccaggtgaaggggcaccccgagcagccgaagccgccggtagccgcgcaggactcgcccaccaggttcctcttcagcagcctgttgttcagaccgaggtcgctgtgcaacctcgggccctga

SEQ ID NO: 979 - DNA, 630 bp, Zea mays
  Peptide Sequence Number=SeqID_44354
atggttgccttccaagggggtcaccctccttttaaaggcaactctccccacttgcgtcctcagccgtcgcagactgagtcttctccaacacgctccaaggtctttcccctacgacatgggggctgggtcccacgcgtcatgcaagctggcccaggacagaaggagccaaaacctccgcgcgtggtgcgcgtaacggcccagcggttacaagcattcctccacttccgcccagaccagcgagtgaaagagcggaccgccatgcaggcggcatgcaaccgcaccaagggggcgcaccctttcgacttcgacgcgtccagcatggaggcccaggcccacacgtcatgtaaccagcgcgccggttactacgtgcaagaaactgcaccgccactcgcgccagtaccgcgccttctcgactgcggaaccagtgccgcgactcgaggcgaccctgcgcatgaaccaacagtgccaaccgagcacatcggtcacaggacaggcgacacctttggcaggcgaagcaggcgacgcttcacctccgccataatgaccgcgtcaaaaaagggaccaggaaaggagatactccgaaagggatccttctacgcgaaggaagcgggccccgagccccactactga

SEQ ID NO: 980 - DNA, 675 bp, Zea mays
  Peptide Sequence Number=SeqID_44355
atgacacagacttaccccgcggtggatggcgggttattttctagaaaacgaaggggctctttaagaaaagtgtacggcgatgggaacagtggcacagcagctcccctgttcacccgcacgacggcgcagcctacctacagcggcgccatcgccgctccaggaaccgaagcgctcacgtcaggcccccccatcgccgacctccccggcggcagaaccttcaacccgcctggctatggagaatcggagctgcgcagggagaagcggaaggtttgttacgcgggcgaggagattccgtcatcatcgcgcagcagaagtgcggcgccgtggagaaggaatcacgtttctgttggaggtaggggaacgagctgcccgagagcgcacgggcttctaggcgagaaattcggcaggaggaacagccattatcgtgcgcggccagtgaatttagctaggatatccccaaccatcggacgaaccaggcgagttcccaggcggtcgtttgctatggtgaagaagaagctgcgccgggggacccacggtcagccgctgcgcttggtggagctggtggtggtggtggaggttgttgttgtcgttgtctctccaaccgcgcttggcttatttcttggtggacctgacgtggaggatttggaggattcatttctgtttgctgttgcgtga

SEQ ID NO: 981 - DNA, 393 bp, Zea mays
  Peptide Sequence Number=SeqID_44356
atggcgaggctagcgagtagcgagcctatgccgaggcgccagcatctgcgggctcgggctttggttggtgttggttggctaacaaaaccaccctcccctgcccaacccatcggacgacgcctcttggcgaccttcccggccccactcgtcccagccatcagaaggaaggcagaggccgactacgagcagacgctcacggaggcacggagcccgtgtgcatctttgcagtggcagcctgcacagcacagtcagcaccacagcgggctggccgctggcaagggtggagtggaggccacgaagtcgtgcacgaagaaaacagagggaccaaaacaggaaagcggaagtaaagagagtgaaacagtacatgcaagcaaaatcaaagattggtggtaa

SEQ ID NO: 982 - DNA, 432 bp, Zea mays
  Peptide Sequence Number=SeqID_44357
atggtccaggacattttccccaactccccagctcgagacggtggcgccacccaagaaccacgacggtccatcaccggagttcagtcaatactcgagctctggtttccaattctcaaatcccatcgatcctatgaactactgcaagtacgaccgagggggtggcaacttaccgaagctagaggtggttgcggggaggctacccgcggcgagagcggattccagagctcccgcgatgaccggcgagcaatcgcgtcttgcccagcgaccgtctccacccgcggacgacgcgacacccttcaagaagacttggggacgtccctggctgatccacgggcggctgacgccagcggcaactcgatttcaacgccgcggctctctctttcccgcggcggtgaagaaatcatggcaccctcatacgatggtgctggctaa

SEQ ID NO: 983 - DNA, 261 bp, Zea mays
  Peptide Sequence Number=SeqID_44358
atgggcgggggcctcctggcagcggcatctagcctgaggtcagcgttgccgctgcttggcccctcggagcagaagtcgtcgtcgtcgccgctgctggagcagggatgtttgtgtgagcgagagttgcttctcgcggaagggacgagtgaggtatccgtatcccagaggcgtgggaatccctcggctcggtcggccttgccgtttacgcgtactttcacccgttcaagaggccctgtccccgacttagtcgagaaagcttga

SEQ ID NO: 984 - DNA, 852 bp, Zea mays
  Peptide Sequence Number=SeqID_44359
atggcgactacggcggtggaaagcagaggaacgcgaatgcaaaggggcgcggagagctcgaaggcgaaagagcgcagcagttggagagaatgcgaaagcgtaactgctgcatgcgaggtgaatcccttttcaaggaagactctcctgctcgcgccccgagacaccgcagaaaatctcgcccgacgtgcaccaaagcaacccgcctatgacacgggggcccaggtccacaagtcatacagctgggccacaagtcatactccttgggcgtcggttcctgagtgcagaaagagcgaaccgccgctcgcgccagtactgcgcctcctcggggccgccgcagaagacaaagaagacatggcagttggcgtgaccgaaggcgggatggcgatgattacgtcagcaaacacacggaagaggcgcgccaatcaccaatcaagctttggccccacctacaggctcgtatcctcccctgaggtggtcccgggggccactgtcggtaccctgaaacaggggtaccccttactacagcatgaagacgcggccactcacagcagggtcccgggattctgggacaaagaatacccaggccttaatcaaggccaggcaggggttcggagccgacacgtgtcaggaccataccatgtacgcctctgctccctgctcaggcggagccccgatgctgccacgtggcctattgctcgtgacgtaagccagcgggcgaagcctgacgcaaggcctctaggccacatggcctctacatttattgcggataatgcacgccgcctgtccattccactggcaggtgatgtgccgcctcggcatttaatgagccctgtccattctactggcaggtga

SEQ ID NO: 985 - DNA, 357 bp, Zea mays
  Peptide Sequence Number=SeqID_44360
atggcccccggcgaggccgtggagctaggagggtggcatagcaactacctggccgcagataaggccccaggcgcagcccttgatgtcctggatgtctgcgcaggagtgtgctgccgtgcagagtgcacaacaacaacaccaggcgcagggcggttggtggcccgtggtgtggaagatgcagcctcttcctccaccgggaagtcctcgggcatgaaatcatggtgctcgacgatgtggaccacggtgtcgagcagaaaaacaagcaaaaacctaatgccaagcccctacctggcgcgccaaaagtcggagaggaaattctccggccgggtggcggaacgcacccgccctaaatcctaa

SEQ ID NO: 986 - DNA, 390 bp, Zea mays
  Peptide Sequence Number=SeqID_44361
atgtccatggggctggcgcccagcacctccctcttctgccatttctttgtactggtgaagtctgggaaggctaaggaccacctcggcgcctactacttccagacaaggtcggattcagccgtggcctacatccccatccttcgcatgaattccattgcctcctgcagcggcctcgtcagctcccccctgaacttcaccagcatctcgtgtggttgtggtgctggccgtggccgcttgcgccaactccaaagccatgacccggccatctccttggagccggtgatcgctggtctggtggccaacactgaagacgctgcccaggaggccatacaagatgccgtggagacggtggccgcgcgcttccagctcgaccctgctgatgccgagtag

SEQ ID NO: 987 - DNA, 2442 bp, Zea mays
  Peptide Sequence Number=SeqID_44362
atggcgacgaccacctcgccgccgctgcagctcgccagcgcctcccgcccgcacgcctccgcctccggtggtggcggcggaggtggggttctcctcgctggcggttccggaggtggggtcgcgccaggttggggtcgagggcgattgcagcggcgggtgtcagcgcgcagcgtggcgagcgatcgggacgtgcaaggccccgtctcgcccgcggaagggcttccaagtgtgctaaactccatcggctcatctgccattgcatcaaacatcaagcaccatgcagagttcgctcccttgttctctccagatcacttttctcccctgaaagcttaccatgcgactgctaaaagtgtccttgatgcgctgctgataaactggaatgcgacatatgattattacaacaaaatgaatgtaaaacaagcatattacctgtccatggagtttttacagggaagggctctcacaaatgctattggcaatctagagattaccggtgaatatgcagaagcattaaaacaacttggacaaaacctggaggatgtcgctagccaggaaccagatgctgccctgggcaatggtggtttaggccgcctggcttcttgttttttggattctttagcaacattaaattatccagcatggggatatggacttcgctatgaatatggcctctttaagcagatcataacaaaggatggtcaggaggagattgctgagaattggcttgagatgggatatccttgggaggttgtaagaaatgatgtctcttatcctgtgaaattctatggtaaagtggtggaaggcactgatggtaggaagcactggattggaggagaaaatatcaaggctgtggcacatgatgtccctattcctggctacaaaactagaactaccaataatctgcgtctttggtcaacaactgtaccagcacaagattttgacttggcagcttttaattctggagatcataccaaggcatatgaagctcatctaaacgctaaaaagatatgccacatattgtatcctggggatgaatcactagaggggaaagttctccgcttgaagcaacaatatacattgtgttcagcctcactacaggacatcattgctcgttttgagagtagagctggcgagtctctcaactgggaggacttcccctccaaagttgcagtgcagatgaatgacactcatccaacactatgcattcctgagttaatgagaatactgatggatgttaagggattaagctggagtgaggcatggagtattacagaaagaaccgtggcatacactaaccatacagtgcttcctgaagctctagagaagtggagcttggacataatgcagaaacttttacctcgacatgttgagataatagaaacaattgatgaagagctgataaacaacatagtctcaaagtatggaaccacagatactgaactgttgaaaaagaagctgaaagagatgaggattctggataatgttgaccttccagcttccatttcccaactatttgttaaacccaaagacaaaaaggaatctcctgctaaatcaaagcaaaagttacttgttaaatctttggagactattgttgatgttgaggagaaaactgagttggaagaggaggcggaggttctatcagagatagaggaggaaaaacttgaatctgaagaagtagaggcagaagaagagagttctgaggatgagttagatccatttgtaaagtctgatcctaagttaccaagagttgtccgaatggcaaacctctgtgttgttggtgggcattcagtaaatggtgtagctgaaattcacagtgaaattgtgaaacaggatgtgttcaacagcttctatgagatgtggccaactaaatttcagaataaaacaaatggagtgactcccaggcgttggatccggttttgtaatcctgcattaagtgcattaatttcaaagtggattggttctgatgactgggtgcttaatacagacaaactggcagaactgaagaagtttgctgataatgaagatctgcattcagagtggcgtgctgctaagaaggctaacaaaatgaaggttgtttctcttataagggagaagacaggatatattgtcagtccagatgcaatgtttgatgtgcaggtgaaaaggatacatgaatataagcggcagctgctaaatatccttggaattgtctaccgctacaagaagatgaaagaaatgagcacagaagaaagagcaaagagctttgttccaagggcaaaaaggatcgttaaatttattacagatgtggcagctaccgtgaaccatgattcagacattggagatttgttgaagatcggtgagggattgaagaggggtatcgatgggcaggaacaccggccgggggcctctgcccacgaccgagcaagaggagggtttctcccttctaattcttgcctgctttag

SEQ ID NO: 988 - DNA, 558 bp, Zea mays
  Peptide Sequence Number=SeqID_44363
atgggcagtaggccacgtggcagcatcggggctccacctgagcggggagcagaggcgtacacggtatggtctggacacgtgttggctccggacccccgcctggccttgattaaggcctgggtattctttgtcccggaatcccaggaccctgctgtgagtggcccagaccccacacagaggggtccgaaacccatcctaggggtccggtttgcacccgtggaggtcctggaccttaccctgaggtccggtctgtatacacaggggtccgacactttcccatgggggtccggacccactgttgataccttggagtatattgtcttctctggccatgtggcggccccggagctgtccacgtggtggggttgggtgctgttcaccatgcgactagagatagccgcgtgggtaccgcggcttcatgttgtagtaaggggtacccctgtttcagggtaccgacagtggcccctgggcccacctcaggggaggatacgagcctataggtggggccaaagcttgatcggtgattggcgcgccgctttcgtgtgtttgctgacgtaa

SEQ ID NO: 989 - DNA, 285 bp, Zea mays
  Peptide Sequence Number=SeqID_44364
atggagggaggcgcggtccagcagctagtgagcggcggagcggacagcggagctagcctgctgctggcgtcgcgctcggcgtgggatgtggtggatcagtgccagtggatggaggcaagtagtaaagaggagagaggtgaagggtacaagtacaagtgtgccggggcccaaggacatgccgacgtggcgcagagaatacaaaatgttgatacgttgctcacaatcactgcagaaggcaatattgggtctgtttggttggtttctctcgccaacctggttgtgtga

SEQ ID NO: 990 - DNA, 183 bp, Zea mays
  Peptide Sequence Number=SeqID_44365
atggccgttgggaggggtgctgtcgatgggcgcaccagacagtccggtgttcctgaatcacttgacaagttcggtatctgcttttcttacctttcccaagagcgtttcacccgtcacgcagacattacaatcatcggagttacgagaatgcggaagcaattacatgaacttacctttatttaa

SEQ ID NO: 991 - DNA, 1101 bp, Zea mays
  Peptide Sequence Number=SeqID_44366
atggcatctcttactccaggaatactattaaaggttctaaaacatattaactctgatgtcaaagtatgtggagaataccggtccattcttctccaagttattagcatagtccctgcaataactggttcagaactttggccggaccatgggttctttatcaaagtttcagattcttcacactcaacttatgtttccttgtctaaggaggacaatgaactcatcttatcaaacaaactacaacttggacagtttatatatgttgagaaggtccagtcaagtatacctgttccggttcttgttggggtccgcccagttccaggaaggaacccttgcattggaaacccaaaggatttgatgcaaatgtcaactccctctggagttatggaagcactggatcatcaacggacaacttccaagtcagctgatctgtctgaaagtgaaaaggaaaatttgcagagaaaggtagttatcaaagagcagaagacagttgtcgcttcccgttacatgcttggggtgtcaagcaacaacgggaaaattaccaacctcaactccagcattgatagtgaaaaaagtaatggaggaagtaccatatctgaatcaaataaaaaatctgttgccctgaaagtcagacaagaggcaaaacctcaggaacggtcaaataatacatctcctagtaacgctaagttagtttccacaaagcaagaaattagcaaggacacacgcaagaatattggcacttcacctagtccaaatggttctgctgtagtcaagaagcaaatgccaaaggagagcaaaaaggaagttgctactgagagaagatcaccaccaaagcttcataggagttcgccaacaccagcgaggacttcaccaacaaagctcagtccagcagcaaagcagaatggaaactctggtccagtttcttctgtatctactgttaaaaaaagagttagtgaaactatctcttgggactccctcccaacaagcctaatcaattcaggaaaggctgttgtccggaggaagaacattgctcttattgtagcggctgaggctcaaagggaggctgctgcagctgcgtatcttgtaaaaggccttggcaaatga

SEQ ID NO: 992 - DNA, 258 bp, Zea mays
  Peptide Sequence Number=SeqID_44367
atggttaaaaattttggcaggaaaacagtgcaaatagcaatgaatgctgtggtaagaaggcaaagcgccagagtttttacaccaggcgcacacccgcttgcgctcgctgcgcggtggaccgcagggacaaacagtaaactctgcaaggtcttcaagggaaaagctacaaagttgacacagcgccgaagctgtgaagcaggaaagcttcggcatgttcgcagaaaagggaaccgacttaaagatgaaaaggccatttag

SEQ ID NO: 993 - DNA, 741 bp, Zea mays
  Peptide Sequence Number=SeqID_44368
atggccggttctaaggatcacaccaagatctccaccaccaacatcatcaagccggccatggaggcgctcccggctgatgaccaaatgccctttgaagacctcgtaatgcgcgataagaaggaggtgatgcggcaatggaacgaacaacgcgacaaggaagaggcggaactgctgcataaactctccgaacggcgcaaggaggcggcggacaagtacttgtcacacttcacgatagatcgccaccagaagatcatccgtcaaggggagatcgatatggaatctctcctacctccacttcatggtcccgctccacaaccactaggcacgcggcaagtactggacacggccggaccgtccgaacatcatctcagacagtccgggtataccgcggaccgtccggcgtatttcgccggaccgtccgaccagatgcaggcccgcacacaaaacactcaggtcgcaccgtacatggccggaccatcaggatacaaccctgaacacttcggccccatcacggaccgtccggtgcatcacgccggaccgtccggatatgttgcggaccgtccgccatcttacgcaaaagtagcgttttttaaggagcgccaaacactcaacaagaaccgtggggggccctctggtcaggcgcggacgatctcgtcccctgggggaaaagatcttaaggtgctccgggtcgacaggtcacccggggcgtccccagacgacgtggagtcgcctaggaattaa

SEQ ID NO: 994 - DNA, 564 bp, Zea mays
  Peptide Sequence Number=SeqID_44369
atgatggtcctcgccttagttgccaccaccttgttcgccattctatttcttttctctctcctctcatgccttcacctccgtgccacctcattcttgacagagggcgtaggagcaagcgcctcctccccgtattcgtcagacaccagccccgacaccgactcgcgcagtggctattgtacatccatgaggacatttcacatcatgcgcgcaacatcgtttttgtcgtcgtcggacgtcctgttcgtcttccctgccttcgtccggttcttccaccccaacctgctacctcgcccacggtttgagtcgcgagccgaccgatgcacacacgaaatacgtgcaggatcatcattagaaccatcatacttgctgaccatcgatgaaccgatcggattaaccaaccaaagttggcctccgtcattatatattgtcgtcgacgcgggtacagggcgagtcggtcatgctcctggcctttctccgtgtgtgccgtcgaggaggacatggtggcgcctgccacgcttaggttatcttagcgatgagtccaagtctgagatattggacaattaa

SEQ ID NO: 995 - DNA, 1026 bp, Zea mays
  Peptide Sequence Number=SeqID_44370
atgtcgtcgacgacggcgcccgcgcgccaccggacgtgccgcatgtactggtgctaccagtgcggccgcgcgctccgcatcatctcctacccgtccaccgacgtcttctgcccgcgctgcttcggccgcttcctccacgagatggacctgccggcgcgccccgcgttcccgccgccgcactttctgccgcacccgttccacccgcagcgccagcacgacggccacccgcgccgctgggtcatatacggcggggagccggcgacgacggtaccaggccgcgcgttccgccagcctgctgcgccggcgcagggacccaccacgcctcctgctcctgcaccggcgccggttcgacggcgcgtgccctccccgccgccaccgccgccgccaccgccgccgccgccgccgccggtactgcggcggcctaccacggccccggccgtcgacctcgggaactacttcacggggccgaacctgaacaacctcatcgaggagctgacgcagaacgaccggccgggtccagcgccggcgccgccgtcggccatcgactcgctcccgacggtgcggatcaccggggcacacctgtcggacggctcgcagtgccccgtgtgcaaggaggacttcgagctcggggaggccgcgcggcagctgccgtgcaagcacgtctaccactccgactgcatcgtgccgtggctccgcctgcacaactcctgcccggtctgccggtaccagctgccgggagccgggtccacgtccaacggcggcagccaggccgcacctcgcggcggaagcgacggcgacaggaacagcaggaacggggagagggggagagagcccccgacgttggtgcggtgggggccgttctcgtggctgttcccaccgcacgggatggacgaccccgacgacgcgtgggagcacgggcggcgcggcaggcacgacgcggccgacgccggcggtaatgacatgacggccctccagtcctttgttcttgtggcaacctgcgttttcttcttctcgttcttggtctga

SEQ ID NO: 996 - DNA, 3858 bp, Zea mays
  Peptide Sequence Number=SeqID_44371
atggcagcaacaccggcctgggactgggaggaatcgcttgtattcttcctgcagccgttcttcctccacggcgtgagcgccgcggcccaccttatcctggcgctcgccgtcgcgggacgcttgctctttcgccgcctctccgccagccggaccaaggacggggaggtgggcggaggagatgctagccgcggcgttggccggtttcggtactggtacggggtctctgtctgcaccacgtgggctatgggtgcgttcgaggtcctcctcgccgtctactcatggtacgcgaacggcggcgccgggtggtcgcgcgacgcggtcgttgaacaggtggacgcggccgcgcgcgcggtgtcgtggctgctgctcgccgcgtacctgcagttcgatttctggtggcgtcggcagcgccaggagcggttccccgtggcgctcaggctttggttggcgctcttcatgctgctctccgtagtcaccgtcggcgttcacgcggcgatgatcctcgacgggtcccttgtgcccggtcgatcgtgggcgctcgacgcagtctctgttactgcagcagcggttctactctcagtctcagctgggttcttcggaaggaaggagggagagggaggcggccatgcttccgaggcgcatgaacctctgctgaacggcgcgcacgaggggtccggtgacgacgacgagaacagcagcagcgccgccgacgcatccttgttcactggcgccggctttcttagcgtgctcaccttctcttggatgacgcccctgctcggcgtgggtcacaggaagaccctcgtcccggaggatgtcccgggcctcgaaccaggcgacagcgttgctggcgtcctcccgcccttcaaggccaaccttgaggcgctcaccggcgacggcggcaggtcgagccggaaggccgtcactgcgttcaagctcaccaaggccctgttgcgcaccctacggtggcacgtcgcggtgaccgcgttctacacgctggtctactgcgtcgccgtctacgtcgggccgtacctcatagactccctggtccagtacctgtacctcaacggcgacgagaggtacgcgagcaaggggcagctcctcgtactcgccttcgtcgtggccaaggtgctcgagtgcctgtcgcagcggcacttgttcttccggttgcagcaagcggggatacgagcgcggtcggcgctcgtcgcagtcctgtaccagaagagcctcgcgctttccagccagtcgaggcggagccacacgagcggagagatgatcaacatcgtcagcgtcgacgccgaccgcgtcggcattttctcatggtacctgcacgaggtctggcaggtaccgctgcaagtagtcatggcgatgttcatcctgtactccaccctcggggtggcctcgctcgccgcgctcggtgccaccgtggccaccggcctcgccaccgtgcccctgggaagaatgcaggagcggttccaggagaagctgatggacagcaaggacgggaggatgaaggcgacgtcggagatcctgcacagcatgaggatcctgaagctgcaggggtgggagatgaggttcctgtccaagatcatcgagctgaggaagacagaggcgaactggctaaagagatacctctacacgtcggccaccatgaccttcatcttctggggcaccccaaccttcgtcgccgtggtgaccttcggagcctgcatgctcatggggatccccttggagacggggaagatgctgtcagcactggccacgttccgcgtgctggaggaacccatatacgaacttccgggcactatcgcgatggtgatcaagaccaaggtgtctcttgacaggatagcatcgttcctgtgcctcgacgagctacccagtgacgccgtgcagaggcttccacgtggaagctctgccgacttcgcagtcagcgtcggcaacgggtgcttctcatgggaagcctcgcctgatgctccaacactgaaggacctcaacttccaagctaggccaggcatgcgcgtcgcggtctgtgggacagttggctccggcaagtccagcctgctatcctgcattctcggcgagattccgaagttgtcgggagaggtccggacctgtgggacgacagcgtacgtcagccagtcggcgtggatacagagcggcaaaattcaggagaacatactgttcggtatggagatggacagagacaagtacgacagggtgctcgagtcgtgcgcgctcaagaaagacttggagaacctgccgtttggcgaccagacagtcatcggcgagcgaggcatcaacctcagtggaggccagaagcagaggatccagatagcacgcgctctgtatcaggacgccgacgtctatctgttcgacgatccgttcagcgcagtcgatgcgcatacaggatcccacattttcaaggtcatgaaagatgggaggatagcacaggcaggaagatacgacgaaatactgggttcaggcgaagagttcatggagctggtgggtgcccacgaggagtctctaacagcactggatgtggtcgatgccatgaacgagaacgaagccaacgtgtcatcctctcccagcagcaggatagagacgccgaacctgtccagatccctgtcgttagctgagaagaaacatggcgccaccaacgaggctgaaggggacgacgacgatgctcggagcgggcagctggtgcaggaggaagaaagggagaaaggcagggtggggttctgggtctactgggagtacctcacgcaagcctacaagggcgccctcgtgccgttggtgttgctggcgcagacgctctttcagatcatgcagattgccagtaactactggatggcttgggctactccggcgtcgaaggatgccgagcctccggtgagcgcgcccacgctgctcttcgtctacgtcgtgctggctctcggaagctcgctgtgcatcctcgcttcaactgatcaaagcgaggtggacaccaacatcgctgaccagatgggcaccgttgcattctccatcatccagctcgtcggaattactgcggtgatgtctcaggtcgcatggcaggtctttgtggttttcgtccctgtatttgctgcatgtgtctggtaccagcggtactacattgacacggcaagggagctgcaaaggctagtaggagtgtgcagagctccaatcatacagcacttcgcagagtcgatagcggggtcgagcaccatcagaagtttcggcaaggaagaccagttcgtgtcgactaacagccgtctaacagatgcctactcccggcccaagttctacaacgccggagcgagggagtggctttgctttcgcttggacgtgctgtcctctcttgcgttcgccttctccctgatctttctgatcaacctaccggccggtctcatcgatccaggcattgctggccttgcgatcacgtacgggcttactctgaacacgctgcaagcacaggtgaaatatgcgccgcagctgccgttcgttctgaagggccttacggtcgcttttccgggcggcgtgaagactggcattgtcggaagaacagggagcgggaaatcaaccctaatccagtccctcttccgcatcgtcgaccctgctgtcggccagatagtgatagacggcatcgacatccgcacggttgggctgcatgatctgaggtccaggctgaacatcattccacaggagccgacgatgttcgaaggaactgtcaggagcaaccttgaccctcttggggagtactccgacgatcagatctgggaggctttggattgctgtcagctaggggacgaagtcaggaagcaggagctgaagctcgactcaccaggtctgaatctgatacagtaa

SEQ ID NO: 997 - DNA, 981 bp, Zea mays
  Peptide Sequence Number=SeqID_44372
atggtggagaaggcgtcgatcgaggacgtgatgaaggtgctgatggcgtcgcggaagcaggacctgcaccagctgtggaccacgtgctcccacctcgtggccaagtccgggctcccccctgaggtgctggacaagcacctccccatcgacgtggtggccaagatcgtggagctccgcctcaagtcctcgatgtcccgccgctcgccgttcctcgcgcaccaccacccgcaccaccacccggcggcgggcggcatggaggcctcgtccgcggccgacatcgacgagcaccacaagatccgccgcatgcgccgcgcgctcgactcctccgacgtggagctggtgaagctgatggtgatgggcgaagggctgaacctggacgaggcgctcgcgctgcactacgccgtggagaactgcagctgggaggtggtgaaggcgctgctggagctcggcgccgccgacgtgaaccacccggccggccccgccgggaagacgccgctgcacgtcgccgccgagatggtgtgcccggacatggtcgccgtgctgctagaccaccacgccgaccccaacgtgcgcaccgtggagggcgtgacgccgctggacatcctccgcacgctcacctccgacttcctgttcaagggcgccgtgccggggctggcgcacgtggagcccaacaagctccggctctgcctcgagctggtgcagtcggcggccatggtcatgtcccgcgaggacgcgcacacggcggtcaaccccgcggccgcgcccatgtacggcgagccttccggaggcggcgccgtgtacagcgcgagcggcaccagctcgagcatggtgaacctcagcctggacaacaggatggtgtatctgaacctagggatggacgcgcagttcggcaagatggacgacggcggcgacggtgatgacggcgggggcagagggcaagggggcccgccttctttgttctccccgcatggctaccattga

SEQ ID NO: 998 - DNA, 891 bp, Zea mays
  Peptide Sequence Number=SeqID_44373
atgagtagtgatagtgatttatttgttgatgctcatgatctatggactagaattaaaataaaatattctgagtccaattgtactacttctactccctatgttgcttgtgatactaacctttcaaagggagaagaaaaacgatggcaaccaaacgatgaatccacctcaccaacaagtttgtcttccactagttataaatgtcttattgctaacaatgatagtggagacgaaagggatgatgaggaggaatatgaggatgatagcgaggatgagtcttcaccacaaggtacattttcctgtattgcttccactgataataatgacagggaaaatgagatcgtcgatgtggaagaagaggagattcgccggttctacacccatctcaacaaagaagacaaagtgctcttggttaagctattgaggaggaacaaggaacaaggcgagatgcttctcaggctagaggagactctcatcaaaaccaacgacagcctggagaagatgaccaaagaacatgaggagctaaagtgctctcatgataatttggtccaacgatggagcagtgttggcattgaagattggtggagaaatgagcagttttgggttattggtggcacctctgcccatctcttcgcagtgttccagggtctgctgaaagtgttggctgggattgataccaacttcacagttacctcaaaggcatctgatgaggatggcgactttgctgagctatatgtgttcaagtggaccagtttgctcattcctctgaccactgctcttgtcattaacctggtcggaatggtggcaggaatttcgtatgccattaacagtggctaccaatcctgggaaaaggtcgataaagctaccaacgcggcaggccctgacgcattctaa

SEQ ID NO: 999 - DNA, 402 bp, Zea mays
  Peptide Sequence Number=SeqID_44374
atgcaggcggcatgcaaccgtgccaagtgggcacgccctttcgactccaacgagcccagcatggagggaccgggaaagggggataccccgaaaaggacccttctccatgaaggaaacaggctccgagcctccctactgattagaggttcgaaggctggcccctcggaggggttcaacagccgcctcagagcacgggttcgtaggctggccctcgaagggttcacagtcgcctcagacacagagcgagggatgaccatgggggaccgggtccggcagatcacccgcaagtacttttgggcgctcctctgggcctctagccgacccctatcaaatggggcacagacgtccgctcggattacctgccagcagctcaccggagacaccatgttcggcgccacctga

SEQ ID NO: 1000 - DNA, 420 bp, Zea mays
  Peptide Sequence Number=SeqID_44375
atggagggcgtcctggagttcgcgccgacgtacaagtacgagctcggctcgaggaggagtttaatagtaagtattatcatccaagcaacgctaggatctggttctatggtgatgatgacccaaaagagcacacattctaagtgtggtgtgcatgaaggatttgagctccccgtgctctactcgccaggccagtcgacatcccagtcttgcgctacagatcgggtgtttttgacgatagagttgcctgacgccaagggtgtgaagcagagcttaaagcctaaaggccatttcaacttgtctagctcagatgactcgccttgcgagtttgatcttgagttgtttgatgttgtcgatttaatacatgttgaattagcgtttcagattttgattgatgaggatggcgaagatgttggatgttag

SEQ ID NO: 1001 - DNA, 1404 bp, Zea mays
  Peptide Sequence Number=SeqID_44376
atggttattaacctagtgggctatgcctgggccttgctcggggcccgtgggccggcacggcacgacccgctagctaatccggtctggatcgccgacatacaaggagaggggggcggtagcatcgaccgctgcagtcagtctaagggcgatgctcgttggttcagcaacgacgcgggatgtggaaggccagtgcacctccagaaacaccagttgccacatcttgagcagatggtcgttgatcgatggctgcttcccaaggatctgaggaacggccacgtctttgataggtggaggccgatgagtgggcggcagcaggctgcgtccttgtcaccggggatcgaggctccgacgagacggctccaccagatccagaagacggaagtagagaagagaagcgaaccaaagcaagcaagcttcaagaacaaggggaggggggaggaggaggccacggggctaccgtccgacgtgccgcgcgaccactttgcggtgtacgtgggcgagcggcggcgccggttcgtggtgcccatcacgctgctggaccgccccgagttccggtacctgctgcggcgcgccaaggaggagttcacgagcgtcggcggcgccctcatcctcccctgcgaggaggtcgccttccactccctcacctccgcgctcgcctgcgcccggaatcctgacgagatggacggcaatacgaggtccgcagcggagagtcagaagaagcccatcgtcccggacgacgacctcgtggagctgttgtggcacaatgggagcgtcgtagcgcagccccaggcgcaccacaggccggcgccgccctccgaccgcgaccctctaggcaccaacgacatcactgccgaggagaccgccgcgtggttcccggacaccctcgacgacccgctagagaaggacctatacacgcagctctggtacagcacgatcgccgacgccgccccacaacacgagggcacgttcccgggccctacctcgcatccttcgccgccactgccgcccgttgggagcagcaacgtcgagtctagctgggccggcgacatctgctcgaccttctgcggcagcaaccaggtgcccaggacgccgacagggatcagggggaaggacgcggcattgcagtcggaggtgccaagcggtgtcggcgcgcacgacggcacatcgtcatctggtgggtccggaagcaactatggtggatccgggctgcccagtgacagcgtccatggccacaagaggaaggggatgtgtagagacgagtcagatagtcggagtgaggatgtcgagtgtgaggagtcaactgaggagaccaaaccctggcagcgcaatgggccgaaacgtcggactcgtgcagctgaagtccataatctctcagagaggcgttattggctgctgctgatgtag

SEQ ID NO: 1002 - DNA, 53 bp, Zea mays
  Peptide Sequence Number=SeqID_44377
tggcatacagggaattggccatttactgtacgcgcactcaactgtaaagaccg

SEQ ID NO: 1003 - DNA, 321 bp, Zea mays
  Peptide Sequence Number=SeqID_44378
atggacacaggacttctgaagatggatcgcgacgacttggtgctgggtgcgggtgagcggtggcttggtgctaggcatggcggtggtgacctgggcactaggcgtggcagttacgtcctaacgaccgatttttttgcttttagcatatttttcgaaaaatatttacgttttagacctctggacgaagtatttctagatctagactcaaagctcgacgtcatgggctttggcgccgagcttacacggctcggctcctcatgtcttagcgtcgagcttgctgacatggcttccatcgtggcacctagctcggcgccgagctag

SEQ ID NO: 1004 - DNA, 72 bp, Zea mays
  Peptide Sequence Number=SeqID_44379
atggctccggtgcacggttgcgccttgcaggaagtggtaagcatctttcgttatgcccgctactacagctga

SEQ ID NO: 1005 - DNA, 1473 bp, Zea mays
  Peptide Sequence Number=SeqID_44380
atggaggacaccctcaagtcgctgtccatggactacctcaacctgctcatcaacgggcaggccttcagcgacgtcacgttcaacgtggagggccgcctcgtgcacgcgcaccgctgcatcctggccgcgcgcagcctcttcttccgcaagttcttctgcggcgccgagcaggccgccgccgggcccggcgcgctgctgctggaccacctcagcccgcgttccccgtccggcacctcctccccgcgcggcgcctccgccgccgcgccgggcgccgccgtcatacccgtcaactccgtcagctacgaggtgttcctgctgctgctgcagttcctctacagcggccaggtgtccctggtgccgcagaagggggagccccggccgggctgcggcgagcgcgcgtgctggcacacgcactgcgccgccgccgtcgacctcgcgctcgacacgctcgccgccgcacgctccttcggcgtcgaggagctcgcgctcctcacccagaagcagctggccggcatggtggagaaggcgtcgatcgaggacgtgatgaaggtgctgatggcgtcgcggaagcaggacctgcaccagctgtggaccacgtgctcccacctcgtggccaagtccgggctgccgccggaggtgctcgccaagcacctccccatggacgtcgtgtccaagatcgacgagctccgcctcaagtcctcgctgtcccgccgctcgccgttcctcgcgcaccaccaccacccggcaccggggggcggcatggaggcctcgtccgcggccgacatcgacgaccaccacaagatccggcgcatgcggcgcgcgctcgactcctccgacgtggagctcgtgaagctcatggtgatgggcgaggggctgaacctggacgaggcgctggcgctgcactacgccgtggagaactgcagccgggaggtggtgaaggcgctgctggagctgggcgccgccgacgtgaaccacaccgcgggccccgccgggaagacgccgctccacgtggccgccgagatggtgtgccccgacatggtcgccgtgcttctcgaccaccacgccgaccccaacgtgcgcaccgtcgagggcgtgacgccgctggacatcctccgcacgctcacctccgacctcctcttcaagggcgccgtgccggggctcgcgcacatcgagcccaacaagctccggctctgcctcgagctcgtgcagtcggcggccatggtcatgtcccgcgaggacgcgcacacggcggtcaacgccgcgcccatgtacggcgagccttccggcggcggcggctgcggcgtgtacagtgcgagcggcaccagcagcacgagcttggtgaacctgaacctggacaacaggatggtgtacctgaacctagggatggacgcgcagttcggcaagatgggcgacggcgatgacggcgggggcagggggccgtcttctttgttctccccgcatggctaccattga

SEQ ID NO: 1006 - DNA, 441 bp, Zea mays
  Peptide Sequence Number=SeqID_44381
atggagtacacgatcagacatcagtgggggagcagcagcaccctcggcgtcgactccaccttcggcggaatccgacccggcctcggacggcaacacggtcggaggatctccacctcaaaggaacctgtcggcaccacgcctgggccatcgccgttaggcaacccgactccggcgctggtccggccagtggacagccccagccaggctcccggccaaagaagcttcttttggagccaaccctgccctctgttccacgctgacacccgctgcctccggctccggctcatcgcagagcggccgagggtttctttaactaagcaagagaagcctcgggcgacaaggccgaccgagccgagggactcctacgcctccaggatacggatacctcactcgtcacattccgcacgagacgactcacacttggttaagcggttcggctag

SEQ ID NO: 1007 - DNA, 1161 bp, Zea mays
  Peptide Sequence Number=SeqID_44382
atgcggatccgcaagagtgcctctcgcctcctaggctctgcgtactccgcctccgccgccccgaccgttgatgcggcgcctcggctcgacctgctgccgccgccgcaccccgcgccgtgctccgcacccgaatcctgcggcgggtccgccttctcgagcccctctgtctccactgcggagccctgtgagctcagccgttccccatgggacctcatcgccgacctctccctctccgacaaaaaggtggaggacgaactcgtggacaagtactttgtgcatgtcacgacccgggcgagctggctcttttcatccaccgtgtcagccaccacatccaccaagaagaagaagaagctgcctgctgcagtctacgaggatagcacgcagctgaggcgtgaggccgcgaaaaaaactgcaacgaatagggaggagggcgagactaagaagaaggcgaaggtgaagaaagaagaggtgcagcaggatggggcagcagcagcagcagcgcaggtctggaagtgcaagaagaacgatggcagacggtggcactgcaaccggccagtgagccaacctaacaccctctgtgagtaccatttcgtgcagaagcgctcctacttgaaccccggtttcgagttccactccacggcagaactggagggggcagcgccagcgccagcgccggtgcatgcagctagctccaagttgtccaccagcaacaagccacggaagaagaagaagcctggaaacgacttcagtgcgaccgagggcttctactactacgctggctttggcccgttccggaccaagaggcagtgtagaagcggcggcacgaacgagcctctgcctgcaaagcaagaagaggaggaggaaacacctgaatatgcttctcatcatacagaagaagaagaaaaagaagccaaagttgctggattcaccaatcaggctgcatctcaagatgacgtgtcgagttgtgacgacgacattgcagggatcgcgggcgtcgacgaagagagcagcgatggtgactacgatgggattggtctcggtggctgcaacgtggatggagctgctgatccccaggctagcatcggtgaggtgaggaggaaggccccctggaagcggtggaggaagcctgtgaaggcgcggtcgctcaagtctttgatgtga

SEQ ID NO: 1008 - DNA, 408 bp, Zea mays
  Peptide Sequence Number=SeqID_44383
atgacaaatgcaggtgcgctaccagttggtaccaccattgctgctgacaataatgatgctgatcatcgtgattacatcatagtggatgatttgtttgatgatgatgctggagataggggcggcgatcatgatgttgctgctacattgctagagcttgaggacacagagcttttcgagaacatagctaactgccttgatgaagatgatgttttgttttgtttggaaacccgagacactggcttcaacgagctattagatgtacttgctaaagcttttcctgagggtaacaaagtgaaagtgaatacctatcgagcaaagaagctgatccgcccagtggcaatgaaacttaagaagtttgacgtctgccctaaccaatgcatactgtatctggcgagtacgagagattag

SEQ ID NO: 1009 - DNA, 333 bp, Zea mays
  Peptide Sequence Number=SeqID_44384
atggccgctaaatgtagcgaaaaattggaaatcaccttctcctcagttggagcaagatctcgcgagagaaattttgttgatgctgacatagtcagggctatgaaatggattgatggcgaagtagtggacttccaagaaaacataagaaggtcttctgtcaaatcttcaaattggggtaaaaagttcttaatcgacatatggaagatcaaagggaaggaaattactcttgaagaatccaaaaagaataggaagaaggtgcaaagagtcgctcagaaggctgcagccattggagaggctctacaatcgaaggaaactgaagcttccccttcgtag

SEQ ID NO: 1010 - DNA, 303 bp, Zea mays
  Peptide Sequence Number=SeqID_44385
atggccatgatgggttcaacatcggaaaagatgtacctctgtcaggaccttgtcgatgtaggcttgctgatcgaggaccttttaactggtcacatgcctcatcacgggagccgccgacgacccccgccgcctgtactcgtggccagggtagctccgaccacctccgacgccgacccgcacaccgacgtgaccggcgtgacctcccggacgtcactgaccactctgccggagctctactgccgccgggggttttgtgcaatgtcagtgacccatgccaatagtagaccgaggactcttttgtga

SEQ ID NO: 1011 - DNA, 519 bp, Zea mays
  Peptide Sequence Number=SeqID_44386
atggcgacctgcatcggcattccgcccgacaactccctccgcttgatcttcttccttacggtggtgcgcaggatagagcttacgtttggtgccatggatgttttaatgattaggtaccttagagacgaccagcaaggacttggtaaaggccaaggtgttgaggaggagcaggataagccttcatggcgaggtcattcgtgtctcacgggtgataaccaacggagccgtggtgtagtgattgcgaggaaccgttcgctcggagccttggatcatcaacgtcgagatctccactcaatcaaattatcgcatctcacggaagatcgggccacgtctactatcaattggtatcagatttccaggttgcccatgagtgctggaccaaagaatcaaatggacaaggacaaggggcctaagcttaacgacgatgagtgtgtctctcagctggaattgaaggagatgatgcgcgcgatgactgaagcttttaaaaaaataccaggactctgcggcgacatcctatga

SEQ ID NO: 1012 - DNA, 156 bp, Zea mays
  Peptide Sequence Number=SeqID_44387
atggttaaaaattttagcagcagaacagtgcaaatagcaatgaatgctgtggtaacttcacacctactcgtctgtttatatagtactgcagcatttgagaacaagtccccaacaggagtgatgacaggaaaagatgaaatggaactcaaattttag

SEQ ID NO: 1013 - DNA, 645 bp, Zea mays
  Peptide Sequence Number=SeqID_44388
atgacagtcagcgtacagctgagttatcagccgaagtcggccgcttgcggtttgagctctctgaacgagactcaaccattgattaggccatcaactcacgctcaatcgcttggcatcgtgaagcaaaagctcgagcccgtgtggatgagctcagcacagcccttgataacctacaagtatattgtaatactctacatgaggaagtacatgtactgtatggtcgactacatccggacgtgcccgctgatcctgttggaatgggagccagaccatctgggacagcagatgccatcaaggactcgtgcacatgacggcgcgggtacttcccgtggtcgggaagacacacccaatccactgcctgtacctccaacgttgcccgaggctatcgctgccttggtcaatgcaaccgctgagaatacccgctttctacgtgaaatggtacattctaccctagtcaattgtgtttcagagcttacgcttggggccatggatgttttgatgattaggaaccttggagaggaccagcaaggatttgggaaaggtctaggtattgaggaggagcagcaagggcgcccacaacaggaaggagatcatgtccgactcggctgcggctccatctcgggttctaggaccaatctgcactaa

SEQ ID NO: 1014 - DNA, 990 bp, Zea mays
  Peptide Sequence Number=SeqID_44389
atggaacatctagcaatgaacaaggaacttaaatcttgtaatttagattggttgaagaaaatatgtctgcactatcataatgtatttcatgtgatattatggttcagtttttcgactctgttttttgcacatagagaaaacacaatgagtaccttaggacgtggtgttttgctcatatggctatttgttgtattgatcattcaatcaagctacactgcaagtcttacttccatcctaaccgtgcaacagcttgatacatctataagaggacttgatgacctgaaaaatagtgattatcctattggtttccaagttggttcttttgtcgaagaatacatgattaaggaactgaacatctcacagtcgaggctaaaagctcttggttctcctgaagagtatgctgaaaatctcaagctaggtcccaagaaaggaggtgttatggctattgttgatgagcgcccctatgttgagctgtttttgtcaacttactgcaagattgctgttgctggctcagatttcaccagcggtggatggggctttgcatttccaagggactcccctctgcaaatagacctgtccaccgcaattctgacactgtcggagaacggggagctgcagcggatccatgacaagtggctcaagacaggcgactgctcaacggacaatgctgagttcgtggactcgaaccagctccgcctcgagagcttcatgggcctgttcctcatctgcggcgcggcatgcgtcctcgccctgctcatctacctcggcatcacgatacgccagtacctgagacacgaacagccgggaccagcgatctccgtggacgcagggtcgtcgacgtcgaagcgcagtctccgaaaattcatctctttcgccgatgacaagcagccgccaccgaagaaaaagcgggccatgagcctctcgagaagttcaatgccaacgatgccgatgagtaaccgtcctggggctgatattgatgtagaaagctag

SEQ ID NO: 1015 - DNA, 927 bp, Zea mays
  Peptide Sequence Number=SeqID_44390
atgaagctgtggaaggagaccttcaggagttccaagactacgacgagttctaggcgtgggttagcggcaacccccagtcggctgcctgtgaaggccgcgatggctcgacttagacacactgcacgaaagtccgtcatccccttcttaccctcccgccttgctgagcgtccacttcgtcgtcacgtggccggacagtccagccacttggagagactgcaccaccgcctgcatgaggagcaggaacgtcgacgacaggagcagcagggctcttccttctcgctccaacaggagatagagtctgtgaggagctgctcccctgtgcttcccctggaggcgccccctgcaccaccactgggcgccccagcttctggagtagctgctggaggagacccagacgacggaggtggtgatgacagctcgagccacgacaccgacctctctgctgaccaggagccggaaggatgggttgctcgacccatcactcgcgacgctgctcgcgggtgtcacttccatgatgcgctcgacaccctgctacgtcgggcccttaaccggcgtacttggtccatcgagtatcgctgtgtggtctaccagcatagttgcggggtctacccggaccgctgggaggcaacctgcttgctgaggcagccatgcaagatgctgcacggcgtgcgcttcgcactactgctcggttctcggtgggtcaacctagccgccgtgctaaacacggagctggaccatgcattagacgagctgagtagggctcgtgctgagatcgccctgctgcaggctgagcgcgcggaacgtcgtcacctggatgatggttcccctgctcccgtcgggactcagcacccgtaccgctcacctcggcgtggacgccagccttatggcaaccccgactgcaagaccaagataaatctagaaccatag

SEQ ID NO: 1016 - DNA, 450 bp, Zea mays
  Peptide Sequence Number=SeqID_44391
atgcaggcggcatgcaaccgtgccaagtgggcgcgccccttcgacttcaacgagcccagcatggaggtccaggcccacgcgtcatgcaaccgttccagccaagtgcgacggtcaaatgcggtcaaagttgggccggcagtaatggcggtgacaggcgggcagaagcagcggtcacgtcgtcagccaagctcacgtcccatccaggggcagcgggagagccctctctcacggcgtgaagacggcgcgcccgtgatccgttcctcgaacggctcgcgcacgcgcaacggccaccccgcgaaccactcgcctcgtcgcattaactccgcggcgggacatgccgcctcagatcgattgggttctgcgcccactactggtcagaggttcgatggccggcccctcgaagggttcaacggctgcctcaggccactcgggctccgcgcccactactga

SEQ ID NO: 1017 - DNA, 969 bp, Zea mays
  Peptide Sequence Number=SeqID_44392
atggcgcagctacgggcaatgtcaatttatagtgccagcgggcggtggtcgcgaatttcgagcaagacgcgcggcggccggaaggaaagaagaacactggcgcagcggcttggtgtttactgccgtggcagttactccggtgagccacagagagcgagagtaagtcgcggcggtgcgatggaaagcgagagccatgcgacgcatggccgggaggcggcgatcaccggcgttcttatcgacttctaccgtggtgacaccgtacggtggccggagttctttaacggttggagcttacccacggcggcgtacaccggtgttacccacttaccccgagaacaatgtggaccggctgtcgcacgaatcacggcggcaattggtcgccgacggctcggactcgggctcagccccggaagagggcgaactctgctccgcctgacccagggctcggactcgggctcagacccggaagacggcgaactccgctccgcccgacccagggctcggactcgggctcagccccggaagacggcgaactccgctccgcccgacccagggctcggacatgggctcaaccccggaagacgacgaactccgcctcgcctgaccccagggctcagactcggcctcagccccagaagacgacgaactccgctccgcccgacccagggctcggacttgggctcagccccaggagacgacggactccgcttcgcccgaccccagggctcggactcagccctggcctcagccgacgatctccgcctcgcccgacccaggggctcggactcgaccacggccacggaggacagactcgacctcgacctcggaggagcctccacatcgcccaacctagggcacggaccaaccacatcggcaggaggcgccatcattaccctaccccgagctgactcaggctacgtggaacaagaccggcgtcccatctggctcactccaccagataggcaatga

SEQ ID NO: 1018 - DNA, 312 bp, Zea mays
  Peptide Sequence Number=SeqID_44393
atggcgcaaagtaaattggaggaggtggtgacgtcgcggcgagaaatccttgctcctccagttacggttctcgccccacgaggatccggctggaagaaccctctgaccgatcagacccacacctcagtgagagtaagggcttgggtgagcgaggcccaccagaccgtgactgatggcgtggagagggggaaagtgggctgcgcgggtgaattacttgggccgcatagagaagaagtcagggttttagtgggccgagaactattccctaatttaagcttgtctcataaatgggaatacaaagtgcaacaataa

SEQ ID NO: 1019 - DNA, 792 bp, Zea mays
  Peptide Sequence Number=SeqID_44394
atggctaacgtcgccgctatcctcaccgtcccctgctccgcgggccgccgcccgaagcggagcagccagccccgcggatgcggctccgtctccgtctccgtctccgtccgtgcgtcctccggcgcaaacacggtgactctgctggactacggcgcggggaacgtacgcagcgtgcgcaacgcaattcgctacctcggcttcgacatccgcgacgtgcagagcccggaggacatcgtcgccgcggaacggctcgtctttcccggtgtcggcgccttcggctccgccatggacgtcctcaacaggacgggcatggccaacgcactccgtgagtacatccaaagggaccgccccttcctaggcatctgcctcggtctccagctgctcttcgattccagcgaggagaacggcccggtgagcggcctcggtgtgataccaggcgtggtcaggcgattcgactcctcaaatggcctcatagttccacatattggctggaacgctctccagatcaccaaggacacaccactgttgcagggagctgatggccagcatgtgtactttgttcactcctaccgcgtactgcctatgctaatagaaactggatttcctccatatgcaactatggtgacagctttatatcctccatctcaatgggcaacattcaggcagttcaatttcacccagaaaagagtggagatcaacaacgctcctagtgaaaggagggaatccagtgatccagtcctttcttcctcaaaccagaaacctgagctgaagccctctcccaccaaaccatga

SEQ ID NO: 1020 - DNA, 1056 bp, Zea mays
  Peptide Sequence Number=SeqID_44395
atgaaggcggcagcgctcaactccagctacggtaaaagactgtacaagaggggtaacagcattggcacattggcgctcagtttcagctcccctgaattagtgttatcgtacaatttgaatgaaacactttatttacaggcaagaaaaggcttgccaacagaggaggatggctgttccagtgataacgacaaggctcatattacgaagcttgaaaacaagaagactcatctccaatctaaacttacggaggaggagaaagaaaatacagtcctccaggcaaatttagaaaaacgaaaagaagcattacacaagcgccgtgtagcacttgaaaaagaagtggaaaatttacgagaccagctactgaaggagagaagtttgagggcttctctggagtctgggctaatgaatatgcgaagaggacaagtgtccttcccctcaacgatagacaccaagactaaggctgatcttgaggaagttgctgccgttgaagctgatattatgaacttgaagcaaaaggtttctgatcttcggggacaactcaacaaccaagttcagttgagttccacctcgttatgtgaatcatgcaacaacaagcgatccataaatgcagacaagcttgtcgaaggtgaacaaaacgctgccctttctccacagattgcctcagtcgaagcaccacctattgtagggtcttattctgtacctgacatgttctgggctacaaaccaaatggttcagaagatgttgtattcaaagggtgagattgcgaaggatggccaagacggatcacttacatcaagatggaactttgcacagagaccacactcaaatagtccagtcatgagcagggttcaaggttccgatgcctattcaagtactaaaaccgaggaatctggaggcgcaccttcctctgcattagcgaagctgactacccgactcaactttttgaaagaaagaagggccttgcttgccagtgagatgcaaaacttagatctgggccgctcccaggcccagaggcatacagctcctccgaaagctgagactccaactgagaagtag

SEQ ID NO: 1021 - DNA, 1014 bp, Zea mays
  Peptide Sequence Number=SeqID_44396
atggggagcgcccgcgttgccttcgtcttgttgttggaggagcgcaacctcacggaggatgatgaccaccagttcgatggtggggagaagcaagccgggctgcggcctctgctccgccctcagcttcaaggatcttcatcatctgagctagggaggggggcggggcaggtcggggcctgtctccacgctagggcggccgccattcgttggcgtagcaccgacgcgcaggtgcccgctgtcgtcgatgctgaggtggtggtcgccagaggaggtttctccgccgacgagaccgttggcaccacccacggacagacctccggccctttggctttgatagcttgtcctcgcccctcgagtggggacgtgggcgagggccttgtcacagcagcgtttgccctgaggtcatcgctgctgctgtttagccgcccggagcagaggtcattgtcgttgctggtgaagtggtcgacggcgagccacctggagtttgtcgtcccgcaggccctccgatgtggaggttgttcatacccacgggagtggaaccggagttccgtttgtaatggcaccatgaatgtgggtaaccttcggtcgctctgcgatgagctggagccggaggtagcggcgtcggcgtggacagaggcggagtcgactcgaaaagaggtttcgtcggcccgagagcttgtggcttccctggccgaggaggccgaggtcctcgggggacagctggctgaggctacggggcagccaaccgaggacttgttcgtcggcagcagaatcgcttatccgagcgagagttacttttcgcggaaggtgatgagtgaggattctgttatcgatatagtcgagaaggcacaaaaatcgttctcgcagaaaagttttcgagtgatcccgctatcgaagctgtcgaaaagcgcgaaagatgttctggcagaaagactttttccgaggaaaattttgacgcattctagccccgagggagggtcgggctttgccgaggcaacgctgacccttccttga

SEQ ID NO: 1022 - DNA, 354 bp, Zea mays
  Peptide Sequence Number=SeqID_44397
atggatagaagatcagccgaggggtacaggtcatgccattcggttgtcgcgaagaatctgtcaatcctagtcatggtagggttagcttgttcatttgaccaggttcctatactagcagtgaaagagcatctggtcaatgctggtgtggagttctgtttctctgatgtcgcaactgctatcagatctgttggtggcagctggcagtgcataggcccctgtcgagaactgcagtttggagctcttaagtctcatccaaatggtgatccacaatatgcaagtgggtggagtgtttctctaaccgcaaaagatgttcacaaatatttggtgtgcaaggatgtcatccaaggcacttaa

SEQ ID NO: 1023 - DNA, 249 bp, Zea mays
  Peptide Sequence Number=SeqID_44398
atgtccggtgcaccagaggactccaccttcaaagtcgtcaccttcgggaaattccagaggcgactccgctataattcaccggactgtccgcggggcaacggctacttcggcgccaacggctacctgcgacgcattaaatgcgcgcgctgcgcgcgcagaggtcaggcacgcccatgctggaactttgtgttccaagtgattgagaagagaaagctcactcggtccgagggaccgtttgagagagggtaa

SEQ ID NO: 1024 - DNA, 477 bp, Zea mays
  Peptide Sequence Number=SeqID_44399
atgatgactgcctcaaagaaggttgcgccctgcagggttcggcgaccgccccagagcactcaggctccgagccctttactgatcaagggttcgaaggctggccccccggagggattcgacagccgccccagagcatgcagagtcagggataaccctgggtacgtccgttacatggccaaggctcgggctacgctcccgagcctcgggcgcaacagggagcttcgcctcgcccgaccccaggcctcggcttcagcctcggcctcgggagaaggtctccgcctcgcccgaccccaggcctcggcctcagcctcgacctcaggagaaggtctccgcctcgctcgaccccaagcctcggcctcgggaggagtcacaacctcgctcgacctcagcctctgccttaggagaagtcaccgcctcgcccgacctcggcctcggaccgactgcgctacaggggatacatcattaccctacctctag

SEQ ID NO: 1025 - DNA, 423 bp, Zea mays
  Peptide Sequence Number=SeqID_44400
atgcaggattggcgcaagtggcggtgcggtttctttgcacgtggtaaccggcctccagatggggtgcaccggtgttgccttcttctttctgctgttggaggagcacaacctcgtgggggttggcgctctttagtcatcgctcggcttcaaggattttcatcatgtagcccggctgcagttccccaccagtggtcatccaggatgatgaccatcagccttgtggcggagaagagcgagccggcctatggcctcccccctgccctcagcttcaaggatgttcatcatccgtgctgggggcgaggacaagccgagttggggtcctgccttccgcatgggctggcgacccgcttcttcctccagcattcgggggagaagggcgttcaccagccttgcggaggaggcgaactgccacctgctgcctag

SEQ ID NO: 1026 - DNA, 306 bp, Zea mays
  Peptide Sequence Number=SeqID_44401
atggatatcattagctttcgtcttgatgcgcttgcagaagtccacgacgggaagatcgccttggacaatggtgcgatgtttggtttcgaggatgagagcgtgtgtctcccgattcccaaagaaatggctttcaatggcgagctaggtggcgcgagcggtgatgacgcagttgccgcggcgcatgacaatgtcgacaaggtcgccggagagggtgtcgtagagccaggaacggacgacgcagtccatccacacccagtcgagcgagtcgaaggggaagatggccaagaaggtgacatggtttgctga

SEQ ID NO: 1027 - DNA, 471 bp, Zea mays
  Peptide Sequence Number=SeqID_44402
atggcctcggcaagtgtcggtggtattggaggtggattcggggtcgcctccctcccacgagaggcggcggacgtcgcttctcaattcattgattctgtcgtcatccacgacccaaatgtcaatcctgcgttggagttctgtttgaagctgatttacttttgcttcaagatcaacgatcagatcattactcccactactgctatcctcgtaccttggggcaagttgatgacgtggtaccccaattgggccaagaagggcttcgctccgatactagctatgatagaacctcccaagtcattaggcccacctaccgttgtccttgtccaacggacctcagacaaccctgtaggtgcccctgaattacttgataagtttggtatctgcttttcttacctttcccaagagcgtttcacccatcacgcagacattacagatcaccggagatacgaaaatgcggaagcgattacataa

SEQ ID NO: 1028 - DNA, 426 bp, Zea mays
  Peptide Sequence Number=SeqID_44403
atgacgtggattgttctcagcttatacgaaggcaaagaaacgtcagcaggacccagggccgcaccgtcagctacgcttctacagggctcaagcacttctccgctggccacattagcacgcagctacacccccatatgtacagctggatcacctccttgtatctataaaaggagatgcctagggccttcccacggcacgctgcgaggacgacggagacgaactcgctcaaacatcaaactcctcttcgcaacactagacttctcaagcgacctgggacccgttccttctctcgcgaagcttgtaacccctactacaagcaccccggtgcaagataatataagcctcatccccctcttgtgtttcatcttgcatcaatccatctgggcagggacacgtggcacaaaattcactagtcggttcggttga

SEQ ID NO: 1029 - DNA, 267 bp, Zea mays
  Peptide Sequence Number=SeqID_44404
atgaatatcaattgctgcatattaacaaagataggcatgagctgcaacgcggcgctcaaggccatgaaggcgctcgaggctgccctgcaggtggcctcagtcgtcgtcgtcgggttccttgccgtcgccaagggaacggtcctcacgtcgactgttcagagggtcacgatcgtgtcggcggtcgtgttgtgcttcgctgcctcccgctggcttgccaacttcatccagaacttctacttccaagactacatccacgtctacaagtga

SEQ ID NO: 1030 - DNA, 585 bp, Zea mays
  Peptide Sequence Number=SeqID_44405
atgcagtcggcatgcaaccgcgccaagtgggcgcgccccttcgactccaacgcgcccagcatggaggcccaggcccacacgtcatgcaaccggcgcgctggttgctacgtgcgagcaactgcaccgccactcgcaccactactgcgcctcctcgactgcggaaccagtaccgcgactcgaggcaaccctgcgtatgacccagcagtgccagccaggcgcgacggtcaatacggccaaaaatgggccggcattaatggcggtggcaggcgggcaggagcagcggtcacgtcgagaagcaagcgacgcttcaccttcgccataatgaccgcgtcgaaaaagggaccgggaaagggggatacaccgaaaaggatccttctccgtgaaggaaataggccccgagcctccctactgatcagaggttcaaaggctggcccctcggaggggttcaatggccgcctcagagcgcttgggttctgcgcccactactggtcagaggttcgatggccagcccctcggaagggttcaacggctgcctcaggccactcgggctctgcgctcactactgatcaggggttcgtaggctag

SEQ ID NO: 1031 - DNA, 591 bp, Zea mays
  Peptide Sequence Number=SeqID_44406
atggcggctaggattggatgcaaggtggggcaatacaatcgaggtgggccgcgcctccgcgaattgagccgtcgcaggaagacgaactatgtgaccactaatctgcgtcgcgtaaagaagaaacgggagtcaaactggcagcaccgagacagtgtcgagggagaggaatcgagaccatggaacacagcaccagcgaaacacagggatggtagtgaatacgaaggcggcggcgctgggcagaggaaggcgactgattgggagggaaaagaaaatactcgccttggtgccatggccgcgggagcagagggcggcggggttgcaggaccttcccaaggagagcaaaaatttaggtgggcgcgtccgcggatctcgccggtgtttgcctgcgcgagatggaggtgggttccgcagatggtggcggagcagaggggtaggagaggaggaaggggcggatcagcgtggggaggagggtggggatcctcggaaccttccagatcgaggcggggcatgacttgcggccgtgattggaggtcaggattgccagcgtccgcgggtctcgccggtgctggaggcaatgcagagatcgcgtag

SEQ ID NO: 1032 - DNA, 48 bp, Zea mays
  Peptide Sequence Number=SeqID_44407
atggcgctttctgttgacgtggtcgacttaaaagctttaactctctaa

SEQ ID NO: 1033 - DNA, 1821 bp, Zea mays
  Peptide Sequence Number=SeqID_44408
atgaccaccaagcgcctatcgcccaagcggctggccccagctccttccgctgccacgacaactcgcacgaatagcacaatcctggatcctcatccgcgttcgattgctgtggtcggaatggaatccgcgatgcagcagattttggaagccttgggccagatggaggagcgattgatgacaacgctgggaagcagatgcgacgcgatcgagcaccgcagcacgacgaccgtggaaaatctgaggggccgccgcggccccaccaccacttcctccgtcgccgcgccgcggtacgacgacgacgcgttcggctcttcggcgacctcggcgtacgatgacgagttcggctcttcggcgacctcggtgtacgatgacgtgttcaccactgtcgcccgcttcgcggcaccttctccttgccacgacgacgacctgcttggtgcgtttgggattttcatccccgaccgcgaggcgctcaacggcaaggcgacggcccacaaccgcttcgacaccgcaccgcgcatggaatcggagtcggagtcagagttcctcacctcccttgctgcccaggcttcctcggccgaggaggccatggtcacggccgcggacgcggggagccccgcaaggctcaacccgcgctacccgtgcctccccgagggcgcggtgttgttccatcgggatccggacgagaaggtcatcatcgacgggacggagttgtccggcgaagtccaccgcctctgtttctccttgtcgtcaccagaccaggcgatgaaccccgccactcggagtcagaggcgatccgctggaccctgctcgtcatcaagttggaagcgcggcacgtgcgactgcgtcaggacttgcgtcggcgtcgacgtccccgtcgcgcattctgagctcaaggtgttcgaccaaatgctcagcccatgctttgatggagagcctattttcgttgaggatcccaactactccatccccgacttcgtcaacatctcgtgccacgacaacgactccgtgcaaggcctgcagctggagcggctcgacctagcggggagagcgtccgacctgggcaccctcgccgtgctccccggcctgcacaccctccgcatctccgacaacgtgcgctccggtgcgttctccaacatatccacgctcgccgtgctcaacatgtcagcggaggtgatggggttgtccgagtcgggaaatggcgggaacgagcatccgcaggagcaaggtgatacttcagttggtgtcgtacgtgatgttttcaacccgtgcctcagtgaatctggtttcgataagcatctgaccagggccatcttcatcgaccttgactcaactaacgttggcactggcttcgggttgtggtccagcggggctaacaacaagaacacgtccatggttgagcagatgccgagtgctgttgaggctcttgcaaaagcaaatgtggaccaggattctatgcacaatgaagggcactcgacactccactatgttgttgtttatgaaatagaatacattgcagtggcagaagtgttcgtcaagcatcatgtcaaccttcagatcaaggacaaggttctcaactccttgcccaatatacaaccatggccaccacccatgttgttggtgatacttgctgatggcgttcaagtcagacctctaccatggccatctttttactgtcatgcaggaggagtctactacggtgatgtctgcatcattcctgtcttagtacacggcactaatccagctcgtttaaaggcacaaacaattagcatacctatggagtttgagtgcttggactatgcatggcctccggcaaattggtga

SEQ ID NO: 1034 - DNA, 72 bp, Zea mays
  Peptide Sequence Number=SeqID_44409
atgggcaagagggggagcgagggtgatgctggagactttgatggagattttatcgacgacgatgaatactaa

SEQ ID NO: 1035 - DNA, 480 bp, Zea mays
  Peptide Sequence Number=SeqID_44410
atggaggaaagagagaaagatggtggctgggatttggaagaggagaagcaggatgtgtccctggggttgctgctggcttgcatgaaaggagaaaggggcaaaagggttggcatggacaatgctgataagcaatacatttctagattccaacaacaacaacaaagtcttagtcccaagcaagtggggctttcatcaatcagcactaaattgtccaaaaaagcatacaccaagggatatcccattgcgaccccatccatcgccaaggcaaaaagtctgctagtcagactggcagtcaggtcaccaggggtgtcagggggcggttcaaccggtcctgacctgtctgacccgcctgcaggtcagtctgccagtcagtctggcagtcagactggcagacagtctgctgacctgtcagggggcggttcaaccgccctagggggcggctcaaccggttttctgcaaggtttctggtcaaacggctag

SEQ ID NO: 1036 - DNA, 441 bp, Zea mays
  Peptide Sequence Number=SeqID_44411
atgatgaggagcaaagaggtggtgcgccaggtgagaggcaaagtgttcctccccagactggtccgggggagaagcactcccagaaggatcctggggcggagggtgagaggacgattggcccggatccccgtgatacggaggcgggacaaactgctcacgatcatcaaaataagcttcttcttcttcttcgtcgacgtcgtctgctgtcataaaaggcaccccgtatgcctgctggtaccactcgttgatctccggaggaggaggatggagagaaagatgccgcaaacccgtgggccaagcgggcacccatccctcggccacgacctcgaccacgaccacgtggcgtgggagatccgcggccaggggagggacgcgaggcaccggcagcagcagcagcaggaccagcagatggacccgcagatgtatgagcacgagagctag

SEQ ID NO: 1037 - DNA, 654 bp, Zea mays
  Peptide Sequence Number=SeqID_44412
atgtccaaaccggacaaaactttccccctccttatcctcccggtgctccccagccttcataaccctggggttggaccactcttcgaggagatagagcttcaacaaaatctggcctttgaggggcatccggttgctgatagggatggcaattttacccgcgggttcggccgcctgcccgcccagccacaagcagccgccggccgccagaaaggccaaaccgcagaaccgagcgccctgcgtccggcgtccctgccgtccaggtccggctgccgtggtgctggtgagccgaagcggcaacaagcagaagaggaggccaaaatgaaggaggctgaactgatgcggggaaacccgttgattaatatcaacaatgttggctccttcagtgttaagagaaggtgggacgatgacgtggtattcaagaatcaagcacgaggagagaccaagacactgaaacggttcatcaacgacgccatcagaagtgatttccaccgtaaatttcttcagaggaaccttactggaatactacccactttaaaaagaatgagggtagaactcttgaatcttggggattttaactccttgaagtacctcataacaagggtgttacggggcctccttctgctgttgctgcttgaccaggctgcagagaaatga

SEQ ID NO: 1038 - DNA, 1179 bp, Zea mays
  Peptide Sequence Number=SeqID_44413
atggcggtcaggcaagaaccctgcattggagcttcctataaactgcagcagggcttaattcttagtaaagctttaagggctcaaaaagaagctgatgacaaaagttgtcaaattgcactcgggaaccttcggtcagaggaaaagcaagagataagtgaatggacaagctcaaggctagaaaagaatgttgaagagcttcgtgattctagggaaaggtgttatgaaaaatccttgaactgcgcgaagaagctaaaagatagctttgcgaagctgacctctctccccccatcggagccatataacctcgaagctgatccagttatgaaagaagctttagatgttatgcaaatttgtcggcgtttcgagacaggggggtccctaagccgacgaggcgacgtgggggttcctccgaagccgaggttgagtctgccttccgttgccgtggccgagcccgagcccgagccaaggggtcgggcgaggcggaagtcgttcggccgaggccagggcggagtccgagccctggggtcgggcgaagcggagtttcgtcgtcttccgggtgttagcccgagtccgagccctggggtcgggcggagcggaggtcgttcggccgaggccagggcggagtccgagccctggggtcgggcgaagcggagtttcgtcgtcttccgggtgttagcccgagtccgagccctggggtcgggcggagcggagttcgccgtcttccgggtcttagcccgagtccgagccctggggtcgggcggagcggagttcgccgtcttccgggtcttagcccgagtccgagccctggggtcgggcggagcggaattcgccgtcttccgggtcttagcccgagtccgagccctggggtcgggcggagcggagttcgccgtcttccgggtcttagcccgagtccgagccctggggtcgggcggagcggagttcgccgtcttccgggtcttagcccgagtccgagccctggggtcgggcggagcggagttcgccgtcttccgggtcttagcccgagtccgagccctggggtcgggcggagcggagttcgccgtggcgcctttggcaaggcctgactgcctgtcagactcactctgtcgagtggcactgcagtcggagtggcgcaggcggcgctgtccttctgtcagactggcaagtggagcggtggagtga

SEQ ID NO: 1039 - DNA, 840 bp, Zea mays
  Peptide Sequence Number=SeqID_44414
atgtggcagccggagagatctgggcaccctgctggtgtgatgtcgtggctgtcggagggcgacgtgggggttcctccgaagccgaggttgagtctgccttccgttgccgtggccgagcccgagccaaggggtcgggcgaggcggaagtcgttcggccgaggccagggcggagtccgagccctggggtcgggcgaagcggagtttcgtcgtcttccgggtgttagcccgagtccgagccctggggtcgggcggagcggaggtcgttcggccgaggccagggcggagtccgagccctggggtcgggcgaagcggagtttcgtcgtcttccgggtgttagcccgagtccgagccctggggtcgggcggagcggagttcgccgtcttccgggtcttagcccgagtccgagccctggggtcgggcggagcggagttcgccgtcttccgggtcttagcccgagtccgagccctggggtcgggcggagcggaattcgccgtcttccgggtcttagcccgagtccgagccctggggtcgggcggagcggagttcgccgtcttccgggtcttagcccgagtccgagccctggggtcgggcggagcggagttcgccgtcttccgggtcttagcccgagtccgagccctggggtcgggcggagcggagttcgccgtcttccgggtcttagcccgagtccgagccctggggtcgggcggagcggagtttgccgtggcgcctttggcaaggcctgactgcctgtcagactcactctgtcgagtggcactgcagtcggagtggcgcaggcggcgctgtccttctgtcagactggccagtggagcggtggagtga

SEQ ID NO: 1040 - DNA, 198 bp, Zea mays
  Peptide Sequence Number=SeqID_44415
atggagcaacggctcccagcgcaacggttgacttcaacggtcactgccaaacgctacagaagctcgcaaccaacttccattggaggcgattttggaggtctatattacataaaatacaagggggcaggttttgatcttcattttttggaggaagttgctaagaaaggtagtgatggagaggacatcgtggatgtataa

SEQ ID NO: 1041 - DNA, 501 bp, Zea mays
  Peptide Sequence Number=SeqID_44416
atgaagaggatggtgatcgtgaggcggtgccacccgccgccgcctccaccggtgctcctcttcggcgggtgccccagcgccgggggcgtgcgctacggggagtgccggcggaaccacgcggcgagcatgggcggccacgccgtggacgggtgccgcgagttcctggccgagggggaggagggcaccgccgccgtgctccactgcgcggcatgcgggtgccaccgcagcttccaccgccgcatggtgcagcgctcctgctgcttctgctgcgacagcgccgacgttgccgttgccgcagccgcagccgcagccgcagccgccgaacggtgggacgacgactgctcgccggagtcctcggcatccagttccacacccagtgaactgtatgctcgcagccagcttccattggaggcgattttggaggtccagatttcacaaaaatataagggggaggttttggtcttcatttcttggaagaaggtggataagaaagttgcttaa

SEQ ID NO: 1042 - DNA, 306 bp, Zea mays
  Peptide Sequence Number=SeqID_44417
atgcgcaggggtgcacggctcggggaccagctgcagaccgcgtaccaggagaaggccgccctcgaggaggagatcgagaccctgaagggttccgccactgccgagggcaagggcgtggaagagggatgtgattctgttgctgctagggccgggacgcctaaggatcatggcgtggtgcctcccgcactgtattattatgcatctgatggtatggtattgtctctgatagatccatttgctaaggctaatgctgaggagtctggtgttgatcttggaacgaaggattatgtgcatatgcgcatctaa

SEQ ID NO: 1043 - DNA, 546 bp, Zea mays
  Peptide Sequence Number=SeqID_44418
atgccccgagcgcggcagtgtcgaacacccgcttggcgacagccctcacgttctctctctacgttctctctctgctcccgctccgcactcggctgcagcaatggtgatgtctcgattgtcctcgccgatggccagctggaagaggtgatcggtattaatacacaagggcaaggtcgcgatggttgcaacggccccgggttttcctccgtgcattccggcaacaggaccaccggcgcccgcgcgttctgttgtgcccccgcacaagaggaaggagctgacgagatggccccatcggcagcgacacttcgtccctcgccaagcgacagacaaatgggcccccatgctttcgctgcgctagtcacagttgaggcacgcccaggggacgacaaggccgatatcccaagtgggccgccacagcgaaatttggcccgggcgcagccgttcacctcggtagtgtctaagggccttgcaaaccctggtgacatgggatacacgacttgtgggtacagggtacaacctctgcagagtgtaaaactggtatactag

SEQ ID NO: 1044 - DNA, 243 bp, Zea mays
  Peptide Sequence Number=SeqID_44419
atggtctcccattccggttatggtgggtacaagtgcggtcaatgcacgacggcagtcggggtcagtgaggcattgtacgccaaggcgatgacttctcacggatgctcggatgaagggaatgcacattcccacactgacgggcttgcacaagagggtttcccccgtatcttgtgggaggtacttcagggagctggttacacgacgcctccccagtacgcggtggagctgttcgagaagcactga

SEQ ID NO: 1045 - DNA, 366 bp, Zea mays
  Peptide Sequence Number=SeqID_44420
atgataaatcttaaccataacaacttcagcaaaaaccttgttaaaattttcactaatacattaaagactcagctagtgcttttggcaaaccaacccctcagccaaacagcttcatggtctagaggtagaggagtagtctcctcacaccgggtgcgctacaggatatggtttgttggggccttccttttccgaaggaagcttcggctttgggatgaaggttctctttctggtgaaagcatgtgtgatatggagcatttgagaacaaggaccaacatggttgatggtgtgacttggccttccaccctgccaccgggttggacggtcgagtgggatgctgccttgacaggagagggccaggaggagtag

SEQ ID NO: 1046 - DNA, 552 bp, Zea mays
  Peptide Sequence Number=SeqID_44421
atggcgcgtactaggaaaacagcgcgcaattctactggaccttttggtgtgccacgacatcagctagcttccaggcacgaaggaagtagtagtggcagtaataacccaattggagacctggaagccagggtggaacaacttcggtcagagttacgccacaggaacaaggcacatgaacaggacagttaccgtatagcggaattgtcagccgaagtcagtcgcttacagtacgaaatctcggaacgggatacaaccattgattgggccatcaactcgccctctttcgcttgggactgcgaagcgaaagctctagctcgtgtggcagagcttagtgcatccctcgaaagcctgcaaatgccatcatggactcgtgcacatgatggtgcggagacttcccgcggtagggaggatactcctaacccgccaccagtaccatcgactttcgccgaggctatcgctgccctggtcaatgccaccactgataatacacgcttcttgcgtgaaatggcgggcaatcagttccaacagcacggaggaagagctcctccttaa

SEQ ID NO: 1047 - DNA, 195 bp, Zea mays
  Peptide Sequence Number=SeqID_44422
atggaaacagggagcctgcacccgaacgtgccaccagaggttgcagcaatgggagctggaacatctggagcagctggcggaggaccttatggggagttggatctttttggagcccctccttccatgaacattgcagatgaacgttctcctgaagctggcagtggagcaggagcagccaaggatgaagataattag

SEQ ID NO: 1048 - DNA, 78 bp, Zea mays
  Peptide Sequence Number=SeqID_44423
atggcgccaccagcgactgaacgcgccgccgcggtgggtgtgggcgctgtcgtgcccagtctgctaaagttcctataa

SEQ ID NO: 1049 - DNA, 165 bp, Zea mays
  Peptide Sequence Number=SeqID_44424
atggggttacaggtgcacgctatttatactccaaaggcgaagtccgagcccgagaaaggagatgaggatactcacaactcttttcttcttcactcccccggtctcttcgtcaagtctatcataatcaggatattcgaagccgagagcatccaccactcgatttaa

SEQ ID NO: 1050 - DNA, 315 bp, Zea mays
  Peptide Sequence Number=SeqID_44425
atggaccagcgcgcatgcccgccgagatccttggccacgtcgcctgcccatgcaccccagttcccttttgagctccgctcgcacccgcactcgctcccctgcctcatttcgcgcaagctcaccctctctcgcgctctcctctcaccgctcggcctcgccagagttccgcgcccgccgtgctggacatccaacccgccagaagctgcgcaaagcgaccccgagcttcgccctgagagttcggccgcggcagttcgccgcgcccgctcggtgactggccgaattagcccggtctggtgcccctgcattggtccctga

SEQ ID NO: 1051 - DNA, 123 bp, Zea mays
  Peptide Sequence Number=SeqID_44426
atggggattagctctccccgagcagaaagggaattacggctcgtgggtaaagtaaagaagaaggagaaagacgtcaaggtggatctccatgagttccaggacttcgacgagttcgaggattag

SEQ ID NO: 1052 - DNA, 1491 bp, Zea mays
  Peptide Sequence Number=SeqID_44427
atggaggacttaagtaacatgaccccgaccattgtgattgggaaaatcgcggcttttgagatgtcgcgaaaaatgtgtcggggagaggagccaactccctcaaggccatatgcttttgcatgtgatgagaggaagggtaaaaagaaggcttccacaccaagttcctcaagtgaagaagaggaagaagaagaaagtgatgatgatgaagataatcaaccatgcacatcatcctccgaggacgaagaaacaatccgacgcgtcggaaaggtaatggggatgatccgcaagattaatctaatgggtgtgcccctgcaggtcgaagatattctctttaacattgacaggaaaaagcaaagaaagagaggatgcttcgcatgtgggaaaaagggccacttcagggacaactgtccaactatggccaaacccaaaaaggagaggagcaaaggcaaggcgctaacaagtgttagaacttgggatgactcttcaagtgaagatgaacctccaaggacgtgcagccaccggtcctcatcacgatcatcacggtcatcacacaaatgccttatggcaagaggtaacaaaagcattccatcctctagtgatgaaaatagtagtgatgatgaaggtgagggaaagccctccgtagatgagcttgcggaagccgttgaatttttccaggatggtaatgatggcgcctcctgtgacgtgcttggtctgagccctgggttgggcgaggtggaggctcctccgaggtcgaggtcgagtctgtcttccaaggccgaggtcgagtccgagcccctgggtcgggcgaagcgaagactgtcggcggaggccagggctgagtccgagccctggggtcgggcgaagcggagttcgtcgtcttccggggctgagcccgagtccgagccctggggtcgagcggagcggagttcgccgtcttccggggctgagcccgagtccgagccctggggtcgggcggagcggagttcgccgtcttccagggctgagcccgagtccgagccctggggtcgagcggagcggagttcgccgtcttccagggctgagcccgagtccgagccctggggtcgggcggagcggagttcaccgtcttccggggctgagcccgagtccgagccctggggtcgggcgaagcggagtttcctatggcacctgaggccggacttggctgatgtcagcatcactctgtcgagtggcacaacagtcggagctgcgcaggcggcgctgtcctcttgtcaggccggccacccttgcattaaatgcccctgcgattcggtcgggttggcgtggcgacttggcccaaggttgcttcttggtgaagactgggtctcgggcgagccgaagctttgtgctgatgggggttaccagctgagatttaggagtcttgaggcccgggtgcacggtcgggtcccaagttctcaggctggtatgttgacgctgtcaacggtttggccggagccgggtgagagcacctag

SEQ ID NO: 1053 - DNA, 1710 bp, Zea mays
  Peptide Sequence Number=SeqID_44428
atggacaaggatcgtcagggagctgcgcagaagcgccaggcggtcgtcaggctgcatgaggccaggccgaagaggtcgcgggggaccgcgaaggctgctgcccccggcggaagccagccgacgctggcggcgaagtcggccacccctgggtccagcagggtgccggaggctgtgaaggcggccgccgccggcggtaccaagtctgtcccggccggcgctgcgaaggcccgagagcttcctccgccgggtaagcgcgttgctgacttcgccaccgacattagcgtggatgattatcttgttgggtcgggcgaaggccaacttgttgttgttccgcctgccgtggctaccgcggcggctgtcgtggtgcccagggcgaagggtagtgctcttggtgccggtggtgagattctggcactcactgccgtcagggacgaggcgggcgctgtgtcccgccggctgaaaaaggcattaagtcaggcggctgacttcgcagaccgcgcggcgtcgggggcccttacggcggttgtttctgccgaagtcgagagacttcgggcgcaacatgctgacgccgtccgggaaaagtcggccgccgacagcaagtgccgcaagttggcggataaggtggccgcgctggagggtgagaggactgacctccggcgccaactggcgaaggagaggaaggaggctaatgagtccctcgccaaggcgcagtctacgcaagcggaggccaatttggcgcaggcgaagggcagtcttgccagacagcgcgccgaggaattggaggagcggctcaacgctctgcaggcccgtgtggagagggccgaggcttcgacccgctcggaggctgagcggacacgcaaacagcttatggactcataccatgagctgggcgcgcggaccgctgacttcgaagtgccagaccgagagcccggacttcgctgcctcgagtggctgcaggaggagttgctggcgctccccgccatcgtggaggggtttatgtcctatgcctccctagtcacctgcttaggggcgatgaacgcgctgtcccgcgaagggtgccgacactatgaggtcttcgaccaagctgatgaggatttcgagcgtgagatttacaaggttgagggccctgtggtgaaggaatccgcgggagccctcttcgaccggatgtggggccctcacggtcgggaggtggtcagggagcggtccgagacggcgaggggtcaggcggcgcgtaatgagaaggtggaggacttcggggctttgaacagcgtgcagcctgattcggagtcgaacccggtggcggctgtgaccgaggccgccccggcaccgcccccagaaaccgtcgaaggcgcccctgaagcccctgcagccactgcggccggcagtggctcgtcgccaactactgcgccgagggctgaggatcctgtgaagatggcggcggagccggcagcggaggatcccgcgacggctgggtcttcgcaggttcaagattttgggcctgcgcacgcaaccgctactgctaattttttggcggcttcgaccgtggatgatgggaatgaatcggatgaatctgtgtctaagttttctgattttggtgactctgggactttggttgagtggactgaagagtcgtcggatgaggacttggattactttgcggccttggatgtggcagcggcggaggcttcgccgcgtgctgtggatgctgaa

SEQ ID NO: 1054 - DNA, 435 bp, Zea mays
  Peptide Sequence Number=SeqID_44429
atggcgcccgcggccaacggtcatctacgcgatcaacgagtgacacgtggccgagccaacggtcacttggtcgcaccggactgtccggtgtgcactggacaatgtccagtgcgccaaggggaccgaaggtccaacggtcggcttcgccggaaaaggaaggagatcgggcaccggacaagccacccgactgtccggaacttcaagtccgctgcaacctactcgaagggctttttcattccactgcgatccagccttcgagtagagtcgatagggaaaatagtatttaggcatgagatgcccaacctagaggccatattagtcaaggatgcaaaacatgattggaaatcggtggggagacccatactaggatttctcaaaccttctacaaaccctcctcattcaacactccccctcgaggaagctaatcaagggtaa

SEQ ID NO: 1055 - DNA, 840 bp, Zea mays
  Peptide Sequence Number=SeqID_44430
atgtgttgtgtggctaataaaaatgatagcggaagcacaaatgaggatgaggaggaagaaagaaactttgtgcatctctacgctcgcctaagccaagaagataaggcggtcatgctcaaacttctagagagagcgagagagcaaagcgaagctcgtcaaaggctagaagatattctctccataaagatgcaacaccttgacgagttgactaaagaacatgaggagctaaagtgctctcatgttgatttggtccaaagcaaatcttcctttgagctagaatttgcaggaacaaatgatgattcatatcaaaagctcaaagaagaaaatgagaggctaaagaagagcttgacacaactaaaagggaaatgcattgcccaaccttctcaagataactgtgatcacatggtgaagaagcttgagacgggaacaaccgttgcatgcactacatcccttgaagaaaatgtcaaggatttgaggattgcaatgaggagggaacaaaatatgaaattcaacacctcctccaaaagcctcaaccacgcctccacaaaaggtaacatccaagaagggaaagtacacaagcctcatgggttgatcttcacccaaaagaagaaaggaaaaaggagaattcatgattcatttatgcaacttgtgatccgtttgatatatgctaacaataacttgaaaaagatcactagttgtagaactctctcttgtgcaaagtatttccatatattgtcattgagtataggtcttaagcatctaagactaaggacaaagcacaatgaagagagcgtctctatgagaaggtacaaaagggtaaaatcacttcctttcatttaa

SEQ ID NO: 1056 - DNA, 459 bp, Zea mays
  Peptide Sequence Number=SeqID_44431
atggcgttgaacagggttgacttgccaacattaggaagaccgatgataccggcacggaggctcatgctaatccgtgggccgcggctggacgagaaccgccgggcgcggcaggcccggccccaacgccagtgctggagcaacgccgatgagccgcacagggagtacagggtcaccgtgaccggccccaccggtcagccgcttcgtcatcctccccgcatacgacgccccgtcgtcccttcaccgccgtcccttccccgccgtctcttcaccgccgtctcctcgccgcacaggaaagtttggcaccgcttcgtcctcctccccttgaccagcgtcctcgccaagctcaccgacggcaaccccgccgcgaagctccgccacctccccgcggacagccccctcccgacctcctctgaccaaattgaggccacctctaggtccgccatcccctccccatgctaa

SEQ ID NO: 1057 - DNA, 408 bp, Zea mays
  Peptide Sequence Number=SeqID_44432
atggcgcttcctgtcgacgtggctggcctgtgccctaggttgggcgacgtggaggctcctccgaagccggggttgagtctgtcttccatggtcgaggccgagtccgagcccctgggtcgggcgaggcggaggtcgtctgtaacaccccgtccaatccctggaccggtgccttgggccaggacatcccatcccaggggccaggatatcacatcgtcagcagaggccgagtccgagcccctgggtcgggcgaggcggaggtcgtcagcagaggccgagtccgagccctgggtcgggcgaagcggagttcgtcgtcttccggggcttagcccgagtccgagccctgggtcgggcggagtggagttcgccgtcttccggggcttagcccgagtccgagccctgggtcggtga

SEQ ID NO: 1058 - DNA, 447 bp, Zea mays
  Peptide Sequence Number=SeqID_44433
atggcgccgagctcggcgccaagatctatggcgccgagcttggtgccacgtcggtgccacgacgtccgtttttgccagcgtaacacgcacctcggcgccatagcctatggcgccgagctgtgttacctcggcgtcattggctattgcgccgagcaaagggatcccgacggcagcgttccattccactggggcgttgataccgacggccctctcgcggtatctgacgacgccgagctcgtgaaccatgtctatggaagatcctctgccctgttccccgaaggtaaagcacccaaaggaaaacaaacgagcagaagcggttctctgtcgctctgcactcggttctcgcccgctgacgcctgggcgcacgatgcctgcgccgcatcaggcaggcttctccacgacgtccggagggccgacgagctacgagcacccatgaacgagggttga

SEQ ID NO: 1059 - DNA, 726 bp, Zea mays
  Peptide Sequence Number=SeqID_44434
atgggcgcgagccccttcttctacctctggccggcggcgagtagcagccccacctccctgcgcccttctcccccatgggctgcttatccagctcgtccctctcctcccctctattttcctgtgcgtgcgcagaggctcctccatggccgtcggccccctgcagcttcccaagcgccccctctctcccatggctgggcagcagctctgctcgccccctcccatggcgcctccacctccctgcgtgccctctgcccttcttcctcccctggccgagctactacgcaaagcagcggcagcagcttccttggacggcgcccagaaattccagcagagctcgccccattttttttcctccctggccgaaggttccccctgctgctagctcggcaaccatggcgagcagccccggcagcgagctcctcccttgctttgctgtcggacgtccctgccactacctcactccctcgtcgcgcagcgaactccatcgccaacctgcgcagcaagctgcgcgctgcagcagcagccatgagatcccgtccgtgtcgccagcgtcgacccgatttgcgcagcggtgccggtccaccgcagcagcaccatgctgcgccgttgatctgcgcggttcgactgtctccgcgtctcgcttcgccgaatctacgcagcgccgacgtgccatcgtgggaacccgtggtgagaccccgctgtcctgcgctttttgtgttcgattaa

SEQ ID NO: 1060 - DNA, 243 bp, Zea mays
  Peptide Sequence Number=SeqID_44435
atggagctgaggaacagggagccatggagggagcgtacacaggggcgtcgggtcctgagcgtccctgctggaatggagctcggccatgggaactgctccctgcgcctgcaccagggaaggagcgacaacgagcagctcgtggttcctgagtgtgttgctgaagatccctctgagcaacaacctggaggagatgctggcaacatggaggactttgaagagttccaggactacgatgagttctag

SEQ ID NO: 1061 - DNA, 225 bp, Zea mays
  Peptide Sequence Number=SeqID_44436
atggaggtgcctgaggccgccgaagctgttggcgtgagcggcggcatgaagttaagcattcaaaggcatgagaaatccaagaaggatattgaagttgtaggaattaaaggattatcctgtgtggaaaaccaaagcctacaacatggaggaaagccaaaggatggtaacacttatgtctttaagtgcaagtatcttcaattaccatttctcttgtgtcttgtgtag

SEQ ID NO: 1062 - DNA, 1362 bp, Zea mays
  Peptide Sequence Number=SeqID_44437
atgcaggcggcatgcaaccgcaccaagagggcgcaccctttcgacttcgacgcgtccagcatggagacccaggcccacacgtcatgtaaccggcgcgccggttactacgtgcgagaaactataccgccactcgcgccactaccgcgccttctcgattgcggaaccggtgccgcgactcgaggcgaccctgcgcatgacccgacagtgccaacagagcacatcggtcatgggtcagtcaaccgcgggagaaggcgcgacggtcgatatggccagaaatgggccggcagtaatggcggtggcaggcgggcggaagcagcagtcaagtcgtcagcaagctcacgtcccctcctgggacagcaagagagccctctcccacggagtgaagacgacgcgcccgtgttccgttcctcgaacggctcgcgcacgcacaatggctgcccgcgaaccactcgtctcgtcgcattaactctgcggcaggacaggcggcacctttggcaggtgaagcaggcgacgcttcacctccgccatgacgaccgcgtcgaaaaagggaccgggaaaggggatacttcgaaaaggatccttctccgcgaaggaagcgggccccgagcccccctactgatcagaggttcgaaggctggccccttggaagggttcaacagccgcctcagagcactcgggctccgcgcccactactggtcagaggttcgaaggtcggcccctcggaagggttcaacggccgcttcaggccactcgggctccgcgcccagtactgatcaggggtttgtaggctggccccgaagggttctgacagccgcctcagagcacgcagagcgagggatgaccctggaagacagcgccgcctgcgtcgctccgactgccgtgccactcgagagagtgaggctgacagcagccaagtccggcctcgagcgccataagaagctctgcctcgcccgaccccagggctcggcccccgtctcggcctcggacgatgaactccgcctcgctcgaccccagggctcggactcagcctcggctccggaagacgacgaactccgcctcgcccgaccccagggctcgaactcagcctcggctccggaagacgacgaactccgcctcgcccgaccccagggctcggactcagcctcggctccggaagacgacgaactccgcctcgcccgagcccagggctcggacttagccttggcctcggacgacggtctccgcctcgcccgacccggggctcggactcgacctcgacctcggaagacagactcgcctcgacctcggaggagcctccgcctcgcccaacccagggctcggaccaaccacgtcacaggggggccatcattaccctacccctag

SEQ ID NO: 1063 - DNA, 384 bp, Zea mays
  Peptide Sequence Number=SeqID_44438
atgtctcagctaatggcattggtggaagccaccaagatcaccctagataacagagaggaactcgtggtagacctgtccacggagatggtggaaaaggacctacaggtggaacagatggccaaccagatccaagagcttgaggagctagtgggagccaaggagaacaccatcgaggttcttgaggatcagctgataaacactcaacaactcgaggaagctaaccagcatttggatatgcaccatcaggagattcaggacatggaggccaacgaggatgttgacattgagggaggagtggagccggagcccgcatctagcctggacactgctggctcagggagacccccttcccccgagtcaagcgttgcctcatttgtccattaa

SEQ ID NO: 1064 - DNA, 162 bp, Zea mays
  Peptide Sequence Number=SeqID_44439
atggggatgcgtgtctacaagacagaaattggaataaggattaaggtgtggtactgttctctggaggacatggttgctggagtgacttggccgtccatcttgccacctggttggacagtcgagtgggatcctacctcggcagaggaggagcatgaggattga

SEQ ID NO: 1065 - DNA, 270 bp, Zea mays
  Peptide Sequence Number=SeqID_44440
atggctcgacagcgaacacaggcatggtttgcctgcggcggcggactctcccttctcggcaatggtgcgcggcggcggtggatcgatctcgaactcgacccccagcaggagaatggaataggggagagtggggctgaagcagcccgatatatgcggcgaagcaaatcagcggtccaacaaccacatgcaaggttgggaacaggcgtaactcttacccgatcaacgatcaccttctctgaaaaacaacaaacaagcaagggtgagtactaa

SEQ ID NO: 1066 - DNA, 870 bp, Zea mays
  Peptide Sequence Number=SeqID_44441
atgacttctcacggatcctcggacaaaggtaatgcactgtcccacaatgacgggcttgcacaagagggttttccccgtattttgtgggaggtacttcagggggccggttacacgacgcctcctcagtacgcggtgcagcagttcgagaagcaccgagtgccccgctgtagggtgaggatgacccttgagcctcatcccctgcagccaggctggcgttcgctggactctgagtcctttggataccgggctgaggatacgatcgaggcgattgcccttcacggactgaccaccttctgcggattccaccccttggagctatccactcaccccattggcttgttccccgctgagaaggaggacgacccaatgtggaaggaccgagtggagcatgccaaggacatctgggctatctacccaggtcagactgctcacttgacagtgcggtgcatgaatgccctgtaccgtctgcaagtgatgcgtggtgaggcaatgtcccatctgatggcattgttggaggcaactaagatcaccttggataacagagaagagcttgtggttgacttgtccactgagatggtggaaaaagacttacaggtggagcaactgttaaatgagatccaagagcttgaggaactggtgggaacaagggagaacaccatcgaggttctcgaggatcagttaattaacacccagcagcagcttgccgaggctaacgagcacctggatatgcatcaccaggagatccaggacatggaggccaatgaggatgtcgacatcgaggcaggagagaagcctgcctccagtttggacactgcgggctcagggagaccaccttcccccgagtcgagtgttgcctcatttgctcactag

SEQ ID NO: 1067 - DNA, 375 bp, Zea mays
  Peptide Sequence Number=SeqID_44442
atgcaccatcgagtgcaaagagaaaaagaaaaaacagggagaagctcgaaagacatccctaaggggatgcagagcacgacgaagctacaaaaagctgttcctaagggagcgcaacccggacttcaaaaaagcaacagctgtaccccgagaagcaaccagggcacagaagtcgccatgccaagctatgacttcgtcaagatcattaatttcaccttcaatatgctcgaaggcaccaggcaggtcttcagccgaaggagtgaacttctcgctgctggctccaacaaaatagaacacctacttcagctgttgaacgcatcgattgctgaactccaggcatttattctgaaggcgtgtcaaagattctttcagctctga

SEQ ID NO: 1068 - DNA, 336 bp, Zea mays
  Peptide Sequence Number=SeqID_44443
atgcaggataggggcatgagcacaaaaaaggatggagctaaggcaaggattgtaatcgacaagaaagaaaatgcaaccaagggcagggtaggtaaaacaccattctcaaatcgagatggaaaagaggatatttcaaaaggcaggcataagttaagcatcatgggaagatctagagattacaaaggcacagggtgcaacctgcgtaaaattacatttaagtcctttataattgactacaataatgacacaaaacatcaagggtctttaagtcaatccatctttaagtcggtttggcccttcgtctttgagatctatcattgtgccgaagctctctag

SEQ ID NO: 1069 - DNA, 639 bp, Zea mays
  Peptide Sequence Number=SeqID_44444
atgactctgggtacgtctgttacatggccgaggctcgggctacgcttccaaggtaccctaggacatttccgagaccagcaggagcgattttgtaacggaatcccatcagagggaggcatcgagccctcagaccctatcgaacgggtccgggtccggcaaatcacttgcagtcggcaaggtcgaagtgactgcagtcacttcgctcttccactcaccgacctgataggaaaacagcgccgctcgccccgctccgactgttgtgccacccaccagggtgaggctgacaacggccaagttcagcctcaggcgcaacaggaagctccgcctcgcccgaccttaggcctcagcctcggaaggaggtctccgcctcgcccgaccccagggctcagcctcaacctcggcctcggaaggtggtctccgcctcgcccgaccccagggctcggcctcaacctcggcctcgggaggaatcgcgtcctcgcccgaccccggcctcggcctcaggagaagtctccgcctcgcccgaccttgggctcggaccgaccgcgccacgggggatacatcattaccctacccctagctagctcaggctatgggggaacaagaccggcgtcccatctggctcgccccggtaacaagtaa

SEQ ID NO: 1070 - DNA, 894 bp, Zea mays
  Peptide Sequence Number=SeqID_44445
atgggcgactgttgcgccgtgcgcatcaggggatcatccaagacaccgtacgccgcatgggcggcgttcgtgttcttggattgtcctcactccggcacaacgcctccacgcggaggtcggtgcctgcccgtccacgaggacttgagtggggacctgccggtgcaggctggggcagcctccattcgttggcgtagcgctggcgtgcaggtggccgctgtcgtcggtgctgaggtggtggtcgccagaggaggtttctccgccgacgagaccgtcagcgccgcccgcggtcaaacctccggctctttggctttgatggcttgtcctcgcccctcgagtggggacgtgggcgagggccttctcacagcagcgtttgccctgaggtcatcgctgctgctgcttacccgcccgaggtggaggtcgttgtcgctgctgatggagcggtcgccgacaagccacccggagtttgttgtcccacaggccctctggtgtagaggttgttcatacccgcgggagtggaaccggagttccaaccttcggctgctctgcgatgagctggagccggaagcagcggtgtcggcgtggacagaggcggagtcggctcgaaaagaggcttcgtcggccgaggagcaggtggcttcccaggccgaggaggtgcagcggcggcggctggagcttggccaggtcatccgtgagcgggaccaacctcggagtcatgctgccgaggccgacttgttcgtcggtagcagaatcgcttatccgagcgagagttacttttcgcggaaggtgatgagtgaggatcccgctatcgaagcagtcgaaaagcgtgaaagacgttatggcaaaaagacttttttcgaggaaaattttgacgcagagggggttccccccttctag

SEQ ID NO: 1071 - DNA, 210 bp, Zea mays
  Peptide Sequence Number=SeqID_44446
atggagccaatttgcaaacacaccagttccaccacccctccgacacatatacctgcacctggagatagggttacgcccgaagcgggtgttagtgggtctgatcccgcagcagggactggatttgttgactcgctcttcgcgttccctcctcctggtggtggtggcggcagcggtcaaagctctaaccacccaagtggtggttatctataa

SEQ ID NO: 1072 - DNA, 591 bp, Zea mays
  Peptide Sequence Number=SeqID_44447
atgactggcacagggttgattctgggagaaccttcttcttatcttctcttcactatattcttttctcttctcacttttcacttttcactgcctctttctttctctttgctcttcccactggaggagtctatcgatgagtattaccatcatacagaggaggaaaccgaagactatgaaccatgtacaacagtcttcaacccaagaatcaccaagcattgtgatcttaggggcgagggagtggaaaatggagttgcttgcgatttggcagaggggatttttatctggcgtgtgcttttcttgggatgggaactgagggagctggtgcggaagttttataggcgagcggtatgcgaggtggtgctcgggtgcggagtggtggtggtggagcaggtgccatgtggcagcggatgcgacggaggggaaagggggcatggtgttgctggcagtgatggcggctgtggtgcgctgcaaaggtggcgtgggcggcggtggtgcgcatggaggcgggcacgcgtgcagggggcacgggcttcaaggggctctggccaaagtgaagaaaaacttcactacccaatgcacgcagagggctag

SEQ ID NO: 1073 - DNA, 990 bp, Zea mays
  Peptide Sequence Number=SeqID_44448
atgagggatgagaaaagggcagtgtctgtactaaacgatgttttcaaaaagtgtatgatgaagggtattcaccctcgtcacttttttgagtgggatgatcagggactccctggtttaggggagggcctaagggttatgaaggctggggagcaccgggaggataaggagggggaatgttttgtccggtttggacatggcggtggcctgactccttctggtataaccgttaagacccttcttttcttctaccagatggaagcctctttggtcattaggacatcctactgctcagaggtggaaagattccctcatctcttgcggagttgcgcgcttcgcatggggatccgcaagaagccggagtacgactggaaagaataccacgagaatggaactgagaagtgctctatggcagtctacctgggagaaagccgaagctacccgaatcaccctcctttccaagtcaccttcagcggacaccgcttcccagactcttgccaaaatgttgcccgaaaagctctccgacagctatgccaaaactacagcagggaggtctttgaaaccccccttcgttacttcccacctagcaacaaaaatactcctgcctataggaaaagtcttcaggccctgtcaggaagagatcctactgaggatgaccccaccatcgtctacatggccggatatctccacaccctcgataaccactatgacgacctttcctcccactgcacccacctaaactctcgggtggagagcttagagcaacaggtcaaggaacttaaaaaggagacggcgtccctccaagaaagtctcgaaatagcagaaggtgaagaggccaacactcgtgaagcctaccgaaccctgaagatggattacgataagaagctaaagaagctcgcccccacgaagaaaatccggaagaggaccaagagccaaggatgccagactaagcggaaaaaggaagcctcccaccagaatagagaacttgtctga

SEQ ID NO: 1074 - DNA, 996 bp, Zea mays
  Peptide Sequence Number=SeqID_44449
atgaaaattcctcagttctacccttgtattcggagcaacgcatcactaaacctctcaccttgtgccgccgccctaggttcccgtcgccgctggtggtcgccgtcgccgtggaggcgcgcggcgctgcccctgcagttgtgccgccgccctaggttcccgtcgccgctggtggtcgccgtcgccgtggaggcgcgcggcgctgcccctgtcgtggctccatacaccctcgatcacgcggctgctcctcgcccggagcccggtagacatcgccgccgctggtggtcgtcgtggaggcgcacggcgctgcccctgacgtggctccaggcgccctgggccacgcggtcgccgtcccctgccgtggctccagagtgcttcgggaatcgccgttgctcaccgagcgagggaagggagatccacgccgccaatcctacgccctcgccctttgcgcggagaggccgccagatccacgacggggctactccagagctcgccctgctcctcttcgccctcgccctgctcctcttcgccctcgccttcgccctgctccctccgcgcgccgatctatcaacggggttgaggacggtggggttgcgaggacgcacactgagcgagggaggagggcacgacccatcggtggcgtgggggggggcgtcgtcggcgggatctgccgacagtggccgacgacgggaggactgggacctcgccctgctcctcttcgcctctgtagaggtggggtgtggcgacgggccgactgggggacagtgggcggcgacggctggactcctccacctcccggcgcgacggcgggaggactcctccacctcccggcgcgtgaaggtctggcgtcccttttcgattggggaattgttggcacagttgagcaccgctggccaggctgggacccacatgacagtaacgccaacacgacggaaacggcgcgagatggcaaagttgagcactgcatggcacaccagggtgaaaaacgagtatgggtaa

SEQ ID NO: 1075 - DNA, 876 bp, Zea mays
  Peptide Sequence Number=SeqID_44450
atgcctgccccgcctcctcctccatcggcggggaaggtgacgggacagacccggacgtttctcttccgccacgtggggaagacgtcgtcgattccgccgccggcgggcgggctgacggccgccattgtcgttgtcgcgcggcggaggaaggagtatcatgtcgtagctgccgtcgagggacatgaactcaagactcccaaaacgaagcatcgtcccgggttggagaggttgctggagactacccatctagagcttgacggaaagttgttcgtcaacacgcaacaggcccttacctggcacgccaactgtcggcgtttcgaccccgaggggtccctggaccgacgagtaaattgtcgccgcgtgtcccagcccagatgggtcggcgtgagacggaacacaaaggggggaaagacagcaaagaggaaacccgcgaccttcgtgttgtcctgcgcccaggtcgggtccgagcccgaggtcgggcgaggcggaggctcctccgaggtcgaggtcgagtccgagccctggggtcaggcgaggcggagaccgtcttccgaggtcgaggctgagtccgagccctggggtcgggcgaggcggagtccgtcgtccgaggtcgaggctgagtccgaaccctggggtcgggcgagacggagtccgtcgtccagcgtcgaggttgagtccgagccctggggtcaggcgaggcggagcttcctatggcgcccgaggctggacttagctggtgtcagcctcactttgtcgagtggcacagcagtcggagcagggcaggcggcgctgttttcctgtcagttcggtcagtggagcggcgaagtgactgcggtcacttcggctctgtcgactgaggagcgcgcgtcaggataa

SEQ ID NO: 1076 - DNA, 1521 bp, Zea mays
  Peptide Sequence Number=SeqID_44451
atgggcggcgagatgaagcccgggaggggcctcaggacctgggcgcagcgccacctcaacgtcaccttcgccgtcggcttcctcctcgtgctgctcacctacctcgtcgtctcgcggcagctcgccgtcgccgcgcccggcggtgcagcgtcgagggtggtggcgggtaagcaggtggtcgtcagagacgccggagacaacgcagagggcgcgagcaaaaggcggcaggaatggcagccaaaacaggcggcggcggaggaggaggagacgtccggtgccgtcccaacggaggaggaggagtcgtatccgaaaagagatgaggccgacggcaaaccgtctgcagaggcagagacgacgacgacgacgacgagcaaggccgtgtgcaacacggacggccccgtgtccgagacgtgcgacctggacggcgacgtccgcaccaacggcagcgccctatctgtgacgttcgtcccggcgagcccgtcggagcggcgggagtggaaggtccggccgtactcgcgccggaccatggtgggcgtcgacagggtcaccgtgacgcggctggggtccccggatgacccggcggcgccgtgcgcggtggcgcacagcgtgccgggcgtgctgttcgcgctcggcgggctcacgggcaactactggcacgacttcagcgacgtgctgatgccgctgtacgccgcgtcgcggcggtacggcggggaggtcctgttcctggtcagcaacatgcagccgtggtggctgggcaagtacgaggccgtggtgcggcggctgtccaggtacgacgccgtggacctggaccgggacgcgcgggtgcgctgcttccgccgcctcaccgtgggcctgcgcctgcacaaggagctcggcgtcgcgccggagctcacggcgccggaccggctgaccacggccgacttcacggcgttcctgcgcgagacgtacgcgctccagcgcggcgcgccggcggcggtcccgacgacggaggggagaaagccgcggctaatgctgatccaccgcgcgcactaccgccggttcgtgaacgtgccggagatcacgcgcgcagcggaggcggcggggttcgaggtggcggtggcgagcccgcgcggcgacgcgcccgtggaggagacggcgcgggcggtgaactcgtgcgacgcgctgctgggcgtgcacggcgccgggctgacgaacgccgtgttcctgccccccggcgcggtgctgatccaggtggtgccgtacgggcggctggagcgcatggcgcgccgggacttcggggaccccgcggaggacatgggcctgcgctacctggagtacagcgtgtccgcggaggagagcaccctgctggagatgctggggccggagcacccggtgatcagggacccggactccgtgcaccgcagcggctgggacaaggtcgccgagtactacctcggcaagcaggacgtgcgcatcgacgtggaccgcttcgcgcccacgctcgcgcaggcgatggaccacctgcggcaccgccaccagtga

SEQ ID NO: 1077 - DNA, 174 bp, Zea mays
  Peptide Sequence Number=SeqID_44452
atggagagtcatgatctccgggcagaatgggaatcacggcttgtgggtggttatgagactgttgaatctggttataattatggtgctggttgtcagcattgcaacccctgctcaggcgaagatgaagctgtggaaggagacttccaggagttccaagattacgacgagttctag

SEQ ID NO: 1078 - DNA, 2301 bp, Zea mays
  Peptide Sequence Number=SeqID_44453
atggaggtagttgagttggttccttgtgcccgcaataaatggggcaactggcatgagttttggttctacgttgcggagggcacagtcgaagaccatccggggctccccgtggccgagatgtgctcgcattattactcagcatacccgcagtttgaagtggcggaggaggatgcaagcgaaggggcccttcggtgcacggccggcctgagcagcgtgcgcgatttggttgaggagtttgtggcgtacggggtgtggcctttggcgcatggctgggcgctgggcgaagtatgccctcaccagatgccttcccatggtaggaagctggtgcgaagtcccaccttcgcactggatctgcatagccgcgatctggccgcctttgtgcgtgaggcggaggatggggcagtgcggatcgttggtcagtacgtgccgaagacagagggccagcgtagctgggatatacgcgggtctaatgaccgcttgaacagggtcttcgagttgaaccgtctgtcgtatggcggttatcgcgggcaagacgatgtggatcgtcgcgggaagaagccggcggcagaggctggagacgaccccgcgccggcggccgccccatcctctaagaagaggaagctaggtattgctacgggaggactgggggtttccgatggttttgctagggaattgatgaggacatgcgcggccccagggggaaggatgtcttcgcccgagctccgggagtcttcggcgcggatgctgagggttaccgggggttggtggcctaagaatgttcctatccccagcgcggtcggcgaagacttttttacatctcgcatggttcatgattggagagtgtttccttacgggcggaatattgttgttgttgtgtcggcagtgatggacaaggatcgtcagggagctgcgcagaagcgtcaggcggtcgtcaggctccatgaggccaggccaaagaggccgcgggggactgcgaaggctgctgccccggaggaagccagccgccgctggcggcgaagtcggccgcccctggggtcgggcgaaggccaacttgttgttgttccgcccaccgtggcgaccgcggcggctgccgtggtgcccggggcgaagggtagtgctcttagtgccggtggcaagattccggcactcactgccgtcagggacgaggcgggcgctgtgtcccgccggctgaaggaggcattaagtcaggcggctgacttcgcagaccgcgcggcgtcagggggccttacagcagttgtgtctgccgaagtcgagagacttcgggcgcaacatgctgacgccgtccgggaaaagtcggccgccgacagcaagtgccgcaagctggcggataaggtggccgcgctggagggtgagaggactgacctccggcgccaactggcggaggagaggaaggaggctaatgaggccctcgccaaggcgcagtctgcgcaggcggaggccaatttggcgcgggtggagggcagtcttgccaggcagcgcgccgaggaattggaggagcggctcaactctctgcagacccgtgtggagagggtcgaggcttcgacgcgctcggaggctgagcggacacgcaaacagcttatggactcataccatgagctgggcgcgcggaccgctgacttcgaagtgccggaccgagagcccggacttcgctgcctcgagtggctacaggaggagttgctggcgctccccgccatcgtggaggggtttatgtcctatgcctccctggtcacctgcgaaggggcgatgaacgcgctttcccgcgaagggtgccggcactatgaggtcttcgaccaagctgatgaggatttcgaacgcgatatttacaaggttgaggaccctgtggtgaaggagtccgcgggagccctctacgaccggatgtggggccctcacggtcgggaggtggttagggagcggaccgagacggcgaggggtcatgtaatatttgacttttgtttggtgttcattgaatgtgggttatatgtgggtttgctgaatttgtgtgttgtgtctcaggcggcgcgtggcgagaaggtggaggactttggggctttgaacagcgcgcagcctgactcggagtcgaacccggtggcgcctgtgtccgaggccgccccggagccgcccccggaaaccgtcgaaggcgttcttgatgcccccgcagccactgcggccggcgaaggcccgtcgccaactgccgcgccgagggctgaggatcctgtgaagacggcggcggagccggcagcggaggatcccgcgacggctaggtcttcgcaggtggcttag

SEQ ID NO: 1079 - DNA, 234 bp, Zea mays
  Peptide Sequence Number=SeqID_44454
atgacgctgttggaacttgctctctggcgcaaggtgatccaacgggggtacgatgtcaccgattacggcgaaggcatcgagcgaagggtggcgtcttcgccttcgccccaacatttgccctccgagggaccagttcgactaagtcatctggtgccgaagacgtcgctagatggcggagacgctgccctcgctcgaagtggttccgcgggggtttttgacatgaccgttgattga

SEQ ID NO: 1080 - DNA, 1155 bp, Zea mays
  Peptide Sequence Number=SeqID_44455
atgagccgccaccgggtcgagacctgcgactcgtggcggcccccgcggaagaaccacgccggtgcgccgccgctcctccgcgcggggcctcggctcctcgccttcgcctcgctctccgtccgcgacggcggggactccgccgcggccgtcgccaaggcggttgaggaggcggttgtcgtacgatccgatgaggtgaaggaggcggtggccggggaggagaggaagaagacgaagtcgacggagcgcaggctgccccccgcggcgcagctgacgcatagcgtgcgggtggcgggagagagtgccaagaagggtgttggatttctcgagacattaccttctgaacttacattttctgtggaaatttctcatctcctgcgctacgttctttgtggaaaattcacatcggtggaatattctgaagctatggcagacattggaaagaaggatgggcttaagggttactggaaaggaaaccttccacaggtcattcgcataattccttacagtgcagtgcaactcttctcgtatgaagtttacaagaaaattttccggagaaaggatggagagctttctgtatttgggagacttgccgctggtgcttgcgcgggcatgacatctacacttgtaacttacccactggatgttctccggctcaggctagcagttcaatctggacacagcactttatctcaggttgctcttaacatgctgagagaagaagggctggcctccttctatggaggcttgggtccatctcttgtagcaattgcaccttacattgctgtgaacttctgtgtttttgacctgatgaagaaatctgtaccagagaagtacaagaatagaccagaaacatctctggcaaccgctcttctttcagcaacatttgcaactttgatgtgttatccgctggacactgttaggagacagatgcagatgaaaggcacaccatacaatactgtttttgatgctattccaggcattgtggagcgtgacggtctaactggtctttatagaggttttgtgccaaatgcgttaaaaaatctaccaaatagcagcattaaactgaccgtgtttgacacggtgaagacactgatagctactgggcagaaggagatggacaaattaattcaagaaaatgaggagaaaagaagctag

SEQ ID NO: 1081 - DNA, 735 bp, Zea mays
  Peptide Sequence Number=SeqID_44456
atggcggcctcctcctcccgcggcggcgccgctgcctccgctgatgacgacgacgagccctacctcctgggcttcatcatctccaagatcgttggtatgctctactaccgcggcaaggtcgccggccgcgagccgctcaaccagtacgacaacaacgccatcgtcgtctttaacgcccgcaacgaccaggttggccacctcccaggcgtcctcgcggcagtgctcgccccactcctcgactcccacctcctcgtcgtggcgcagggcatcatgccccggtcgggctcgaagatcaaccccaacgcttacagcctcccctgccaggtccacctattcgcgcgccccgccgccgcctccgtcgtcgaggccgcgctccacgaggctggcatcgacctcatccacgtcgaccaccccgagttcaccctctcccaagcgggcgtggtcatggagcagttcaagaaaccggaccgcgaccacgatgtcgataagctcttctcgcttgtggggaaagaagggaagaatcagactcagcgcatggacccgcccggggatgtcgtgctatccgagctcttcggacaccagaaggaggcgctagggtggatggtgcaccgggaggagtctgccgacctgccgcccttctggcaagaaggtgaagatgggggattcgagaacgtgcttaccaatcaaaagacggagaaacgaccaccgccgttaaaagggcgggatctttgctga

SEQ ID NO: 1082 - DNA, 450 bp, Zea mays
  Peptide Sequence Number=SeqID_44457
atgggcaagaacaacaagcgtaagcgtgagccgactcctccatcggaggagtttggtgactcggaatactcggaggaggagttctcctccgagtccgaggggtctccggctcctgcctctcccccggcgtcgtctgatgactcggacgactcccaggggatagccgcggaggtctggacgtatatccgggccgtcgagcgcgccgggctcgaaggctcggacgagtcggagtgctcctcggatgaggaggactcggacggcggcgacgagggtgaagacgacgacgacgacgacgacgacgacggcgacggtggcggcagtggcagtggcaggggcggcggcgacggcagcagggacagcaccaagggcgacagcaggggcagcaccaagggcagcagcaggggcagcaccaagggcggcggcggcggcaggggcagggccagtggctag

SEQ ID NO: 1083 - DNA, 582 bp, Zea mays
  Peptide Sequence Number=SeqID_44458
atggcgcgtacaaggaaaacaacacgcaaatctactggaccttttggcgtgcctcaccatcagctagcccctagacatgaagggagtagtagtggcagcaatgacccaattggagacctgaaagccaaggtggaacaacttcggtcagagccacatcaccggaatagggcatgggcgcaggacagccagcgtatagctgaattgtcatctgacgtcagccgcttgcaatatgagattttagaacaggatttggccattgattgggtcgtcaactcgcgttcgatcgcttgggaccgtgaaacaaaagctcgagctcgagctcgtgtggcagagcttagtgtggccctcgatagtctgcaagtgtactgtaatactttacatgaagaagtacatgtactgtatgctcgactgcacccggacgtgccttccaacgctgctgtaatgggagtcggaccttcaggaacaacaaatgaaggacctgatgaggagttggacctttttaggccccctccttccatgaaccttgctaacgaacggtctcctgcgacaggaaatgaagcaacaaaggatgacgaagactag

SEQ ID NO: 1084 - DNA, 108 bp, Zea mays
  Peptide Sequence Number=SeqID_44459
atggcgagagtagcgtgtaccttctgtggcaagatgctagacggtggtggtacccaaggaagagccccaacagtgaagtcgcgggaggatgttggcctcccactttga

SEQ ID NO: 1085 - DNA, 147 bp, Zea mays
  Peptide Sequence Number=SeqID_44460
atggcggagtccacagggcttataagctcacgcccccgtggatcacggtgggcagatgtaattgtggacattactccacaacccatcacactcaatcaaagatccaaatcagacaagtatcataagaacaagcattcaagttcatag

SEQ ID NO: 1086 - DNA, 606 bp, Zea mays
  Peptide Sequence Number=SeqID_44461
atggtggaaaacatattggacaccgatcttgtggattttgtagccatcctgtcttcagcggagttcgcgagagagctggtggcatcacatgctttcctgttggagcagttggccgagggcgggctcgagcgaggcggagatccctctcgaggcagaggccaggtcttggcgtcgcatgtagccacgctttgggcagttagagcagtggtcggggtgggggaacaacaccccgtattcgtgcctcgaccaccgtcattgtggaaagaacagtgcagcacagtaccacgcagaagtcagagcagcgaagtcagaggggcaccggactgtccagtgccgcaagaggacaaagcctctaacggtcgaccagctccgaaccctaacagttgggtgcgtggtggcgcaccggacaaggaacgttgcctgtccggtgagcccatcgccatcagcctccccaacggctatggaagtggttggaccctgttttttgacggggcgctgatgagcacaggggcaggctcgggtgtgctcttcattcacgttggcgggaagcacctgcgttacgtgcgatgtctttgcttaccggcgtacaatgatgtggttaagtaa

SEQ ID NO: 1087 - DNA, 780 bp, Zea mays
  Peptide Sequence Number=SeqID_44462
atggcgcttttccccccgtcctccttgcggaaaggcgacgcaggggctcgacagagccgaagtgaccgtagtcacttcgccgctccactgaccggcctgacaagaggacagcgccgcctgcgccgctccgactgctgtgccactcgacagagtgaggctgacagcagccaagtctggcctcaggcgccagaggaaactccgcatcgcccgaccccagggctcggactcgggctcagccccggaagacgacgaactccgcttcgcccgaccccagggctcggactcgggctcagccccggaagacgacgaactccgcttcacccgaccccagggctcggactcgggctcatccccgaaagacgacaaactccacttcgcccaaccccagggctcagactcgggctcagccccggaagacgacgaactccgcttcgcctaaccacagggctcggactcgggctcagccccggaagacgacgaactccgcatcgcccgaccctagggctcgaactcgggctcagccccggaagacgacgaactccgcttcgcccgaccccagggctcggactcagccctggcctcagccgacggtctccgcctcgcccgacccaggggctcggactcgacctcggccttggaagacagactcgacctcgacctcggaggagcctccacgtcgcccaacccagggctcggaccgaccacgtcataggaggcgccatcattaccctaccccaagctaactcaggctacggggaacaagaccggcgtcccatctag

SEQ ID NO: 1088 - DNA, 408 bp, Zea mays
  Peptide Sequence Number=SeqID_44463
atggctagggaaaacgaagaagagattgaagtgactgaagagaagacaccaccaccttcggattctcaggccgagaattgtttctacttcgatatctgcgggtccgagcctgactcacctactaacgaaggcaagccctgtttatgtaatcgcttccgcatttctatatctccgatgttctataatgtctgcaagacgggtgaaacgttcctggaaagtaaagctactaaaagtgaaaagaaggcttatcaagtgcccgtaacattggctgaacgggactttcctataaatatgattgttctgaaaggccaagacatagatgtcatcttgggcatgaattggttagcccagtataaagcaattctcaaccctgatatgagaaccatcaggttgagttatggccaatag

SEQ ID NO: 1089 - DNA, 696 bp, Zea mays
  Peptide Sequence Number=SeqID_44464
atgaacaagacaccggcactcaaggtgccattacaaatggaactccggttccacctccgcaggtacgaacaaccccacatgattggagggcctgcggagcaacagaaggccgacgggtggctcgccgccgcccgctccaacagcgacgacgatgacttctgctccgaggggccgaacaacagcagcgatgacctcagggcggatgctgctgccataaggccctcgcccacgccctcactcgagaggcaaggacgagcagaaggccgtagagttggaggtcagtccgcgggtggcaccgactatctcgtcggcggagaaacctcttccggctgccgcggtggaaggagctggtggtcaccgtcttgggtgaccaccgacgaggggatgcggccgggctgcctgatgaaaatccttgaagccgaacgatggatgaaaggtaccaacttccacgaagttgcgttcctccaacgacaaggcggaaggattgcgggtgttccccatccgggggctcggaagccatcgcgggctgagtcttctccaacacgctccaaggtcctccccctacgacacgggggctgggtcccacgcgtcatgcaagctggcccagggcagaagaagccaaaccgccgcgcgcggtgcatgcaactgcccagcggttacaagcattcctccactttcgcccagaccagcgggtga

SEQ ID NO: 1090 - DNA, 1377 bp, Zea mays
  Peptide Sequence Number=SeqID_44465
atgaagatccttgaagctgagggcggggcagaggccgcagcccggcttgcttctccccaccatcaaactggtggtcgccgtcttggcaagacgaaagcaacgcgggcgctccccatccgggggctcggaaggtggaaggacgcgatgcatgaggggagtgcgaaggcatggctgccatccaagggggtcaccccctttttaaaggtgactctccccacctacgtcctcaaccgtcgcggactgagtcttcaccaacacgctccaaggtcctccccctgcgacacgggggctgggtcccgcgcgtcatgcaagctggcccagggcagaagaagccaaaccgtcgcgcgcagagcgcaccagcaggtgaaagggcggaccgccatgcaggcggcatgcaaccgcaccaagggtgcgcaccctttcgacttcgacgcgtccaacatggaggcccaggcccacacgtcatgtaaccggcgcaccggttactacgtgcgagaaactgcaccgccacttgcgccagtaccgcgccttctcgactgcggaaccggagcagcaactcgagacgaccctgcgcatggaccaacagtgccaaccgagcacatcggtcacgggtcagtcagccgcgggagaaggcgcgacggtcaatacgaccataagtgggccgatagtaatggcgacagcaggcgagcggaagcaacgatcaaatcgactgcaggctcacgtcccctcctggagcagcaggagagccctctcccacggcgtgaagacgacgcgcccgtgttccgttcctcgaacggctcgcgcacgcacaacggctgccccgcgaaccactcgtcccatcgcattaactctgcggcaggacaggcggcacctttggcagggaccgggaaaagggatactccgaaagggatccttctccgcgaaggaagcgggccccgagccctcctactgatcagaggttcgaaggctggcccctcggaagggttcgacagccgcctcagagcacttgggctccacgcccactactggtcagaggttcgaaggctggcccctcggaagggttcgacagccgcctcaggccactcgggctccgcgcccactactgatcaggggttcgtaggctggcccccgaagggttcgacagccgcctcagagcacacagagcgagggatgactctgggtacatccgatacatggccgaggctcgggctacgctcccgaggctcgggggctgctctcgcaaacccagctccggcaaaaccgttgacagcgtcaacataccagcccgagaactcggaacctggctatgcacccaggctacggccagttcgcatgagggaacaaccagaccggctgaggcatcacgaaaggcattaa

SEQ ID NO: 1091 - DNA, 591 bp, Zea mays
  Peptide Sequence Number=SeqID_44466
atgccggggaaggcgaactgttgctgcccagccagggtgcaacattctgtcctttgtccgggcgatggtggccagccgcaccggggggtctcccaacacgtcgtacgccgtgagggcggcactcgtgttctgggacagtcccattctcgttttcgtgacgaggacgggagtgaggacttgccggtgcgctttggggcggccggcgcccgctggtgcggtgttggtgggcaggtggacgtcaccgtcggtgctgaggtggtggcagctggagaaagcttctccgccgacgagaccgttagcgccacccgcggaccgacctctggctctttggctttaatatctggttctcgtccccctcgaggggacacaaacgagagccttccggcggcagcgtccgtcctgggaccatcgccgctgctgcagaggtcgctggcgagtcgcccggagttcgtcgtcccacaggctctccgatgtggaggttgttcatacccgtgggagtggaaccggagttccgtttgtaatggcaccttgagtgtcagtgtctgttcattgtggttgtcggggcctgaacatctatgtattttggcgtaa

SEQ ID NO: 1092 - DNA, 342 bp, Zea mays
  Peptide Sequence Number=SeqID_44467
atggcgcggggagctttgtttgcctggaacacctcgccgatggccttccaaagggcgctcgcagtctgggtgctgtcggtcatggcgaggttgaggacggcgtcggaggtggtgctgtacatccatccgcggacgcagaagtcagcctgtgcccatgccgcatcggtggggcgcgaggtggagagaacaagtgagaaagaaaagaagcaatccaagcgcaagagctcaaatgaatacggcaaatcactctcactagtcactagggttttgtgtggaattggagaggatttgatctctttgaatgtgtctagaattgaatgcctagctcttgtaagtggttga

SEQ ID NO: 1093 - DNA, 348 bp, Zea mays
  Peptide Sequence Number=SeqID_44468
atgtccggtgcacaccggacagtccggtttcaactccagggtcatggggacgtggagcttgatgttgatggtggcaaaggggcagaggacaggagcagaatcggcagcatcggagatggtgctcatggcgcagggaaggggaaggagagggcagacggcgcggtctggttaaggcggcgcggctggaggagagaagctccctttcacattgtcattatagttgtcttcgatgctgatcgttaccaccctaatagtgtcctctaccaacataaacatagaaggtataaccttcatgtttatgtgtacgtagtggctagagtttacgagcaaggtctctctgtggtctaa

SEQ ID NO: 1094 - DNA, 960 bp, Zea mays
  Peptide Sequence Number=SeqID_44469
atggggatgatccgcaagattaatctaatgggtttgcccctgcaggtcgaagatattctctttaacattgacaggaaaaggcaaagaaagagaggatgctttgcatgtggggagaagggccacttcagggacagctgtccaactatggccaaacccaaaaaggagaggagcaaaggcaagacgctaacaagtgttagaacttgggatgactcttcaagtgaagatgaacctccaaggacgcgcagccaccggtcctcatcacgctcatcacggtcatcacacaaatgccttatggcaagagagaaaatggaaattcttagcatacacaatgatgagctaactactaagctagaaaacattggtagcaccccagtagcatctttagttaaaattcctgaaattattaaaaaggatgcttctacttcttgctttgatttaattaatgatactaacccctgcaaccaagttcttgttgagaatattgttatagaaacatgttcggatgaggttgcaaaggaaaatgagcaattaaggcaagaagtggctcgtcttggcaaggctttgtatgacaagaaaggcaaagccaaacaaatccgacctccacaggataacaccactgtgggagtgaacaagcctatggagggagaaactgtcatttgtaggttatgccacaaggaaggccacaagtctttccaatgcaagacgatgaccggggataagcaaaggcaagagctcaagcaaaaaccatcaagcaaaatctccaacacctacatcaaaaaggaggacaaaaagactgctacaccatatttgatcaagaagaaaaagaatggaaaggtgatagcaatcaaggccaacaagcaagccaacaaaggaaagggagccaaacgcatctgggcgccaaaggaaataatttcaaccatgaaaagcaccaagaaggtttggatcccgaaagggaagtga

SEQ ID NO: 1095 - DNA, 438 bp, Zea mays
  Peptide Sequence Number=SeqID_44470
atgaggaacccaaagccaagggtgaagaagaaggcttgcaaggatgttggagctaagaaatgtcaatctagatcaagtcaagccgacttgatgatttatgagtccaacatcaaagctcaagcatgtgaaatgaaacagaaagaagaagaaaaggaacgaggtgcaaaaggcttggttgtgtacagccaaggttctgctcagtctgggtgcaccggactgtccggtggctcaccggacagtgtccgatctgagcaaacggaggaaggagttgaaatagactccaagaccaggcgacatccagatcctgttcccgggtcaaagagaactttcacattgccgtgtcacacatttttcgtgggccctgaaggcattgcatatgttggcacattgctatttgtcgctgaacgatatgaagcaaactttaagataaatgactag

SEQ ID NO: 1096 - DNA, 93 bp, Zea mays
  Peptide Sequence Number=SeqID_44471
atggctgccagggccgcgcgactgctggcatgggtgcggctcctagcgcggcctcagctcaggcgcacggccttcggcatggcgttccactaa

SEQ ID NO: 1097 - DNA, 144 bp, Zea mays
  Peptide Sequence Number=SeqID_44472
atgttcgggttacaggtggcaatgagattgatggttcttggttttgactctggtaatggttgtccgtattgcaaccactgctcaggagaagatgaagacgtggaaggagacttccaggagttccaggactacgacgagttctag

SEQ ID NO: 1098 - DNA, 1044 bp, Zea mays
  Peptide Sequence Number=SeqID_44473
caggatatgaagcggttgctagcctggtcgaccatcactcaacttggctggatgttcttcggcttgtcgctctccatcttcggctcgcggctggcgctggagggcagcatcgcctacatcgtcaaccacgcgttcgctaaaagcctgtttttccttgtagcagcgctggcgattaccggcgtgccgccgttcaacggcttcttcagtaaattcccgctgtttgctgccggttttgcgttgtcagtggagtactggatcctgctgcccgccatgattcttctgatgattgaatcggtcgccagtttcgcctggtttattcgctggtttggtcgcgttgtgcctggcaaaccgagcgaggccgtcgccgatgccgcaccgctgccaggatcaatgcgcctggtgttgattgtactgattgtgatgtcgctgatttccagcgtaatcgccgcgacctggttgcacgtcaaaagctatcgcctgtcatgcggattttacgcctgccagtcactggtgctggtgtctattttcgccactctctcgtgcctgttcgccgcagagcaactgctgatctggtccgccagcgcctttatcaccaaagtgctgctggtaccgttaatcatgacttacgctgcacgaaatattccccagaacatcccggaaaaagcgttattcggtccggcaatgatggcactgctcgcggcgttaattgtcctgctttgcgcatttgtcgttcagcccgtgaagctaccgatggctaccgggctgaaaccggcgctggcggtagcgttaggtcattttctgcttggcctgctgtgcattgtcagccagcgcaatatcctgcggcaaatttttggttactgcctgatggaaaacggctcccatctggtgctggcgcttcttgcctggcgagcaccggaactggtggaaataggtatcgctaccgacgccatcttcgccgtcattgtgatggtgttactggcaagaaaaatatggcgtacccacggcacgctggacgtgaacaacttgaccgcgctgaagggataa

SEQ ID NO: 1099 - DNA, 213 bp, Zea mays
  Peptide Sequence Number=SeqID_44474
atggaggaggataacaccgaggaggatgaccaactaggagaggatttggtcgactatggagcctcgcctgagcacccaggtgatgatgaaactgtcgtagcccaatttgattttggttctaaagaggtcatcttcactaagccaaaaagaatcggtcaaccatttatagctgctctttgtgcgcggtcatatcgatggaataccggttgctaa

SEQ ID NO: 1100 - DNA, 435 bp, Zea mays
  Peptide Sequence Number=SeqID_44475
atgaccactagccttgtggtggagagaagcgagtcgggctgcggcctccccttgccctccgcttcaaggatgttcatcatccgcgctggggaggggggcgagctgagttggggccccaccttccgcatgggctggcggcccgcttcttcctccagcatttgggggagaagggtgttcgccagtcttgcgaaggaggcgaacttcgggtacgcggggccagccgactgcaggcgccgccagccaccgcgtgcccggtgcctcggcttgggtggcttcggcgccgcctccgacgctggctcctgctgcttggtcgaggcatggctgcccgtccatcgcacgggcgacggtcgcgccaggtggccgccgccgtcggcgctgaggtggtcgcctccgctggcgagccgcttggagctagctatcccgcggccctactga

SEQ ID NO: 1101 - DNA, 90 bp, Zea mays
  Peptide Sequence Number=SeqID_44476
atggcgggctccgagctgagcgagaacgaggagcagaggagaatgactacgcgcgacgaattccgatttgctactcgagcactcgactag

SEQ ID NO: 1102 - DNA, 382 bp, Zea mays
  Peptide Sequence Number=SeqID_44477
atgaagaaaatagacgaggaggtccagcgacaaaaagatcaggtgctcaaggcagcggataagtggttcctctcgcactttagggtggattgccaccagaagaccgtccaagagagggagataaacgccgagagtgtcctccagatccagagccggcgcgccgcccctgcctctcctggcctctccgccctccgagcgcgcgccgacgccgcccctagcgccgcccgtagctctagcgtcgacgccctgccgacgcccagaaagcgtcccggccttcacgcggatccaaagccaaagccaaagccaacaaccgccgctgggacgcgagggatcgattcggagatggcgtcaactagctccgccggggacgtgggagactcag

SEQ ID NO: 1103 - DNA, 564 bp, Zea mays
  Peptide Sequence Number=SeqID_44478
atggcgcctcctgtcgatgtggtcggtccgtgccctaggttgggcgaggtggaggctcctccgaggtcgaggtcgagtctgtcttccaaggtcgaggtcgagtccgagcccccgggtcggacaaggcggagcccgtcggctgaggccagggctgagtccgagccctggggtcgggcgaagcggagttcgtcgtccttcagggctgagcccgagtccgagccctggggtcgggcgaagcggagttcgtcgtcttccggggctgagcccgtgtccgagccctggggtcgggcgaagcggggcgaagcggagtttcctatgacgcctgaggccggacttggctgctgtcagcctcactctgtcgagtggctcagcagtcaaagcggcgcaggcggcgctgtcctcttgtcagaccggtcagtggagcggcggagcgactgcggtcacttcggctctatcaactggagggcgtgcgtcaggataaaggtgtcaggccacctttgcattaaatgcccctgcgatttggtcggttggcgtggtgatttggccaaggttgcttctcggtga

SEQ ID NO: 1104 - DNA, 987 bp, Zea mays
  Peptide Sequence Number=SeqID_44479
atggggaacacctgcaatccttccaccttgtcgtcggagggacgcgacttcgaggaagctggtacctttcagccatcgttcggcttcaaggattttcatcaggcagcccggctgcatcccctcgccggtggtcacccaagacgcttcaaggatgttcatcatccttgctggggcggaggccaggctgagccggagctctacctcccgtgcgggttcgtgggtcagcctccccttcagcattcaagggagagggcgctcactggccctgcgagcggggcgaacttcgacaacgcggggctggtcgacggcgggcgtcgccagcttcagcacgttgggctcgccggcttggctcccgatgccccctcccgccgcaagggcggtcgtcgcgccgtgcgcacgggtggaccgcccaagacgccacgcgccgctagggcggcgttcgtgttctggggctgtcctgtctttgcaccggtacagcgcctccgcgcggaggagtccctcggctcggtcggccttgctgtccgaggcttctcttgcttagttaaaggaacccctcggccgctcttcgatgagccgaagccggaggtaatggtgtcagcacggacagagacagagttggctcgaaaagaagatttggtcggccggagcctggccgggtcgtccactggtgggaccgacgccagagttgagctgccgaggccacaagccgggccgatgtcttcgggggacagctggtcgaggcctcggggtggccgaccgagccgtctgctcgagccggattcctggagaagaccctggcggcgatggcccgggtgtgggcgatggcccgggtgtggtgctgatgtcgtccttcagagtggagatcctccaaccgcgtcgccgtccgaggctaggtcagaccccgccgaaggtgtagttgacgccgagggtgttgctgcccccttcaactgtcgacgtccgagcctgcaggattgggttgtcctgtag

SEQ ID NO: 1105 - DNA, 402 bp, Zea mays
  Peptide Sequence Number=SeqID_44480
atggaaatcctcataccaatcatcctcgttgaagaagccctcttggtgaagctctctgtgttggggccttcggttttgctcatcttgagtaagatgacgtacttcttcagtggcttcgtcaatctgcctttctcatcctcttggggtgttggactggtggctttcctcttctggcttcaggcctctcgaagagaaagggtctcctggttcgggtctagcggctgcagagcggcagtccctgtcgctgaagctttctttggcggcatgacgaaggtcgatgcttgccgaaggtggtcgaaaagggttcaccggagaaatgataacaaattacaaatataccttcggcttgaaagaaggcaaaagtacaagcgcgacacaaaagcaaatgccaagtcagcgtga

SEQ ID NO: 1106 - DNA, 414 bp, Zea mays
  Peptide Sequence Number=SeqID_44481
atgggcaagaacaacaaacgcaagcgcgagccgactcctccatcagaggactttggcgactcggaatactcagaggaggagttctcctctgagtccgaggggtctccagctcccgtctctcccccagcgtcgtccgatgactcggacgactctcaggggattgtcgcagaggtctggacttacatccgggccgtcgagcgctctgggctcgagggctcggatgagtcggagtactcctcggacgaggaggactcgcccgaggaggacggcgaaggtgacgacgacgacgacgacgacgtcggaggcgacggcggcaacgacggtgacggcggcggcaggggcggcgacggcggcagcagcaggggcagcggcggcggcggcagcagcaagggcagcaacaaggccagtggctag

SEQ ID NO: 1107 - DNA, 141 bp, Zea mays
  Peptide Sequence Number=SeqID_44482
atggaggataagttcaccgacgagagccaccttccggccttgtgccacgtgcctgagtacctccaccgcaccgccgtgataggagttgaatgcttaaacaattcctgcattaccttccttgaacttgattaccctccttga

SEQ ID NO: 1108 - DNA, 192 bp, Zea mays
  Peptide Sequence Number=SeqID_44483
atggtgccctacttcctcgttgagtcgcccacaaagagtcgggtctctttcaaccctaatcctccttttgccgaccacaaaggagagaaccatagctcaactgcccggaggcaagttcagctggtgtatggtcaaagaggttcacagcttaagttgagttcaggtgtacttgagaaagctcaactcagctga

SEQ ID NO: 1109 - DNA, 1500 bp, Zea mays
  Peptide Sequence Number=SeqID_44484
atgcaggcgacatgcaaccgtaccaagggggcgcaccctttcgactccgacgcgaccagcatgggggcccaggcccacacgtcatgtaaccagcacgctggttactacgtgcgggaaactgcaccgccacttgcgccagtaccgcgccttctcgactgtggaactggtgccgcgactcgaggcaaccctgcgcatggcccaacagtgccaaccgagcacatcggtcacgggtcagtcagccgcgggagaaggcgcgacggtcgatatggccaaaagtgggccgacagtgatggcggcggcaggcaggcggaagcagcggtcaagtcatctgcaggctcacgtcccctcctgggacagcgagagagccctctcccacggagtgaagacgacgtgccaggcaggcaacacctttggcgggcgaagcaggcgacgcttcacctccgccataatgaccgcatcaaaaaagggaccgggaaaggggatgctccgaaagggatccttctccgcgaaggaagcgggccccgagccccactactgatcagaggttcgaaggctggcccctcggaagggttcaacagccgcctcagagcactcgggccccgagccctcctactgatcagaggttcgaaggctggcccctcggaagggttcgacagctgcctcagagcactcgggctccgcgcccaccactggtcagaggttcgaaggctgacccctcggatgggttcgacagccgcttcaagccactctggctccgcgcccactactgatcaggggttcgaaggctggcccccaaggggttcgacagccgcctcagagcacgtagagcgagggatgactctgggtacgtccgatacatggccgaggcttgggctacgctcccgaggtaccctaggacatttccgagaccagcaggagcgattctgtaacgaaatcccatcagagggaggcatcgagccctcggaccctaccaaacgggaccgggtccggcaaatcacctgcagaaaggcgatgcatgggcatatgaaaaaagtcgagtctgcccttgaccgtcctctcgctctgtggggaggctcaggggatgctctcgcgaactcggctccggccaaaccgttgacagcgtcaacataccagcccgagaacttggaacctgactatgcacccgagctacggccagaaaacagcgccacctgccccgctccgactgctgtgccacttgacagagtgaggctgacagcagctaagtccagcctcgggcgccataggaagctccgcctcgcccgaccccagggctcgggctcaaactcgacgccggacgatggactccgcctcgcccgaccccagggctcggactcagcctcgacctcggaagacggactccgcctcgcccgaccccagggctcggactcagcctcgacctcggaagacggactccgcctcgcccgacctcgggctcggaccgagcacgtcacaggggggccatcattaccctacccctag

SEQ ID NO: 1110 - DNA, 1107 bp, Zea mays
  Peptide Sequence Number=SeqID_44485
atgaacagacaccggcacccgaggtgccattacaaacggaactccagttccactcccgcaggtacgaacaaccccccacatcggagggcctgcgggacgacaacctccaggtggctcaccgccgcccactcctacagcagcgacaacgacctccgctccgggtggccaaacagcagcagcgatgacctcagggcagacgctgctgtgacacggccctcgcccacgtccccgctcgagaggcaaggacaagctatcaaagccaaagagccggaggcccgaagcgcagatggcgccgacgatctcgtcggcgacgaggccttctccagctgctaccacctcagcaccgacgacgatagccatctgcccactggacgggcgagcaccaaccaccgcgcggaggcgtcgcgccagagcaagggcaggacagcccaggacagaagacgccaaaccgccgcgcgcggagcgcgtaactgcccagcggttacaagcactcctccactatcgcccaaaccagcagcatggaggcccaggcccacacgtcatgtaaccggcgcgccggttactacgtgcgagaaactgcaccgccacttgcgccagtaccgcgccttctcgactgcggaaccgatgccgcgactcgaggcaaccctgtgcatggcccaacagtgccaaccgagcacatcaatcacgggtcagtcagccgtgggagaaggcgagacggtcgatatggccaaaagtgggccggcagtaatggcggcggccggcgggcggaagcagctgtcaaatcatctgcaggctcatgtcccctcctgggacagcgagagagccctctcccacggcgtgaagacgatgcgcccgtgttccgttcctcgaacggctcacgcatgcacaacggctgccccgcgaaccactcgtcccgtcgcattaactctgcgggaccgggaaaggggatactccaaaagggatccttctccgcgaaggaagcgggccctgagccctcctactgatcagaggctggcccctcgaaagggttcgacagccgcctcaggccacccgggctccgcgcccactactgatcaggggttggaaggatgcccccccaagggttag

SEQ ID NO: 1111 - DNA, 408 bp, Zea mays
  Peptide Sequence Number=SeqID_44486
atgaacgacgacgacgcggacgaggagcgggcgcggccgagggaggagcgcggctgggacgggacgccggccgtgcggcggccgcgggaggcgtccggccgtgttggggcgggcggcacggccgggcaaccgggtcagggcggcggcgacgcttgtggggcgaggcggggctggcgggtcggggcggcggcgcttatggcgcgctggccgtggcagggctgggcgggcgggggtgaccggggcggccgggggcgggcggggcggcgctggccgggggaggagcaccggccgtggtggagcgcgggccgggggaggatggagggcggcgcggggatgcggcgacggagggcggcgcggggtccgttggcggcggagggcggcgcggctggcttaaggatggcggcgtga

SEQ ID NO: 1112 - DNA, 303 bp, Zea mays
  Peptide Sequence Number=SeqID_44487
atgtctcttgcctcttccgacactcatgagcacatcggggtcgatctgctcggtgctcagatcatattctgggccatggacctcctacgccatggcggtgtagtcatgaaggcggctgtagacggcggggttgcttccactcaagggacacgatctcgcctcgcccgagcccagcctcgggcaaaggcagccgaccccgaaggattcacgtctcgcccgagggtcccctcaagcaacgggcgcaccttcgacccacccgaggcccagctcgggcaggcttcgcggagaagcaaccttggctag

SEQ ID NO: 1113 - DNA, 276 bp, Zea mays
  Peptide Sequence Number=SeqID_44488
atggtgaagcttcagggcacgtggcatccgatcgacgggcggccaactccggtgaacttatctgagccggccgcaaagcaacaggggtacgacggccagcctccggtgttaccctgtggcgaagatcttttacccagaagtgttatccggtcaccgatgagcacgaatcacaacggcggcgtgaatccaggcgcacagctcactggcggcgaggttctctgcgctggcgttctgatccagttactgtaccatcgcgaggtcattcagttggtctga

SEQ ID NO: 1114 - DNA, 141 bp, Zea mays
  Peptide Sequence Number=SeqID_44489
atgacccagctcttcgagttctacgaagctgaagaccctgagcatctgtttggtggtgatgaggaggatggttatgattatgcttatggtaatggtaatggtaaagaagaaggcgtcaaggcggatctccaggagttctag

SEQ ID NO: 1115 - DNA, 933 bp, Zea mays
  Peptide Sequence Number=SeqID_44490
atgtcgcccgccgccgccaccacaaccttcgtcgcaatctccatcgccgtccccaaccctaccgctccatcccgcggtcgcgtgcgccttccgctaggcggggtccccgctgctccacgccgcgccgtcgcctctatggcagtgtccgcccccaggtccggcgccgccacctcgtttctcgagcgccgcgagtcggagcgcgctctccactttgtcaaataccagggcctcggcaacgacttcataatggtggacaacagggattcgtcggtgccgaaggtgacgcccgaggaggctgcgaagctgtgcgaccgaaacttcggcattggcgccgacggtgttatcttcgtcatgccgggggtcaatggtgccgactacaccatgagaatcttcaactctgatggcagcgaaccagaggtaaaggttgatatgggcgagcctatcctttctggactagacatccccacaaaactgctagctaccaagaacaaagctgttgttcaagctgaattggcagttgagggcttaacatggcatgtcacatgtgttagcatgggaaaccctcactgtgtcacatttggtgcaaatgagttaaaggtattgcaggtcgacgatttaaaacttagcgaaattgggcctaaatttgagcatcatgaaatgtttcctgctcgcacaaacacagaattcgtacaggttttgtctcgctcacacctcaaaatgcgggtctgggaacgtggtgctggagcaactcttgcctgtggtactggtgcttgtgcagtggttgttgcagctgttcttgagggtcgagctgagcggaaatgtgtagttgatttgcctggcgggccattggaaattgagtggagggaggatgacaatcatgtttacatgactggtcctgcagaggtcgtcttttatggatctgttgttcactag

SEQ ID NO: 1116 - DNA, 270 bp, Zea mays
  Peptide Sequence Number=SeqID_44491
atggagcaacgagcaagccaggcaagagccagccagcagtccagcaccagcatccagcaaggcacggccggcttgccgccaagcgccagcggcaaggccgcagcccgcaaggcaaagcaaacacatcacggaaggagcattacggaagttttcaagaatattcggtccctggaggtctgcggtgggttgattaatgatgctggcgtgaagaacatcaaggacctgaaagctctgacgttactcactgtttcactatttcgggtagtttga

SEQ ID NO: 1117 - DNA, 558 bp, Zea mays
  Peptide Sequence Number=SeqID_44492
atgcggctagacgcctcgctacctgcggatgatgacccatccgatgagaccgcctcgcgccgcccctccatcattctcaacgccgtcgtgctcggcaatatcgatgctggcaagtcgactgtgtggaacagcctcatcggccaccctgtgctgcccacggaagcgggaaaaccacgcgtcgtagaccgccgggaacctgggcgcggcggaatcttgcgcggtggtctgctggtgaggccggaatcgctcaccagagccaactcgtcgccttgcgcccgccgtatatcgtggccagcaacttctgctctacaatcgctggaaataccgccttcagcaggcaggagagtaactcttcgtgcaatagatctgggccgtgtatcttggatcgtgcgtacaagaacggatcgggatcactttaaatctggaccgttgatggtcaatccaatggaaccctatagcataccggttcgctttaatgaaggatctaatcgcgaccgcataactcagatccaatggctagtagttatccataccccttcggccatccgttttgcataa

SEQ ID NO: 1118 - DNA, 1502 bp, Zea mays
  Peptide Sequence Number=SeqID_44493
atgagcatcatcctgcagtacctggtcttgacctgcggtgtatgtgagacagcaagaggtgttacacttacggcggttgtgtctgccgaagtcgagagacttcgggcgcaacatgctgacgccgtccgggaaaagtcggccgccgatagcaagtgccgcaagctggcggagaaggtggccgcgctggagggcgagaggactgacctccggcgccaactggcggaggagagaagggaggctaatgaggccctcgccaaggcgaaatctgtgcaggcggaggccaatttggcgtgggtggagggtagccttgctagacagcgcgccgaggaatgggaggagcggttcaacgctctgcagacccgtgtggagagggccgaggcttcgacgcgctcggaggctgagcggacgcgcaaacagcttatggactcataccacgagctgggcgcgcggaccgctgacttcgaagtgccagaccaagagcccggacttcgctgcctcgagtggctgcaggaggagttgctggcgctccccaccattgtggaggggtttatgtcctatgcctccctggtcacctgcgaaggggcgatgaacgcgctgtcccgcgaagggtgccagcactatgaggtcttcgaccaatctgatgaggatttcgagcgcgagatttacaaggttgaggaccctgtggtgaaggaatccgtgggggccctcttcgaccggatgtggggtccccacggtcgggaggtggtcagggagcggtctgacacggcgaggggtcaggcgacgcgtaacgagaaagtggaggacttcagggctttgaacagcgcgcagcctgattcggagtcgaacccggtggcggctgtgtccgaggtcgcccctgcgccgcccccagaaaccatcgaaggcgcccctgatgcccccgcagccactgcggccggcggtggctcgtcgccaactgctgcgccgagggctgaggatcctgtgaagatggcggcggagccggcagcggaggatcccgcgatggctaggtcttcgcaggttcaagattttgggcctgcgcacgcaacctctactgctaattttttggcggcttcgaccgtggatgatgggaatgaatcggatgaatctgcgtctaagttttctgattttggtgactctgggagtttggttgagtggactgaagagtcgtcggatgaggacttggattactttgcggccttggatgtggcagcgacggaggcttcgccgcgtgctgtggatgctgaagttgtgcctggtctaagtgcggggcgtaggcggcgaagggcggttgcaaagcgtagagtgagtgaggcggacggcggtcggcttcgtgtgggcagggctggcaggcaggaactgttgtccttgccagccgttgcgagtgtaggggaaggggagctgcgaggtctttttgcgggtgaggagctgaggataatgctatttaactatagggagatgagaattattccgaaggttgagccgat

SEQ ID NO: 1119 - DNA, 915 bp, Zea mays
  Peptide Sequence Number=SeqID_44494
atggagaaccgccatgagctcgatgccaattgcatcagcgcccagtcattgggatcgcctgggtggtttcgtaacaacctcagtgaaaatagcccgttttcactggcagttgtgctacgagaatcgccaatggaattggtttccaccggtggttcccaagctaggcccacctgtgtttttttttcactcacgcacggtttcatcagcatcgactgcggcgtagcggaggcctaccaggacccggacccggacaggggcctcacctacgtctccgacgccggcttcgtcgacgctggcgaggggctcaacgcccccgtgcggccaccgtacgtcgacaagggtctggcccagcggtacctcaacgtccgctacttccccgtcgtcacgggtgccggtgccggcggcggcggcgcggcgcgcacgcgcacgcgcagctgctacacgctccggccggtcgcgcagggaagcaggaacctcgtccgggccaccttctactacggcaactacgacgggttgaactcgcgccccgccttcgacctccacctcggcgtcagtcgctgggccaccgtcaacgtcacctccaacaccggcgtctacatctttgaggcggtgaccgtgtcgccggccgacttcatgcaggagaacacaagtgcatcgatggagcgattgtttgtaagggcttggcacaccgagatatttgttggaacttgctctccggcgcaagttgatccaatggggcgagtacagcgaaggcctcgagcgaagggtggcatcttcgccttttcgccccaacatttgccctccgagggaccagttcgactaagtcatctggtgccgaagatgttgctagatggcggagacgctgccctcgctcgaagtggttccgcgggggtttttgacatgaccgttgattga

SEQ ID NO: 1120 - DNA, 69 bp, Zea mays
  Peptide Sequence Number=SeqID_44495
atggcgctcgcgccgtgcgcattaccgaggtcacaagaaaataaattgaactatgttatgtatttgtga

SEQ ID NO: 1121 - DNA, 780 bp, Zea mays
  Peptide Sequence Number=SeqID_44496
atggcgccccgcacgctctatgacgacggcggtctccacccccttacggaagcaagaggacgccagcaaggactcgacagccccgacagctgtccttccgccaggctccggcactccttcgacggccacgacatcacacgaaccgggtgccaaaacctctccggctgccacgatggcatggccctcttacagaaggttggccgcgcggggaaggacgggacgacgctcgcgccccaagcctccctactgatcagaggttcaaaggctggcccctcggaggggttcaacagccgcctcagagcgcttgggttccgcgcccactactggtcagaggttcgaaggccggccccttggaagggttcaatggccgcctcaggccactcgggctccgcgcccactactgatcagggcgggaatgatcttgtaacggaatcccatcagagggaggcatcgagccctcggaccccgtcgaaaggggaccgggtccggcagatcacccgcagcgccgcctgcgccgctccgactgctgtgccactcgacagagtgaggctaacagcagccaagtccggcctcaggcgccataggaaactctgcttcgcccgaccccagggctcggactcgggctcagccctggaagacggcgaactccgctccgcccgaccccagggctcggacttgggctcagccccggaagacgacgaactccgctccgcccgaccccagggctcggactcgggctcagccccggaagacggcgaactccgctccgcccgaccctag

SEQ ID NO: 1122 - DNA, 414 bp, Zea mays
  Peptide Sequence Number=SeqID_44497
atgggtcggcgcgagacggagtgcaaaggggggaggaagccggagggagacgggcgtgagaggtggaatcccgcggccttcgtgtttgtcccgcgcccaggtcggcctgagtcagcttggggcagggtaatgatggcacctcctgttgacgtggtcggtccgtgccctaggttgggcgaggtggaggctcctccgaggtcgaggtcgagtctgtcttccaaggtcgaggtcgagtccaagccctcgggtcggatgaggcggagaccgtcggctgatgccagggctgagtccgagccctggggtcgagcgaagcggagttcgtcatccttcggggctgagcccgagtccgagccctggggtcgggcgaagcggagtccgtcgtcttccggggctgagcccgagtccgagccctag

SEQ ID NO: 1123 - DNA, 201 bp, Zea mays
  Peptide Sequence Number=SeqID_44498
atgacggtggaggcgaaagccatgatgaggaggaatatgaggatgatagcgaggatgaatcttcatcatcacaagacaactgatcaagccaaggacggaggcaagaagagcttcgaggtaccaagtgcacgggagaaggtcaaggaggctgaggaacccaaagccaagggtgaagaagaaggcttgcaaagtcaagggtga

SEQ ID NO: 1124 - DNA, 234 bp, Zea mays
  Peptide Sequence Number=SeqID_44499
atggggaagcctgtcccatcactcctcatcctcctcctctgccgaggcaggtacaatggatcaagcagtctcattagctgcgagaagcagacgattcaaatcgagtttttatccttgcaagtgaccgcacttgtacccaccataaccggaatgggagaccacgtctcaggtcgcgtgaggggtaaagtctactgccaggttcaatcaggatttagtaatcattatgctaagtga

SEQ ID NO: 1125 - DNA, 795 bp, Zea mays
  Peptide Sequence Number=SeqID_44500
atggcagtcggggtcagtgaggcattgtatgccaaggcgatgacttctcacggatcctcggatgaagggaatgcacagtcccacactgacgggcttgcacgagagggcttcccctgtatcttgtgggagctaggctggcgttcgttggacttagagtcttatggataccgggctgaggatactatggaggcaattgctcttcatggactgaccaccttctgtggattccaccccttggagctgtccactcaccccattggcttgttccctgtggagaaggaggacgacccaatgtggaaggaccgagtggagcatgccaaggatatttgggctatctacccaagtcagactgctcacttgatggtgcggtgcatgaatgccccgtatcgtctgaaagtgatgcgtggagaggcgatgtcccatctgatggcattgttggaggctaccaagatcactttggataacagagaggaacttgtggttgacttgtccactgagatggtggaaaaagacctacaagtggaacaactgtcaaatgagatccaagagcttgaggagttagtgggaaccagggagaacactatcgaggttctcgaggatcaactaatcaacactcagcagcagcttgcggaggctaatcagcatctggatatgcaccaccaggagatccaggacatggaggctaacgaggatgtcgacatcgagggaggagaggagcctgcctccaggttggacactgctggctcagggagaccaccttcccccgagtcgagcgttgcctcgtttgctcactag

SEQ ID NO: 1126 - DNA, 381 bp, Zea mays
  Peptide Sequence Number=SeqID_44501
atgcaggatgcagcacgacgagcactttctcagtattgctcattgttcagcggggtagctgatggccttgacctgaagtactacccccgctgttcaaccggcagtgctggaagtgtgattgtctcgccagtgggtgagggcaatcccaggctgagcaacatggtcaacttggtcgtcgtgctcaacacagagttggaccacacccttgacgagctaggcaagatgtctgagaacaggcgcagaggtgcaaggcgtgctcagcctgaacaacaagcaccccaagaggaggcagcccagcagcaacagttgccaccgccacccccgatgaccattgagcagatgtttttgatacagacccaagcagtccaggcaatgggttag

SEQ ID NO: 1127 - DNA, 381 bp, Zea mays
  Peptide Sequence Number=SeqID_44502
atggacggcgggttgatttttaagaaatccaggggttctttagaaagaaagccagggcgaaggggtatcgttgattcagagccgtccgatcctggatccaggagagaccgcggatacggatactccgacgaggaagagtcgggtgccgtcggacttggggcagcggcgcctagaggtggtggccaaggatccgcgcgccgggaagatctcggtgtagaggatggtgaccggctggagttggagcacgagtgttcggatatggagcttgctggtgtcctcacgacggcccaaggcgagccaacgcggaggggaagccgaagaggaacaggccctacgccatggctgggaggaggtgcagctggtggagcacggcgttggtga

SEQ ID NO: 1128 - DNA, 360 bp, Zea mays
  Peptide Sequence Number=SeqID_44503
atgcaggaatcccttgcaggaccgccatcacagcaaaatcctcccgagggcctccccaggaatcccttgcaggaccgccatcacagcaaaatcctcccgagggccttcccaggaatcccttgcaggaccgccatcacagcaaaatcctcccgagggcctccctacactgaccactcccctactgcccttgcccctttcgggtaccaggatgatcttcaggtggctcgtgacctcactgctaaacgtagcaatacagacaaagatggtataggcaaaattaacatcacaccaaacataagaataaactgcgtaatattattctacgcgaagctacgagatcgtaggaacgagaaccactaa

SEQ ID NO: 1129 - DNA, 1185 bp, Zea mays
  Peptide Sequence Number=SeqID_44504
atgccgtcgagtacaccgtcggtagtggcagaagaggccccaaccgcgcccatcgccactatcgaggtcggtgcggggggcgtggccagctccaacccgccgcccactccggaggagacggaggtgattttcgggcggtggctccgatccggtgccgagccagaagcggcgccgattcccctcccccggatgctgtctcgcgcccataaggccctccaagagactggggcggcgttcctgcgggagtgggaggcgctcaaggccgaacaccagcaccttagcgactggcgtacccagctggaggagcgcaccaaggcaacgtcccaccagtttgccttcgagcagtctgagcttgagcgggaccgcaaggactacaagaaggacctccagaaggtgttcgcccgggagctggaggtgacccggaaggagaagaggctggccaagaaggaggtgcacttggaccagagggaggaggtcatcacagagcttcaggcgaagctgaaagcccttaacaaaatcgtggaggagcagcgggccgatcagactgtggctgcagagagcctgcaaaggctgcagcgagagctcgatggcaaggctcgtgacgccgcccttgccgaggagaagctcaaggcgaaaggtgaatctttggataggcgggaggcggacctcgtcggtcgggcagcggacctcaccaggcgggagaaggatcttgccttcaagaaggaaatgcttgaaaggcaggagaagtcactggccgagcatgagctcgaggcggaagagaaggagcggatgctggaggagcgggtccgccagttcgaggtggcacaggcggcacaagcagcaccgggcccccaggcggtggaggcgatgaagaagacactcaaaaatctccaggtggagcagcgcgctggggtccagcgcatcgccacatgggccggcgaggcgagcacgacactggtgccgctagggatccttggcgcccgcctggaggccgagggcagctggctctaccgggcggtgattgagtacatcctaacgtgcttccggagccatgacctggccatctccttggagccggtgatctctggtctggcggccgacaccgaagacaccgctcgggaggggatacaagatactgtggaggtggtggctgagcgcttccagcgggatcctaccgatgattag

SEQ ID NO: 1130 - DNA, 495 bp, Zea mays
  Peptide Sequence Number=SeqID_44505
atgcaggaacaaatgaacgtgttgctcaagtatcaaataacacttctacaaggtgggattcgaccgagaacgtacccactatcatgcctggtgtttcctggactgcttcggcttcgagatggttcagcctcccatggttgtcgcgcgtctaaccacgattgcctgctccctgcggtggtgcattctgtcttgctagggcattgggggccggctgttgttgagccatctttttcgggcactgcatcgcctagtggccctgctctccacattggaagcatcctctgcctcctccttgcactggggctacctgactgctctgattggttgttggggcaagaaaacgaggtgcctggttaccctgtctctggtactgattccctcttggttgactattctggtggtactgctactgttgctgagggtactacctttggtattacggttgatgcggatgctggttctgctgctgatatccttgagggtgactctgcttga

SEQ ID NO: 1131 - DNA, 681 bp, Zea mays
  Peptide Sequence Number=SeqID_44506
atgcagcccggctgcacccctccaccggtggtcacccaagatggtgacctccagcttgatggtgggggaaagcgagccgggctgcggcctctgcccctccctcagcctcaaggattttcgtcatctaggccaagatggaggatgaggcgagtcggggggctgcctccgcgtgggtcggttacccttttcttcccctggcgtctgggggagaatggcatcctccagcttcgcggagacttcctccagccacgccgggataggtgggccgccgtcactcagccagggcgcggcactacgccctccgtccggacgacggttgcgccgcgcaccgcgagggcggcgcccacgctctgggcggttctggctagggcgaagacctgccggcgcgcttcgaggcgtcggcagccggagatggcttctctaccgatgagattgccaactccgccagtagccctagactcgcctgttgattatctgaaccgcttcaccaagcatgagtcgccccgtgtcaaggtgtcgagtgagcatgaacagaggcggagttggctcgaaaatgagaacctggttggccggagcctagccgggttgtccgttagcgggaccgacgccggagttgaccagccgaggcctcgggtcgggctggcgcccttggaagatggtcagccgaggccccagaggtga

SEQ ID NO: 1132 - DNA, 1371 bp, Zea mays
  Peptide Sequence Number=SeqID_44507
atgtcttcttcctcccttatgcgtcgtgtctttccatcttccaagcccccggatggggggtatccgccgtctttccgcctcctcgttggaggaacgcaactccgtgggagttggtacctttcagccatcgttcggcttcaaggattttcatcacacagcctggttgctcccctccgccggtggtcacccaagacggtgacctccagctcctggatggggagaggcaaaccaggctgtgatcccgtccccagcatcgggggtgttcgccatcctcgctggggcggggagcgaggcgagccggggctctacctcctgcgcgggttggcgaaccaccttctcttccagcttctggtggtggcaatcgtcctcccgcgctgcgacagagacgtcctccagtcatgccggggaatgcgaactattgctatccagctaggatgcaacattccgtcctttccctcccattcgcggcgaggacggcagcgaggatctgccggagcgcttgggagcggcccgctctttggctttgatggttggttcgcgtcccttgagcggaaccgcgaacaagagccctccggtggccgcgtccacccgggaccatggctgctgctgcagaggtcgctggcgagcctcccgatgttcgtcaccccgcaggcccgaggtcgctcgtacccacggggacggaaccggagttccgtttgtgatggcaccttgaatgccagtgtttttgttcgtcgcggctgtcgaggcctgaacatcttagttaaagggaccccttggccgctcttcgatgagccgaggccaggggtagcgatatcagtacgagcagaggcggagttggctcgaaaatgggaacctggttggctggagcctagccgggttgtccgtcggcggggccgacgccggagtcgatcagccgaggcctcgggtcgggctggcgcccttggaagatggttggccgaggccccaggggtaaccggccgagccgcctgctcgggccggattcccggagaagtccctggaccgcatcgccgtccgaggctgggtcggatctcgctgaaggcgtcgtcgatgccgagggtgctacagcccccttccagcgtgaagacccgagcctgcaggatcagattatcttgtagcgtgtgccttctgcggccgccgaggccagaaaacacaccctcgctgcgttgtaaagccgcgtctcttttcctcttgttccgagcatctggactttccgtcggtaacagggatgtttgtgtgggcgagagttgcttctcgcggaaggtgatgagtgaggtatccgtatcccagaggcgtgggagtccctcggctcggtcggccttgccgcttacgcgtactttcgcccgtccatga

SEQ ID NO: 1133 - DNA, 480 bp, Zea mays
  Peptide Sequence Number=SeqID_44508
atggcgcttcctgttgacgtggctggcctgcgccctaggttgggcgacgtggaggctcctccgaagccgagcggagttcgccgtcttccgagacttagcccgagtccgagccctgggtcgggcggagcggagttcgccgtcttccaggacttagcccgagtccgagccctgggttgggcggagcggagttcgccgtcttccgggactcagcccgagtccgagccctgggtcgggcggagcggagttcgccgtcttccgggactcagcccgagtccgagccctgggtcgggcggagcggagcttcctatggtgcctttggcagggcctgactgcctgtcagtctcactctgtcaagtggcactgcagtcggagtggcgcaggcggcgctgtccttttgtcaggccgctttatgctgatgggggttaccagctgagaattaggagtcttgagggtacccctaattatggtccccgacagtag

SEQ ID NO: 1134 - DNA, 528 bp, Zea mays
  Peptide Sequence Number=SeqID_44509
atgcaggcggcatgcaaccgcaccaaaggggcgcaccttttcgacttttacgcgtccagcatggaggctcaggcccacacgtcatataaccagcgcgccggttgctacgtgcaagaaactgcaccgccactcgcgccactatcgcgcctcctcgactgcggaaccagtatcacgactcgaggcaaccctacgcatgacccaacagtgccaaccaggcacatcggtcacgagccagtcaaccgcgggagaaggcgcgatggtcgatacggccagaaatgggccgacagtaatggcggtggtagggaccgggaaaggggataccccgaaagggatcctcctccgcgaaggaaacgggccccgagcccccctactgatcagaggttcgaagggtggcccctcggaggggttcaacagccacctcagagcgcttgggctccgcgcccactactggtcagaggttcgaaggccggcccctcggaagggttcaacggccgcctcaggccactcgggctccgcgcccactactga

SEQ ID NO: 1135 - DNA, 1086 bp, Zea mays
  Peptide Sequence Number=SeqID_44510
atgcatcgcgcccttccaccttccgagcccccggatggggagcgcccgcgttgccttcgtcttgttgttggaggagcgcaacctcacggaggtgggcacccttcagccatcgctcggcttcaaggattttcatcaggcagcccggctgcattccctcaccaatggtcacccaggacggtgaccaccagttcgatggtggggagaagcaagtcgggctgcggcctctgccccgccctcagcttcaaggatcttcatcatccttgctgtggcggggggcgagctgagccggagccctacctcccgcatgggccggtggaccacctcttccttcagcattcaggggagagggcgctcaccggcctagcggagggggcggacttcgacaatgcggggccggccggccgcaagcgtcgtcagctccagcatgcctggctcgctggctcagctggctctggtgctgcttccggtgccacctcccatcgctggggcggagcgtggctgtctgcccaccgtacgggcgactgttgtgccgtgcgcaccggggaaccgtccaagacgtcgcacgccgctaggggatctaccggtgcatgctggggcggccgccatttcattggcgtagcgccggcgcgtaggtgtccgctgtcgtcggtgctggaggtgatggtcgctagaggaggtttctctgccgacgagatcgtcggcgccacccgtggacagacctccggctctttggctttgacggcttgtcctcgcccctcgtgtggggacgtgggcgagggccttcatgcagcagcatttgccctgagctcatcgctgctgttgtttagccgcccgaggcggaggtcgttgtcgctgctgctgcagtggtcggcggcgagccacccggagtttgtcgtcccgcaggccctccgatgtggaggttgttcatacccgcgggagtggaaccggagttccgtttgtaatggcaccttgagtgccggtgtttgttcattgtggctgtcgaggcctgaacatctgggtatttttagcgcaataccgtgtttcttcctcatttcgagcactaggactcgcctgtcggttagctga

SEQ ID NO: 1136 - DNA, 426 bp, Zea mays
  Peptide Sequence Number=SeqID_44511
atgactctgggtacgtccgatacatggccgaggctcgggctacgctcccgaggtaccctaggacatttccgagaccagcaggagcgattttgtaacggaatcccatcggagggagacatcgagccctcggaccctatcgaacgggaccgggtctggcaaatcacctgcagggtaaggctgacaacagctaagtccagcctcaagcgcaacaggaagctccgcctcgcccgaccccagggctcggcctcaccctcggcctcggaaggtggtctctgcctcgcccgaccccagggttcggcctcaacctcgacctcgggaggaatcgtgtcctcgcccgacctcggcctcaggaggagtctccgcctcgcccgaccttgggctcggaccgaccgcgccaaggaggatacatcattaccctacccctag

SEQ ID NO: 1137 - DNA, 456 bp, Zea mays
  Peptide Sequence Number=SeqID_44512
atgcaggtggcgtgcaatcgcaccacggggacgcaccccttcgacttcaatgcatccagcatggaggcccaggcccacacgtcatgtaaccggcgcgccggttactacgtgcgagaaactgcactgccacttgcgccaatgccgcgccttctcgaccgcggaaccagtgccgtgactcgaggcaaccctgcgcatcgcccaacagtgctaatcgatcacatcggtcacggggaccgggaaaggggatatttcgaaagggatccttctccacgaaggaagcgggccccgagccctcctactgatcaggggttcgaaggctggcccctcggaagggttcgacagccaccccagagaactcgggcttcaggctcattactaatcagaggttcgaaggctagcccctcggaagggttcgacagccgcctcagagcactcgggctccacgcccactactga

SEQ ID NO: 1138 - DNA, 1749 bp, Zea mays
  Peptide Sequence Number=SeqID_44513
atgccgcgcacgaagaatgtgtcggcgccagggggaggcgatgatgaggatcctcgttgccccttcaggcaggtcaagggaaagaccgtgtacttggagcagcaggaaggctgcaagaagcgacgtatggacagagaagcccgagcagtggcagcagccgctgagcaggccgagctaggagatcagccacagactccttcagatcagattgcgtaccgagtttgtcgcctcgcctcccggcctcgctccactcccaccactgcttccactccaccacccactttgcctgctcccgtcacccctgctgcgccatccaccacctccactacaccagcttccactgctcctcctcccgctcccgcttccgctcctcctatcccacctgctcgcttccgagagcgcgatgagactgagctacgaccacttgctgcagatcccaggttatttgatcttcagcgtgctacagcgacacagattgctctacgagtgcaccggcttttggaccttcccgcttttctgctagccgccggtgctgactctgaggttcacctctcctatctgcctagacttctcactcttttgactaccagcggcagatatgttgaggaatcttatgctatggcacctctgaccctcctcgtcgccctcatggtggtgttgctcctgcttatgagacggacacttctgccgcggatggggtacagggaggctgccactcatatccagctctggctccttggtgccctggtctctcactcagagtttgatgttgtggatttccttatttgtgagatcgaggacaccgtactggatggtctgcgtgctcgtcgacagctgccttatgctcactatctgtgtcacatttttgctcagctgattcggcctccacagttccagggcacacttgaggcctcacgcgtcctctttgggtcctaccgtccagcgcctgaggatcctgtgccagcacctgctccagtatttgacactcaggccgaggatactgctcttcatcagttcgaagctcaggatgcaacagttgatgatgatgatgatgattttgggattctgcctccgcctcctatgcctccatgctctcatgatcatgaggttgtgagttccagtggtgctgcccctgctgcccctcctgccattgaccctgctcttgccgcgattctccagactctcactcagcagcaggctcacttggcagcggtccagcagcagatgtccgagagaatgctctcgatgtttcagacgattcaggacaggcagggttctttgcagcagcagcttcttcaggaccgggctgagaacctagcattcatgactcttatgcttcagcacaccagtgtgtcgattcccccagttcagtcagcaccgcctccacctcttcaggctcttgttgtgccagcgattcagctaggaccccctcttcctatagttggtccttcttcctctccgctccggccggtcaccctggtttccacgtcaccggtcttcagctctgtctgccctcagccgccagtgccaccagcttctgctgttaccactattgctgtggcggtgtctgtgaccactccagatctagcagctcctgcagcgtatcctcagtccgagtcagtaccagctccagcttctacagcagatcctggatctgagactgactctgaccccgagctggcgttcgctctactgccacgaccgcgaccggatgcgcccccgccaccttctccctcttctgctgtgtag

SEQ ID NO: 1139 - DNA, 372 bp, Zea mays
  Peptide Sequence Number=SeqID_44514
atggccgagacagtgtgtgaggtggtgtacacttgcgaaagtgagaaaaagtcattcgaagctgcaagcagaatcccacccctagatccaattgcaagcagcacaacagtgttgtttagaaaattcggacccaaggatgatgtggctataaacaagcggaggtttatggagctaaaggaacatatgcaaggagatttcggtgctgaaaatgaagcatatgagagttcagcacaaagcatatcagctatttggaaaggagaagccgagaatggttcctctattgacagttcaactggaatggaggtgaagccgagcgatcaagagtcaggtggcacagctatgaatatggaatctagcccaattgccatgtga

SEQ ID NO: 1140 - DNA, 207 bp, Zea mays
  Peptide Sequence Number=SeqID_44515
atggcgctgttgctctcgcacgcgaaatccgcggaggagaagaacccgacagcgcggtcccgcgtgtcagcgatggagcgaaggaggcggccgcgcgagcaagtagcgggcgaggctgatcgaggggccccacttgtcggcgcggtcgagcgctcccccgatgggctagtgcgattttttttatcctccaatcatattgtgaaatga

SEQ ID NO: 1141 - DNA, 129 bp, Zea mays
  Peptide Sequence Number=SeqID_44516
atggccgaagctctagcggcaatggcgggcggaattgagcttgccggagctaaggagaggtggctggccggtgaaagattcgagttagggatcaaggtgaacatccttgatctttggctcaaggtctga

SEQ ID NO: 1142 - DNA, 468 bp, Zea mays
  Peptide Sequence Number=SeqID_44517
atgcacgtaattgaacaccaaaagtggcgacggtatcatgcagagttcgacctcattcccgagggcatttgtgctgcctccatccacttggtagagtccatggacgagcttttggctatctgctacttatacatggatttcgatcctaccaacattagctcagctcgtatcttcaagatggagaaaacttgtggtgacgaggaacttgtggcctggcacctggtggatgatgttggggacagggttttcctcttgacgggcaccaacatggcaacttggtgctatgcatgcaccaataacccaagagggagcaccctctactttctggtccacttagtagctggtcatagggatctatgcatctatgatgtccagaagcagactatggaggttggtcaggttcacgaccacgaagatctggagatcatgcacacacagtcatactggattaatgtacctccgtgttag

SEQ ID NO: 1143 - DNA, 219 bp, Zea mays
  Peptide Sequence Number=SeqID_44518
atgggagtcgactgggaacatacctactatcatgccggggatctcctgaactgcttcagcctccaagtggttcagtctcccatggaagacgaggtgcctgctgattctacctctgaaactgacctcctcctgactgattgttctggcgattctgatactggtgctgaggatactgcctttggaattgctgctgcggaggtggacgctggttctgcctga

SEQ ID NO: 1144 - DNA, 666 bp, Zea mays
  Peptide Sequence Number=SeqID_44519
atggctcgtcttagacacaccgcacagaagtctgtcatccccttcttaccctctcgtctcgcggagcgttcgcttcgtcgtcccgtggccaacttggagaggctgcaccaccgcctgcatgaggagcaggagcgtcgacgacaggagcaggagcagcagggctcttctttctcgctccagcaggagatagagtctgtgaggagctgctccccctggaggcgccccctgcaccaccactgggcgccccagcctctggagcagctgctggaggagacccagacgacggaggtggcgacagcagctcgaaccacgacaccgacttttctgctgaccaggaaccggaaggatgggttgctcgacccatcactcgcgacactgctcgcgggtgtcacttccacgatgcgctcgacaccctgctacgtcaggcacttgaccggcatacttggtccatcgagtatcattgtgtggtctaccagcatagtcacggggtctacccgggccgctgggaggcgacctgcttggtgcgccgtccggagaacagtctctggggtgcggaggtctgctcagagcactattccatcttttagcgggactcagctgaggcggccatgcaagatgccgcacggcgtgcgctttcgcactactgcacagtgctcgatggggtag

SEQ ID NO: 1145 - DNA, 180 bp, Zea mays
  Peptide Sequence Number=SeqID_44520
aggatccagggtgtagttcgcttagccatcgtgccgtcaatggggctcggtgtatgcggctcgctctgccaagctggggtggcaatgagattgatggttcttggttttgactctggtaatggagaagatgaagccgtggaaggagacttccaggagttccaagactacgatgagttctag

SEQ ID NO: 1146 - DNA, 1639 bp, Zea mays
  Peptide Sequence Number=SeqID_44521
gccgaatggtgcgaagtgtttgaccgcgggcgcaccacgtcgctgctgctgttcgaacatgttcatgccgagtcccgcgatcgcggccaggcaatggtggacctgctggcggagtatgaaaaggtcggcctgcagctggattgtcgggaactgcccgattatctaccgctgtatctggagtatttaagcgtactgcctgacgatcaggcgaaagaaggattgctcaatgttgcgccgatcctcgccctgcttggcggtcgcttaaaacaacgcgaggcaccgtggtacgcgttgtttgatgctctgctgcaactggcgggaagctccctttcaagtgacagtgtcacaaaacaagtaaacagcgaagagcgcgatgacacccgccaggcgcttgatgcagtgtgggaagaggaacaggtgaagtttattgaagataacgccacggcctggctgcgctacgactacgggcagtacacctggcgcgcctcctcaagtcaaatgctcgataaacgcgggatggtgatatggtcgaatctgttccatatcggcattttggggattttcttcgggcacttgttcggcatgttaacgccgcactggatgtacgcgtggtttttgccagtggcagcgaaacaactcatggcgatggtgctcggcggtatttgcggtgtgttgacgttgattggcggcgcaggactgctgtggcgcaggctgacaaatcagcgcgtgcgtgccacttccactacgccggatatcatcatcatgagcattttgctgatccagtgtctgttggggctaagtaccataccgttttcagcacagtatcctgatggtagcgaaatgatgaagctggtgggttgggcgcaaagcattgtcactttccgtggtggatcgtcagagatgctcaacggcgtagcgttcgtcttccgcctgcatctggtgttgggaatgaccatcttcctgctcttcccgttcacccgactggtgtaccacgtcgatgcttttacctcacaaccgtttcgcggcaattctgccggtgttgttttccccgccgataatcttagcgaagcgcaaatgcagcttatcgcccgcgagttaggccattcggaaactgcttttctgctgcacagcgacgacagcgatgtgcgcatccgctactttacgccaacggttgaagtgccgatttgcggtcacgcgacagtagctgcgcactatgtacgtgcgaaggtgttaggtttaggaaattgcacgatctggcaaacatcgctggcaggaaaacatcgcgtgactatcgaaaagcacaacgatgattatcgtatttcgctggaacaaggtacgccgggctttgagccaccgctggaaggtgaaacacgtgcggcgattatcaacgcgcttcatctcactgaggacgatattctgccaggcttgccaattcaggtggcaacaacaggacactcaaaagtgatgatcccactgaaaccggaagtgcatatcgacgccctttcgcctgaccttaatgcgctgaccgctatcagcaaaaagattggctgcaatggtttcttcccgttccagatccgcccaggcaaaacgaacgatggtcgcatgttctcgcctgcgattggtatttgtggaagatccg

SEQ ID NO: 1147 - DNA, 249 bp, Zea mays
  Peptide Sequence Number=SeqID_44522
atgagtgcactcggttccagccaggtgttcgacctgtgcgtggtcggggacccaagccgtaaagaaatagaaatccaggggtctttgcgcaaacaaaatgaggaagagactgtagttgaagaagttgtctctcaagctgagaatccaccagccaagaataacttctacttcgacatctatggagtagacccagaacctcctgcaacacaaggcaagccccgatgcgttatctctttccttgtgttttaa

SEQ ID NO: 1148 - DNA, 300 bp, Zea mays
  Peptide Sequence Number=SeqID_44523
atgatgatcggcatccgtgcggatgagtcctacaaccgttttgtcgccatcgccagtttaaataaacaacgttttgccgacgataaaccctggactacggccgcaccaggcggtcatagctggtacatttaccccatttacgactggaaagtggctgatatctggacctggcaggcgttcctctgcgtcatatgcgaatttgcgaaccttttggcccggagcaacgacaaggattatggctctatcacgttatcgaaccggatcgctgggctgctatgtgcgcacgagtcagcggggtaa

SEQ ID NO: 1149 - DNA, 630 bp, Zea mays
  Peptide Sequence Number=SeqID_44524
atgggggatactatgcaacaacgattaacgcaggatttaacgcaatttctcgccagcttgccggaagatgatcgcatcaaagcgattaatgaaatccgcatggcgatccatcaggttagcccctttcgtgaagagccagtggattgcgttctgtgggttaaaaacagccaacttatgcctaatgattacaacccaaacaacgtggcaccacccgaaaaaaaactgctgcaaaaatccattgaaatagatggttttacccaacccattgtggtcacacatacggataaaaatgccatggaaatcgtggatggttttcaccgccatgaaattggtaaaggctcatcatcattaaaattacgcttaaaaggttatttgccggtgacctgtctggaaggtacgcgtaatcaacgcatcgccgcgactattcgtcataatcgcgctcgtggacgccatcaaatcaccgccatgtcggaaatcgtccgtgaacttagccagttgggatgggacgataataaaattggcaaagagctgggaatggacagcgacgaagtgctgcgcctgaagcaaattaacggcctgcaagagttgtttgccgaccgtcaatattcccgcgcctggacggttaaatag

SEQ ID NO: 1150 - DNA, 1047 bp, Zea mays
  Peptide Sequence Number=SeqID_44525
atgccgaaccatgcattcttcgattgcttagaaatgcagagaacgatccggttgaagagcccgaggaactcgcaggagaagcccctgagcagcagtggcaatgagattgatggttctggttatgactatggtactgctagtccactacagccaaacaagatacttgctgagtatgttgatgtgtactcacccttgctctacacaccaaacccccctcatacccaggttgtcagcactgcaaccactgctcaggcgaagatgaagctgtggaaggagacttctaggagttccaagactacgacgagttctaggcattggttagcggcaacccccagtcggctgcctgtgaaggccgcgatggctcgtcttagacacactgcacgaaagtccatcatccccttcttaccctcccgccttgctaagcatccgcttcgccgtcccgtggccggacagtccagccatttggagaggctacaccaccgcctgcatgaggagcaggaacgtcgacgacaggagcaggagcagcagggctcttctttctcgctccaacaggagatagagtccgtgaggagctgctcccctgtgcttcccctggaggcgccccctgcaccaccactgggcgccccagcctctggagtagctgctggaggagacccaaacgacggaggtggcgacgacagctcaagccacgacaccgacttctctgctgaccaggagccggaaggatgggttgctcgacccatcactcgtgacgctgctcgcgggtgtcacttccacgacgcgctcgacaccctgctacgtcgggcacttaaccggcgtacttggtccatcgagtatcgctgtgtggtctaccagcatagtcgcggggtctacccagaccgctgggaggtgaccagcttggtgcgccgtccggagaacaatctccagggtgctgaggtctgctcagagcactattctatctctgagcgggactcagctgacgcgggccatgcaagatgctgcacggcgtgcgctttcgcactactgctcggtgctcggtgggggtag

SEQ ID NO: 1151 - DNA, 147 bp, Zea mays
  Peptide Sequence Number=SeqID_44526
atgccgtggtacgaggcgggattaattcggtcaccacgcgcgggggagggcgccgacgagagggggaaggaggagggaggggagggagaagggggaggagggggaagcctcaccgtgggcgggggagggcgcggcggcggcggctag

SEQ ID NO: 1152 - DNA, 732 bp, Zea mays
  Peptide Sequence Number=SeqID_44527
atgacaaccgtccccatcgattccccattcgcgtccaggcctcaccgccttggcatacaatgctccactgaccccggctaccgtcgtgcagtgaccgcacttgcggcggagctcgtcggcgacgaggagtccgccctatccagggcacaattgatcaatcaaatgggtcagagagcttcaccagggatcaaggaagacaggcggccgaagtccggcgaggacgatcttggttttccggtgaagttctgccgggtccgagagcttgggaagcttcacaatctcttggcaaagctaaccgagtggctggcgcggcttggaagtgaccagggcgggctggccacggtggccgaggctcgggtggcaatggcgggcggaagagagctcgccggagctaaggaggggcgtctggccggcaaaggtgagcacggggtgagatgtttgacaataggccccaaggaggcatgcatgctcagtaggagtggtgttcctaacaagaggaggtaccccatcagtagcagctacctcctctccacctccgttgatagtggagcagatgttcttgatgcagacccatgcagtgcatgctattcggtagactttggtagccatgctctgcagatgccaaagatgccacaggacaaacgtggagggttcatgagagggcaccctcagaactactcaccgtccaatgtgatgacaaagagaaggttttgtatggtccccgtcaagtga

SEQ ID NO: 1153 - DNA, 405 bp, Zea mays
  Peptide Sequence Number=SeqID_44528
atggagaaaggggcggaggggcttaccggcggcgagactgctctgggcataattgatcaatcaaatgggtcagagagcttcaccagggatcaaggaagtgaagttctgccaggttcgagagtttggaagcttcacaagctcttagcaaatctaaccgagcggctggcgcggcttggaagtgaccaaggcgggctggccacgttggccgaggctcgcgtggcaatggcgggcggaggagagctcgccggggctaaggaggggcgtctggccgacgaaggcttgcaggttttgcttactggatcaagagatagagaggggagaaatcgagtttgtctcactgccacgcacagagagaagatcccagggatcaaggtgaacacgctcggtctttggctcaagggctga

SEQ ID NO: 1154 - DNA, 102 bp, Zea mays
  Peptide Sequence Number=SeqID_44529
atggctgatgcatgtttcacttggttttacctacttttatttctgcacttaatgcaaaaaactggcgatgggttttacatggatgtccctggccttcagtaa

SEQ ID NO: 1155 - DNA, 87 bp, Zea mays
  Peptide Sequence Number=SeqID_44530
atggcgaaggggttctggtttgcacaatggcggtcaatttgtgcagtcacagccgacgggaagggaaatttggatccataccattaa

SEQ ID NO: 1156 - DNA, 2463 bp, Zea mays
  Peptide Sequence Number=SeqID_44531
atggttacggctcctgctccggcggtgcgacctgcctgcaaccgggagaaatgcgattccggcgtccagaagaggtttgtgtcgtcgacgggtgttgctcaggttgatcggaacacagagaaaacagagcagctagtggatggatggcagttggtggaatccaagcagtcaaagcgacgccgattgaagatggagcggcaacgtcagaaacggcccgtaccagaggacctggctggcaggtgctttaactgcctctctcatgatcactttgccttccagtgtacgcagaagacgaggtgttttcggtgccggaagcaggggcatcgctcctttgactgcaatctacttaaaaggccgatgaggcttgaggctgtgaaggtggcggtgaacaacagtgctgcttctcgacctgagactaagatctcggtttggaggaggatcaatcttccggagccaagtacgaccagtggagacagactaagggagcaacctcgacctgagacacggctctcggtctggaggaggctctcttcgtcttcagcaacctctgtgatcaaggtgaagaagaagagactggtgtggagaaggaaagacaaccagcatcctcctagtgattcaggtatcgctgttcgacaccaggaaacatcaacaatggagggcgacggaggaggcttgatttcacttgatgctgtcggtgtccaatcaaaaagacagcggactcgcaagagacggcgtagagccaaaccgatttctgatttggataagcgccccgctggaccggtgtcgcctactgaagatgataagccttgcatcttgagatggagtcagcagatgaccagagctgaggatgatcttcagaaggcagtggtgattactgttatcagcgatcgtgagaaagtaccggttgaagagattgctgagttaattgctcctaggctggagctggaagaggggacactgataattcggcaatattcccagtcaagtttcattctctttctacctggctgtgacatggtggagatgctagtgggcaattggccttttctcagggcagccacgttcacaatcacctgcaggaaatggtcccggtttctgaactccaggggtgttgtgttacctgtcttgttggacttcgagcttcagggtatccccattcatgcatgggaaaccataactgtggaacaattgcttaatccctttgctagtgttcatcaggttcatcctgacaccctggagcttaaggatgtggctgtttaccgatgttctgcttggtgtttagacccgtccttggtgcctgcttcaagggagctttggatcgtcgaacctcccgttgccgttgatgggatatcttctggcaggagaacgctgatgtatccaatccgcatcacattctcgtctgcaccacggagggatggatccgatcctaagcttcatgctattacttcgggcggggatggttctggtcacgtgcagcagggatcccctcctttttcaagacctccccattcgagtgggagaaggggggatcatggtcattcgggacgtctctcagttcatgagcgtttgggcccaagagatgtgagcatgcagcagcggagcattagttccggggtggcagtttcagatttgaagagaactttggaatctgatggggggaacttgcctcctaggctggcagagatgactgatgacatggttattgtttcaccggtgaaggcgaagcagctgaaagtttattttcgtcaaagactcaagaatgtcctgaaccaggaggaagctggaactcccaattctgtcactgtgcttcctccatcaccctcagacgtggcagctgctgacacagatccatctgagtatcctgtttcagatgttgacgctgtgttggcaactccgtctagaacattaacttcctccctgtctgatgtggcagcagcacacgcggctccgtcggaggctaatgccttagacgttgatgctgagttggctgctccatctgaggaggacatttcagcaacaacaattgctgcgttggctgctccatctgaggaccctccagcaacaacacaagattctgtggagatttgtgctcaagagcaattcatcagcaaattgtcaaaccagatcacacgcatattaccaatcccaaaatctgtcagacgtcagtcctctatccccctggcagttccaagacgcagccgacgtgtggcgggggttggagttgaatttaaaattcaggattggggaaaaagatctaagaaacaagctatggtggctctaaatattattgaggacaatgaaggattcagccgtcaagctttagatgactacgccaagctcttcaagaatactctttctcgtagtcatgtgcaggctcttgctgccctttttgggtggtctgtcccagataatttagaatttataactgggactggggatattaccgcagcaagcttagtttag

SEQ ID NO: 1157 - DNA, 639 bp, Zea mays
  Peptide Sequence Number=SeqID_44532
atgcagcctggttgtaccccccgccggcggtcacccaagacggtgaccaccagcctttgggtggggagaagtaagtcgggctgcgatcttggtcccaccctcagcttcaaggatgttcatcatcctcgctggggtggaggccgagctgagccggagctctacctcccacgcgggttcgtgggtcaccctctcctacggcgttcgagggagagggcgctcgctggccctgcgggcgggtcggacttcgacaacgcggggccggtcgacggcaggcgtcgtctgccccagcgcgtcgggctcgtcggcttggcccgcggtgccccctcctgccagaaggcggcaccgtaccggtgcaaaggcaggaccgccctagaacacgccacggggaggtcggtgccctgctcgtccgggaggatccgagtggggatctgccggcgggctgacggcccctgtcgtcggtgccgaggcggaggcggctcgagaagtccccgtcgccgacgggatcaccgccaccatccgcgcttcgggcctccggctctttgtacttgtcctcgcccctcgagcgtcggcgtgggcgagggcaaggttgcagcagcgttcgccctgaggctatcgccgctgcagtttggccacccgtag

SEQ ID NO: 1158 - DNA, 1401 bp, Zea mays
  Peptide Sequence Number=SeqID_44533
atggctgaaaggtaccaactcccacggagttgcgttcctccaacgacaaggaggaaagacggcggatatcccccatccgggggcttggaaggtggaaagacacgatgcataagggagcgcgaagacatggtcgccttccaagggagtcaccccccttttaaaggcggctctccctacttgcgtccccagccgtcgtgggctgagtctcctccaacacactccaaggtcctcccctacggcgcgggggctgggtcccacacgtcatgcaagccggctcagagcggaagaagccaaaccgccgtgcgcggtgcgtacaaccgcccagcggttacaagcgactctccacttttgcctagaccaacgggcgaaaggggcgggcaaccatgcaggcgacatgcaaccgcgcaaagtgggcgcgcttctccgactcccaacacgcccagcatggaggcccaggcccacgcgtcatgcaaccggcgtgccaaatgcttcgtgcatgcaactgcaccgccacttgcgccactaccgcgtctcctcgactgcggaaccaataccgcgactcgaggcgacccagcgcgcaacccagcagcgccagcctggcgcgacggtcaatgcggccaaaagtggcccggcagtaatggcggtggcaggcgggcaggagcagcggccacgtcgagaagcgggcgacgcttcgccttcgccataatgactgcgtcaaaaaagggaccgggaaagggggataccccgaaaaggatccttccccgtgaaggaactaggctccgagcctccctactgatcagaggttcgaaggctggcccctcggaagggttcgacagccgcctcagatcgcgtgggccctacacccactactggtcagaggttcgaaggccggcccctcggaagggttcaacggccgcctcaggctactcgggctctgtgcccattactgatcaggggttcgaaggttggccccccgaagggttcacagccgcctcagacgccgagcgagggatgaccatggaatcccatcgaagggaggcatcgaaccctcggaccccgtcgctaggggaccgggtccggcagatcacccgcagctcaccggagacaccatgttcgacgcccatcgagggtaacatggcgctttcccccctcctccttgcggaaaggcgacgcaggggcgtatgtaaaaaattcgagtctgtccctgatcgtcctctcgccctgtgcagaggctcgggggctgctctcgcaaacccggctccggccgaaccgttgacaacgtcaacataccagcccgagaacttgggactcgaccgtacaaccgggctacgaccagctcgcatgagggacgaccagaccagccgaagcattacgcgaggcattaagacctcggaggagtga

SEQ ID NO: 1159 - DNA, 702 bp, Zea mays
  Peptide Sequence Number=SeqID_44534
atgccgtgcacaaagaatgtgtcggcgccagggggaggagatgacgaggatcctcctcgccccttcaggcaggtcaaggggaagacggtttacttggagcagcaggaagaccgcaagaagcggcgtctggatagagcagcacgagcagctctagcagcagcgacagccgctgagcagatgtctgcacagattgctctgcgagtgcaccgacttttggaccttcctgcgtttctgctagccgccggtgctgactctgaggccgaggataccgcttttcaccagtttgagactcagggcgcagcaatccctgatgatgatgatgattatgatgatgatcatgactttggggctcctgttgtgccagccattcagctaggaccccctcttcctgcagctggtccttcttcctctccgctccagccggtcaccctagttttcacgttgcatgtcatcagctccgtcagcactcagccgctagtgccaccagctcctgctgttaccactgctgttgtggcagtgtctgtgatttcttcagctccggcagcttctgcagcgcagcctccgtctaagtcggtaccagctccagcttctacggcagatcctggatctgagattgactctgacccgcagctggcgttcgctctactaccacgaccgcgaccggatgcgcccccgccacctcctttctcttctgatgtgtag

SEQ ID NO: 1160 - DNA, 585 bp, Zea mays
  Peptide Sequence Number=SeqID_44535
atggaggaactggacgagcgcgctttcctatttgtcgtcgagactggaactgatgatcacggtcttgcgttcatgagagaatccgaggttgattcttttagtttctctggtcgcatagaggtcgtggagggggcttcattcgaagggatcataaagtattcttccaccgacttgccatcgacctgcacgggaagggctactgagggcccggtagtgagagctgtcagaatggtgccccggaagcattctgcggcgccttggaagtcaacacggatggcactgggagtcgagaatctcatccagtgtccttaccccctccacggggtgcgccgcaggctcgagtggcaggtggcccggcggtggtatgggctttgcgccttcaatgaggtcttgagcccgctcattcgcggtgatgtagacgtccgcctccctgaacaacttttcagaggtggtgggtgctttttgaagtatggctcagacaaaagccggatcattggatccccggtagaactcttcgatcacagctgcctcagtgacctcggggatacaattcctcattgtttgaaacttttgaggaacgaatga

SEQ ID NO: 1161 - DNA, 726 bp, Zea mays
  Peptide Sequence Number=SeqID_44536
atgacttcccacggatcctcagatgatggaaatgtactgtcccacactaacgggcttgcacgagagggttttccccgcattttgtgggaggtacttcagggggccggatacatgacgcctcctcagtacgcggtgcagcagttcgagaagcaccgagtgccccgttgtagggtgaggatgaccctggagcctcatcccctacagccaggctggcgttcattggactctgagtcttttggataccgggctgaggacacgatagaggcgattgctctgcacgggttgaccactttctgcggattccatcccttggagctgtctacccaccccattggcttgtttcccgccgaaagggaggacgacccaatgtggaaggatcgggtggagcatgccaaggatatctgggccatctacctaggacagactgcgcacttgaccatacgatgcatgaatgctctgtaccgtctgcaagtgatgcgcggtgaggcaatgtcccatctgatggcactattggaggcgacaaagatcactttggacaacaaggaagagcttgtggttgatttgtccactgagatggtggaaaaggacttgcaggagatccaggacatggaggccaacgaggacgtcgacattgagggaggagaggagcctgcctccagcgtggacactgctggctctgggagaccaccttcccccgagtcgagtgttgcctcgttcgctcactag

SEQ ID NO: 1162 - DNA, 636 bp, Zea mays
  Peptide Sequence Number=SeqID_44537
atggaattaccactagacgcgcagagcagcggaagacgtctcgatgtagacgaacgcgtcgagcagtgccgtgcagtcgccggcgtccttcacgtcctcgcacggttcgtccaagtgctccagatgcagcacctccgaggtatccacacgtacagggaggaagcgccgcgtaccgaactgctaggttcgcgacggcggcttggcgagggcgagagtccgagcccgaggtcgggcgaggcggagactcctcccgagatcgaggtcgaggtcgaggtcgagccctggggtcgggcgaggcggagaccaccttccgaggtcgaggttgaggccgagccttgggatcgggcgaggcggagaccaccttccgaggccgaggcggggaccgagccctggggtcgggcgaggcggagtccatcttccgaggccgaggcgggggccgagccctggggtcgggcgaggtggagcttcctgtggcgcctgaggctggactcgactactgtcagcctcaccctggcgggtggcacagcagtcggagcggggcaggcggcgctgttttcctgtcaggccagtcagtggaggggcgaagtgactgcggtcacttcggccccgccgactgaggaacgcgcgtcaggataa

SEQ ID NO: 1163 - DNA, 324 bp, Zea mays
  Peptide Sequence Number=SeqID_44538
atgggaacaaatgggcatctcgacctcgacacggaaggtaaatccgtcgatcaaaaggtgccaaaggttcacactaagccaataaaaagaccaagaatgggttcaatcaaagagagcaaaggacaaccgaaggctgccctggtctggcgcaccgaactgtccgaggagagcgactccgatctcgccagcttcggatttccgctccgctataattcaccggacatgtccggcttccatcttcgggtcgcggcaatgggagttcttcatgacttggtcgatgacaagctgcgagtcgccacgagcgttgaggcgccggacccctag

SEQ ID NO: 1164 - DNA, 936 bp, Zea mays
  Peptide Sequence Number=SeqID_44539
atgtcgcttcgcccccaatccgtgcggcatcatcagatggacgctggggccatgccgagccccgacggtcgccatttcgggatgccgcttgcccgctcggtgatactcgccccctcgtcgtcgccgctcgtgtggcctctcgaccgtcgtcttcacccgcaagatccaccgccccacgcccttcgccgccccgggcgacctgcagctaaccagaaacatccatggcatcgcatcatcagcatccatccgtccgtccaggaacctgacgatgatttgtttctgcagccggatcttctggctgggcgatctgaactaccggttggacgcgtcgtacgagtgagcgcacgagctgatctcggcgggacgaggaggtacgtcggcgtaggggaccaccagggccagagccagaggggcgacgggcggcgaacgccggcgtggtgcgaccgggtgctgtcgtacgacaaggggctggagctgctgggctaccggcggtcggagttggcactgtcggaccaccgcccggtgacggccacgtacgcgacgaaggtggaggtgttctccagccggaagctgcagagggcgctgacgctcacagacgccgaggtggagggcggccaggagcgcaatgttgacctttttaaaaacctggtacatgaatatgattacacctgttggtcttgcagtgttgcaaggcttggttattcaggaactgctgttatatcacgggtacaaccaatctcagttcaatatgggcttgacataacagagcgtgatcaggaaggcaggcttattaccttggagtttgatgatttttacttggtcaatgcttatgtcccaaattctggccgtggtttacgtagacggaattacaggatgcgttttctgctgcacatttactgcccccaagacttttttattcattcatttctatattag

SEQ ID NO: 1165 - DNA, 918 bp, Zea mays
  Peptide Sequence Number=SeqID_44540
atggaatacctctttgatgaaccctgcagccatcagcttgtggatctcctcgcctatggctctacgcttttcttcgtcgaatcggcgcagaggctgcttcacgggtcgggctccagctcagatatccagcgagtgctcggcaacatccctcggtatgccaggcatgtccgagggactccacgcaaaaacctcggcgtttgcgcggagaaagtcgacgagcactgcttcctatttggggtcgagctcggagtcgatccagatctgcttggaggtgtcgttgctggggtcgagagggacggacttaaccgtctcagctggctcgaagttgccggtgtggcgcttcgcatctggcacctccttggagaggctctccaggtcgacgatgagggtctcagattcggcgagggcctcggcgtactccacgcactccacgtcgcattcttacgcgtgtcggtacgtggagccgacggtgatgaccccgttggggcccgacatcttgagcttgaggtaggtgtagttggggacgaccatgaacttggcatagcatggtctccccagcactgcgtggtaggttcctcggaacccgaccacctcgaacgtgagggtttcctttcggaagttggagggagtcccgaagcagacgggcagatcgagttgcccaaggggttggacgcgtttcccggggatgatcccgtaaaagggcatcgtgccggcccggatcgtggacagatcgatctgcaggagcccgagggtctcggcgtagatgatgttgaggctgctgcctccgtccatgaggaccttggtaagcctgacgttgccgatgacgggatcgacaacgagcgggtactttcccgggctcggcacgcggtcggggtggtcgccctggtcgaaggtgacgggcttgtcggaccagtctag

SEQ ID NO: 1166 - DNA, 1308 bp, Zea mays
  Peptide Sequence Number=SeqID_44541
atgctgccaggctcgccggtgaagcgcctgttgcggcgggcggccaaggggcggcgggagaaggccgagatggcggagctggccgcggcggccgccacgctgctgctgctccgcgccgcctcgctccgctgctcggccgaccccagggtcgcgacgccgttctcgtggcaggggagctgggtggtgtctctctcgctgcccgacaccttcctcaacctgtcctcgctgccgccgccgctcgccacgctctcctcgctgcagctgctcaacctctccgcctgcaacgtctccggtgccatcccgccctcgtacgcgtcgctctccgcgctgcgggtgctctgcgtccatgacaacctcctcaacggcaccataccggcctcgctgcgcgcgctcgccgcgctccagcagttccgcgtcggcggcaacccggcgctgtcaggccccatcccggcctctctcgacgcgctctccaacctcaccctcttcggcgccgcggtcaccgcgctctccggttacagcatcgtcgtggacaaaattgacttttaccgtagcttacagaaggttacagaggacggaagattaacagtcccaatctggcgtgcctttgagctgcataataccaaactagcgaatgactgctccgaggtcgaggctgagtccgagccccggggtcgggcgaggcggagaccgtcttctgaggtcgaggctgagtccgagccctggggtcgggcgaggctgagtccgtcttccgaggtcaagggtgagtccgagccctggggtcgggcgaggcggagtccgtcttccgaagtcgaggttgagtctgagccctggggtcaggcgaggcggagtccgtcttccgaggtcgaggttgagtccgagccctggggtcgggcgaggcagagtccgtcttccgaggtcgaggttgagtccgagccctggggttgggcgaggcggagcttcttatggcgcccgaggctggacttagctgttgtcggcctcactctagcgagtggcacagcagtcggagcagggcaggcggcgttgttttcctgtcaggcgatccttgcattgattgctcctgcgatacggtcggttggcgtggcgatctggccaaggttgcttctccgtgaagcctgcccgagctgggcctcgggcgagtcgaagccggtctggctgttccctcatgcgaactggtcattgcccgggtgcatagtcaggttccaagttctcgggctgggcgccgaacatggtgtctctagtgagttgctaacgggtgatccgagtggacactcgtgccccgttcgataa

SEQ ID NO: 1167 - DNA, 297 bp, Zea mays
  Peptide Sequence Number=SeqID_44542
atgacctcgacgcgcggtggcggaggttcctcgatccggagtagtggcggcggttcccaggtcggtggcggcgactccccgatccagagggcaagcggcggcgtccccgagctcccgaggaggcgtcacttccaaggccggcgagcaagcggcgacgtccccgaggtcccgaggaggcggcactttcaaggccggcgagcaagcgacggcgtccccgaggtcccgaggaggcagcacttcgaaggccggcgagcaagcgacgaccgtcgacgtgcgagtagcgatggcgacgcatga

SEQ ID NO: 1168 - DNA, 243 bp, Zea mays
  Peptide Sequence Number=SeqID_44543
atggctcccaggcgccaacggtcgactccgccagagaaggaaagagatccgcaccggacagtgtccgctgtgcaccggactgtccggtgtgcaccggactgtccggtgtgccaggcaacagaaggcaagatttgccttccgggaatgctctcaacggctcctagctgccttggggctataaaagggacccctaggcgcatggagaaggacaccaagcattctctaagcattcctaagctctaa

SEQ ID NO: 1169 - DNA, 453 bp, Zea mays
  Peptide Sequence Number=SeqID_44544
atgggcgagaacaacaagcgtaagcgtgagccgactcctccatcagaggagttcggcgactcggagtactcggaagaggagttctcctccgagcccgaggggtctccggctcccgtctctcccccggcgtcgtccgatgactcggacgactcccaggggatagccgcggaggtctggacatacatccgggccgtcgagcgctccgggctcgaaggctcggatgagtcggagtactcctcggatgaggaggactctgacggcggcgaggagggtgaagacgacgacgacgacgacgacgacgatgacgacgacggcggcagcggtggcgggggcgacggcgacggcagaggcggcaccaagggcggcagcggcggcagcggagacagcaccaggggcagcagcaggggcagcacccggggcggcggtggcggcaggggcagggccagtggctag

SEQ ID NO: 1170 - DNA, 210 bp, Zea mays
  Peptide Sequence Number=SeqID_44545
atgtctcattgtccgcgcgcgctatctcccctgccccgcctccccctccgcgcacatacccgcctccccctcgcaccggtgcagctccgctataattcaccggactatccggtgtgccaccggactgtccggtgcaccagcggagcaacggctatctacgcacaacggtcgactctgacggatgaacagtgcagcatagtgtcacggtag

SEQ ID NO: 1171 - DNA, 321 bp, Zea mays
  Peptide Sequence Number=SeqID_44546
atggcacccaagagagctacctcgaaggctgacgaggctgcgaaggcagcagtgctggccgagaaaaagggcaagaccctcgtcgacaccacccaccaagaggcctgcgaggacgacacactcagcaagaggcagtgcaacgaacaacccactcccgaaggcagcctccgcacctgcagctctggaggacaaccgcaacaacccccaggcttcgctccaccagagggcgcggacgccaccgaggacggcgaagtcatcggcgtctcggcagaagaacagctacaactgcatgccttgcgcatcaagaaccgcaacctctag

SEQ ID NO: 1172 - DNA, 1194 bp, Zea mays
  Peptide Sequence Number=SeqID_44547
atggggagcgcccgcgttgtgtttgtctcgttgtgggaggagcgcaacctcgtggaggttggtacctttcagccatcgctcagcttcaaggattttcatcaggcagcccggctgcatcccctcaccaatgcttcaaggatcttcatcatccttgctggggaggagggcgaggcgagccggggcctgccttcgcctgggctggcgtcccgcttcttcctccagcttctgggggtggaaaccatcctccagctctgcggaggaggcgcgctccagccatgccggggaaggcgaactgctgctgcccagccagggtgtaacattccgtcctttgtctgggcgacagtggccagccgcaccggggggtctcacaacacgtcgtacgccgcgagggcggtggacgccgtcgccggtgctgaggtggtggcagctggagaaagcttctccgccgacgagaccgtcagcgccacccgcggaccgacctccggctctttggctttaatgtctagatctcgtccctcgagtggggacgcgaatgagagccttccagcggcagtgtccgccctgggaccatcgctgctgctgcagaggtcgccggcgagtcacccggagtttgtcgtcccgagtccctcggctcagtcggccttgccactcaaggcttctcttgctcagttaaagagaaccctcggccgctctgcgatgagccggagccggaggcagcggtgtgagcgtggacagaggcggagttggctcgaaaagaagcttcgtcggccggagcctggccgggtcgtccactggcgggaccaaccctggagtcgggctgccgaggccatgagccgagctggcgtcctcggggggcagctggctgaggctagagatggcaatgggtacccgaaacccgaatacccaacaggttttacccgatatgaaggcgggcgcagtgttgacatcttccttcgagggggagatcctccgaccgtgttgctatccgaggccgggtcggattccgccaaaggtggagtcgatgacgagggtgcagctgctccccctactgatgacttgtatgtcggtagcagaatcgctcatccgagcgagagttacttttcatggaaggtgatgagtgaggagtccctcggctcggtcggccttgccgcttacgtgtactccgtcattttcaggattccactatcgaagtag

SEQ ID NO: 1173 - DNA, 1119 bp, Zea mays
  Peptide Sequence Number=SeqID_44548
atgccatgcaagctggccgagacaaaagaagccaaaccgctgcgcgcggagcgtgtaaccgcccagcggttacaagcactcctccaccttcgcctaacccagcgggtgaaagggcggaccaccatgcaggcggcatgcaactgcaccacggggatgcgccccttcgacttcgacgcgtccagcatggaggcccaggcccacacgtcatgtaaccggcgcgtcggttactacgtgcgaaaaactgcaccgccacttacgccaatactgcgccttctcgactgcggaaccggtgccgcgactcaagacgaccctacgcatagcccaatagtgccaaccaggcgcatcggtcacgaatcagtcagccgcaggagaaggcgcgatgatcgatatggccaaaagtgggccgacagtaatggcggcagcaggcaagcggaggcagcagtcaaatcatctgcaggctcacgtctcctcctggggcagcaggagagccctctctcatggcgcgacacctttggcaggcgaagcgggcgacgcttcacctccgccataatgaccgcgtcaaaaaaagggaccgagaaaggggatactccgaaagggatccttctctgcgaaggaagcgggccccgagccctcctactaatcaggggttcgaaggctggcccctcggaagggttcgacagccgcctcagagcactcgggctctgcgcccactactggtcagaggttcgaaggctggcccctcggaagggttcgacagccgcctcaggccactcgggctccgcgcccactactgggttcgaaggctggccccccgaagggttcgacagccgcctcagaacacgcagagcgagggatgactctgggtacgtccgatacatggccgaggctcgggctacgctcccgagaggctcgggggctgctctcgcaaacccggctccggccaaaccgttgacagcgttgttggggcgaaggcaaagacaccacccttcgctcgaggccttcgctgataaccgctggtcagacagagacagaacaggcagggacacccttcgctccattcggtgccagacgaagaccggcgacgaagtcatcccgcagcgcggcctcgttcagctctga

SEQ ID NO: 1174 - DNA, 450 bp, Zea mays
  Peptide Sequence Number=SeqID_44549
atgggcaagaacaacaagcgtaagcgtgagccgactcctccatcagaggagtttggcgactcggagtactcggaggaggagttctcctccgagcccgaggggtctccggctcccgtctctcccccggcgtcgtccgatgactcggacgactcccaggggatagccgcggaggtctggacatacatccgggccgtcgagcgcgccgggctcgaaggctcggatgagtcggagtactcctcggatgaggaggactcggacgacggcgaggagggtgaagacgacgacgacgacgacgacgacgatgacgacggcggcagcagtggcgggggcgacggcgacggcagaggcggcaccaagggcggcagcggcggcagcggagacagcaccaggggcagcagcaggggcagcacccggggcggcggcggcggcaggggcagggccagtggctag

SEQ ID NO: 1175 - DNA, 108 bp, Zea mays
  Peptide Sequence Number=SeqID_44550
atggagcgacgatctgtaggatcactggcccaggtagcatcagagagcagagacaaactgactcaagatctgaaccgcatgagcaatatctggcctggtgacagtaag

SEQ ID NO: 1176 - DNA, 159 bp, Zea mays
  Peptide Sequence Number=SeqID_44551
atggttgttgatgaggaggatgatgaggtgaaaaatgagaatgacttagtaatacttgaaggcataaacagaaatatcgttgaattacaagtgtaccttcaatcggaaggagacaacagtacaagcgtgacgcaaaaagcgaatgccaagtcagcgtga

SEQ ID NO: 1177 - DNA, 405 bp, Zea mays
  Peptide Sequence Number=SeqID_44552
atggcaaatgaagctattagacaaaatgaagaaggatctcatactgccttagaagaagcaaggaaagctgaagaagccacagaacgtgaaagacttatagccgaactttctccacctccggagccgtatgaccctgaggccaatccagtcctaaagggtgctcttgatgtgattaagatagcaaacgaggctgttgacgaaactgggtccggcactttcccatggaagtccggacccactgacgatgtcctggagtacatcacctcttctggccacgtggcgtccctggagccgaccacgcggcggggccgggtgctgccgtgggtcccgagtagccacccgtgcctgaggcaagctgcggcttggtcccacatatggcacccccaccacacgactaggagatag

SEQ ID NO: 1178 - DNA, 1407 bp, Zea mays
  Peptide Sequence Number=SeqID_44553
atggtcgacccgtgcccgcaaatcccgtcgtggccactgcagccgccagttcacccgtgtggttgtgtggtcgtggctgcctcgcctcccgctcagagctgtagtgcacgagcgcctcgcctcccccttcgatgtccccttacccacccgaggctgcagagacccggccatacccccgccttgcccccacctccgcgctcctccgacccacctgcggatgcagatgcacgtgcttcggcgccgctccacccgcatccgcgacatgagcgggatctccaacccacccgcggttgccgctccacccgcatcggccacggaccatatgcagaaccaagaaaggatggttccctactggttctgcctataggaagcttgaggccactatgcggcaacttacttgttaacttgagagatcctcggagaccaatttgcaaggttggatactttgggttgtcaaggatcaagcgcaacactctggtttctggtggtgtctgcggcactcttccatggatggcaccaaagctactaaatggcagcaacaacaaagtctctgagaaagcaagtttttttccgaccatactcctgatagctctttgcatatggaaccctgacaggctaatacgtaatgagtatttggttttacacatgcaggttaagtgtacaaaatttaagctaatagaaggcctcaagcattttatgtcattaaagaatttagtgttagaatacagatctgaaccaagaaaggatagttccctactggttctgcctataggaagatccaacaatcctgacagtctggcatcttccttcgtgcagatggttgaacttgggtacaaatctatggcacactttttaattgcgacacatcgagcatcatcagataactcagaggattcaagcccagctggcaaagagaagtcgttgtctactaaatctgaaagctcgtgcatttccgatcatgatggcccggatgccaatgagaggcccgaggatggtgaaacgagcagcaaagctaaggtgaagaaagcaacccgccgcaaagggaagaagagttctgacggcgacaaagaagacagcagaagcgagtccgtggtgacatctgagtgccaggatggccatcaagccaacacggaggctgggtgtgtcactcaatcgtccaagtcagtgtcaaggaagaggaaaggctcggtcccttttgcgatgaagttgtggcgctttcacttgcaagcagttcatggtatgctagcgaagatgtttagtttcagcagagaatgtatccttattgaggagaacaagggcctcctctctacatcctccttcgataggcctcgtgccagaagtcacgttgcagtgaattttttcatccccaatatgatgcagaacaccatcgccactcactgttactga

SEQ ID NO: 1179 - DNA, 369 bp, Zea mays
  Peptide Sequence Number=SeqID_44554
atgtcatcgattccgccggcggcgggcgggttgtcagccgccattgtcgttgtcgcgcggcggtggaaagagtatcatgtcgtagctgccgtcgaaggacatgaactcaagactcccgaaacggagcaccgtcccgggccggagaggttgctggagactgcccatctggagcttgacgggaagctgttcgtcagcacgcagcaggcccctacctggcgcgccaactgtcggcgtttcgagaccggggggtccctaagccgacgagtcgggcgacgtggaggctcctccgaagccgaggtcgagtctgtcttccagggtcgaggccgagcccgagcccctgggtcgggcgaggcggaggttgttcggtag

SEQ ID NO: 1180 - DNA, 942 bp, Zea mays
  Peptide Sequence Number=SeqID_44555
atggggcacagacgtccgctcggattacccgccagcagctcaccagagacaccatgttcggcgccctccgagggcaacatagcgctctcccccctcctccttgcggaaaggcgacgcaagggcgtatgtaaaaaagtcgagtctgtccctgaccgtcctctcgccctgtacagaggctcgggggctgctctcgcaaacccggctccggccaaaccgttgacagcgtcaacataccagcccgagaacttgggacccgaccgtgcacccgggctacgaccagctcgcatgaggggaacaaccagaccaaccgaagcattgcgcgaggcattaagacctcggaggagtcaaaccactcctccgaggcctcggaggctacacccggcgggtgcgctcgcgcgcacccaccggaataaaacgcaaccgagaaaggctggtccccttgcaaaaaagtgcgacaaaagcctccaagcgagtattaacactcccttcgaggctcgggggctactgtcggggaccataattaggggtaccctcaaggctcctaattctcagctgagccgaagtgaccacagtcacttcgccgctccactgaccgacctgacagaaggacagcgccgcctgcgccgctccgactgctgtgccgctcgacagagtgaggctgacaggcagtcaggcccggcctcaggcaccataggaaactccgctccgcccgacccagggctcggacttgggctcagccccggaagacggcgaactccgctccgcccgacccagggctcggactcgggctcagccccggaagacggcgaactccgctccgcccgacctagggctcggacttgggctcagccccggaagacggcgaactccgctccgcccgacccagggctcggacttgggcttagccccggaagacggcgaactccgatccgcccgacctag

SEQ ID NO: 1181 - DNA, 243 bp, Zea mays
  Peptide Sequence Number=SeqID_44556
atgcagctcaagaagaagttggcacatccaggtagcttcggctacagcattagcaacaacacgatattcagcctcggcactggagcaggaaatagtattctgtcgcttggaagaccaggagataaggctatcgccaaagaacactgcatagccggaggtggaattgcgtgtatcgggacaaccagcccagtcagcatcaaagtaaaccacttgctcagtctgtggagaagggcgaagcattag

SEQ ID NO: 1182 - DNA, 1257 bp, Zea mays
  Peptide Sequence Number=SeqID_44557
atggagcctggcggagggacagctgtcggagcggttgggtccttgctgacgtcctcttgcttccgtaagggggctgagagccgccatcgtcacagagcatgcggggcgccatcattgcctatctggcggagctggccagatgggacgccggtcgggttccctgtggcccgagtcagctcgggtgaccttgagatcggggagcttgcccgggctcaacacactaatcataggaccaagttgcatctgaggattttcttgaacaactcaaaagggaccggcatggtcactgagtatctgagcaaaatggagaaagaggttggtaagaagatgacactgaggtctcctcggaccaatactgcattccaggaactcttctctttgccagcagaagaatttctcatcagcagttttacctgctacttgaagaggaaattgcctacacaaggtcaagttttcttatctccaagaacaattgggttttattcaagcatgtttgggaggaaaacaaaatgttactttctatgggaggatattgaagacatacagggaatacctcaatcaatatcatcatggagtccatccattataataactcttcacaaaggtagaggcatggatgcaaagcatggtgtaaagagcatggacaatggaaaacttaagttctgcttgcagtcttttgcatcatttagtgtggccaataggacaataatggcattatggaaggcaagatctctgagcacagagtttaaagtacagcttgcggaagaacaatcccaaattaacacccttcagagtgaggacaatggggtctttgttggtattgaggatgccaagagccttcagatgactgaagttttctcctcgaccatttcgaccaatatggcctcgcttatggaggtgtgtctaggaggatccttggaaatgaagttcagcaagaagctgtctcccgttggcggagaagtgacaggaacccagcagaaatctcttatgcctaataagaaaggatgggttatcgaagaggtgatggagctccaaggagtccttcttggcgacttctttacgctccacatcaagtaccaggtcgaggacctcgctcccaagcaaagagcaagcaatgtgcaggtctccttgggaatcgagtggtcgaagaccagcaggcaccagaagcggatcgagaagaacgtcctttccagttcatccgcgcgcctaaaggagatgttcaaccttgcgttgagggagctctcgcatgccagatag

SEQ ID NO: 1183 - DNA, 1431 bp, Zea mays
  Peptide Sequence Number=SeqID_44558
atggctgaaaggtaccaactcccacggagttgcattcctccaacaatgaggcaaaaagacggcgggtatcccccatccgggggcttggaaggtggaaagacacgatgcataagggagcgcgaagacatggtcgccttccaagggggtcaccctccttttaaaggcgactattcctactcgtgtccccagccgtcacgggctgagtcttctccaacacgctccaaggccctcccctgcggcgtgggggccgggtcccacatgtcgtgcaagccggctcagagcagaagaagccaaaccgccgcgcgcggtgcacacgaccgcccagcggttacaagtgaccctccacttttgccccgaccaacgggcgaaaggggcgggcagccatgcaggcggcatgcaaccgcgccaagtgggcgcgcttctccgactcccaacacacccagcctggaggcccaggcccacgcgtcatgcaaccggcgtgccgactgcttcgtgcatgcaactgcaccgccacttgcgccaccaccgcgcctcctcgactgcggaaccaataccgcgactcgaggcgacccagtgcacgacccagtagcgagaagcgggcgacgcttcgccttcgccataatgaccgcaccagtaaaggctccgagcctccctactgatcagaggttcgaaggctggccccccgaagggttcgacagccgcctcagatcgcgtgggccctacacccactactggtcagagaggctcgggggctgctctcgcaaacccggctccggccgaaccgttgacagcgtcaacataccagcccgagaacttgggacccgaccgtacacccgggctacggccagctcgcatgagggaacaaccagaccagctgaagcattacgcgaggcattaagacctcggaggagtgaaaccactcctccgaggcctcgggggctacacccggcgggtgcgctcgcgcgcacccaccggaacaaaacgcaaccgagaaaggctggtccccttgcaaaaaagtgcgacgaaagcctccaagcgagtgctaacactcccttcgaggctcgggggctactgtctgggaccataattaggggtaccctcaagactcctaattctcagttgagtgaggctgacaggcagtcaggccccgccggaggcatcataggaagctccgcttcgcccgacccagagctcggactcgggctcagccccgaaagacggcgaactccgctccgcccgacccagggctcggactcgggctcagccccggaagacggcgaactccgctccgcccgacccagggctcggactcgggctcagccccggaagacggcgaactccgctctgcccgacccagggctcggactcgggctaagtcccggaatacgacgaactccgctccgcccgacccagggctcggactcgggctaa

SEQ ID NO: 1184 - DNA, 1769 bp, Zea mays
  Peptide Sequence Number=SeqID_44559
atggggacttgcgcggccctcgggggaaggatgtcttcgcccgagcaccgggagtcttcggcgcgaatactgaaggttaccgggggtcaatggccaaggaacgttctgattccccgggcggccggcgaggacatatttacgtcttgtttggcctgtgtgatgaagatttttccttatggatggaatattgctgctgttgtatcggcattgatggacaaggatcgtcaagatgcggcgtggaagccccaggcgttcgctagggtcggggatcctagtcacgaggtgaagcgggcgcggggaggcgtgaagtccaccgcccctggcagcagcaaaccactgccggcagcgaagcctgccgtccctgggcccagcaagtcttcggcgggttcgagggctgccgcttctggcgcgggcaagccgccctcggctgagcccatgaaggagcgaaggccgccgtcgctggtgcgcaccgacgaagcggcggcgggtggtgccgactttgacatggacatctgcgtggaggattacctcgttggtgagtttttttatgtgggactgggtcttgaacaaggttatggtgtagggtcggatgcggggcagctggctgttgtcccggctccggtggcggccacttcgcctacggtggcggttggagcgaagggtacttcgcaggacccatggtccaaattctgcgccagcggtgaaatttcgtcggccgccgccgccaaagatgtagcgggctctgcgtccaagcagctgaggcatgcgtcgtggcagctgaagcatgcgaccgtcttcgtcgaccatgttgcgtcagccgccctgacttcggagtttgctgccgagaggcaacaactcgagggtaggatcgagcgcctccaagtgcagcatacagatgctattcgggacaagtcagctgcggagaacaagagccgcaggctggcaaacaggctggcggctgcgaaggctgagaaggaggatctcaggtgtcagttggcggaggagaggagggacgcaaacaaagcttgtgctgaggcgcagtctgcgcaagccaagggcaagcttgcgtgggtggaagccagtatcacccaccaacgcgccaaggagatggaggcgaggcacgacggctgcgaccgcctggacaaaatggaggcctcgacgcgcgcgaaggtcgagtggacgcatatgcagctggaggagctggaggtgctcccgaccattgtgacgggcctcatgtcctacgcctccctcatcacctacgagggggccgtgaatgccttgtctcgcgagggatgcgggcacttcgaggtcttcgaccagtcagacggaggcttcgagtgcggaatcttccaggtcgaggacctagtgctaaagcggtcagctggggcgctttttgataggatgtggggccctcacggccaagagactgtccgggagaggtccgaccgggcgatggatcagatgacgcatgatgaagaggtcgaggacctcggtgatctagacaacgcgctgcccgaggcaacaggggtggagttggcgccgccatccaatgctggcgagggcccctcggcgacccccgcgccgactggagctggcgaagaccccgtgccaaccactgcgctgacgggtgaggacgctccgaaagtggagtcctcggatgaaggcttggattattttgctgcgttagatgtggccgcagcggagtcttcgccgcgtgtggagggtgccggggctgctgatcttcctagtgcgagtattgagtacaggtg

SEQ ID NO: 1185 - DNA, 594 bp, Zea mays
  Peptide Sequence Number=SeqID_44560
atggcgcgggggctgggtcccacgcgtcatgcaaactggcccagggcagaagaggccaaaccgccgcgcgcggtgcatgcaaccgcccagcggttacaagcattcctccactttcgcccagaccagcgggtgaaagggcagacagccgtgcaggcggcatgcaaccgcgccaagtgggcgcgcccctccgacttccaacacacccagcatggaggcccgggcccacgcgtcatgcaaccggcgcgccggttgctacgtgcgagcaactgcaccgccactcgcaccactaccacgcctcctcgactgcggaaccagtaccgcgactcgaggcaaccctgtgtacgacccagcagtgccagccaggcgcgacggagaagcgagcgacgcttcgccttcgccataatgaccgtgtcaaaaaaggccccgagcctccctactgatcagaggttcaaaggctggcccctcggaggggttcaacagccgcctcagagcgtgtgggctccgcacccactactggtcagaggttcaaaggccggcccctcggaagggttcaacggccgcctcaggccactcgggctccgcgcccactactga

SEQ ID NO: 1186 - DNA, 339 bp, Zea mays
  Peptide Sequence Number=SeqID_44561
atggctcctagggccgggcttggccgctgtcagcctcactctgtcgagtggcacagcagtcagagcggcgcaggcggcgctgtccttttgtcagaccggtcagtggagcggcgaagtgactgcggtcacttcggctctgtcgactggagggcgtgcgccaggataaagggcgagaggacggtcaaggacatactcgacttttttacatacgcccctgcgtcgcctttccgcaaggaggaggggggaagcgccatgtttccctcggagggcgccgaacatggtgtctctggtgagctgctggcgggtaatccgagtggacgcccgtgccccatttgttag

SEQ ID NO: 1187 - DNA, 435 bp, Zea mays
  Peptide Sequence Number=SeqID_44562
atgttcatcatcctcgctggggcggaggccgggctggagctctacctcccgcgcgggttcgtgggtcagcctctccttcagcattcgagggagagggcgctcactggccctgcgagaggggcggacttcgacaacgcggggctggtcgacggcgggcgtcgtcagcttcagcgcgttgggctcgccggcttggctcccggcgccccctcctgccgcaagggcggttgtcgcgccgcgcgcacgggaggaccgcccaagatgtcgcgcgctgctagggcggcgttcatgttctggggctgtcctgcctttgcaccgaaccgcttcaccaagcgtgagtcgcctcgtgcaaaggtgacgagtgaggtatccgtatcccggaggcgtaggagtccctcgactcggtcggccttgctgtccgaggcttctcttgcttag

SEQ ID NO: 1188 - DNA, 672 bp, Zea mays
  Peptide Sequence Number=SeqID_44563
atgccagacctgctcacggggcccgctccctttggtacggctcctatcccggcacctccagctacagacaatacttggttgtggccattgcccatgggcccgtcgggcgagtgtggcgcggcagatgcctctggttcggatgtgcaaatccccttgcatacggccgaggaccttaacctcctgcctgctgggctactggattctccaccggcacagattgaaggcccttctcaggatcaccagcataccaacgacaccatgatactaccaacagctgataatggggtctctatgtctacacccatttcagaggtccaggatgaagatcgtgacatccaagcttttctaaaggagcacttcgtcccaagatcggcgccattacttctgataaataatgaggaaagtatttcggctccttcccctggtcagggtgcaagtcgtcgcagggtcagcacaaggcttgcactcaaaccggcagccaagctaggctccattgcccgttgccagatgattattatgaaaaaattggagaccatcactagcggcagttcagtcaaggaggaacacaagaaacgtctgaaggagctgttcaatgaaccagcatctgagcaggttgttcacgcggtggatgaactctttgatgtcgcttacccgagcccaaatgcaaactag

SEQ ID NO: 1189 - DNA, 840 bp, Zea mays
  Peptide Sequence Number=SeqID_44564
atgtggagacttggagacgtgcgctatccgggcgagtcgtcggcctcgcgcgggggtgaaaaatccgagcgcgctgtagtcccgtcgctggcgacttcgattgatctcggcgagggggcctcgcggcgcggctcgtcggcggagccgggcaagctgggctccaagcggccgtgctcgagcgggtccggcggcggaccgctctcggtggttggaggcaaggaggtggcccgcgaggagacagagatccaagggtccggtgcaaccgtcggtgttcgtcgccgtcgaaccgccatcgcgaagaagctcagaagatccactcagccgacgaaggaaggtgcgcagaaacgcaagcgcatctcgtcgccgccatcttcatcgtcttccactagctccggtgctccacatccgaagagaaaaagatctagggtttatggttacgccaacacacattccatgcttgtagggttcattgagcagttgaccatggattcggagaacgcaaagctccgaagagcactcgctcatttaatcagagtagtggaggagcgttgtgccgacatcgtcgatgtcgtccacggtgccttccaaccagttagcggaccagtcttgaatgaaatgaatcgtgcattagttcagatcgaggacctcgccaacgaccttgatcagcttgcactggaaaaagactgggagatggagcacatgacccctacaccaattgttgaatcatcacaaacagaggatgagcttctgattgattatgattcagagttaaacaatgacgatatcgtcggctacgacgacggccgtgactactccaccgacgacacctatccctactag

SEQ ID NO: 1190 - DNA, 342 bp, Zea mays
  Peptide Sequence Number=SeqID_44565
atggcacccaagagagctagttcgaaggcagccccatccgttgacaaagcagcgaaggcagcgctgctagccgagaaaaaaggcaaggccctcgcagacaacaccccccaagaagcttgcgaagacgaagctctcagcaagagacagcgcaacgaacaccccactcccgaaggcaccctaggcacctgcagctctggaggactaccacaagcaccacccccaggctttactccaccagagggcgaagacgcaacagaggacggcgaagtcatcggcgtctcagccgaagaacagctacagctacgggccctgcgcatcaagaaccacaacctccaaaaatag

SEQ ID NO: 1191 - DNA, 900 bp, Zea mays
  Peptide Sequence Number=SeqID_44566
atgcaagaactagggcacggaaagcaaaggcggctaaaagcgcgactcttaagggatattcttgagccagataccttttcaaaagtgccacctcatcactcggccgttttcctcaaattaactcgagaagctggctatcactcggcgctgcctctaaaacgccgatcacgagttcaatcgctcggcattacttctaaaatgccgacgccgaccttcaatcactcggcgctacctctaaaacgccgaccacgtgttcgatcgctcggcattacttctaaaatgccgacgccgaccttcaatcactcggcgctgcatctaaagcgccgaccacgtgttcaatcgctcggcattacttctaaaatgccgacgccgaccttcaatcactcggcgctgcctctaaaacgccgaccacgtgttcgatcgctcggcattacttctaaaatgccgacgccgaccttcaatcactcggcgctgcctctaaagcgccgaccacgtgttcgattgctcggcattacttctaaaatgccgacgccgaccttcaatcactcggcgctgcctctaaaacgccgaccgcgtgttcaatcgctcggcattacttataaaatgccgacgccgaccttcaatcactcggcgttatttctaaaataccagccccgtattttgtcacttggcattacttctaaaatgccaatgccgaccttctatcattcggcattgcctctaaaacgctggtcttgtgttcgattgctcagtgttacttctaaaacgctgatgtcaatcttcactatcgctcggcgctgtttctactatatcaaaagaatcgtttcaacattcagcaaaagcagtgacaagtcatcaaaaagaggggataaacgacaatcttcattaaagggaagttga

SEQ ID NO: 1192 - DNA, 1620 bp, Zea mays
  Peptide Sequence Number=SeqID_44567
atggacaaggatcgccaaggggcggcgcaaaaacgccaggcggcggtcaggctgcatgaagctaggccgaagcggcagcggggggctgcgaaggctgtggcctccagcggaggcaagccgccgctggcggcgaaggcgggcgcctctgcacctagcaaggcgccggaggcaacggcgggcgccggaggctccaagtcaacgaaggtggtgccgccggccagcggagtggcggaggcttcgaaggcggctcgagcgttgccgttgtcgggcaaacgtgttgccgacttcggcaccgatattactgtggacgactatcttggtgggtcggacgagggccagcttgctatagttgcgcctggcgcggcgatcgcgacggctgccatagtgccgaaggcgaggggcgaggctcttggcgccggaggcgaggtgtcgaccctcgcgttggtcagggacgaggtgggcgtggcgacccgccggctgaagggagtgacggaggcgctgagtcaggcgacggaggcgctgagtcaggcgacggaggcgctgagtcaggtggctgacttcaccagccgtactgcgtcgggggcccttacggcagctttgtctgccgaagtcgagagacttcggacgcaacatgctgacgctgtccgtgaaaaatcggcctccgacagcaagtgtcgtaaactggcggacaaggtggccgccctggagaaggagaaggctgacctccggcgccagctggcgggggagaggagggaggccaacgaagccatcgccaaagagcaggctgcgcaggcggaggccaagctggcgcgggcggagggcaatattgccaaggagctcgccggacatctgcaggagcggctcaccgccctggagagccacgcgaagggggccgaggccgcgatgcgtgcggaggccgaacggacgcgcacacagcttatggatacatatcgtgagctgggtgcgcggaccggcgacttcgaggtgccggaccgagagcccgggcttcgctgtctggaatgggtgcaggagaagctacaggaactccccgctgtcgtgggggggtttatgtcgtacgcctccctggtcacctgcgagggggcggtgaacgcactctcccgcgaagggtgccggcacttcgaggtcttcgaccaggcagatgaagattttgaacgagatatctataaggtcgaagaccccgtcgtgaaggaatccgccggggccctctatgaccggatgtggggtccgcacggtcgtgaggtggtcagggagcgggccgagattgcgagggctcaggcggcgcgtggcgagcgggtggacgacttcggggcgttgaacagcgcgctgccagacccggagccgacccccgcggaggctgtgactggggccgccctggagccaaccccggagatcgcagcgatcgcgacggctgcccccacatctgctgcggccggcgaagacctgcccccaaaggtggccgaaggcgcccctgaagcccccgcagccgctgtgccgagtgttgaagatcccgcggcggcggcggtggaaacaacggcggaagtagcggcggagccaacggcggaggctcccgcagcgccagggccttcgcaggtggcgtag

SEQ ID NO: 1193 - DNA, 405 bp, Zea mays
  Peptide Sequence Number=SeqID_44568
atgtcgcgtcttctcaactgcagaaccagcgcagcgactcaaggcagccctgcgcgtgacccaacagtgccaactatgtgcaacgatcacgggttcgactaccatagacataaccgtgcgcaggagggggggaatcgtcgttgcaagaccccggacatcgccggtgtcgctcgagcttcgtcgtgtgattcgtttgtgtcatcgcgccattgtgctcctgtggtggcttcccatcgtcacgaacctcccggaatgctcatggaggcacgaggtggcgactgtgaccttgaggactcgtcggaagttggagtttgggaggagcgcaccgtcacgggggtctgggtcaccgcactgctatcctttggtgagaatcccctcacagcccttaccttcacctctacgtga

SEQ ID NO: 1194 - DNA, 279 bp, Zea mays
  Peptide Sequence Number=SeqID_44569
atggtacagtaccctgaatcagatcagaccgccagcgcagccgcttcatcgccgacgaccggtcctcgccgtgattcacgccaccgccgtgggattcgcatcgccgatgacccgataaggccgccagaaaacgaagaagagatcgaagtgaccgaagagaagacaccaccaccttcggaatctcaggccggaaattgtttctacttcgttatctgcgggtctgagcctgactcacctactaacgaaggcaagccccggtgcatttgccaccttccttga

SEQ ID NO: 1195 - DNA, 3867 bp, Zea mays
  Peptide Sequence Number=SeqID_44570
atgggttcagcgaagacggtgtataaggggcggaagaagaagaccatcgagtacttcgctgttaagagcgtcgacaagttgcagagctccaaggtcctcaacgaggttcggatgctccattccttagaccatgccaatgtcctgaaattttactcttggtatgagacaaccgtacatttctggttagtgttggagtattgcgttggtggagacctgaagggcttgcttgaacagctgtgtgattttggattagcaaggcgcttaaaagacattgagaaaaccaatcctggagatgtgccacaacccatgaggggaacaccatgctatatggctcctgagttatttcgagatggaggagttcactcatatgcttctgatttctgggcacttggatgtgttttgtatgaatgctatacaggaaggcccccttttgtaggtagagaatttacgcagttggtcaaatctgtaatttctgatcctacaccacctttacctgataatccatcaaggtccttgcaaaatttgattgattgcttactcatgaaagatccggcagaaagattacagtggtctgaattgtgtgaacacaacttctggagaacaagtatcctgatgattcctttacctcctcagcctgcttttgacaacatgattgaactttctgctacaccatatctagctgagagaaatggtgacaaaccttccagacagttgacaccacctaaacatcgtgaaaatattggccttcggaagaaggatgaaaattctactaagccatccatgacacctgttaaaaatgtgcaaagtggcaagaaaaatagtgcaaaaccaaaagctgtgggtttcaaaggggtaaatatcctccgaatgtctcgcattgctaaattgaatttgcaaagggaaagggataaggagaactacaggcgtccgcccacagaaacaactgaaaatgagactgaagttaatatagaaaataatgacatggaacttgattttggtgaaaatccagagggtgatgcacctgatgacaccgatggatcagataatcctggatctgcaggaaatgaaaatcctcaaagcactgacgctaatgaagagaattatatggaaaatcaggttgacatgcttacagatgagggatcagttaagcctgatatcatggtggaaactgagcagaattcttgttcagataacctggatgtggcggcaagtccacctagtagcatgcgaaaagcacatcgtgcaaaggtaactccatgtcctgcaactggttctgagccatctaacatctttgaagcattctggcatccaacagatcttgcagttaaaccagttatgcctattaggaaagcagataaagctgtggacatgatccccacacttccttttgaagctcttacagcaggtgattatactaagttaccaaaggaacagatgaatgcattcaacagtcagatacttcagagtttaagtggaacttatcaggtttcacaaaaacaaaatactatcagatacctggagatgttaagcatgaactcagatgctgcgaacaaaataactaatggaccaattatgttgctactaataaaaatgcttcgactgtcaaaaacttcagtcttgcgtgtccaaattgcctcactcatggggttgctgatacgctattccactgctcttgatgtggagctggcaagttcaggaatttttaatgcactatcagatgggttaagggataaacatgataaactcaggcgattctgtatggcaacactaggagagttattattctatatttctacccagtctgatcaagataacaaggaaatcaatacccaagagtctcctttgaagggtaacaggcctgcaacatcttggcaggttcctagtgctgtaattgcactggtgtcatctatcttgcgaaagggcgaagatgatctagatcagctatatgccttacggacaattgataatatatgtagccaaggaactgaatggacatcccgttttgcatctcaggatgtgattggacatctgtgctacatctataaagcaactggaaagcaagagagtacaaggctcattgcaggatcttgtttggcccgcctctcccgcttcagtccatcatgcattcatttaattctggaaaagatatcattcagggatattgcatccacacttatcaagggaaatggacgtgaacagcagattaatctcaatattctcaattcggcattagttaacagtcacactgtgacaagcatgaaccggtatattctttcattatcagatgacaaacaattggtccctgggctcatttctctgatagaacagggaactgatgttctgcgtgggaaggcctttttgtttgttgctctgctttgcaagaatagtcgaaggtggcttcctcatttcttttgcaatgcaaaattaatatcagctgttgatagatttggaaaagagaaggagggtttcattcatcaatgtacagaagcatttgtgcagttggttgcttctttggtccctggtatccttgaaactgtctccagtgatatacagcagattatgtgtggcaaacgccatggacctgttactgctttagctgggcgagctcatccaaagagcacaattcatctgttccctgtcattcttcgtcttctgggaagtgcatctttcaagcacagagttgtgacaggccatgtattgcttcagttggcaaatcttattaagattttggaggcaccgtttcaggctagggatgatttccaaatgacattgttgcgagttctagaagctgctacagaggagccttctgttatacttgatgaacacacaatattcacaagtcgtatcattccaagcttatctgtcttgtacaacggcaataaagatggtgatgctagatttctgtgtttgaagatactctcagatgtcatgattgtgatcttcagtgactcttcattaacttctgacgaacaaatattaactgatttgaaatcaatctctcagaggcattttctgccactgtacccttcttttgcagaggatgaagatcccatacccatatttgctcaaaaactgctagtaatgctaatggaacatggttatataaaagtctctgatattctacacaaagcaacagtatcccaatgctttgattttttgctaggagatctgtcaaatgcaaatgtaagcaatgtcaagctttgctttgccctggcatctgcacctgagatgaacacccatattctttctcagcttcaagttgttagaaggatagggaacctacttgagtttgtcgctgcaaaagacatggatgattttcttgaaccaaccctggagttttgcagagctttcattattcgtggcactggcagcaacagaagtggtgtcgccctctccgaaaacccagcacttcttgttgacagtgccttcagcatgagtattgctgttgatcaacaaacttgtgtcacggatatatgcgactttggtggcaacatgggtacttttcttgagctagttggcaattcagatccacagataagtaatttagcgtcagactgtgtagtgttgttatccaaggcagcacctcgagaggctacagtgggcttgttgacaaatcttcctaaattaagcactgccatggacttgctgaagcatgagagctccctacgtctgattcgcttattatacggcctagccttctcatgcagacaatacttggcccagggaatgatcctgtcaatatcagtgtcagctttgatgcgagttgaagcacttgtttcagttttcaagggctccaatgatagccttcttgctgatgctgcttcttatttgagcgccgaactgcagcgcttacctcgctgtggttga

SEQ ID NO: 1196 - DNA, 363 bp, Zea mays
  Peptide Sequence Number=SeqID_44571
atggccatgcgagttgtcaagatcttcggcacgccgcagggggacgcgccgcacgtccgcctctcccgcagctacccgaacccgctcaatccaatactaagcctaaggacaactccaaactcttcgccatgcatgttgcagagggaggtgaaggggtcacagtcgcggtcgcgcgagctgaaggattcgagcgtggtggggacatgtgcgctaggggagggggagctggacggtggggcggaaagggggagctgccgtcgctcaaggtgtggccggaggcttttgctcgtcgtcgtctcacgcacgaggggggaggaaggtgccgacggtgtggggcttgaggtggtccaagacggcggctag

SEQ ID NO: 1197 - DNA, 507 bp, Zea mays
  Peptide Sequence Number=SeqID_44572
atggcacctctgatcctcctcgtcgccctcacggcagagttgctcctgctttggctacttggtgccctggtctctcactccgagtttgatgttgtggatttcctcatttgtgagatcaaggtcaccgtactggatggtctacgtgctcgtcgacagctaccgtatgctcactatctttgccacatctttgctcagctgattcggccaccacagttccagggtactcttgaggcctctcgcctcctctttgggtcgtaccgtccagctccagaggatcctgtgccgatacctgctccagtggttgatactcaggccgaggataccgcttttcaccagttcgagactcagggcgcaacagttgatgatggatttggggttccacctccgcctccgtctcctaagccccctcgcactcttgatcatgaggctgggagttctagtggtgctgcccctcctaccattgaccctgctcttgctgcgatcctccaaacccttactcagcaatag

SEQ ID NO: 1198 - DNA, 378 bp, Zea mays
  Peptide Sequence Number=SeqID_44573
atgactctcatgcttcagcataccagcgttctgatttccccagttcagtcagcaccgcctccacctcttcaggctcgtattgtgccagttattcagccaggaccccctctttctacagttggtccttcttcctctccgctccggccggtcaccctggttttcacgttgccggtcatcggctccgtcaacactcagctgccagtgccaccagctcctgctgttaccactgccgttgtggcggtgtctgtgacttcttcggctccgatagctcctgcagcgcagcctccgtctgagtcagtgccagctccagcttctacagcagatcctggatccgagactgactctgacccacagctggcatttgctctactaccatga

SEQ ID NO: 1199 - DNA, 519 bp, Zea mays
  Peptide Sequence Number=SeqID_44574
atgtcttctcccagtaggtcgtcctcttccattgatgttgcatgtcattggaggcttcctggtgtgctctccttcgctcttaggcgctgtaatttccgcttttgggaccgtgtcaatcccgctgggcaccatcaaggcatggagtattttggatcagctgttttgatggtatatgcccccctgccggattggtcggcctttgaggctgagtactccggcactcttgttgggcttgtgcctgatgaccggattgagcggcgctcaatcggtcttgtactggaggtgccaatctatcgaatacagatgtttggggtgccccccaagcggggtactgtggcatcccagatggatatggtggcatgccccacatttgatttgggacatatggtggagggccagaccatccgctggaattatccagaccgtccggcgtggtcccggatcatccgcgcctgtgtgtcggatcgtccaggatgcgtagcacgggttcctgctccttggccagtacttgccccctag

SEQ ID NO: 1200 - DNA, 756 bp, Zea mays
  Peptide Sequence Number=SeqID_44575
atggaggcctgggcccacatgtcatgtaaccggcgcgacggttactacgtgcaaggaaatcacatcgccactcgcgccaatgccgcgtcttctcgactacagaaccagtgccgcgactcgaggcagccctgcgcggaccggaaaggggatatttcgaaaaggatccttctcagcgaaggaaacgggccccaagccctcctactgatcaggggttcgaaggttgtgccctccggggttcggcaaccgccccagagcactcgggctccgatcccattactgatcaggggttcgaaggctggccccccggaagggttcgacagccgccccagagcacgcagagtcagggatgaccctgggtacgtccgttacatggccgaggctcgggctacgctcccgaggtaccctaggacatttccgagaccagcaggaatgatttgtaatggaatcccaccgagggaggcaccaagccctcggaccctatcgaatgggtccgggtccagcaaatcacctacaggcctcggtctcagccttggccttgggagaaggtctccgcctcgcccgaccctaggcctcggcctcagcctcggcctcggaaggagtcacatcctcgctcgaccccaggcctcggcctcagcctcggcctcgggaggagtcacatcctcgcccgacctcggcctcaggagaagtctccgcctcgcccgacctcagcctcggaccgactacgctacaggggatacatcattaccctactcctag

SEQ ID NO: 1201 - DNA, 153 bp, Zea mays
  Peptide Sequence Number=SeqID_44576
atgaccaagtccaatgactcgggctcgggccacaagcgaaaagatgggaagaagaagaggacagacgcatcaagggagatcgtctactacgacagcgatgaagtcctcttcctttccaaagacggaccgacccacgacaaacaaggaaacccg

SEQ ID NO: 1202 - DNA, 372 bp, Zea mays
  Peptide Sequence Number=SeqID_44577
atgagccatgagcgcaagcgcaaggatcgctcacccgtaggcactaggccgtcacgagagaaagagccgctcggccgtggacgccattatcgtcgtcctcgtccacctccgggccggagagcgcggcaccggagaaggcttcggagtctgctggcgaggctgctgctgcggctccggcttgcacttgcacctgctggtcgaagaggccacagcatccaccgcttggacgtggtccagagcggctgcaccgcgctgtccatcgtcaaacatggggacctcatggtcgtcgccaatgtcgacgactctcgggttgttctgggcatcgcaacctacgacgacgccatcacgccgtctagctcatcatccacctga

SEQ ID NO: 1203 - DNA, 57 bp, Zea mays
  Peptide Sequence Number=SeqID_44578
atggctctcaatctcgtgctcttgttgtctaccggaggaaacaagattattccttag

SEQ ID NO: 1204 - DNA, 504 bp, Zea mays
  Peptide Sequence Number=SeqID_44579
atggccacccagatccaagagcttgaggagcaagcaggagccagggagaacaccatcgagccaccacctcagccctacggtggtggtgaccatcagcgtcccccagcagcggccacctatcaggagttcctcggcactcaaccgccattgttcactcgggtcgaggatccacttgatgttgatgtgtggcttagggtagtggaatccaaattcccgctacttaatggagtttgttcagatatggctaagtacgcaggctatcatgctgacacagatgagaagaagagggacaagttcaggaggggcctcagtactaagctccacgaccgtctcaacacagtcagggccaacagctacaatgagttagtcaacatggccatttctcaggaagactgcatcacagctcgacaggcagaaaagaataggaagaccacattggcaggaccttcagctccgcctcagcgcttcaggattgtgtccgacactcagagtagggggccttag

SEQ ID NO: 1205 - DNA, 690 bp, Zea mays
  Peptide Sequence Number=SeqID_44580
atggcccgattcgccacccgcgtgactggggatgatgacgcccttgagtgccgttccgttgcctattcattcatcacggtggacgtgggcctcaggcctcagccacggcagctacgcgaggggggccgtacccaacggtgcatccactgggatctgagcggtgggattagtcgatctatcgatgctgtgtggctttgtgacatgtttgccatgcgtcgaggtaggttgcttactatcaggggcggatttggtaccagaagagagtctacactgaagcttggaggaacgggcggatcttggcggtggcggcagcgccatggagtaagctgtgcaagacagggatcacaaattcttgacaaaacagtggaagaagcataccgtggagtcgattgcggtgacggaggtccatttggagcagttgtcgtccgcaatgatgaagtggtagttagctgccataacatggttctgaagcacactgaccctactgcgcatgctgaagtaactgcaattagagaggcttgcaaaaagctcgggaaaatggagctctctgactgcgaaatttacgcgtcctgcgagccatgcccaatgtgctttggtgcaattcatctctcccgaatcaagaggctggtttatggggccaaggcggaagctgccatcgccattgacctgcaatgcactactctcttatga

SEQ ID NO: 1206 - DNA, 903 bp, Zea mays
  Peptide Sequence Number=SeqID_44581
atgaggaaatgggcaaggcctagcccactactcctcgtgctcctctcctgccggagcagcatcccactcgaccgtccaacccggtggcagggtggtaggccaagtcacaccatcaaccatttcctgaacggtacctgcaaaaattatgccacaagcaaggctgagtatactaatactcagctagacttacccggttacaaggggtcaagcagtctcattagctgcgagaagcagacgattcgaatcaagttttatccttgcaagggcagaagggaagctttgaactacaactattatttaacagtagaaaaccccctaggttcttctaagcctaacccgaggtccttccccaaatcaaacagtacccgcggcagaagaaagggcggaggggcttaccggcggcgagattgctccggtgaggtggccgagggtgtaggggaggtcctgacggtcacgatgatgtgcgggtcgccgtcggggatggtcggagttggccggtccgcgtgcgcaggcgggggagctcgtcggcggcgaggagtccggcctatccagggcaaaattgaccaatcaaacgggtcagagagcttcaccagggaacaaggaaggggtgtgcgcgaggaattgaagaatggctcactggagagctcggtccatgctgcaggcgggcgaccgaagtccgatgaggtcgatctcgggcttccggtgaagttctgccgggtccgagggcttggaaagcttcacgggccactggcggagctagccgaagcactggcgcgacttgggggtagctggagtgggctggccacagtggccgaagctctggcggcaatggcgggcggaaaagagctcgctggagctaaggaggggtggctggccggtgatggtgagcacggggtgaagtga

SEQ ID NO: 1207 - DNA, 585 bp, Zea mays
  Peptide Sequence Number=SeqID_44582
atggggggaatccattccggccgctgctcatcggtgagagggcggagtaaaccctcgccgacaagatcctctagatcactcgccgtcaccgtggaaaaaggccatgggtcgcgcggcgagatgatggtcacccggtcagccatcaccgagcggaaggggtggcggcgcaagggacagggagggcggtttcctcttctctggctaagtctctcgggttgcgaaaacctgatagggaggcagaaagaggggcaaagaaccatcgccagaccctctcccgagtatataaggactcagggaccaggaaagggggataccccgaaaaggatccttccccgagaaggaaccaggctccgagcccccctactgatcagaggttcgaaggctggcccctcggaagggttcgacagccgcctcagatcgcgtgggccctacacccactactggtcagaggttcgaaggccggcccctcggaagggtaccacggccgcctcaggctactcgggctccgcgcccactactgatcaggggttcgaaggctggcccccgaagggttcacagccgcctcagacgccgagcgagggatga

SEQ ID NO: 1208 - DNA, 954 bp, Zea mays
  Peptide Sequence Number=SeqID_44583
atggatgttttaatgattaggaaccttggagaggaccagcaaggacttgggaaaggccaagatgtcaaggaggagaagctaggacgttcacaacaagagaaagccaagtctaactcaacttcgtctccacctcgaagtctaggaccagtctacattaaaacagacgctcaggatgcatctgaactccgattagatgctcaacacatattgttttgtgctaagtgtcaaagagatgcaaatggaaaaatcaagcctaaggtgcaccggacagtgtcccgtgctcaggctggttctcctagtgaacagaccgctctcgggaaaaactcagcgcgtcgtggctataattcaccggactgtctggtgagcctgccgcacccacaccaacggtcggcaacgcaatcagcgggcgacgcgtggactttgccaatggtcaccaagccgcaccggactgtccggtgtgccacgggcgccgtggctgcaaagaatgagagcaaacccttcaagcggaatggcgtacaggctggtggtgaaggggacgccgttcacagacatcgtgacttcatcggcgcgaccctgccaagccaccttgtcgccattggccacagtgacggaggtgttgctgcaacccacaaaggaaaggccctcggcggtggcgatggtggggtggatgaagttgtgggtggagccggtgtcgagcagcgcgaggagatgctggtcgttgatggaggtggtgatctgcatggtctatgctttccacattgtagtcatggcgaggagcgagatgacaggcgtgtcactgtccgccacaggagcaccctcggtggcggcttcctcatcctcatcagccatgtccaagtagaaaaggcgttgacaacggtgaccacgcataaacgactcacgacagttgtaacacaagccttgtttgtgttgttccgccatttctgcaggggttag

SEQ ID NO: 1209 - DNA, 729 bp, Zea mays
  Peptide Sequence Number=SeqID_44584
atggtgcctcctgttgacgtggctggtctgcgccctaggttgggcgatgtggaagctcctccgaagccgaggtcgagtctatcttctgtgaccgaggttgagtccgagcccccgggtcgggcgaggcggaggtcgccggctgatgccggggcggagtccgagccctggggtcgggcgaagcggagttcgtcgtcttctggggctgagcccaagtccgagccctgggtcgggcgaggcggagatcgtcgtcttccgggacttagcccgagtccgagccctgggtcgggtggagttcgccgtcttccgggacttagcccgagtccgagccctaggtcgggcggagttcgccgtcttctgggacttagcccgagtccgagccctgggtcgggcggagttcgccgtcttccgggacttagcccgagtccgagacctgggtcgggcgaagcggagcttcctatggtgccttcgaccgggcctggccgcctgtcagcctcactctgtcgagtggcaccgcagtcggagcgacgcaggcggcgctgtctttctgtcaggctgcgatttggtcaaagttgcttcttagcgaagacagggcctcgggcgagccgggaacacattcgccgttggaggggggcctcgggcgagacggagatcctccggggtcggctgcccttgtccgaggctaggctcgggcgaggcgtgatcgggtccctcgtatggaccaatccctga

SEQ ID NO: 1210 - DNA, 684 bp, Zea mays
  Peptide Sequence Number=SeqID_44585
atggtgcagagcctcaaggggatcctggccgaccgctcggagggagagatctacgccacgctctgcgactgcggaatggaccccgacatagccgtcgagaggctcatctcccagacccctgcacaactaaggtggagccttacaaagcaagagtggttgcttgcaaccggcctcacagggctgttgaatccgtatgggctatggtcgccgaggcactcgcagtcggacgtgtcttcatcggagatggagtttggtacagcgcgccagtacgacaccaccgaccttgatgaagcacttcaaagagagagttttgaagctttgaaccccagagccgttgctgttgtgatagaccccatccagaagaggacgatcgattttcgattttggctgttgaatccgtatgggctatggtcgccgaggcactcgcagtcggacgtgtcttcatcggagatggagtttggtacagcgcgccagtacgacaccaccgaccttgatgaagcacttcaaagagagatctcaaaagaaagatcttcaaagcttgagaaaaggagtaaaggacctcctgctgttgcagggcatatgtcactcacggccttccacagactcaagcagaaaaaggctttattttctgtagcagcaggagcacagtgccccaaggtcgtagttaaggggtttttgttttaa

SEQ ID NO: 1211 - DNA, 1230 bp, Zea mays
  Peptide Sequence Number=SeqID_44586
atggctggccaaggcttcgtctactcaaggaacgcgatctcgccccgcccgagcccagccttgggcgagaacaataatcccagacgaattctcgcctcgcccgagggcctcctcaagcaacgggcgcaccctcgactcgcccaaagcccagctcgggcatgcttcgttgtgaagcaaccttggccaaatcgcctcaccaaccgaccgtatcgcaggcgcattcaatgcgaggatcgcctgacaccttatcctgacacgcgtgcctcagtcggcaagatcgaacagctgagtccagcctcaggcgcaacaggaagctctgcctcgctcgacattgggcctcggcctcaggaggaggtctccgcctcgcccgaccccagggctcggcccccacctcggcctcggaaggtggtctccgcctcgcccgaccccagggcccagcctcaacctcgacctcgaaaggtggtctccgcctcgcccaaccccagggctcggcctcaacctcgacctcaggaggaatcgcgtcctcgcccgaccccggcctcggcctcaggaggagtctccgcctcgcccgaccttgggctcggaccgaccacgccgcaggagggctcaagtgctcctccgacggccacgacaccgtgtacacagggctctagcacctctccgactgccacgttagcatggccctcatgcgggagggtcgtcgcgcgggaggacgggctgacggacaggctctctctctccctcgtgaacgcttgtaacccctactgcaagcgcatccccctggcacaggataacacgagccacgttttccccccttgtgttccatctcgcgccaacccatctgggctggggcacgcagcgacaattttactcgtcggtccagggaccccccggggtcgaaacgccgacatggatattctgaaagggatccttcttcgcgaagggagcgggccccgagccctcctactgatcaggggttcgaaggctggcccttcgaaagggttcgacagccgccccaactcgggcttcatgctcattactaatcaggggggttcgaaggctggcccctcggaagggttcgacagccactcagagcacgcagagcgagggatgactcttggtacgtatgttacatggccgaggctcgggctacgctcccgagaggctcgagggctgccctcgcaatccggcaatggccaaaccgttgacagcgtcaacaaaccagcctaa

SEQ ID NO: 1212 - DNA, 855 bp, Zea mays
  Peptide Sequence Number=SeqID_44587
atggctcgctggctcagctggctctggtgctgcttccggtgccacctcctaccgctgggacggagcatggctgtctgcccacccgccggcgcgcaggtggctgctgtcgtcggcgcggaggcgatggttgccagaggcggtttctccaccgacgagaccgttggagccacccgcggacagacctccggctctttggctttgatagcttgtcctcgccgctcgggtgaggacgtgggcgagggccttgctacagcagcatttgccctgaggtcatcgctgctgctatttagccgcccgaggcagaggtcgttgtcgctgctgctgcagtggtcgccggcgagccacccggagtttgtcgtcccgcaggccctccgatgtggaggttgttcatacccgcgggagtggaaccagagttccgtttgtaatggcacattgagtgtcagtttatggaaccctcggctgctctatgatgagccggagccggaggcagcggtcatccgtgagtgggaccaacttcggagtcacgctgccgaggccgtgagccgggctgatgtccttgggggacagctggctgaggctatggagcggccggtcgagatccttccgcccgtgtcgccgtccgaggtcgggccagatcccgccgaaggtggaaacgacgccgagggtgctgctgctccctctgtcgatgacttgttcgtcggtagcagaatcacttatccgagcgagagttacatatcgcggaaggtgatgagtgaggaccccgctatcgaagcagtcgaaaagcgtgaaagacgttctggcagaaagactttttccgaggaaaattttgacgcagagggggttccccccttctag

SEQ ID NO: 1213 - DNA, 657 bp, Zea mays
  Peptide Sequence Number=SeqID_44588
atgtacgacaagctccggcgcagccgccgcttggacgcggtgcagagcggctgctccgcgttgtccatcgtcaagcaggggaacctcatggtcgtcgccaacgtcggcgactctcgggttgttatgcccagccaagagtcatcagtactcggtatgtcgcgcgcgttcgacgactactatatcgaggactgtggcgtcatcttggcgccagatgtgacgcagtggaggaccgacaacaatgaccagttcgtcatcctcgccaccgttgggagcaattggatgggtcagataggttcatgggatgccagagaagatatgggtgcaaggaattggtcggagactcactggatagctcggtccacgcgcggcggcggaagaccgaagtccggtgaggtcgatctcgggcttccggtgaagtctggccgggtccgagggcttggcgagcttcacgggctactagcggagctagccgaagcactggctcgactcgagggtggctggagtgggctggccacggtggccgaagctctggcgggcagaaatgagctcgccggagctaaggagagggggctggccggtgaagagatatggagccaggaaatccggtctgtctccctgctcaaacccgaggcaaatccagggttttgtcgtgtctag

SEQ ID NO: 1214 - DNA, 1110 bp, Zea mays
  Peptide Sequence Number=SeqID_44589
atgaagctcgccaagccctcggacccggccagacttcaccggaagcccgagatcgacctcatcggacttcggtcttctgccgccgcgcgtggaccgagctatccagccggactcctcgccgccgacgagcatccccgcctgcgtgcgtggaccgaccgactccggccatctccgacgataaattcacccacccccgctagtggaggagactctcatttcagttccgacttcctatctcgcgatggctttccttccatcttgtgggaagtgcttaactccaccggttaccctactccccctttgtacacggtgcagttgtatgaggagcatcgggtacctcgttgtcgggtctggctgactttggaggctcatccccttcagccgggttggcgttctcttgattctgagatgattggactcaggacggatgacaccgttgaagcagcagccatgaagactctgacgactttctgtggctaccatcctctggagatggtgatgcaccccttgggactcttctctactgagaagaaggatgatcccatgtggtgtaaccgcgtgagccatgtaaaggatgtgtgggcgatgtatcctgacttggttgggagggtcactgttcagtgcatgagtgcgctgtaccgccttcaggcccttcagagcgatgctatggcactccttgctaacaccgctcagactgccaagctcactctcgacagtcgggaagattttgtggtcgacctattcaccgagttggtggagaaggatctgcaggtggagaggctgagccagcgcatcaccaccttggagctgcaggtggagatccgagacaacactattgatttcttggagaatcagcttcacgatctgcagagggaattcgaagaagcaaatgaccacttggacatgcaccacctggagatggaggccaatgaagcaggaagcgagggagaagaggctcccgaggagctaggaccagcccctggtgccaatgagactacctccgcgatgcctccttcacccatggcagctaggcagcgtcgcgggcataacgagcaggttcccccgccacctcctccagctcccacagtgcaggagctgatggcccagtag

SEQ ID NO: 1215 - DNA, 171 bp, Zea mays
  Peptide Sequence Number=SeqID_44590
atggcggaaatgagctcgccggagctaaggagaggggactggccagtgaagagatatggagccaggaaatccggtccgtctccctgctcaaacccgaggcaaatccagggttttgtcgtgtatagggctcgcgtcccaatgccatcttctggcacacgacagaggggttag

SEQ ID NO: 1216 - DNA, 303 bp, Zea mays
  Peptide Sequence Number=SeqID_44591
atggaactgcgtcatggaagcagggagcgtgcgcgagatagcagtcatattgctgagttgtcagtggaggttgaccgcttgcagcgggagatcgtggaacgagacagggctatagactgggctctgcatacgaatgtgccatcagatattgcagcaatgggagccggaacatctggagaagctgacggaggaccttatggggagttggatctttttggagcccctccttccatgaacctcgcagatgttcgttctcccgaagctagcggtggagcgggtgcagccaaggacgcagaggattag

SEQ ID NO: 1217 - DNA, 276 bp, Zea mays
  Peptide Sequence Number=SeqID_44592
atgcctgagattgacttgccgaagcaacagaagctgcagggtggttacccacatactctgggatatagggcgagtggtacgaagcaaataagcaatagattttccttggctgatccccaaatcttcctccgaagcccctggcacctctgccccttggagctggaggccgaggataactctgctgctgccccgaagcctgggaagcctgggaggaatattgcggcctctgctgctggcttcccctgtcatcattctgggtggaatgaatcgatctga

SEQ ID NO: 1218 - DNA, 219 bp, Zea mays
  Peptide Sequence Number=SeqID_44593
atggaaattctcatactagtcatcttcgttgaagaagccctcctaatgaagctctctgtgctgagggcttcggttctgctcatcttgagtaagatggcgaacttcttcagaggcttcgtctatctgcctttgcaggtgttcgaaactcaaaaagtggaagtgagttcaccggaggtgggcgccaatgtcggggacttgttctcaaatgctaagagttaa

SEQ ID NO: 1219 - DNA, 438 bp, Zea mays
  Peptide Sequence Number=SeqID_44594
atggcgcctcccgttgacgtggtcggtccgggactgagcccgccgtcttccgggactgagcccgagtccgagccctgggtcgggcggagcggagttcgccgtcttccgggactgagcctgagtccgagccctgggtcgggcgaagcggagtttcctatggtgcctgaggccgggcctgaccgcctgtcagcctcactctgtcgagtggcgcaacagtcggagtggcgcaggcggcgctgtccttctgtcaggccgttggcgtggcgacttggccaaggttgcttcttggcgaatactgggcctcgggcgagccggaagtgtgttcgtcgctggaggggggcctcgggcgagacggagatcctccggggtcggctgcccttgcccgaggctgggctcgggcgaggcgtgatcgagtccctcgaatggaccgatccctga

SEQ ID NO: 1220 - DNA, 510 bp, Zea mays
  Peptide Sequence Number=SeqID_44595
atggccttgctacactcggcgcggtaccagcagtccctgcgacgctaccacgcccgaggggtccggtcccgagacctccaggcccggatcttgacagttgaagggagcagcagcaccctcggcatcgactacaccttcggcgagggtcctctccaagaatccggctcgagcaggtggctcggctggtcaccccgaggcctcggccagctgtcccccgaagacatcagcccggcccgaggcctcggcagatcaactccggcgtcggtcccgctaacggacgacccggccaggctccggccgaccaagtcttcttttcgagccaactctgcctctgtccgtgctgacaccgctacccctggcttcggctcatcgaagagcagtcgaggggttcctttaactaagcaagggaagcctcggacagcaaggccgaccgagccgagggactcctacgcctccgggatacggatacctcactcgtcacctttgcacggggcgactcacgcttggtga

SEQ ID NO: 1221 - DNA, 1041 bp, Zea mays
  Peptide Sequence Number=SeqID_44596
atggctgaaaggtaccaactcccgcggagttgcgttcctccaacgacaaggcggaaggactgcgggcatcccccatccgggggctcggaaggtggaaagacacgatgcataagggagcgcgaagacatggtcgcctttcaaggggatcaccctccttttaaaggcgactctccctacttgcgtccccagccgtcgtgggctgagtctcctccaacacgctccaaggccctccccctacggcgcggaggctgggtcccacgcgtcatgcaagctggcccagggcagaagaagccaaaccgccgcgcgcggtgcatgcaaccgtccagcggttacaagcgtccctccattttcgcccagaccagcgggcccacgcgtcatgcaaccggcgcgccggacgctacgtgcgagcaactgcaccgccactcgcgccactgccacgcctcctcgactgcggaaccggtaccgcgactcgaggcaaccctacgcacgatccagcagcgccagcgtggcgtgacggtcaatacggccaaaaatgggccggtagtaatggcgatggtaggcgggcaggagcagcggtcacgtcgtcagccaagcttacgtcccatccgggggcagcgagagaaccctctctcacggcatgaagacggcgcgcccgtgttccgttcctcgaacggctcgcgcacgcacaacgaccactttgcgaaccgcccgctccgtcgcgttaactccacggcgcgacaggcggcgcccctggcaggagaaggaccgggaaagggggataccccgaaaaggatccttctccgtgaaggaaccaggcttcgagcctccctactgatcagaggttcgaaggctggcccctcggaggggttcaacagctgcctcagagcgcgtgggctccacacccactactggtcagaggttcgaaggccagcacctcggaagggttcaacggctgcctcaggccactcgggctccgcgcccactactgatcaggggttcgtaggctggccctccaagagttcacaaccgcctcagacatag

SEQ ID NO: 1222 - DNA, 360 bp, Zea mays
  Peptide Sequence Number=SeqID_44597
atggcggggaggtcgtgggcgagagggtgttacatcatccatctgcccgagactcacaatgttggtcatgagccgtgggatgtagtagaccccgtcttgccagcgatgttcgccagatttgagggcaaagaggacggtgcccttcccctttatgtcgaccaccgacccatcactgaacctcacggttccagtgacactggtgtcaagctcggcgaagaggcggcgcgatctcgtcatgtggtttgtcgccccggtatcaagcacccaccggcaaggggccacaacctccttctcctcctcactgttgagatggaggagaaccttgcgctcgtggatgtggatcggagcctgcggggatga

SEQ ID NO: 1223 - DNA, 636 bp, Zea mays
  Peptide Sequence Number=SeqID_44598
atgcagagagctcccccccccccgtcgaccgctacctgtctgcggccactgtcgtgtctgcgccttgtcccgtgccatggtgagctccgcctcgctgtcaggtgctcgagacacccttcgttgtgcccttcccctctctgtttcgtccggttcgtgctcaccggagcgatccttgcacagccggagctccgccttcgtagccccgtcgagtctctgtgcctccgtcgttgcttcgtgactccagcgcttcccctcaagcagcatggatcaagcagtctcattagctgcgagaagcagacgattcgaatcgagtttttaaaccttgcaagtgaccgcacttgtacccaccataaccggaatgggagacctcgtctcaggtcgcgtgaggagggcaatttgctgccaggttcactcagtggcagacagatcctctggtacaggctcgggtgctggatctggggctacctcctgagcagctccttgctccggcacgaggacatactctccgtcagcaaggttacagtctatcgaaatgcaatgaacatggtttctagtgtaggtttgaactacaacaggggtctaatatactccaaaaattatgtaaaaattatagtgggttgccaagggtcattatag

SEQ ID NO: 1224 - DNA, 261 bp, Zea mays
  Peptide Sequence Number=SeqID_44599
atggtggaggcgcagagactcgacagggcaacggtggcggagctccggctgcgcaaggatcgctccggtgagcgtgggccggacgaaacagaaaggggaagggaacaccgaagggtgtcccgagcagctgatagcgaggcagagctcaccgtggcacgggacgatcctcttgaacttcaaggtcttccgttggcaactgctcttctagtactcacaagcatttcttcaactgagacacatgaaacacatcgtgcactgtga

SEQ ID NO: 1225 - DNA, 183 bp, Zea mays
  Peptide Sequence Number=SeqID_44600
atggcagccggggtcagtaaagcattgtatgccaaggtggtgaggcctggccgcgaacggggaatcgatggggacggtacgcttcaggatatggttgatggtgtgacttggcctaccaccctgccactgggttggacggtcgagtgggatgctgctccagcaggagaggagcaggaggagtag

SEQ ID NO: 1226 - DNA, 285 bp, Zea mays
  Peptide Sequence Number=SeqID_44601
atggagtcgagcgattttgggtcaggggcagggagttgtcgcctcggcaatgtggcagtgtcacaggttggagtcccgaggcaaatcctgccaagatcatgtctaacggccgagttttgctcccaaatttctccagggtgtgttcaagcctcgtcgcctcgtcgccccgtcgcgctggtcaacgccatcgtgtgcatgcgcccggtgcacctcgtcgtctgcgcagagccgctcaccatcaccgtcgtccgtgccctatcaagtcacaccctcaccattgtttga

SEQ ID NO: 1227 - DNA, 657 bp, Zea mays
  Peptide Sequence Number=SeqID_44602
atggcgcatgacaaagaggttgaggaccttggtgatctagacagcacgctgcccgaggcatcgggggtggagctggcgccaccatccgatgcaggcgagggcccctcggcgacccccgcgccgactagagctggcgaagaccccgcaccagctactgcgctaacgggtgtggacgccttgaaggtggtggtcgaaccaactgccgaagacccagggccttcgcaggttccgacgtttaggcctgcgcaagcaaccgctgctggcaatactgattttgtggcggcctcaaccgtagtgcctgtcgatgctaatttgtttggctctgtgtctgagtgttttgagtctgatggtgaatctgggagttcgttttcttggacggaggagtccttggatgaaggcttggattattttgatgcgttagatgtggctgcagcggagacttcgccgcgtgtggagggttccgaggatcttcctagtgcgagtactgggtataggcggcgaagggtggtggcgaaacacagtgtgggtgaattttcgcgaagtggtaggcgccgtcgtatggggatggagcgtggccatcttcgagtggaccggattggtaaacaagaattgttgtcctcgccgattggggcgagcataggtgaaggggatctgtga

SEQ ID NO: 1228 - DNA, 366 bp, Zea mays
  Peptide Sequence Number=SeqID_44603
atggtcgagcagggaatagagagcaggacgccgagcgcatctgtgaagaactcggcgcggcacgtgcacatggagcaggagctcggcgcgaagacagctagaggccgagtagagaccagggtgagctcggatggaggccagggcaccacgggagagggagctcggcgagctcacccaccagggggcgcgatggccaagaagacgagcaacggcggccagctatggccagacccggagaagatgagggaggccggggcgagcttgagcagggagagggcgctcgggcgccatgggcgaggatctccagtcacgggcacgaagaagcggcgcttgagggaggagaccggaggggagcgaccagcgtga

SEQ ID NO: 1229 - DNA, 51 bp, Zea mays
  Peptide Sequence Number=SeqID_44604
atgggcgttgcagataacgatgcttcgggcagggacaacgggtttaattaa

SEQ ID NO: 1230 - DNA, 609 bp, Zea mays
  Peptide Sequence Number=SeqID_44605
atgccccctgcaccaccacagagcatcccggccgctggaggagaccttgacggagacggatatgatgatgatgccgatggcagttcgagccacgacacggagctcttagaggagccggagtcggagggatggatcgctagacccatcactcatgacgccgctcgcgggtgtcacttccacgacgctctcgacaccttgttgcgtcgggccttcgaccgacacacttggtccatcgagtaccgttgtgtagtctaccagcattgtcgcagcggggtagctgatggcctcgacctgaagtactatcctcaccgttcgacaggcaatgttggatgtgtgattgtctcgccagttggtgagggcaatcccaggctgaacagcatggtcaacctggctgccgtgctcaacacagagttggaccacacccttaacgagttgggcaaggttcgggcggaggttgcggaattgcatgctgagtgcgcagcacaccactatttggatggtggttctcccgcccctgtcgggattcagcacccttaccgttcaccgccccgtggtcgcttcgaatatggtaccccagactggaggacccggatagatttggatccctag

SEQ ID NO: 1231 - DNA, 339 bp, Zea mays
  Peptide Sequence Number=SeqID_44606
atgcctcgtcggagttccttcggtccgcccgagaccttctccctgccgttcttccccctctgtccgcggattcatggccctttccccgccattgagtttgtcgtggcgttctctccctctctgcccaatcccggcgaacccggaacccccctagaacacgcctgcctcaactctggcgacctcactgccgcggagaggagcagcgccgcccgtagccgttcgtccctccctgacaacgagcagtccgaggttcctgagtgtgttgttggaaagctccctgagcaacaacctggtgaaggcaagtgtcctctgacctattatgtcctacatactctataa

SEQ ID NO: 1232 - DNA, 75 bp, Zea mays
  Peptide Sequence Number=SeqID_44607
atggccggtgtgtccttggccgcgggcggtggctggctatcggaagagcatattttctcatatgaggcatactaa

SEQ ID NO: 1233 - DNA, 216 bp, Zea mays
  Peptide Sequence Number=SeqID_44608
atgtcgaaggttgatgctttgctgaaggttgtggaacatttaagaacaagtccccaacattggtgcccacctccggtgaactcacttccactttttgagctgatggcttcgttcaacaatcaatccgaagctactttggctacgaagctggtgctctcgataataggcggttcatgctcagagccggccaacaagaagcagaagaaggaggcctag

SEQ ID NO: 1234 - DNA, 456 bp, Zea mays
  Peptide Sequence Number=SeqID_44609
atggggaagcgaatggggcgcgcgaaccatgaaagtgttggcgcccccgtggaggatgaaaagcaccgagagggattgatggaggtgaagcggaggaaaaggtgtgagcctatttccctttcaaatgacaaggcttcgacgagagcaaaaagaagcagatttatgcttcgttgtgtacgaaaagaagggaaggtgtttttcgccttcggctcaaaaaatacaagtttcgtccacatccaagcagttcatacacagatggaaagcttcggatcattgctcttcggcttcgtcatcctgtacataacaaagtattataaggtaaactcaagtttcaaggagaaggatggggatattgtggcggaaccgcccgaattactccaacttaagtgcctaagtcccaccttagaggctagaccacacttaaatgggaataacacgtcagtccctcggatctag

SEQ ID NO: 1235 - DNA, 174 bp, Zea mays
  Peptide Sequence Number=SeqID_44610
atggtgggtacaagtgcggtcactgcacggcggcagccggggccagtggacattgtatgccaaggcggtaccaatcaggaaatggttgatggtgtgacttggcctaccaccctgccaccgggttggacggtcgagtgggatgttgctccggcaggagaggagaacgaggagtag

SEQ ID NO: 1236 - DNA, 447 bp, Zea mays
  Peptide Sequence Number=SeqID_44611
atgggcaagaacaacaagcgtaagcgtgagccgactcctccatcgaaggagtttggtgactcggaatactcggaggaggagttctcctccgagtccgaggggtctccggctcccgtctctcccccggcgtcgtccgatgactcggacgactcccaggggatagccgcggaggtctggacgtatatccgggccgtcgagcgcgccgggctcgaaggctcggatgagtcggagtgctcctcggatgaggaggactcggacggcggcgacgagggtgaagacgacgacgacgacgacgacgacggcgacggtggcggcagtggcagtggcaggggcggcggcgacggcagcagggacagcaccaagagcgacagcaggggcagcaccaagggcagcagcaggggtagcaccaagggcggcggcggcggcaggggcagggccagtggctag

SEQ ID NO: 1237 - DNA, 135 bp, Zea mays
  Peptide Sequence Number=SeqID_44612
atggagctgaagcatgtcttcaagggagaagctcaaaagatacaaaggttgacacaacgccgaagctgtgaagcaggaaagcttcggcatgttcgcagaaaagggaaccgacttaaagatgaaaaggccatttag

SEQ ID NO: 1238 - DNA, 789 bp, Zea mays
  Peptide Sequence Number=SeqID_44613
atggcccgcgcccgcgcctataaagccctcccaggcttcgactgcactcttccgcgcaccctcaaacctcaccggagtttagctcgccgccgtttgcccgtgcgcagcgtgtccgcggccgcccaatccctctgccaccgtagaccggccaatagagccattcccaaccccgtccagccctcggagaaggctgtgcacacctccatgaagctccccgagcgaggaatcggcgtttgcttcgccggagaggccagtccacgctcgccggagctctcaaccccgccggagtacgtggaccgggtaatccactcaaccatccttcgattccttgtgcacacggtcactacgttaccccatgaagctcaccgtgcccttggattgaaccagttcgccgtggtttggccggtacactcgccgccgacgagaacacccgcctgcgcgcgtggaccgagcgattccggccatccccgacgtcaagccgtacctcgacgtgatcgccagagtctctccgagccgaccccacccttcgccggacctccctcgccgccggataacttagaaaaaccctacaaaaataaccccaaggatacaagagcaatacaaattccctatgtttatcctcaacaaaaaaaaactaagcctaaagactgtaaccttgctgacggagagtacatcctcgtgccggagcaaggagctgctcaggaggtagccccggatccagcacccgagcctgcaccagaggacctgcctgccactgctttggaaggcaagccccggttttatgcataa

SEQ ID NO: 1239 - DNA, 177 bp, Zea mays
  Peptide Sequence Number=SeqID_44614
atggctgaaaacggccatgggagggagctggggactgccggcgtccaaggtggcaatgagattgatggttttgattatgactatggtgctggttgtcagcattgcaaccactgctcaggcgaagatgaagctgtggaaggagacttccaggagttccaagattacgacgagttctag

SEQ ID NO: 1240 - DNA, 300 bp, Zea mays
  Peptide Sequence Number=SeqID_44615
atggggcttccgtttcggatgggacgaggaggaggggtcgcggagcttcggctttatacccaaggagcgacccgcggccgttgcacggaggccgagaatccacggcgagtttggcggagtccgcgcggcgcgatcggcaagctgttgaagacgagcccgacatgcggaccccgcggaccagagagagggagggaggagcgagcgcggttgatcatcttctccggtcttgtctcattgattcgaggtcgagttgttgtgtatggccaggttgatataagtctccaaattaggcttaagtga

SEQ ID NO: 1241 - DNA, 375 bp, Zea mays
  Peptide Sequence Number=SeqID_44616
atggggcttccgtttcggatgggacgaggaggaggggtcgcggagcttcagctttatacccaaggagcgacccgcggccgttgcacggaggccgagaatccacggcgagtttggcggagtccgcgcggcgcgatcggcaagctgttgaagacgagcccgacatgcggaccccgcggaccagagagagggagggaggagcgagcgcggaatttgggtgttacaggcctccaccctggtcatgtttggatgcctgtatttacctgggcctgtctccatggatgcagcttggtcatgtttggtgggctggttggggagttgggtcaggccacaacgatgcaagattcttctgggagccaggctcatcacatacgctag

SEQ ID NO: 1242 - DNA, 396 bp, Zea mays
  Peptide Sequence Number=SeqID_44617
atgtcgcaaagatggtgtggtaaatctgctaaacaaaggaatggtccattgactagaactgccttcgacccacttcctttaccaactgatgttccagtgcctatgtgtttttgtggtgatccttgtaagtggattgacaaagaaatctcacagaaagacaagaagtggttggagaatcttaaaaagtgggacacagaggacaaagagaggatagagaaaagacgagaggagcttgcggccgagcaacaacgggtagacgagcaggaaatgaggtgtgttgctgaatgcagggaggagaaggagaagaagcttgagtgtgcacgtcatgcaaaggacgcaatggaggagaaccctgatgcttttcgcaagggcaaatggccccgttgcactcaatag

SEQ ID NO: 1243 - DNA, 594 bp, Zea mays
  Peptide Sequence Number=SeqID_44618
atggcgtatgaccaatccactagagtgggtacacaagtcgagactgcaccaatcttggaccgagtggcactgggtaacacacttaaacgctcaatacaggatattgagcggattagtcccaatgtgagcgacagtgtcatacacaacttcttggatgacgtccatgtcccatcccttgttgtgccaagggagggtacctcaacacaccaagttgtgatgcctgcagggcaaggatttggctacgacgacactccagacgatattggtccttcccagcttccggatgctccgccatcacagccttcgcagccactagaacgtaggcggcacaagattggccaaagtgcatgcatggagaattgtgggttcactcgttgggtagatcctcgtccgatttttccgcatgcggaatacatatcctacctacataatatgatatttgatctagagagggaagtaagcaacataaatgagaaggaaggaggagacaacaacaatggaggtggttcacaggtgcaagtatgcttagatccatattgtggctacccttgtcacaacaagaatgttggtcctccatctccaccgcagccatag

SEQ ID NO: 1244 - DNA, 1500 bp, Zea mays
  Peptide Sequence Number=SeqID_44619
atggttgccatcctaaggggtcaccctccttttaaaggcgactctccccacttgcgtcctcagccgtcgtggactgagtcttcaccaacacgcctccaaggtcttccccctacgacatgggggctaggtcccacgcgtcatgcaagctggcccagggcagaagaagccaaaccgccgcgcgcagagcgcgtaactgcccagcggttacaagcactcctccacttttgctcaggccggcgggtgaaagggtggaccgccatgcaggcggcatgcaaccgcaccaagggggcgcaccctttcgactccgacgcgtccagcatgggggcccaggcccacacgtcatgtaaccggcgcgccggttactacgtgcgggaaactgcaccgccacttgcgccagtaccgcaccttctcgactgcggaaccgatgccgcgactcgagacaaccctgcgcatggcccgatagtgccaaccgagcgcatcggtcacgggtcagtcagccgcggagaaggcgcgatggtagatatggccaaaagtgggccggcagtaatggcggcggcaggcgagcggaagcagcggtcaagtcgtctgcaggctcatgtcccctcctgggacagcgagagagccctctcccacggcgtgaagacgacgacaggcgacacctttggtaggcaaagcaggcgacgcttcacctccgccataatgaccgcgtcaaaaaaaagccgcctcagagcactcgggctccgagccctcctactgatcagaggttcgaaggctggcccctcggaagggttcgacagccgcctcaggcccctcgagctccgcgcccactactggctggcccccgaagggttcgacagccgcctcagagcacgtagagcgagggatgactctgggtacgtccgatacatggccgaggctcgggctacgctcccgaggtccggcaaatcacctgcaggctcgggggctgctctcgcaaacccggctccggccaaaccgttgacagtgtcaacataccagcccgagaacttggaacctgactatgcacctgggctacggccagtcaaggctccatccactcaagggacacgatcccgcctcgcccgagcccagcctcgggcaaaggcagccgacccaggaggattcacgtctcgcccgagggaaaacagcgccgcctaccctgctccgactgctgtgccactcgacagagtgaggctgacagcaactaagtccagcctcgggcgtcataggaagctccacctcgcccgatcccagagctcgggctcaacctcgacgtcggacgacgaactccacctcgccggaccccagggctcggactcagcctcgacctcggacgacggactccgcctcgcccgaccccagggctcggactcaacctcgacgttggacgacggactctgcctcgcccgaccccagggctcgaactcaacctcgacgccggacgacggactccgcctcgcccgaccccagggctcagactga

SEQ ID NO: 1245 - DNA, 486 bp, Zea mays
  Peptide Sequence Number=SeqID_44620
atgaatgctgtggtaacttcacacctactcgtctgtttatatagtgctgcaggaaagaaggcgaagcgccagaatttttacaccaggcggacacccgctcgcactcgctgcgtggtggaccgcagagaccgaacagtaactctgcaaggtggggccgctacacgctgggagattgaatcgtttctcgacaacgagctcagggaagcatttgagaacaagtccccaacagctgtcgcgccgcgcgcaccgggggaccgcccaagacgccgcgcgctgctagggcggcgtccgtgttcttgggctgtcctgcctttgctccggtacgacgcccctgcgcggaggtcggtgttcgcccgtccgggaggacccgagtggggatctgccggtgggcagatggctgccgtcgtcggtgctgaggtggtggcggctatagaagtcctcgtcaccaatgagaccaccgccaccatcctcgctccgggcctctag

SEQ ID NO: 1246 - DNA, 465 bp, Zea mays
  Peptide Sequence Number=SeqID_44621
atggaggtttctcaccggggaagaagaccctcgccggagccgaggagaaatccgtcgattgccggagatttggggatccaatcgacgaaccgaacgcgctgcgacgaagccctcgacgagacgaacgcagcgggtgttacatcggcggaggcaaccgctcctgtagggggaagcctcacctatggcgaccaccacctcagcaccgacgacaacggccacctgcccaccaacaccgcaccggtgaacggcagccgccccaatgcgcaccggcaggtcctcactcccgtcctcgccacaggagcgaggatgagactgtcccagaacacgaacgccgccctcgtggcgtacgacgtgttgtgcgaccccctggtgcacccagcagcgcaggaaggacctggacgtggcccggcaccggaagcagcaccaaagctgcttaggtcggggagccaaacacgcgacagctga

SEQ ID NO: 1247 - DNA, 570 bp, Zea mays
  Peptide Sequence Number=SeqID_44622
atgtgctccggggttcccaccctacgacacgggggctgggtcccacacatcatacgagctgacccaaaacgcgaagaaggcaaaccgccgcacgcgaagcatggcaagcgacacctctggcaggtgaagcgggcgccgtttcacctccgtcatgatgaccgcgtcaaaaaagggaccgggaaaggggatatttcgaaaaggatccttctcagcaaaggaaatgggccccgagccctcctattgatcaggggttcgaaggttgcgccctgtggggttcggcaaccgccccagagcactcgggctccgagccctttactgatcagaggatcgaaggctggcccctcggaagggttcgacagccgccccaaagcatgcaaagttaggaatgaccctgggtacgtccgggtccagcgggaacgatttgtaatggaatcccaccggagggaggcaccgagccctcggaccctatcaaatgggtccgggtccagcaaatcacctgcagaggctcgggggctgctctcgcaccaaggctacggccaaattatcgaccatgtcgacaaaccaacttag

SEQ ID NO: 1248 - DNA, 1005 bp, Zea mays
  Peptide Sequence Number=SeqID_44623
atgaaggcctgggcccgcaggtcatgcaaccggcgcgacagttactacgtgcaaaagaccgcaccgccacttgcgccaatgccgcgtcttctcgactgcggaaccagtgcagcaactcgaggcagccctgcgtatgacccaacagtgccaagtgagtgcaacgatcacggggaccgggaaaggggatatttcgaaaaggatccttctcagcgaaggaaacgggccccgagccctcctactgatcaggggttcgaaggttggcccctcgaaagggttcgacagccgcctcagagcacccgggcttcgcgcccattactgatcaggggttcaaaggctggcccctcggaagggttcgaaagccgccccagagcacgcagagtgagggatgactctgggtacgtctgttacatggtcgaggctcgggctacgctcctgagtcggcaaggtcgaagtgatcgcagtcacttcaccctttcactgaccgacctgacaggaaaacatcgccgctcgccccgctccgactgctgtgccacccaccggggtaagactgacaacaaccgagttcagcctcgggcgcaacagaaagctctgcctcgcccgaccttaggcctcggcctcgggaggaggtctccgcctcgcccgaccccaagactcggcctcagcctcggcctcgggaggaatcgcgtcctcgcccgaccccggcctcggcctcaggagaagtctccgcctcgcccgaccttgggctcgtaccgaccgcgccacaggggatacatcattaccctacccctagctagctcaggctacgagggaacaagatcggtgtcccatctggctcgccccgggctcaggcacttctccgacgaccacgttatcgcgtacacagggctcaggcgcttctccgacggccacgttattgcgtacacagggctcaagcacttctccgacagccacgttggcatgtacacagggctcaggcacttctctgccagacatgttagcgcatag

SEQ ID NO: 1249 - DNA, 165 bp, Zea mays
  Peptide Sequence Number=SeqID_44624
atggctcggatctacgtagacaccacctgggtcacccaagagagggaagaacatggcaaaaatttatgctacgtgaaggccttctctaccgtgctaacaagttgtgtgtgccagctagctctgttcgccttctactcttgcgggaagcacatgggggtggcttga

SEQ ID NO: 1250 - DNA, 327 bp, Zea mays
  Peptide Sequence Number=SeqID_44625
atggataatattgatgaagtgatcaacaagaggttaacggctctcagggagattgagaaagacaagactatggttgccaaggcttacaacaagaagcagttcgccacggccacagtaaatggcggatccgcggtggttctttggctacaacgagcaattccgtacaccagaacaggccccgaagtcaggaaatcaacgcccgagctcccgtgtagaggactggcgcggccggcggaccaagatctacacggacgtagaggagaccgcggatacggatccgccgacgaggaagagctgagcgccgtcagtggcggccgacgccgatga

SEQ ID NO: 1251 - DNA, 414 bp, Zea mays
  Peptide Sequence Number=SeqID_44626
atggccatgatggattcaacatcggaaaagatgtacctctgccaggaccgtctcgatgtaggcttgatgatcgaggaccctttagctggtcacatgcctcgtcatggggctcggactcgggctaagtcccagaagacggcgaactctgctccgcccgacccagggctcggactcgggctatgccccggaagaagacgaactccgctccgcccgacccagggctcggacttgggctcagccccagaagacgacgaactccgctccgcccgaccccagggctcggactccgccccggcctcagccgacggcctccgcctcgcccgacccaggggctcggactcgacctcggccacggaagagtggaagacagactcgacctcagcctcggaggagcttccacatcgcccaacctag

SEQ ID NO: 1252 - DNA, 66 bp, Zea mays
  Peptide Sequence Number=SeqID_44627
atggccaggataggataccggttcggcgtgtttgaagatctaatctgggcggttggtgctaaataa

SEQ ID NO: 1253 - DNA, 210 bp, Zea mays
  Peptide Sequence Number=SeqID_44628
atgccgaaccatgcattcttcgattgcttagaaatctcggccgccccctacagctcggccgccccgccgctcggccgccccgtccccgtccccggtgagccctcccctctcccttccctctcccctcccctccctctccccggtcaggccgccgcccggcccaaccgcccctgcccgcgcgcccagccgccgctcggccgcccctgttga

SEQ ID NO: 1254 - DNA, 1398 bp, Zea mays
  Peptide Sequence Number=SeqID_44629
atgaaaatccttgaagccgaacgatggctgaaaggtaccaactcccacggagttgcgttcccccaacgacaaggcggaaggactgcaggcatcccccatcccgggggctcggaaggtggaaagacacgatgcataagggagcacgaagacatggtcacctttcaagggggtcaccctccttttaaaggcgactctccctacttgcgtcctcagccgtcgtgggccgagtcttctccaacacgctccaaggtcctccccctacggcgcgagggctgggtcccacgcgtcatgcaagctggcccagagcagaagaagccaaaccgccgcgcgcggtgcatgcaaccgcccagcggttacaagcggctctccacttttgcccagaccagcgggcgaaagggcgggcagccacgcaggcggcatgcaactgcgccaagtgggcgcacttctccgacttccaacacgcccagcatggaggcccaggcccacgcgtcatgcaaccggcgcgccggatgctgcgtgcgagcaactgcaccgccactcgcgccactaccgcgcctcctcgactgcggaaccaataccgcgactcgaggcgacccagcgcacgacccagcagcgccagcctggcgcgacgggaccgggaaaggggataccccgaaaaggatccttctccatgaaggaaccaggctccgagcctccctactgatcagaggttcgaaggctagcccctcggaggggttcaacaaccgcctcagagcgcgtgggctccgcacccactactggtcagaggttcgaaggccggcccctcggaagggttcaacgaccgcctcaggctactcgggctccgcgcccactactgatcaggggttcgaaggctggccctcgaagggttcacagccgcctcagacacagagcgaggacatttccgagaccagcgggaacgatcttgtaacggaatcccatcagagggaggcatcgagccctcggaccccgtcgacaggggaccgggtccggcagatcacccgcaggtacttttgggcgcgcctctgggcctctagccgacccctagcaaatggggcacggacgtccgctcggattacccgccagcagctcaccggagacaccatgttcggcgcccaccgagggcaacatggcgctttcccccctcctccttgcggaaggcgacgcaggggcgtatgtaaaaaagtcgagtttgtccctgatcgtcctctcgccctgtgcagaggctcgggggctgctctcgcaaacccggctccggccaaaccgttgacagcatcaacataccagcccgagaacttggaacccgaccgtgcacccgggctacggccagctcgcatgagggaacgaccagaccagccgaagcattacgcgaggcattaa

SEQ ID NO: 1255 - DNA, 180 bp, Zea mays
  Peptide Sequence Number=SeqID_44630
atggccatgatggattcaacatcggaaaagatgtacctctaccagggtagaaagaactctagtgcaggatccactttagtaagcatttctgcaaaaacagagtctttgaatattgaaaagccttaccttgactcccatatacccagcatacccttgagagtcttttctttagtcgggtaa

SEQ ID NO: 1256 - DNA, 483 bp, Zea mays
  Peptide Sequence Number=SeqID_44631
atgaagtttccagagcaaggaatcgagctctgcctcaccgaagacgccggatcaaggtcgccagacttcacccgactgccggtgaacgtggaccgagccccacggccggagcacatgccgccgacgagctcgcccgcctgtgcacgtggaccggtcgattccgaccatcaccgtcgtcgagctgcacctcgttgtgaccgcaaggacctcccgaagccaaccccacccttcgtcggaccttcctcgccgccggtcgtgccgccctttttcctttcgcgggaggtaaccccggatccagcaccagagcctgccctcgaggacctgcctgccccagctttggaaggcaagccccggaatccttttgagatggatactagttctctggaggacatggttgctggagtgacttggccgtccatcttgccaccgggttggacagtcgagtgggaccctacctccgctgaggaggagcaggaggagtga

SEQ ID NO: 1257 - DNA, 579 bp, Zea mays
  Peptide Sequence Number=SeqID_44632
atggttcactgcttgggtctcgagcgaagtcaagcagcagattccaggaaggagtgggtttttgtgtcggagcctggcatcatgctccgctcgttcccgctcgccctcctacgcatggagacgatcgcggtgtcgagaattgcggcattcgtggagtgccctgtccttaggagtttctcctgctttagatgcctcatcccgggatacgggctgagcaggatcccgctcccccgcctcgtggtgacgccgaatgttacggcgcttgttccgacggttgtgtgcctcacgctgcgggtgctcctcccccagtacagtgggctcgtcgtcgtagatgggtgcatcctctactcttccctggaaaaaaggacacccgagaagaaagagcttggggttgtgtcacgtgcttcgactgtctcccatgtgagcagagcggccaggacggtcgccggtgttgctcccgcggcctcgctagtgacgaggctatccactcctttttgtcgagtgatccgagtccacacccgggtgggtgacgtggacagaggggtccgccgcgacatgggtgcagccttagtcggttga

SEQ ID NO: 1258 - DNA, 927 bp, Zea mays
  Peptide Sequence Number=SeqID_44633
atggctcgacttagacacactgcacgaaagtcagtcatccccttcttaccctcccgccttgctgagcgtccgcttcgccgtcccgtggccggacagtccagccacttggagagactgcaccaccgcctgcgtgaggagcaggagcgtcgacgacaggagcagcagggctcttccttctcgctccaccaggagatagagtctgtgaggagctgctcccctgtgcttcctctggaggcgccccctgcaccaccactgggcgccccagcttctggagtagctgctggaggagacccagacgacggaggtggcgacgacagctcgagccacgacatcgacttctctgctaaccatgagccggaaggatgggttgctcgacccatcactcgcgacgctgctcgcgggtgtcacttccacgatgcgctcgacaccctgctacgtcgggcgtttaaccggcatacttggtccgtcgagtatcgctgtgtggtctaccagcacagtcgcggggtctacccggaccgctgggaggcaacctgcttggtgcgctgcccggagaacagtctccagggtgcggaggcctgctcagagcactattctatctctgagcgggactcagctgaggcagccatgcaagatgctgcacggcgtgcgctttcgcactactgctcggttttcggtggggcagctgacggtcttgacctgaatcaacctagccgccgagctaacacggagctggaccgtgcattagacgagctgagtagggctcgtgctgagatcgccctgctgcgggcagagcgcgcggaacgtcgtcacttggatggtggttcccccgctcccgtcgggactcagcacccgtaccgctcacctcggcgtggacaccagtcttatggcaatcccgactgcaggaccaagataactctagaaccatag

SEQ ID NO: 1259 - DNA, 789 bp, Zea mays
  Peptide Sequence Number=SeqID_44634
atggcgctccctattgacgtggcgggtctgtgccctaggcagggtgacgtgggggctcctccaaagccgaggttgagtctgtcttctgttgccgaggccgagtccgagccattgtgtcgggcgaggcggaggtcgttcggccgaggccagggcggagtccgagccctggggtcgggcgaggcggagtttcgtcgtcttccggcccgagtccgagccctggggtcgggcggagcggagttcgccgtcttccgggtcttagcccgagtccgagccctggggtcgggcggagcggagttcgccgtcttccgggtcttagcccgagtccgagccctggggtcgggcggagcggagttcgccgtcttccgggtcttagcccgagtccgagccctggggtcgggcggagcggagttcgccgtggcgcctttggcaaggcctgactgcctgtcagactcactctgtcgagtggcaccgcagtcggagtggcgcaggcggcgctgtccttctgtcagactgctttatgctgatgggggttaccagctgagaattaggcgtcttgagggtgcactgaatggaatggccatggtacaatatctgaagtggattagaccgccagctcagtttctcaccgccgacgatctctccgcctcgattcgtgccgccgccgtttcgattcgtgctcaggttgatcggatagcgctcagggtcacacaaatatcatcgccgtggataactccggccagtaaactattccggccatcgtaccgcactcaccacggtggaatcggttga

SEQ ID NO: 1260 - DNA, 174 bp, Zea mays
  Peptide Sequence Number=SeqID_44635
atggagagtcatgatctccgggcagaatgggaatcacgacttgtgggtggttatgagattgatggttttggttatgactatggtgctggttgtcagcattgcaaccactgctcaggcgaagatgaagctgtggaaggagacttccaggagttccaagactacgacgagttctag

SEQ ID NO: 1261 - DNA, 954 bp, Zea mays
  Peptide Sequence Number=SeqID_44636
atgggtcggcgcgagacggagcgtgaaggggggaagaagccggagggagacaggcataaaaggggaaacccacggccttcgtgtttgtcccacgcccaggtcgggcgtaaggagaggatccagggtaatgatggagcctcctgtgacgtggtcggtccgagccttgggtcgggcgaggtggagactcctccgaggttgaggtcgagtctgttttccgaggccgaggtcgagtccaagcccctgggtcgggcgaggcggagaccgtcggctgaggccagggctgagtccgagccctggggtcgggcgaggcagagttcgtcgtcttccggggccaagcccgagtccgagccctggggtcgggcgaggcggagttcgtcgtcttccgaggctgagcccgagtccgagccctggggtcgggcgatgcggagttcgtcgtcttccggggctgagcccgagtccgagccctggggtcgggcgaagcggagttcgtcgtcttctggggctgagcccaagtccgagccctggggtcaggcgaagcggagttcgtcgtcttccggggctgagcccgagtccgagccctggggtcgagcgatgcggagttcgtcgtcttccggggctgagcccgagtccgagccctggggtcgggcggtgcggagtttcctatggcgcctgaggccggacttggctgctgtcaggctcactctgtcgagtggcacagcagtcggagcggtgcaggcggccacctttgcattaaatgctcctgcgatacggtcggtcggcgtggcgacttggccaaagttgcttcttggcgaagactgggcctcgggcgaaccgaagctttgtgctgatgggggttaccagctgagattaggagtcttgaggggcgccgaacatggtgtctccagtgagctgctaacgggtaatccgagtggacgcccgtgccccatttgttag

SEQ ID NO: 1262 - DNA, 714 bp, Zea mays
  Peptide Sequence Number=SeqID_44637
atgccccctgcaccaccacaggtcatccaggctgctggaggagaccctgacggagacggagacgacgccagtggcagttcgagccatggcatggagctctcggaggagtcggagtcggagggatggatcgctagacccatcactcgcgacgccgctcgcgggtgtcacttccacgacgctcacgacaccttgctgcgtcgggccttcgaccgacacacttggtccatcgagtaccgttgtgtagtctaccagcaccgtcgtgggttatacccggaccagtgggaggctacttgcttggtgcgtcgtccggacgatgatctccagggtgcagatgccttctcagagcactattctatcactgagagggatattgccgagacagccatgcaagatgcaacacgacgtgcactttctcagtattgcttgttgttcagcggggtagctgatggccttgacctgaagtactaccctcgccgttcgaccgacagtactagagccgccgtgctcaacactgagcaggaccacgcccttgacgagttgggcaaggttcgggcagaggttgcggaattgtgtgctgagtgcgcagcacgccactatctggatggtggttctcccgcccctgtcgggattcagcacccttaccgctcaccgccccatggtcgctttgactatggtaccccagactgcaggccccagatagatttggatccgtag

SEQ ID NO: 1263 - DNA, 432 bp, Zea mays
  Peptide Sequence Number=SeqID_44638
atggcgcttcctgttgacgtggctggcctgtgccctaggttgggcgacgtggaggctcctccgaagccgaggtcgagtctgtcttccatggccgaggccgagtccgagcccctgggtcgggcgaggcggaggtcgtcggcagaggccagggcgcccgagtccgagccctgggtcgggcggagcggagttcgccgtcttccgggtcttagcccgagtccgagccctgggtcgggcggagcttcctatggtgcctttggcatggactggcttcctgtcagcatcactctgtcaagtggcgctgcagtcggagtggcgcaggcggcgctgtccttctgtcaggccggtcagtggagcggcgaagtgacggcggtcacttcggctctgccggagggcgcgtgtcaggaaaaaggtgtcaggccacctttgcgttaa

SEQ ID NO: 1264 - DNA, 1197 bp, Zea mays
  Peptide Sequence Number=SeqID_44639
atgtcgacaaaagaatcctacgaacgagtaagggtacacgtaagcggcaaggccaaccgagccgagggactcctacgcctccgggatacggatacctcactcatcacctactgtgagaagctcaaatgtcgatggagagggagcagcagcaccctcggcgtcaactccaccttcggcgaagtccgaccaagcctcggacggcaacacgggcggaggatctccgtaccgaaggacgacgtcagcaccacgcccgggccatcgccgccagggtctcccccaggaacccggcccgagcagacggctcggccggccgccccgaagcctcagccagccgtcccccgaggacaccagcccgactcgtggcctcggcaactcgactccggtgttggtctcggccaagccccggccaacgaagctccctttttcgagccaactctgcctctgtccgtgcttgcaccgctgcctccggctctggctcatcgaagagcggccgagggcctcgacagccacaatgaacaaacaccggcactcaaggtgccattacaaacggaactccggttccacccccgcagcggcaacaacctccgtcccgggcggcaagacagctgtagcaacggcttccgggcagacgctgcggcggaaaggctttcgcccacgaaggacgagaaccagccattcaagccaggggacggaggtccaggggtgcaggcggagttggcggtctcgtcagcagagaaaccttctccggctgctgccaccccaacaccgcaccagcaggcgctggccgccttaaagcgcaccggcaggtcctcgctcccgccctcgccgaggccaccccagaacatgagcaccgcccttgcggcgcacgacgtgctgggcgaccctctggcgcggctgtcggcgcgaggaagacctggacgtggccggcccttcgccttccccggcatggctggaggaagcctccgcggggttggaggatgcctttttcccccaaacgccggaggaagaaaagggttactgacccacgcggaggcaaccccccactcggtgcgctcctctgccccagcaaggatgatgaagatccttgaagctgagggcggggcagaggccgcagcccggctcacttctccccaccatcgaactggtggtcaccgtcttgggcgaccaccggcgaggggatgcagccgggctgcctga

SEQ ID NO: 1265 - DNA, 372 bp, Zea mays
  Peptide Sequence Number=SeqID_44640
atggcgcttcctgttgacgtggctggcctgtgccctaggttgggcgacgtggaggctcctccaaagccgaggtcgagtctgtcttccatggccgaggccgagtccgagcccctgggtcgggcgaggcggaggtcgtcggcagaggccagggcggtgtccgagccctggggtcgggcgaagcgaagttcgtcgtctttcggggactggcttcctgtcagcatcactctgtcaagtggcgctgcagtcggagtggcgcaggcggcgctgtccttctgtcaggccggtcagtggagcggcgaagtgacggcggtcacttcggctctgccggagggcgcgtgtcaggaaaaaggtgtcaggccacctttgcgttaa

SEQ ID NO: 1266 - DNA, 717 bp, Zea mays
  Peptide Sequence Number=SeqID_44641
atggctgaaaggtacccactcccacggagttgcgctcctccggcgatgaggcggaaagacgacgggtatcccccatccgggggcttggaaggtggaaagacacgatgcataagggagcgcgaagacatggtcgccttccaagggggtcgccctccttttaagggcgactatccctacttgcgtccccagccgtcacgggctgagtcttctccaacacgctccaaggccctcccctgcggcgcgggggctttgtcccacatgtcatgcaagccggctcagagcagaagaagccaaaccgccgtgcgcggtaccctaggacatttccgagaccagcgggagcgatcttgtaacggaatcccatcagagggaggcatcgagccctcggaccccgtcgccaggggaccgggtccagcagatcacccgcagctcaccggagacaccatgttcggcgcccatcgagggcaacatggcgctttcccccctcctccttgcggaaaggcgacacagggacgtatgaaaaaagccgagtctgtccctgatcgccctctcgccctgtgcagaggctcggaggctgctctcgcaaacccggctctggccgaaccgttgacagcgtcaacataccagcccgagaacttgggacccgaccgtacacccgggctacggccagctcgcatgagggaacaaccagaccagccgaagcattacgcaaggcattaa

SEQ ID NO: 1267 - DNA, 525 bp, Zea mays
  Peptide Sequence Number=SeqID_44642
atgcaagcggcatgcaaccgcaccaagggggcgcgccctttcgacttcgacgcgtccagcatggaggcccaggcccacacgtcatgtaaccggcgcgccggttgctacgtgcaagaaactgcaccgccactcatgccactaccgtgcctcctcgactgcggaaccagtaccgcgactcaaggcaaccctgcgcatgacccaacagtgccaaccaggcacatcggtcatgggacagtcgacacctttggcaggagaagcaggcgacgcttcgcttccgccataatgaccgcgtcaaaaaagggaccgggaaaggggataccccgaaagggatccttctccgcgaaggaaacgggccccgagccccctactgatcagaggttcgaaggctgccccctcggaagggttcaacagccgcctcaaagcactcgggctccgcgcccactactggtcaggggttcgaaggtcggcccctcgaaagggttcaacggccgcctcaggccactcgggctacgcgcccattactga

SEQ ID NO: 1268 - DNA, 339 bp, Zea mays
  Peptide Sequence Number=SeqID_44643
atggcttcatggagcagcagtgacaccatttcattttcagaagtttcaccctttgacactattctacatcttttacagctcatgtggtcttttaagccctgcctctacatggacttcggcctcgcttccgctgtcaccacgctctggacctgcaccgatgtcacgcacctcgtgcacgtgctcctgcagttccgcctcgtctggtgcggcaagctaatccgttatgcccgcgccgtcgccgcacactacgtctgctccgtcaagggtctctgctttgacctcttcatcattaggggtagaaacagaactttcaatgcatgttggaggtgcacgatgtga

SEQ ID NO: 1269 - DNA, 573 bp, Zea mays
  Peptide Sequence Number=SeqID_44644
atgaacgaactcactggcattcgaagtgccattacaaacggaactccggttccccctccgcaggtacaaacaaccccactccgagggggaaggcctgcggagcaacggaaggccgacgagtggtgcgccgtcgcccgctccagcagcagcgacgacaacgccttctgctccgagggaccaagcagcggcagcgccaacctcgggctcgatgccgctgccaggaagcccccgcccatgccaaaacttgtgaggcaaggacgggtagaaggccatagagtcggagggaccggggaagggggataccccgagagggatccttctctgcgaaggaaccgggctccgcgccccccattactgatcaggggttcgaaggctggccccccgagggttcaacagccgcctcagatcacgtgggcccgacacccactactggtcaggggttcgaaggccagccccccgaagggctccatggccgcctcaggctactcgggctccgcgcccattactgatcaggggttcgaaggctggcccccgaagggttcacagtcgcctcagacaccgagcgagggatga

SEQ ID NO: 1270 - DNA, 501 bp, Zea mays
  Peptide Sequence Number=SeqID_44645
atggctgaaaggtaccgactcccatggagttgcgttcctccaacgacaaggcgaaaggactgcgggcatcccccatccgggggcttagaaggtggaaagacacgatgcataagggagcgcgaagacatggtcgcctttcaagggggtcaccctccttttaaaggcgactctccctacttgcgtccacaaccgtcgtgggctgagtcttctccaacacgctccaagcgggcgaaagggtgggcagccatgcaggcggcatgcaaccgcgccaagtgggcgcacctctccgacttccaacgcgcccagcatggaagcccacgcccacgcgtcatgcaaccggcgcgccggtcgctacgtgcaagcaactgcaccgccactcgcaccactgccacgcctcctcgactgcggaaccagtaccgtgactcgaggaaccctgcgtacgacccagcagtgccagccaggcgcgacggtcaatgcgggccaaaaacgggtgggcagtga

SEQ ID NO: 1271 - DNA, 948 bp, Zea mays
  Peptide Sequence Number=SeqID_44646
atggcgggggaaagcaagccgggctgcggcctctgcccctccctcagcctcaaggattttcatcaccagtgctggggaggggaccgccgcgtgcccggctctcggacgcgagtggcttcggagccgctcccggcgccgccttccgccacggcagctggaagaggttcctccgccgacgagattgccggagccgcctatggaccgacctctaactctacggccttctgcccgtccttgcctcacgagtttgggcacgggcgggggcctcctggcagcagcatccgccctgaggtcatcgctgctgctgtttggccccccggagcagaagtcgtcgtcgtcgccgctgctggagcggatgacgtcgtgccgttcgtcggtcttccgttgctccgcaggcccccccccagcgagtggggttgttcgtacatgcggaggtggaaccggagttctgtttgtaatggcactttgaatgagtccctcggctcggtcggccttgctgcccgaggcttctcttgcttagttaaaggaacccctcggccgctcttcgatgagccgaagccaggggtagcggtgtcagcacggacagaggcagagttggctcgaaaagaagacttggttggccggagcctggccgggtcgtccgttagcgggaccgacgctggagttgatctgccgaggcctcgggccaggctgatgtcttcgggggacagctggccgaggcctcggggtgaccagtcgagccgcctgctcgagccggattcttggaggagacccgggcggcgatggcccgggcgtgatgatgaagtcgtccttcagagtggagaccctcggaccgtgtcgccgtcggaggctaggtcggacctcgccgaaggtgtagttgacgccgagggtgctgctgctcccttcaaccgtcaagatccgagcctgcaggatcggattatcttgtag

SEQ ID NO: 1272 - DNA, 984 bp, Zea mays
  Peptide Sequence Number=SeqID_44647
atggctgaaaggtaccgactcccatggagttgcgttcctccaacgacaaggcgaaaggactgcgggcatcccccatccgggggcttagaaggtggaaagacacgatgcataagggagcgcgaagacatggtcgcctttcaagggggtcaccctccttttaaaggcgactctccctacttgcgtccacaaccgtcgtgggctgagtcttctccaacacgctccaaggtcctccccctacggcacgggggctgggtcccacacgtcctgcaagccggcccagggcaaaagaagccaaaccgccgcgcgcggtgcatgcaaccgcccagcggttacaagcagttctccacttttgcccagaccagcgggcgaaagggtgggcagccatgcaggcggcatgcaaccgcgccaagtgggcgcacctctccgacttccaacgcgcccagcatggaagcccacgcccacgcgtcatgcaaccggcgcgccggtcgctacgtgcaagcaactgcaccgccactcgcaccactgccacgcctcctcgactgcggaaccagtaccgtgactcgaggcaaccctgcgtacgacccagcagtgccagccaggcgcgacggtcaatgcggccaaaaacgggccggcagtgatggcggtggcaggcgggcgggagcggcggtcacgtcgtcagccaagcttacgtcccatcctggggcaggaccgggaaagggggataccctgaaaaggacccttctctgtgaaggaaacaggctccgagcctccctactgatcagaggttcgaaggctggcccctcggaggggttcaacagccgcctcagagcacgtgggctccacacccactactggtcagaggttcgaaggccggccccacggaagggttcaacggctgcctcaggccactcgggctccgcgcccactactaatcaggggttcgtaggatggccctcgaagggttcacagccgtctcagacatag

SEQ ID NO: 1273 - DNA, 351 bp, Zea mays
  Peptide Sequence Number=SeqID_44648
atgggcaagagcaagaagggtagtagttcttcgcatcactccggcgacaagtggaagcacgactcccaggggatcgccgcagaaatgtggacctacatccgggccgtcgagcgcgccgggcttgagggctcggatgagtcggagtactcctcggacgaggagaactcctcaggctcgtccgaggagggcggcggcggcgatggcggtgacgacggaggcgatggtgacggcggcggtgacggcggcgaaggcgacgacaagggcggtgacgtcggcggcaaaggtggcagcggcgacggcgacaatggcagcaagggcagcagcaggggcagtaacaaggctagtggctag

SEQ ID NO: 1274 - DNA, 918 bp, Zea mays
  Peptide Sequence Number=SeqID_44649
atggagcggctgcagcggatctttggcgcctccggcatggggcagccgccgacggactcgccgctgctcgattcctccgagcaggtctacatctcctccctagcgcttctcaagatgctcaagcacgggagggctggggtgcccatggaggtcatgggcctcatgctcggcgagttcgttgacgactacaccgtcagggtcgtcgacgtcttcgccatgccgcagagcgggactggtgtcagcgtcgaggccgtcgaccacgtcttccagacaaacatgcttgacatgcttaagcagaccggcagggcaacaattgacaccggtaatgtcactactaatggttccatcaccctgaaagttgtggatgaactcatcttgttgagttttgaagctttgaaccctagagccgttgctgttgtgatagaccccatccagagtgtgaaggggaaggtggttattgatgcattccgcctcattaatcctcagaccatgatgcttggccaggagccacgtcagacaacatcaaatgttgggcacctaaataagccatctattcaggctcttatccatgggttgaatagacactactattcaattgcaatcaattaccggaaaaatgagcttgaggagaaaatgctgttgaacttgcacaaaaagaaatggaccgatgggctaattttgaagaggtttgacactcactcgaaaaccaacgagcagactgtccaggaaatgctaaacctagccataaagtacaacaaggcagtgcaggaggaggacgaactgccacctgagaaacttgcgatagcaaatgtgggtcggcaagatgcaaaaaagcatttggaagagcatgtgtcgaatttgatgtcatcaaacatagttcagaccctaggaaccatgctcgacacggttgtcttttag

SEQ ID NO: 1275 - DNA, 447 bp, Zea mays
  Peptide Sequence Number=SeqID_44650
atgggcaagagtaagaaaggtagcagttcttctcctcgctctggtgacaagcgcaaacgtgagccgactcctccttcgaaggacttaggcaactcggagtactcggaggaggagttctcctccgagtccgagggatctccggctctcgtctctcccccggcgtcgtctaatgattcagacgactcccaggggattgccgcggaggtctggacctacatccgagccatcgagcgctccgggctcgagggctcggatgagtcggagtactcctcgaacgaggaggactccttggactcgtccggggagggcagcggcggcgatggcggtgatgacgacgacgaaggcgacggtggtggcggcggcgacagcggcaggggcggcagcaagggcggcaatggcagcggcagcaagggcagcagcaatggcagcaacaaggccagtggctag

SEQ ID NO: 1276 - DNA, 321 bp, Zea mays
  Peptide Sequence Number=SeqID_44651
atggcgggcggaaatacgctcgccggagctaaggaacggtggctggccggtgaggggacagggagttgtagcgtcaccaaggtgccagtgtcagaatgcctggtcccgaggttgagctgcgccaaaaccgtgtcaaatggatttggtttgagttcaaattttcccagaatgtgttcaagagaaaccctaggtgacactggggtgtcacagccttccccccttaaaggaatctcgtcccgagattcaggccagagtcctcccggggtgaagcgaaggaaggaagtcctttttaagttttatcttttagttacttcattctga

SEQ ID NO: 1277 - DNA, 708 bp, Zea mays
  Peptide Sequence Number=SeqID_44652
atggcgcttcctgttgacgtggcggtctgtgccctaggcagggcgacgtgggggttcctccgaagccgaggtcgagtccgtcttctgttgccgtggccgagcccgagccatggggtcgggcgaggcggaagtcgttcggccgaggccagggcgaagtccgagccctggggtcgggcgaggcggagtttcgtcgtcttctgggtcttagcccgagtccgagccctggggtcgggcggagcggagttcgccgtcttccgggtcttagcccgagtccgagccctagggtcgggcggagcggagttcgccgtcttccgggtcttagcccgagtccgagccctggggtcgggcggagcggagttcgccgtcttccgggtcttagcccgagtccgagccctggggtcgggcggagcggagttcgccgtcttccgggtcttagcccgagtccgagccctggggtcgggcggagcggagttcgccgtcttccgggtcttagcccgagtccgagctctggggtcgggcggagcggagttcgccgtggcgcctttgtcaagacctgactgccggtcagactcactctgtcgagtggtgctgcagtcggagtggcgcaggcggcgctgtccctctgtcagactgctttatgctgatgggggttaccagctgagaattaggcgtcttgagggtacccctaattatggtccccgacaatag

SEQ ID NO: 1278 - DNA, 888 bp, Zea mays
  Peptide Sequence Number=SeqID_44653
atgaattcgaggctagtcacatgggctgtccgcaaggcttggcatttcatcgaacgggccaagcgcgaagcgcggcgtcgaccactagctgcgataacacaaaacattgttgacgacagttccttgaacatcataaacgccggaaaaacagcgaggacaacggggttctcaccaagggtcgacggcgtcgtgggcggagctgtctacaacaccaagcctttcataggcattttgtcgagtactcgtagggcatgcgcagcgcgggactgcagggggtggcgccatggggagggaatagtagggctgctgctggggaatgcccatgggaggaggggctggaacttgggcgccggccatggaagtcgcaggtggtgccatgggaggctggggacgctgctgctcgattgcagggagcaagcgccaggcggagtcttggtcagtatccattgcagggggagtggagactcgcgcccatggagcagggaagtgaagaactccatggctggggcgtgtggagcagggaggcgaggatctgggcgttccctagccgggcagggaagagcaggggaggcagacgccatggaagggggcgagcagagctgctggctgctgatggctggagagcaagaggacgacggttggggaaaatggcagccagggggaggtcacagccatggaaaaatcatagggcagagaggagctcgcccatgcccggggacaggcgccatggggaaactcgagcttgcagggaggggcaccacgatctgctgccgtgtgcacgctggagcttggggaagggagatgccatggcggcaacagagggcatcggccaagccttgccgcactcctgcgcgcagctggtttccatgtgaggacgagcgctggtga

SEQ ID NO: 1279 - DNA, 414 bp, Zea mays
  Peptide Sequence Number=SeqID_44654
atgcgaaggtggacggcgcaggacaagctcggtgtcgacgcagtggaatctgagggcggaatcacggagaaaatggcgacccagcgatgggtttcggcttcccaggtgtttcccccgcgcaccagacgcagttgcggtcggaaaccacggctgcggcggacccctctatccctctctctttcttggtgttgctcgtacacgggcgtaatcgagtggttgaagcgtaaggagggggcgcaggcttcggccgggctggtccttatagtccaagggtcaaggcgcaacggccgcggcccatgcggccgggacgttgatggagtccggcggcgtggagaagatctacaggacgcacacgattctattggggacgtagacactgacgacttgggcccaagcggcggtgatgcaagctaa

SEQ ID NO: 1280 - DNA, 600 bp, Zea mays
  Peptide Sequence Number=SeqID_44655
atgcccccctgtgacgtggtcggtccaagccctgggtcgggcgaggcggaggctcctccgaggtcgaggttgagtctgtctttcgatgtcgaggtcgagtccgagccccgggtcgggcgagacggaggctcctccgaggtcgaggtcgagtctgtcttccgaggtcgaggtcgagtccgagccccgggtcgggcgagacggagaccatcgtctgaggccaaggctgagtccgagccctggggtcgggcgaggcagagttcgtcgtcttccggggccgaggccgagtccgagccctgggatcgggcgaggcggagttcgtcgtctttcgaggccgaggccgagtccgagtcctggggtcgggcgaggtggagtttgtcgtcttccgaagccgaggccgagttcgagtcctggggttgggcgaggcggagcttcctatggcgcccgaaaccggacttggctgctgtcagcctcactctgtcgagcggcacagcagtcggagcgacgcaggcggcgctgtcctcttgtcaggccggtcagtggagcggcgaagtgactgcggtcacttcggctctgtcgactgaggggcgcgcgtcaagataa

SEQ ID NO: 1281 - DNA, 306 bp, Zea mays
  Peptide Sequence Number=SeqID_44656
atgaacaatatcaagttacatttgtaccttcagcttgacagaagttcgcatatcatactcccgaaggtgtttttgcttggaggaccttcgatgaagaagcaagcccccaacagccacctactcatacccgaagccagcagtcagaagggcgccagcactctcaacagcaacgcgacttcagggaagagtccaaagctcgtacagtcaacagcattgtaccagaatcgaagcacatatactgaagaatatcctacttctaaagtacttttatattttatgccatttcactttttgtatgagaaataa

SEQ ID NO: 1282 - DNA, 99 bp, Zea mays
  Peptide Sequence Number=SeqID_44657
atgacgcttggttgctcccccacctatataaaccaccaggagccaccatttgagacttgggttttgtttgcttgttcaaagttgttcttggcacagtaa

SEQ ID NO: 1283 - DNA, 633 bp, Zea mays
  Peptide Sequence Number=SeqID_44658
atggtgccgccgccgcctcctgccctattcgccgccgcctctaatcgccgctgcgccgccgcccctccccgccggcgtgccttcccggccgagctcgaccgtccatgccgtgcacccggccgccccggcgccgcccgtccgctcgcgggcgccgcgcgcctagccaccccactgtcgcgcgcccgtcagcgccgccgcgagcccggccgcccgtccccaccgcgcgcccgtccgttgccgtcgtgcccgccctcgctcgtctccgccgtgccccacaccgcccacatcgccgccgggcctcccaacgtgctcacaaacgccgccgccgccgcctctcggagcgtcgtcgctgcctcctcgagcgtcgccgccgcgcccaagcgccgcctccgcccccgatcgcatctccgaaccaactacgacacccacaaacgtgattgtctcacacacactctttactcgtacacagccgcaataatgggtgatagacgtgattggatgtatgaaggtttcaagaagggctataaggtctggtatctccacagtgaagatgctgaacgagtagcagaagtagaagttgatgacggtgaagatgatgttgataggatggaccagatgcttgaggatctgtag

SEQ ID NO: 1284 - DNA, 660 bp, Zea mays
  Peptide Sequence Number=SeqID_44659
atgcgtgcattagaagtgcagcagctgcttgaggatgaccccacagtcgtgtacctcaccgcatacctgctcaccctggatgcacaatatgatttcttggctcggcaccaccgtcagatgattgcccgagcagaagatgcagagaagcgcaatcataagctccatgtggatctcaccacaactcaagcccgtgtagctgccttggaaagtcgtgaagtcattgctgttgaagccctgaagcaagccaaggatgagcatgtccagaagttgatggatgcctacttggtaacccataaccaacgtcacccggtctctatcagaggagagaagaaggcttgggaactcccggaaggagccatagtcttggaaggaattccagtcttccctcaggctatggataagcaagagcaccccgaatcctcccaagatcccccgcaagagttgtttgagcccctcaccatgaagaagattccagcaccgtcccgtgagatcaaagaagaatctgcaagcaccccaccagcaccaccgccctctgaggagctacaagagccagtcccgcttgaagaagagttcaatctcgttctgccatctcagtctccaccagaagaagccatcaacattagctccctattgacccatccaggagatgtctcagattga

SEQ ID NO: 1285 - DNA, 90 bp, Zea mays
  Peptide Sequence Number=SeqID_44660
atgggtacgatgcggcttcatacccttagagatgatgtggttttataccctcagaggtgcttgttgctcatcaaggggagtgggaagtag

SEQ ID NO: 1286 - DNA, 1068 bp, Zea mays
  Peptide Sequence Number=SeqID_44661
atggattctgacgcacatatgctatgcattcggttttgcccccagaaccggatggtgcgtacaatccaaaccacccgaaccaacaccaactacatccctctgccacgacaaattcccgtctacctagtggtaatcaaagaaatccctgtggatctcccttgcattcgtgtggagaacagagttattctggagtatagctcagaggagtttctgcctacgcccaccccgttggcagaatcagtagccttcactgctagatcgtcatcgtcagcatcgccagcaccagcagtccaagcctctgctcccggaggcgatgacccggacgactctggtgatgatgatgaagacgacgacgacgaagaagaagaagaagagaacataaacgaggaagccaacgatgaacagcaggaccactacgtggggttatggcctgtcaccgaacattatacatcaatgttcgagacagggcacttctctaacctactgcaggatgttttgcatgtgttgggaacctatgttcgacccctgtatgagaccaggcaagtgtgcgaaccccctcgggcttgctactacatcactcgcattcatgttagggtgatggatgcaagtgatagagggttcaggactctgtcagctcatgagtctctgacaccgctatccacctacgctgcttcggtcagcgatgctgctaggcaaactctatggtccctcagccacacctaccggcaggagctgcacaacacgaagtacaaacatctccctctgcgtcttcgtggagaaagccagaccagcattgttccaggtggagctgaagaagatcgcctcaacaccctagctggtgtggtggcaggtcttaacaccgacctggatagtgctaccctagacctctctagggtacacttggagctggaggatgcacacgcaaggattgcagccctggaagctcaactagaaggaagggatccccctgaagctcaaatccctgccatggcgttgtcccctccccacaagaggatccgcgagaaccagtatccatcaccaggctgctatagattttttacattgtaa

SEQ ID NO: 1287 - DNA, 1080 bp, Zea mays
  Peptide Sequence Number=SeqID_44662
atggggggcgcggagcccggttccttcgcggagaaggatccctctcgggcaactggcgtgccagttgctcgacgcgtgggcctgggccccaggctggcgtgtcagaagttggagaagcgcgtccatctggcgcggttgcatgccgcctgcatggctgctcgccccttctgcccgttggtctgggcggaaatggggggtcgcctgaacgcaactccatgggagttggtacctctcagccatcgttcggcttcaaggattttcatcacgcagcccggtcgcaccccttcaccggcggtcacccgagatggcgacctccagcttgatggtgggggaaagcgagccgggctgcggcctctgccccttcctcagcctcaaggattttcatcaccaaggctggggaggggagagtgccgagttggggtcagcccctgcgtgggcggtggcccgctccttcactcagtgatggggggagaagcgggcattgcccgtggcgtccggcagctgcagcgtgcctggtcttcagccgcgagtggcttcggggccccttgcggcgtcggcgtctgccacggcagccggaagaggttcttccgccggcgcggcggccgggaccggccacgggctgacctccatcttctacggccttctgcccgtccttgcctcacgagttttggcacgggcgggggcctcctgacagcggcatccaccctgagggacccctcggccgccctttggtggatcgaggccgggggtagcgatatcagtatgaacagaggcagagttggctcgagaatggggaacctggtcggccggagcctagccgtgtcgcccgtcagcggtgccgacgcccaagtcggtcagtcgaggcctcggatcgggctagcgcccttggaagccggttgcccgaggccccaggggaaaccggttgagccgcctactcgggccggattcccggaggtgcccctggacctcggcgccgcccgaggctgggtcgggctttgttgtagatgtcgtcgatgccgagggtgctacggctcccctcggcgtgaagacccgagcctgcaggatcagatcatcttgtag

SEQ ID NO: 1288 - DNA, 717 bp, Zea mays
  Peptide Sequence Number=SeqID_44663
atggaggcgctcccggctgatgaccaaagaccctttgaggacctcataatgcgcgatgagaaggaggtgatgcggaaatggaacgaacaacgtgacaaggaggaagcggaattgctgcataaactctccgaacgacgcaaggaggcagcagaaaagtatttgtcacacttcacggtggatcgccaccagaagatcatccgtcaaggggagatcgatatgaaatctctcctacctccacttagggtcctgctagccacccgcggccagcgcatcggctacaaatgggtcacccttgacccaaccatcatatgccctggaccattcgggtcgatcgcaaaccgtccagccctttacgcgcggacggtccggaccatccggcctcttatgctggaccgtccggatatgcgtacgcaaagccgagagctgcgcaatacacacagttcccacattcatcgtagcaacattatggtgccccgccagcaacacattataatcatgccataccacctcatggacatagggctgaatactgttcggccacaagagagcctgagaggtatagggcaggagctggtgacattaataggacacctaacacacacctcaaacacccttgggaggaaagccgacagagtgatgtcaggcaacctgagatttccacccacaaactcaatggatggtcgccagacatggcagagaggatcagagacgaggtag

SEQ ID NO: 1289 - DNA, 381 bp, Zea mays
  Peptide Sequence Number=SeqID_44664
gaaaacagcgccgctcgcccctctccgactgctgtgccactcgccagggtgaggctgacaacaactaagtccagcctcaggcacaacaggaagctccgcctcgcccgaccttgggcctcagcttcaggaggaggtctccgcctcgcccgacctcaggcctcggcccccgcctcgccctcggaaggtggtctccgcctcgctcgaccccagggctcggtctcaacctcggcctcggaagatggtctccgcctcgcccaaccccagggctcgggccttaacctcgaccttagaaggaatcgcgtcctcacccgaccccgggcctcggcctcagcaggagtctctgcctcgcccgaccttaggctcggaccaacagcgccatag

SEQ ID NO: 1290 - DNA, 315 bp, Zea mays
  Peptide Sequence Number=SeqID_44665
atggccataccacaggtgtacccgctattcatgacgatgggtgttgctatgggcatatgcggacttcagctcttctggaacatcaccggcaacctggaagtcaggttcggatctataatcttcactccttttgcctattcgattcttgcaagagatgtgctgttccatctagagcagggggatgtagggaatagcgcagccatcaccgagatgggcaacctggttcctgagccatcctacgaggaagttatgactaacaataataattgttgtgcatgctacaagattacttgtgttctgactgccaccatgtag

SEQ ID NO: 1291 - DNA, 324 bp, Zea mays
  Peptide Sequence Number=SeqID_44666
atgaggatgaggctcaagttgatgaagggcaaagtcaagaagatgagccacctcaagatgatggcaatgatcaagggggagatgcaaatgatcaagaaaaggaggatgaggaagaaccaaggccaccacacccaagagtccaccaagcaatccaacgagatcaccccgtcgacaccatcctcggcgacattcataaggggggtggaggaagcactccaagattcggattgggtggtggcgatgcaagaggagctcaacaacttcactaggaatgaggaaccaaatgggtcttccgcaacaagcaagatgagcatggtgtggtga

SEQ ID NO: 1292 - DNA, 354 bp, Zea mays
  Peptide Sequence Number=SeqID_44667
atggcgcttcctgttgacgtggcgggcctgtgccctaggtcgggcgacgtggaggctcctccgaagccggggtcgagtctgtcttccatggccgaggccgagcccgagctcctgggtcgggcgaggcggaggtcgttcggcaaaggccagggcggagtccgagccctggggtcgggcgaagcggaccctagtccgagccctaggtcgggcggagcggagttcgccgtcttccggggccttagcccgagtccgagccctgggtcgggcggagcggagttcgccgtcttccggggcctagcccgagtccgagccctgggtcgggcggagcggagttcgccgtcttccggggcctag

SEQ ID NO: 1293 - DNA, 909 bp, Zea mays
  Peptide Sequence Number=SeqID_44668
atggcgtccgcgacgggggtttcctcctcggagatggcggtggaccacgcgacggggccgggcgccgtggacaagccgcggttcgatgctctgacgccgaatgagatgagcggcgggaggccccagttccggaaagtgcccgtcccgcagcaccggttcgcgccgctcaagcgatgctggatggaaatctacacacccgtatacgagcatatgaagatcgatatacgcatgaatctcaaggcaaggagggtggagctaaagacaaggcaagacacaccggacgtgagcaaccttcagaaatgtgcggactttgtgcatgcttttatgcttgggttcgacattgctgatgccgtcgccttgctgcgtcttgatgacctgtatgtggactccttcgaaatcaaggacgtgaagaccctgcgaggggagcatctgtcgcgtgctattggccgcctatcagggaaaggaggcaagaccaagtacgccattgagaactctaccaggacccgcatcgttatcgctgatacaaagatccatatacttggatcctttgttaacatcaaggtcgcgcgggattcgctttgcagtctcatcttgggttcacctgctggcaaagtgtattctaagctaagggctgtatcagctaggttggcggaaagttttgctgacagactacatgctttctacaaggtcgataggttagaggatgctagaaggacatatagaaggatggtattccttagatttgaaccaaataatcagacatacccttcactcatcaatggttatgtctcatctgagaaatactttagtgtgctcatactgtggagtgtggacagaagagggttctttggtatggctatgcaggtgactgaaaaggcacaagaattcaaaatatttgttgataaatag

SEQ ID NO: 1294 - DNA, 540 bp, Zea mays
  Peptide Sequence Number=SeqID_44669
atggaaattatcagccaatggttagaaggaaatcattctcatgagcgtacacctatccacacttcaatcctttcggggaaaaacatgtcgaagaacttttacaaggacataagttcctcgcatgctgggagcaacagggaggcgagggagctggggacggcgctggggctacagggacacgtcgacagatcctgggacggcgcgggtatgagggaacctggggagccggcggtgaacgcgacagatcctgggggacggcacgggtcacggcgagggaaggggcagctcacggctcacggcgagggaaggggcggctcacgacgagaaatcctgggggacggcgcgggtccgagggagctggggggagacggcgggtcgcgcggcagggaggcggcggctcacagcgtggaggtggtggctcacagtgggggcagcgcaggtccaagggagccttggggaggcggcgtcttggagaaatggaggcggtcgtcttggagaaacggggaagcggcgggttctgagagaatagggaaaaaataa

SEQ ID NO: 1295 - DNA, 372 bp, Zea mays
  Peptide Sequence Number=SeqID_44670
atgggcaactgcgccgtggcgcagcacgcggtgacctcgtgggcggacgacggcgagtgggacgtgccgtcggcggcggaggacgaggccggaggagcggcggggaccagcgggtgggagtgggacaaggaccgcgcggcggcggaggtgacgatcaggatccccaggaggcagctgcaggagctgatggagaagagggcgcccgccgccggtgggctcctccgcggcctcgcgagccgcggggccgccgcgcaggcgcagctgctgctggcggacgtcatgaacgccgggcacgtctacctccaccgctgcagggcggcgcactggaagcccgcgctgcagagcatcccggaggctgctgtggagtcatga

SEQ ID NO: 1296 - DNA, 306 bp, Zea mays
  Peptide Sequence Number=SeqID_44671
atgcgcgcaccattatttttgccgtcgtcggacgttctgttcttcttcccggccttcgtcctgttcttcctccccaacctgctgtccccgcccacggtcgcagccgtgagccgaccgatgctcgtcgatgcgggtacgaggcgagtcggtcatgctcctggcctttctctatgtgtgacgtcgaggaggacatggtggcacctgccacgcttagtttatcttggcgatgagaagtacagcggtatactacctatgtatcctccagatgcccagatctttgtcgtgtccttctccggcaacgaacag

SEQ ID NO: 1297 - DNA, 1164 bp, Zea mays
  Peptide Sequence Number=SeqID_44672
atggccattgcgtccaccgcggccgcgacgacgaccgttacgttggtcgtttggcaccgaggggcgtgctggaggatgtgcccctggacgtggaggtgctggagccccgggagccgcaggtcgcggcgttgcagcgacgagggcggatggcggggacggaggtcgtgcgtcgatttccagctcctccaacaacaggtgcgctcgtgcctctgcgaacgtggggaacgacctgtgcatcttgaggatggacaccttgtggcggaacttaccaccgaggccgcgaaggagcgtgagcaccatctgccgatcgccgatgggatcgccgaactcggcaagggaagccgccatcgattcgagctggcggcagcagtcggtgatgctcagggactcttggcggaagttgcggaattttgtttcgagcagaagcgcccgagactccctctggccgaggaactcgtcctcgaggtagcaccacgccccgcgagcggggccctgccgcatcatcagagattgctgcaggtcgccggaaacggtgctgtagatccatgtcaggacacaacaatcggcttgaacccatgccgggcgcgatgggaacgcttcatcttcaaggacgtgacgagtcagggcatatttgccaaggacagtgaggaacatgccacaccacttggtgtaggtatttgtcgcctgatcgagaaggacagggatgagcgccttcatgttgacgacgacagtggcctgcgcccagagggcctcatgggcatgctcatacgcgtccagagcggcagcacggaggcggccttcctcggcgcggcgagcgtcttcggcacggcgtgctgcagcctcagccgtagggcgctggtcctcggcggcagcgtcgtggtcgtccgccatcgggagggagacgcgacggctgggcagccaatctggagccgctgcagactggacgagagggaggcgcgacggagattagcgcggtctggaggctcgactgcgcccggccagagggaacgaccgcgcgatctggacgggaatcagccgagggagacgcgacggggatccgccgatctggagccgcgtcggatcagcgagcgtggcgggcgagtggatcagcggccgcacccggcagcaacagcgacggggcgggcgatcgaacggacggcgtag

SEQ ID NO: 1298 - DNA, 1068 bp, Zea mays
  Peptide Sequence Number=SeqID_44673
atgcgcggggtgcctcgatgccgctgcattgcttttgaaaattttactttccctgtcttccgcggaggccccgaggaggcgcggtactggcgcgagcggcagttcgactcctctgcatccaggaaccggtgcccatggattatgactcgtgggcccgggcccccatgtcagcaactgggttgttggtttcgacgaagaggctgggccgctgctttcgatggagatgaagaggcgcactatcacagacggtggcgtgctcctcacgcggtggttcaccttctccgcacacggaggctgacgcccaaggagtatgactcgtgggcccggaccccccgtgttagaggttgggtcaccctggctcgcatcgggcgagatcttgtgcagcgtctcggggcatcagtggggaatctttctttaaaaggggactcccccgagcgtggtagccattctcatcactcgttgtgccctttcgccctcgagttctccgcgctcttctgtcgccgtagccgtcatggccttgctagatcctcccgagcgtctccagcccgaggtggcactcaacttggtgcgcaacctgctcggatggggtgcaccggtgttcgtcggaagaatctatgtcggcgcctctcctcacggcgatctcaccaccggagagttcgtgctcttcgtcttcaacctccccagcggtctagcgttgccgattttgtctttcctcgtgctgctgctggaggagctcgacctctaatctcagcacttcacgccctgcttcatcctacaggcgaccatcatcgcctacctctgcaaggtgtccgtgggggcgacgcttcttcccgcttcttcctccagcatccggaggaaaggatgttcaccagccttatgaaggtggaaagcgggctgagctgcggctccatctttcgcgcctccatctctttggctttgatggctttggggccgcctccaatggtgaccgctggcctgactgctaaagacgccgcccgggaggtcgtacaagatgtcgcggagatggcagccgcacgcttccagcgcgaccctactgatgttgagtag

SEQ ID NO: 1299 - DNA, 228 bp, Zea mays
  Peptide Sequence Number=SeqID_44674
atgaagaatcaaggatgtgcatcctccaagataaccctcaccaaagaaaatgacgaacagcaagcgtcatgtcaggttgagcgacgcttctgctacaaatgtggtgagcagggtcatatatcaaaggtatgttataaaggtggaaaagagaagataagcaagaaatggagcaatcaggacttgggtacctctgtaagtcaagaaattggtatctcaagtcgtgagtaa

SEQ ID NO: 1300 - DNA, 258 bp, Zea mays
  Peptide Sequence Number=SeqID_44675
atgcggtcccggttgcgatcccgcgtcatggaccggtcctactcggccggcgtccgcgccacgccggtcgtgctcaatgtcccagtgtgctcgcgcccggtgttcgggttcttcaaggagaagaaagaggccgcaaacgccgcctcggcgcgggcgcggttggcgttggcccggaggactgctgcgggtaccgccccgccagccggtggagcgagcgccagagatcttggcagtggttttagaaacatcactttatag

SEQ ID NO: 1301 - DNA, 2273 bp, Zea mays
  Peptide Sequence Number=SeqID_44676
gaactaagccctgcgatttgggagagaacaaggaaggcgacccgaataataatgatcttgattgggaccgcgatgtggagatgcaggtggcggccaaaaacctccacaccgcgggggcgagcactgtctggatctcttccatcgacagacgcgtgcgcgggacaaagaggtgcgaaatccggaatctgagagtgcgcagcatgtggggcgatgaggagggcgcggacgcgagatctgtgggcgtggctggcgggtggattcaggctggggcgcgacgcgtggtctgggatggctggcggaacctgagattggcgggcatggcaagagggggcggggcaaggtgtagccctgtagacgtggaaaccatggaggaggaagaagccaccgccgcggatcccatggatgatggggaggcagcaggagactcggcagccgcggagcccatggaggacgacgcgcccacgtcctccccgactccctccgcgccgtcggccaccgcggccgttgaagactccaccatcgctaggcggtccccaagcatcggcacctcgccgcctcccgccgccgcggcagcgagctcagctgccagctcgatcgccagccagcggaaccctccagaaaactccatggggatcccgtcgaggctcccggaccacgaggaggaggaggaatacgacgatgccttgttctacgaggacatccaggcgccgaagttcgtggacctcaccgcgcccgacgccggcctccccgacgacgaccccgcctggttctgcctccgagtcggttgcgaccagagccatgagcaggttgacccggaggccttggacaggagcttcttcgtgcgggtcatggcggcgagaagccccaacgtgcggctacagaaggttatcagcaggaaaaaacagagctcgatgctgaaatgcccgcactctgcgccaccgaagcctccgagggctcggttcgcgaggctgagcgcgaccacggaggccgcggagaaggcaccggcgaaacccaagccaagggtccagcggatctgcgccctgcgagcatccccgatccgtatcaaggctgagagggtcgaatgtcccagcgagaggaagaaggcactgacgacgccgcggagcaaggccgtccggccgagccaggaactgtttcacagcgtgaagcaccagaaggaaccgttcaccgctgcagccaggaaggggaaggtcgtcaaggccctgttcatgagcacgccaaaaaaggcgcctgcccagacgccggcggcagacaggagcaaggaggcggggtccgaggcatgttccaagctgaggaagctgaacttggcgtgccgggaggtgccgagcaggtacatgtctcagctgaagaatccgaagactgtcaagaaaggggaagagaccacggtggccaagagcgagaagcgggggcaagaatccaagacgaatgccaagaagaaaatcttaggacgctcactgaagtgtacccatgccgaacctgatggggagaatcgaaacggttgcagcagcactgatgcagacgagaactcatttgcagaaattgctgcctccgatcaggagaggaaggtggtgctgcaggaattgagaatcgaggtggatacatcgcgagctgacaattccaatgacaacaaggagaatctgtcgagtgctcccagtgaagaagcattgaacaattcacattctgaaaatggaaacagacagttggagaacaatgagaatgttcctctaaacgagaatgttgctttgaaggtggctaaattgcagagcaaagtgcatcaagagcaagcaggaaagctcaagaaaactaccaaccctaggccattcaggctaaggactgatgaaagaggagtgcttaaagaagcaaaaccagagaaaaggcagccgttcactgagaataattccacggcagtactcaaggatgcaaacagaggagtgacgccaatggacaaacacacccatggcaagggacgagacaagccggcttgcggcaagaaacagaagaaacgaagcacccagattgtaacggctcagcagctcgatgagtccagctccaggccggccgtcaacagcatccaatgcagagctgtgaaaccggagagggcagacctgacagcatttcgctttccgtttgcgcagtggccttatggcaccttcttcccggactgggaagaagaggaaggcggctacggtgaagctgtcgaggatccaaacaccagctgcttgagctcgggcacgggcagatcaaggaggaaatga

SEQ ID NO: 1302 - DNA, 1035 bp, Zea mays
  Peptide Sequence Number=SeqID_44677
atggcgccgattgtgttccggtttaacccgcgcaacgcagatgatatctttgtcgagttcttcggtggctccagccgcgcggcatgggcgggcccggacgggcacagcctgcacaccggcgggcaggtcgtgaagccgaccaccatcgagcggaacctgtcgtgcaacctagaggagttgtacaagggcatcaccaagaagttgaagatttctagggaaattgttgacgcaattgaattgattgatttgtatttggccatttgggtgtgcaactgggcctcggcttctccagatgtggtgggtcaacgacagaggcaccctcttgctcccatcggcgatggcacctccttccatctgcaacaacccatggaggccgacgacggtgcatctggtgtttggaacgacggtcgcgtggatgccccttcccctcacggctgtgcagtccaccctggctcactccctggatgtagttggcgctcgttgcgggtgctggtggacaagcggtcgctcgagatggcggtggaggtggatgcgaggtgggagcccatgggggctcaggagtactacgactactggcgggccatgtacagcgcccgcaacaacagatctgctacctccacatcggtgtctagggctcctccattgcctagatctactagagtgagtgagcctacagagctgacctcatccaggctccagttccaccccacagtcatcgtcctctgttgctctacgtttcatgcttctcacctcctctcctcaatctcatcaactgtgctgaaggagacagctgaaagtatttccgtctcatcaactgtgctaaaggaggaggaaaacacctcacttgttgaaggaagcagtggagacctggaggaagatcgtttggagtctgcagctactaatcttcagcctggcagtgacacttgcattgcaagggaagagttgctggatcagaaggatctggtgaaactgcaagctgttatccgtggacatctagaggcggcccatgcctcacggccaaagcaaatcagatga

SEQ ID NO: 1303 - DNA, 549 bp, Zea mays
  Peptide Sequence Number=SeqID_44678
atgacggtggcaggcgcgcgagagcagcggtcacgtcgtcagccaagctcacgtcccatccgggggcagcgagagagccccctcttacagcgtgaagacaacgcgcccgtgatccgttcctcgaacggcccgcgcacgcgcaacggcagccccgccagctactcgccccatcgcattaactctgcggcgggacaggcggcgcttctggcaggaaaagcgggcgacgcttcgccttcgccgaaacaaccgcgccaaaaaagggaccaggaaagggggataccccgaaagggatccttccccatgaaggaaccaggctccgagcctccttactggtcaggggttcgaaggctggccccccgaagggttcaacagccgcctcagatcgtgtgggccctacacccactactggtcagaggttcgaaggccggccccccgaagggttccacggccgcctcaggctactcgggctccgtgcccattactgatcaggggttcgaaggctggcccccgaagggttcacagtcgccccagacgccgagcaagggatga

SEQ ID NO: 1304 - DNA, 552 bp, Zea mays
  Peptide Sequence Number=SeqID_44679
atgcagcatctggcgtgctggttgcgcgacgcgtgggcctgggcctccatgctggcgtgtcgggagtcggagaacccggttgctcccctccgctggcggtcgcccgagacggtgaccaccagctcgtgggtggggaggagcaagccgggctgcgatcttggtcccaccctcagcttcaaggatgttcatcatcctcgctggggtgggtgtcgggctgagccggcgctctacctcccgcgcgggtccgtgggccatcctctcccgcggcatctgagggagagggcgctcactggccctgcgggcggcccggacttcgacaacgcggggctggtcgacggcaggcgtcgtcacctccagcgtgtcgggttcgttgacttggctcccggcggccccttctgtcggagggcggccgccgcgccgtgtacacgggaggaccaccctagatgccgcgcgctgctagagcggcgttcgtgttctggggtggtcctgccttggcactgggatggcgccttcacgtggaggccggtgccccgctcgcctgggaggatttga

SEQ ID NO: 1305 - DNA, 513 bp, Zea mays
  Peptide Sequence Number=SeqID_44680
atgggcgcggttcgggttagggctcagtccactcaagggacacaatctcgcctcgctcaagcccagcctcgggcaaaggcatccgacccgggaggattcacgtctcgcccgagggtcccctcaagaaacggacgcatcttcggctcgcccgaggcccaggcttcgcggagaagcaaccttggccagatcgccacgccaaccgaccgtatcgcaggagcatttaatgaagctctgcctcgcccgaccccagagctcgggctcaacctcgacgccggacgacggactctgcctcgcccgaccccagggctcgggctcagcctcgacctcggacaacggactccgcctcgcccgaccctagggctcggactcaacctcgacctcggaagacggactccgcctcgcccaaccccagggcttggactcagcctcgacctcggaggagcctccgcctcgcccgacctcgggctcagaccgaccacgtcacaggaggggccatcattaccctactcctag

SEQ ID NO: 1306 - DNA, 954 bp, Zea mays
  Peptide Sequence Number=SeqID_44681
atggtgacctccagttcgatggcgggggagagcgaactgggccgcggcctctgcccctccctcagcctcaaggattttcatcaccagggctggggaggggactgccgcgtgcctggctcttggacccgagtggcttcggagccgttctcggcgccggcttccgccacgtcagctggaagagtttcttccgccgacgagacagccagggccgcccacggaccgacctccaactctacggccttctgcccgtccttgcctcacgagtttgggcatgggcaggggcctcctggcagcagcatccgctctgaggtcatcgctgccgctgttcggccccccggagcagaagtcgtcgtcgtcgccgctgccggagcgggcgacggcgcgccgttcgtcggtcttctgttgctccgcaggcccccccccatcgagtggggttgttcgtacccgcggaggtggaaccggagttccgtttgtaatggcacttcgaatgccagtgtttttgttcattgtggctgtcgaggcctgaacataggaacccctcggccgctcttcgatgagccgaggccaggggtagcggtgtcagcgcgaacagaggcagagttggctcaaaaagaagacctgatcggccggagcctggccgggtcgtccgttagcgggaccgacgccggaattgatctgccgaggcctcgggccgggccgatgtccttgggggacagctggccgaggccccagggtgaccggccgagccgcctgctcgggccggattctcggagaagaccctggcggcgatggcccgggcttggtgatgacgttgtccttcagagcggagacccttggaccgcgtcgccgtctgaggctaggtcggacctcgccgaaggtgttgtcgacgccgagagtgctgctgctccctttagccgtcaagatccgagcctgcaggatcggattatcttgtag

SEQ ID NO: 1307 - DNA, 1605 bp, Zea mays
  Peptide Sequence Number=SeqID_44682
atggacacgggctgcctccaaccaccctgcaacccctcctcgtcggaggcgtcgggaggcgacgcctccgacgcctgcggctccgcctctgcctcccggtcctcctccgcccgccgcagcaagggggtgcggctccggctccggctgcggcgaaggcggcaggagccgggccccgccgctacgcctgggggtgagggtcagggtggcgccggcgtgcaggtgcaggacgacctcgcgctgcccctcgggatgtcgttcgcggccgtcctcgcgcaggttgtgaatacaaagaatcgttcaggcgaaagattacagcctgcacttctttccaagtttgaaactgagcctagactttggatgcagatctgtacatcggcagtgaaggaatcattgagaaatatatatggtaacaagttagacagttttatgagaaactttgagaaatcattcagcagcacattgacaacgcttcatcttgttaatgagatgcctgtctatggacaaggtccagttcctcaatgttcttctaagcatgaagactctgaagcttcaagcaagttgagcactggtggtacacaaaatctaacgcgtgaaatcaagcaggagcgtttgaattcagtggaaagtcagcttgttctttatgctggcggctatcagcagatgactcgccgcgctcatagcttatcttctcctgaagctgatcagcgcatccttaatgcatttgagagatctttgaaagaacaaactcggtcaaatgagctcaaggaatttgagataagccttagcatgagaaagttgaagctaaaacagtctcaactagaacttaactcctattcacacatgttagacaagattaagttatccttgggatttcagaaagcttccttccaagtggaaaaattcaagactcagatgcaggacacgaggcatgcacaaataatgaggacactcatagattttcttgttagtgcagtgattattatgtcagtatgctttgggtatggaacttatacttattcataccaaaggataactgatattacagcagcatgttcagccacttcaaagggatctaaatcatggtggatgccaaattcagtgtcaaacttcaatactgggttgctcttcataagatgtcatgtaatagctgcaacacggatgttctttggtatagtaatgattttggcagttgtttggttagcgttccagcgctctgcggtgtctgtatcaagtatgccagtaacttttaacatcattctgttgggagttatttgtggctacgctggaaggttctgtaccaacacacttggtggtgatgggaacatgtggcttatatgctgggaggtactttgttccgtccatttgattggaaattgttatccatcggtcttgtaccgtgttctccatggtcctatatctgtatctcatagcaaggagtctgtctggttcccgtattggattcgccgttggatgttttatgctgtgctggggttttttatcccagccttgaatggcttactgccatttgcttctctttctgactggaataaccatttcactaaggagctaaaatccatcttcattgatgagagaatcgaagcctga

SEQ ID NO: 1308 - DNA, 541 bp, Zea mays
  Peptide Sequence Number=SeqID_44683
atggcgcctcccgttgacgtggccggcccgcgccctaggttgggcgatgcgaaggctcctccgaggtcgaggtcgagtccgtcttccgtggccgaggtcgagtccgagcccctaggtcgggcgaggcggaggccgttggctgaggccagggcggagttcgagtcctggggtcgggcgaagcggagttcgtcgtcttctggggctgagcccaagttcgagccctgggtcggacggagcggaattcgtcgtcttctggggctgagcccaagtccgagccctgggtcgggcggaacggagttcgccgtcttccggggcttagcccgagtccgagccctgggtcgggtggagcggaggttgcttcttggcgaagacagggcctcgggcgagccggaaatatgttcgccactggagggggcctcgggcgaggcggagatcctccggggtcggctgcccttgttcgaggctaggctcgggcgaggcgtgatcgagtccctcgaatggactgatgggggttaccagctgagaattaggagccttgagg

SEQ ID NO: 1309 - DNA, 390 bp, Zea mays
  Peptide Sequence Number=SeqID_44684
atggcggcggcaggcgggcggaagcagcagtcaagtcgtctgcaggctcacgtcccctcctgggatagcgagagagccctctcccacggcatgaagacgacgcacccgtgttccgttcctcgaacggctcgcgcacgcacaatggccgccccgccaaccactcgtcccgtcgcattaactctgcggcaggacaggcgacacctttggcaagcgaagcaggcgacagaaaaaaagaggctcggggctgctctcacaaaaccgactccggccaaaccgttgacagcgtcaacataccagcccgagaacttggaacctgactatgcacccgggctacggccagttcgcatgagggaacaaccagaccggccgaagcatcacgaaacgcgctaa

SEQ ID NO: 1310 - DNA, 1323 bp, Zea mays
  Peptide Sequence Number=SeqID_44685
atgatgcagcagcccccgcagccgcagccgggtatggcgctacctcctccccctcagaccggtggcgggcagccaccgcagtggggcgcgatcccgccgccgatgacgcagcagtacggcgcaccacctccgcagcagcctccagcgatgtggggccagcctccgtcgcaggcgcactacgggcaggcgccgccccctcagccgtattatgccgcgccgccggtgccggccgcccccgctgcggcggacgaggtcaggacgctctggatcggggacctgcagtactggatggacgataactatgtcttcgggtgcttttcgaacaccggcgaggttcaaaatgtgaagctcatccgcgacaagaattcaggacagcttcagggctatggttttgttgaatttacaagccgtgcagctgcagagcgagttcttcagacatataatggacaaatgatgccaaatgttgacttgacatttcggctgaactgggccagtgctggtgaaaagcgtgatgatactcctgactatactattttcgttggtgatttggctgcagatgttacagattacttgttacaagagacattcagggttcattatccctcggtgaagggtgcaaaagttgtgactgataaattgacaatgcgtaccaagggttatggatttgtgaaatttggcgatcctacagagcaagctcgtgcaatgactgaaatgaatggaatgccttgttcttccaggcctatgcgtattggtcctgcagcaagtagaaaaaatgcaggtggtgttgttcaagagagagtaccaaattctcaaggagctcagtctgagaatgatcctaacaataccactatatttgttggtgggcttgaccccaatgtcactgaagatgtcctaaaacaagcattttctccttatggcgaagtcatccatgttaagatccctgttgggaagagatgtggttttgttcagtttgttaccagaccttctgctgagcaggcgctgctaatgttgcaaggggccttgattggtgcacagaatgttcggctttcgtggggtagaagcctgtcgaacaagcagactcagatgaagtggctaatactgcgatttaaaaattctcagcctcagcaggaatccatgcaatggggtgcgggtgcgcctgctggtgttggtgattactatggtggctatggacaaggttatgaggcttatggcagtgggtatgcacaaccccaggaccctaacatgtatggttatggcgcttatgttggttatcccaattaccaacagcaaccagctgcacagcagccacagcaacaacagtga

SEQ ID NO: 1311 - DNA, 1365 bp, Zea mays
  Peptide Sequence Number=SeqID_44686
atggcccgccccaggaagccgccgccgccctcgccgcctaaggcggcggcgccgtccatcgctgacgcgctgctgctggccacggtctgcatggtgggtctgcccgtggaggtgcgggtccgcgacggatccgcctacgccggcgtcctccacactgcctgcgtcgacgccggatacggtgtcgtgctaaagaaagcaaagaagattgcaaacgggaagggagatgtgaatctctcgctgggatcgtttgtggacactcttgttgtttgcccagatgaccttgtacaagttattgcaaagggtctttcactcccccttaaaggtgtctgtaaacctcttgattccaacgtggttgctgccagtggatccttgaagcctcaaatttcacatgcaaatgacccaaaaatgtctaataaaactaaaaatatgtctccacttatgcaagctgagaaatgcacctcggtgggtcaggagaaaaatacttctgttaagagaaatggtcaagataatggtattactacaagtttaagttcttcaaccagacatgtgggggcatgtttatccaataattgggattctaggtctggaagtatggtgcctaaagttgatgttatcacaagttcagcttcagctgtgcccgtggtggcttcaggtgttaaaccctctcagccagtcaataattcagttgccaagattgtcacgtcaagcaaaactgctgctaaggaattcaaactcaatccttccgcaaaggtcttttctccatcttttgcaagttctaggcaagtacttgcagctgcggcccctgttgacacatactacatttcacactctgcccctgaagtaccaatgggtgtgcctgtatatgaaccaaaatctgtgtcaggtgtttcacctctatccaacaaggtttattgtagtaatctatctcctgcaaactatgccatttcacctcagtatgtgccgtctatcatgggccataatgcatcaaggctagacccatccagaattggcacaccataccatcctatgcaggtgggggcaacttatactacccctagtcctcagcctgtaatggctgggaagttcagtcctgttgtttatgttcaaccaggtcctcaggatgcaatgcatggaacaaccgttggttttcaaggatggccttgccctttgttattgaattcgtaccaagctagcatgcagaaattccaaggcaaccccccggtgtatttagctcctccagtcatggcaactgggaaccttccattggtggtaccaagccctgcatcacttgtgcagccgttcgaggccattcatcccataatggtccctgctgcaagcagcatggtcccaggaaaatacatgtaa

SEQ ID NO: 1312 - DNA, 573 bp, Zea mays
  Peptide Sequence Number=SeqID_44687
atgcgcgccctgacgacggcgcttccatcgcccgcctggagctcctcccgccgccctagcctccgtcgtcgcaaggaggccaggccagacgaggtggcgcgtgccatcgccatgttccccagatcctgttccacaacgtcgaggagaagctctgcccaatgctcgccttcttccaggtacaccaagctctcgccttcttcaggcaccgcgccaaggcgtcaagcgccacccagtctccctcccatcggtcgtcgctgcctcatgctgttcgtggtcgtgctcgcgctgcccacggcacggaggcatcgatcggacccaccgccatctgatgtatgcccacaatctgatcgccgctgcctccccacgtgccggcagcccggcaccgcggcacgcccggcgcccccacgctacaccctcctggatccttgtcctgactcctggagctggatcggcacaccaccacggcaccacatggcacacgcgcaggcgcaggccgggccgtcctccaccatcggcaccatgggcctccggacgcgcggcccacaagcgaagaagtatgggcctctgtgctga

SEQ ID NO: 1313 - DNA, 378 bp, Zea mays
  Peptide Sequence Number=SeqID_44688
atggctcggccgctcggccgccccgccccccccctgctcggccgctcggccgccccctgcgcgccccgcctagggccgggtggcaatgagattgatggttctggttatgattatggtattgctagtccactacagccaaacaggatacttgctgagtatgttgatgtgtactcacccttgctctacacaccaaacccccccccccaggttgtcagcattgcaaccactgctcaggcgaagatgaagttgtggaaggagacttccaggagttccaagactacgacgagttctaggtgtgggttagcggcaaccccccagtcggctgcctgtgaaggccgtgctatctacgtttcgttttcgcactttgatttattgtaa

SEQ ID NO: 1314 - DNA, 147 bp, Zea mays
  Peptide Sequence Number=SeqID_44689
atggcgtcaatgacaatttcattgggcactatgggcgcttgtgctctcagtcgcaagaaccttcggacatacgcctgcaggtatcttcggactcaagtcggtatcacagcagaccagaataatacgaaggttgatacagcgccgaag

SEQ ID NO: 1315 - DNA, 243 bp, Zea mays
  Peptide Sequence Number=SeqID_44690
atggaggacgatagaggcgagccgagcttgggtggccttgcgacgaaggacgactggcgaccgcggaggacgatggcggaggacgagctcgggcagccttgcggcgacgatgtgctggcggcggcgcggtcagctttggatgtggggcggggggcgcgtgccagttctgaatgcagtggtctatggcatggtttagtgcctataacaatggttgtgaggataaagacttttagagaacaatga

SEQ ID NO: 1316 - DNA, 795 bp, Zea mays
  Peptide Sequence Number=SeqID_44691
atgactaaacccttcccgtttgctatgctaagtaccctggggtcaaatctgactagcttatttcagtcaaaggaaaagggggttgaaaaaggtgcggaaggagagaagaagactgattcggtgactgggggaaatgaggggtcagaagaaacaaaacatgatggctatgatgaaggctatccacaagaccccgcccccggtctcggcataaaaaatgttgcccctgctaattccgaagttgatgaagcaacccctgaagctaaaaatagcaaaggccctcttggaaccacaatgtcggagattgaccagattatagctgatgtggttcctgagagggaaatggccgaagtgaccactgataggccttcacccttaaaaatgaaagaattggaaggagtttctttggaggatagacagttggacctactgcgcttgggcggccaggaactctccaaagaagatatctctgaattaaaaagaattcgctattgctggcggctacaagactggattcgtgctctttggtgcctactattgaggaaagctttaaagctacaaccgaaaaacgaagataggaagaatgagcttgttgtcagtaacttggaagaaagagtgaaagaacttgaaaatcttctggaagaaaaagattcaaagattaagattgctggagcagacatggtcgaagctcaccttcggattaaggatcaagctactcaaatttctgatcaaaacaaacagcttgaagaagcacattcaatgctgggatccgttatgagcatgaggttaaaggtttaa

SEQ ID NO: 1317 - DNA, 384 bp, Zea mays
  Peptide Sequence Number=SeqID_44692
atggatgttttgatgattagggataagccttcatggcgaggtcattcgtgtgtcacgggtgataaccaacagagccgtggtgtagtgattgcgaggaaccgttcgctcggagccttggatcatcaacgtcgagatctccactcaatcaagttatcgtacctcacggaagatcgggccgtgtctactatcaattggtatcagagttccatattgcctgtgagtgctggaccaaagaatcaaatggacaaggacaaggggcttaagcttaacgacgatgagtgtgtctctcagctggaattgaaggagatgatgcgcgtgatgaccgaagcttttaaaaaataccaggactctgcggcaacatcctatgagcggcttgatcgatga

SEQ ID NO: 1318 - DNA, 705 bp, Zea mays
  Peptide Sequence Number=SeqID_44693
atggaggtttgctgctgcgccatgggggaaaggagctgtgggcgccgagcagcgaaggggaggacgccgttggaggaggaaggagagcgtggggagggtcgttggcttcctgcgcggcgtccatcgcagggggatccggccatggagggaaaagaccatgctccctgcgcgctgcttcatagaatggggagcgcgagcagaggaggtcggatggagcacagggagttggattctatggctgctggccgagctcctagcagtggggattgctggcgaccgcagagcagaagggggcgctgggagagggagagcagaggcgccacaccatggacgccggcgagctcgctgctcgagctcggaccagaggagatgccgcgccctggctggagcagaggtggcgttgggggaagaaggcgatgctgccctgcgcgctggagcttggggaaggctgggcggccatgggattccacccttgctgcgggaggtgccgagctccatgggagaagaaggctccctgcttgcttcgtggggaagaaaaaaaaggtggctggcggctgtgggaagtgtaggggtgggaatgcaaaaaatggccaagtgcaaggaaggagcacccctatttatagaggaggcactagggttagggtttcaattgggccaaatgggctgggccgggctggcccaaaatactcaatcgggctgcgctaa

SEQ ID NO: 1319 - DNA, 252 bp, Zea mays
  Peptide Sequence Number=SeqID_44694
atggcgctcaccggggcaaagtctcaggcgacagatgggctatctactgcgatctactgcgacgtggtaacgcctccaaatacgtggcatccttgtggcaaacggcaaactccggcgatggtcatctcgaccggtcgcggggcaagtgggaacatcggccagctcacaatctcatctgtggtcaagatcttttcactggtccgggcaaaatcttcatggattaagagatacaagggcataaacttggcctga

SEQ ID NO: 1320 - DNA, 600 bp, Zea mays
  Peptide Sequence Number=SeqID_44695
atggtggttgccctcaggcggctctggcgggtcacggggaggtcgccggtgctatgggcgagctccggggagtttggcgcgaggtattttggcgccactttgtcaattgggccaagtggttttgagtttgggatcaagctgctgctgtggaggctgattgttccttggagcgggagctggaaaacgagtgggtgccggctgctgctgctaaggtggcctgatcacccatctgcctgcctgctgctgaaatcccctgctctgattgtgagaaacaatcatgaacctctgggcctgagcggatggtgctgccattggtgcctttcgcttcttctctgcccggtgagctacaatacaatcctcctgggagatggccaggttggccaactcattgaagctatcagcacagacagtgttgagatgttcccacagcttggtgttgagacccctacggaagcggtctctcttgttctcatcagaatctgcatgataacctgcatactggcacaggtcgttgaaggcttgtgcgtactgcaataccgtgcgggttccttgattgagtgccagaaactcattcaacttccgatcaagaattccagctag

SEQ ID NO: 1321 - DNA, 648 bp, Zea mays
  Peptide Sequence Number=SeqID_44696
atggccatgatgggttcaacatcggaaaagatgtacccctgccaggtaccaaactttggggttttaaatgatatgccgcgtacgaggaaaaccgcgcgcaagtccattggacccattggcgtgcctcgtcatcatttggctccaagacatgaagagagaagcagcggcagcaacgatccaatcggagacttggaggcccaagtagagcagcttcggacggagctacgtcaccaaaatagggtgtgggcaaaagacagtcagcgtatagctgagttgtcaaccgaagtcggccgcttgcggtttgagctctccgaacgagactcgaccgttgattgggccatcaactcacgctcgatcgcttggcatcatgaagcaaaagctcgagttcgtgtggatgagctcagcacggcccttgataacctgcaagtatattgtaatactctacatgaggatttacatgcactgtatggtcgactacacccggacgtgcccgccgaccctgttggaatgggagtcggaccatcggggacagcaggagaaagaccggatggggaacttgatctttttgagccccctccttctaagaacttggctgatgagcggtctcctgcatcagacagtgaagcaacaaaagataacgaagactag

SEQ ID NO: 1322 - DNA, 990 bp, Zea mays
  Peptide Sequence Number=SeqID_44697
atgggccggatcacacgtgggcctcagagctggacgaggccgcgctgcgggatgacgtcgccgcaggccttcgtctggaaagactacctggagatcccctgggctgagctgcgctccatggtcgaaccgtcctttgctgagagatcgttgatctaccacaaagattacctcagcgatgcgaccatcgtgacatcttctgcggtcaatatcactgaacacgttgtcctgactgttgacggccactctcttccatatgattatctcatcatagcgactggccatgctttggcttctcctgccagcagagctgaaaggataaatgaattccagagagataatgggaagatagagtcatcagaatctgtgctgataattgggggtggtccaactggtgttgaactggctggagagattgtggtagactacccagggaagagggtgacccttatccatagaggaccgcgtttactcgaattcattggagataaggcttcaaagaagtgccttgattggcttacttcgaagaaagtagacgtgctccttcagcaatcggttgacttgggctcattatcagacacagagaaggtgtacaagacatcagacggagaaacagtaacagctgattgccactttgtatgcattggaaagccactgagttcgtcgtggctacatgataccatcctaaaggaatccttggacagcaaggggagagtaatggtggaaaaggatttaagagtgaaaggttttaataacattttcgcgattggtgacatcacagatattcctactcctgcttctgcggcggaggccaagcaggagtcggtgttggagacggaggaaactaagcaggcggtggcagcagcagcagcagcggcaggaggtgtgcaggccatggcggtcaccgtagtgcgggacgttgagacgggtctggacacgagtaccaacgaccgggacggcgacaagccttcctggttcacacctaagaggtaa

SEQ ID NO: 1323 - DNA, 678 bp, Zea mays
  Peptide Sequence Number=SeqID_44698
atggagttctggggtgaagaagtgaagccaggagccacggtttcttgcaaagttggtgatggtttggttatccacctttcacaggctgccctaggggaaccaaagaaagcgagtgagaatgccattgtgtctgtcaaaattgatgataagaaactagtgcttggaaccttatcagttgagaagcatcctcaaatctcttgtgatctggttcccgtgaaggttggtatacaaaatgctgatgaagatgaaacttctagtggtgatgatgatgatttcactgatagtgatagtgaaatgtctgaggaagatgagtccagtgatgaagatgaagtgtcaagcgatacagatactagtgatgattctggttcggaagaacagacacctaccccaaagaagactgaggtagtagttggcaagaagagggcaattgaagctgagacaccttctggtaagaaggctaagtctgaacaatctgctcagaaaacaggcgacaaggtctcaacttctcatcctgcaaagcagtccagcaagactcctgcagacaaatctacaaagacccccacagctgacaagaagtcccccaaatctgggagccatgcctgcaagtcatgcagcaaatctttcggcagtgcgtcagcacttgagtctcatcagaaggcaaagaagcatgaagcctag

SEQ ID NO: 1324 - DNA, 1500 bp, Zea mays
  Peptide Sequence Number=SeqID_44699
atgtcgtcctcttcttcttccgctgccactacgccgccggccgccgcctcgtctgaggagacgctgagtagtttgatggtggaggagttgcgcgccggcgactctgttgattttggtgtgtcgcggatgacgtcagcccgcgttcaagatatgcagcggttgggctactttggcggcggagttgctcgtgctccggggacggaggaagtccccgagccggaggggtcggacgagggccagcttgctatagttgcgcctggcgcggcgatcgcgacggctgccatagtgccgaaggcgaggggcgaggctcttggcgccggaggcgaggtgtcggccctcgcggtggtcagggacgaggcgggcgcagcgacccgccggctgaagggggtgacggaggcactgagtcaggcgacggaggcgctgagtcaggtggctgacttcgccagccgtactgcgtcgggggccctcacggcagctgtgtctgccgaagtcgagagacttcggacgcaacatgctgacgctgtccgtgagaaatcggcctccgacagcaagtgccgtaagctgacggacaaggtggccgccctggagagggagaaggctgacctccgacgccaactggcggcggagaggagggaggccaacgaggccatcgccaaggagcaggctgcgcaggcggaagccaaactggcgcgggcggagggcaatcttgccatggagctcgccaaacatctgcaggagcggctcaccgccctggagagccgcgcgaagggggccgaggccgcgatgcgtgcagaggctgaacggacgcgcgcgcagcttatggatacatatcgtgagctgggtgcgcggaccggtgacttcgaggtgccggaccgagagcccgggcttcgttgtctgcaatgggtgcaggaggagctgcaggaactccccattgtcgtgggggggtttatgtcgtacgcctccctggtcacctgcgagggggcgatgaacgcactctcccgcgaacggtgccgacacttcgaggtcttcgaccaggcagatgaagattttgagcgagatgtctacaaggtcgaagaccccgtcgtgaaggaatccgccggggccctttatgaccggatgtggggtccgcacggtcgggaggtggtcagggagcgggccgagactgcgagggctcaggcggcgcgtggcgagcgggtggacgacttcggggcgctgaacagcgcgctgcctgacccggagccgacccctgcggaggctgtgtttggggtcgccctggagccaaccccggagaccgcgacgatcgcgacggctgcccccacatctgttgcggtcggcgaagacctgcccccaacggtggccgaaggcgcccctgatgcccccgcggctgctgtgccgagtgttgaagatcccgcggcggaggcggcggaaacaacggcagaagcggcggcggaggcaacggcggaggctcccgcagcgtcagggccttcgcaggtggcgtag

SEQ ID NO: 1325 - DNA, 93 bp, Zea mays
  Peptide Sequence Number=SeqID_44700
atggggagccgcgctaggggggggcgcctgctccctgcgcgcctcgttcgtcgaaacaactacaaacgatcgcgtggaaagtacggatcttaa

SEQ ID NO: 1326 - DNA, 348 bp, Zea mays
  Peptide Sequence Number=SeqID_44701
atggcaggaatgtactgcgacgcccgcgactgcctcaacaagagaatgcagccgccggcccgcaccgctgcacggatcctcctctcccccgtcgacaaggcgaaaggctcggcaaggaagaaggaccgggaaagggggataccccgaaagggatccttctccgcaaaggaaccgggctccgagccccccattactgatcaggggttcgaaggctggccccccgagggttcaacagtcgcctcagatcgcgtgggcccgacacccactactggtcaggggttcgaaggccagccccccgaagggctccatggccgcctcaggctactcgggctccgcgcccattactga

SEQ ID NO: 1327 - DNA, 1536 bp, Zea mays
  Peptide Sequence Number=SeqID_44702
atggccacggcgatttacctctcctccccggcggcgccgtcgtcgtgtgcccgccagcggcggcagactaccagggcgaccgcgtcggcgacggaccgtccgcgcgaggtcgtgtccccgaagcgtcggctcccgctgcggaaggtgccgggcgactacgggccgccggtgctgggcgcgatccgcgaccggttcgagtacttctacgggcccggcggccgcgacgggttcttcacctcccgcgtgcgcgcgcacggctccaccgtggtgcggctcaacatgccgccgggccccttcgtggcgcgcgacccgcgcgtggtggcgctcctcgacgccgcctcgttcccggtgctcttcgacacctcgctcgtcgacaagacggacctcttcacgggaaccttcatgccgtccaccgagctcaccggcggctaccgcgtgctctcgtacctcgaccccgccgagcccaaccacgggccgctcaagacgctcctcttctacctcctgtcgcaccggcggcagcacgtgatccccaagttccgcgaggtgtacggcgacctcttcggcctcatggagaacgagctcgccagggtcggcaaggccgacttcggccactacaacgacgccgccgccttctccttcctctgccaggcgctgctggggcgcgaccccgccgagtccgcgctccagggcgacgggcccaagctgatcaccaagtgggtgctgttccagctcagcccgctgctcagcctcggcctgcccaagcacgtggaggactccctgctccactcgttccgcctcccgccggcgctggtcaagaaggactacgaccggctggccgacttcttccgcgacgcggccaggagggtggtcgacgagggagagcgcctcggggtcgcgcgggaggaggcggtgcacaacatcctcttcgccatgtgcttcaactccttcggcggcatgaagatcctgttcccgtcgctcgtcaagtggctgggccgcgccggcgggcgcgcgcacggccggctggcgacggaggtacgcgacgccgtgcgcgcgcacggcggcgaggtgactatgaaggcgctggcggagatgccgctggtgaagtcggccgtgtacgaggcgctgcgcatcgagccccccgtggcgatgcagtacggccgcgccaagcaggacatggtggtggagagccacgactatggcttcgaggtgcgcgagggggagatgctcttcggctaccagcccatggccaccaaggacccgcgcgtcttcgcgcgcgccgaggagtacgtgcccgacaggttcctcggcgaggacggcgcgcagctgctccgccacgtcgtctggtccaacggccccgagacggcgtcgcccacgctgcaagacaagcagtgcgctggcaaggacttcgtcgtgctcatcgctcgcctcctcgtcgccgagctcttcctccgctacgactcctttgacgtccaggtcggcgcctccgcgctggggtcgtcggtgaccatcacctcgctcaagaaagccaccttctga

SEQ ID NO: 1328 - DNA, 1215 bp, Zea mays
  Peptide Sequence Number=SeqID_44703
atgcaggcggcatgcaaccgcaccaagggggcgcacccttttgacttcgacgcgtccagcatggaggcccaggcccacacgtcatgtaacaggtgcgccggttactacgtgcaagaaactgcaccgccactcgcgccagtaccgcgcctcctcgactacggaaccggcgggcggaagcagcagtcaagtcgtcagcaagctcacgccccctcttgggacagcgagagaaccctctcccacgacgtgaagacgatgcgcccgtgttccgttcctcgaacggcttgcgcacgcacaacggctgcctcgcgaaccactcgtctcatcgcattaactctgcgacgggacaggcggcacctttggcaggcaaagcaggcgacgcttcacctccgccataatgaccgcgtcaaaaaaaaggtgcgccacgtcattcgattccgtatccttttccacttcctctttctctctcttgccacagggaccgggaaaggggatactccgaaagggatccttctctgcgaaggaagcgggccccgagcccccctactgatcagaggttcgaaggctggcccctcggaagggttcaacagccgcctcagagcactcgggctccgcgcccactactggtcagagtttcgaaggctggccccttggaagggttcaacggccgcctcaggccactcgggctccgcgcccactactgatcaggggttcgtaggctggcccccgaagggttcgatagccgcctcagagcacgcagagcgagggatgaccctggcctcgggcgccataggaagctccgcctcgctcgaccctagggctcgagctcaacctcgacgctggacgacggactccgcctcgcccgaccccagggctcggacacagcctcggcctcggaagacggtctccgcctcgcccgacccagggctcgaactcaacctcgacgctggacgacggactccgcctcgcccgaccccagggctcggacacagcctcggcctcgaaagacggtctccgcctcgcccgacccagggctcggactcaacctcgacctcggaaggcagactccgcctcgcccgaccccaggggtcggacacagcctcgacctcgaaagacggactcgacctcgacctcggaggagcctccgcctcgcccgacctagggctcggaccgaccacgtcacaggggggggggcatcattaccctacccctagctag

SEQ ID NO: 1329 - DNA, 126 bp, Zea mays
  Peptide Sequence Number=SeqID_44704
atggacgactccaacctcctctcccgcttcaccaagaatgagtttagcctcgagtccaagtccaccatcggcatcgagtttgccacccgcagtctccaggtcgatggcaaggtcatcaaggcctag

SEQ ID NO: 1330 - DNA, 189 bp, Zea mays
  Peptide Sequence Number=SeqID_44705
atggcgagcgtggcctccgcgaggtgttacggccttctcctcccgccaagcttcgccggagcacggtgctgctcccgtccgtcctcttcgctccgtctgcggccgcggtggggcctgcgccggccgaggacccccctcgcctgcgtcgcgccgcccgactccgcggagccacagacgaatagtaactga

SEQ ID NO: 1331 - DNA, 756 bp, Zea mays
  Peptide Sequence Number=SeqID_44706
atgggcgcgattaaggtcaaggctcagtccactcaagggacacgatctcgcctcgcccgagcccagccttgggcaaagccgaccgaccccgaaggattcacgtctcgcccgagggcccccttaagcaacggacacaccttcggctcgcctgaggcccagtcttcaaagagaagcaaccttggccagatcgccacgccaaccgaccctaagtccagcctcgggcgccataggaagctccgcctagctcgaccccagggctcgggctcaacctcgacgctggacgacggactccgcctcgcccgacccagggctcgaactcaacctcgacgctggacgacggactctgcctcgctcgaccccagggctcggacacagcctcagcctcggaagacggtctccgcctcgcctgacccagggctcagactcaacctcaacctcggaaggcggactccgcctcgcccgaccccaggggtcggactcagcctcgacctcggaagacggactcgacctcgacctcggaggagcctccgcctcgcccgacctagggcttggaccgaccacgtcacagggggggccatcattaccctacccctagttagctcaggctacggggaacaagaccggcgtcccatctggctcgccccggacaacacgaaggccgcgggtttccccttactgttctcccccctttgtgtcccatctcgcgccgacctatctgggctgggacacgcagcgacaatttactcgtcggtctag

SEQ ID NO: 1332 - DNA, 717 bp, Zea mays
  Peptide Sequence Number=SeqID_44707
atgggtggctccagggctgccacgtggccagagaagacaacatccgccaaggtatcagcggtgggtctggacccccatgggaaagtgtcggacccccgcatatatggaccggacctccggacagggtccaggatctccgcgggtacagaccggacccccgggacgggtcccagacctctctatgtggggtccgggcaactctcagcagggtcccgggattctgggacaaagaatacccaggccttaatcaaggtcaggcgggggtccgaagccgacacgtgtccggaccacaccgagtacgctcctgctcctcgctcaggcggagacccgatgctgccacgtggccgacagcccgtgacgcagtacgcccgtgctgcagcatacactgtgctcatcatgacccgcgcgttaccaaggagacagccgcgagatattaatactatatggactacggacattatggcgctcgaagatcttctcggcgacactggcattggatacttctatatatccaacttagtctctcaacctcacaagttcatacaagctctcaagctcaatacagcacacagtggagtagggtattacgcttcggcggcccgaaccactctaaacccttggcgggtacgttccgccactcggctggagaattccctctccgacaggtaccccaagggatccacatttgatttaataggttattcagatgctgattag

SEQ ID NO: 1333 - DNA, 795 bp, Zea mays
  Peptide Sequence Number=SeqID_44708
atgaagaggcacactaccgcgggcggcggttcgcttttcgggcgcgcgcggcggttcgccttctccacacccaagaaccgagacccaaggagtatgacttgtgggcccgggcccccgtgtcagcgactgggccgttgttttttgggcggagatgaaggagcgcactaccgcgggcggcggttcgccttctcagcactcggaggctcgcacaccttctccgcgccccattgcatttgcgccgccattgttgtcgtggctttgctagtccttcccgggcgcttccagtctgaggtggcatgcaacctactcagatggggcgcgccggcgttcgccggaaggatccgcgccggcgcttctctcctcgacggtctcgccaccggggagttcgtgctcttcatctcctgcctctcctgtgggttggtgctgccgatctcgcctttctttctacggcagctggagaagctcggtttccaacatcagtgcctcacggcccactccatcctccaggcggccatttttgcccacctgtgcgagatgtttgtgggggtggcgcttcttccatcagcgcccagacgaaagggtgctgcgcagcgaccttccggaggtggaaagcgagctgagctgcggctccatctttcgcttcttccggcaattctcggacgaaagggtgttgcgcagcgaccttccggaggcggaaagcgagctgagctgcggctccatcttttgcttcttccggagttgagctgcgcctcccgcagcagtcccatcagttccctgaacttcaccagcaactag

SEQ ID NO: 1334 - DNA, 1914 bp, Zea mays
  Peptide Sequence Number=SeqID_44709
atggaggtggaggctctagagaaggggtacacagcttttgccaaggcggtgaagtcttttacttcttcagaacggtacaagcgatcagagagatggaactatgttcagaatgtgattaaggaagctgtaaaagctaaggtgaaaggtgatatcagcaaggaagctcaacctggaaggggagcacaaagcaccttgagaaaggagatccttgagcttgagaagcacttcagggaacaacaggttgtgagtggtgcactggaaaacgctttaggacctaacgccggttcagtcaacttttcaccagagaatccaatgccaaaggcagctaatgaactgatacgggagattgccacattggagctcgaggtgaagaacatggagcagtatctcctgacactctaccgcaaagcattcgagcagcaagcgccggcactctctccccctgattgccgggaagcttcgaagccgtcagtgagctcacgctttgggcagctccgagaaacacccgtggcggcgaagtcttgcaagagtggaggaggggatgcggcactccggaccagttacccgccgccggcgcataagaaactgaacgatccgttggcagactgctgcacatctgctcgctcccatagagcggttgattcagatgtcctccgctgccagtcagccctgtcgtaccgcggagtttgctcgtccagggtactgccttcagaagaggatgatgatagcctcgcgagggctcttcgctcgtgccactcacagccattctcattcgcagaggaaggagagggggccggtgcatctggaggagcgataagcttagcagagtatctaggaaccaacgtagccgaccacatcccggaaacccccaacaacctgtcggaggagatggtgagatgcatggcggggatatactgcaggcttgcagaccctcccttggtccaccacggctcgtcgtcctcgccgacattgtccttctcctcgaccaccagcgcagtctctccacagtacgtcggagacgacatgtggagtcccagctaccgcaggagagaagcgacgaccctggactcccgcctgatcaacccgttccacgtcgagggtctgaaggagttcagtgggccttacaacacgatggtcgaggttcctacgatcagccgtgacggtcggaggatgaaagaagccgaggacctgctccagacttacaggctggttttgtaccggctggaagccgttgatctgaggacgatgacgaacgaagaaaagatagcgttctgggtgaacgtacacaatgccttgctgatgcatgcttatctggagaacggcgtcccacagaacaaaacatccctgcttgctaagcaggccgcctgcaaaatagctggacgcagcatcaacgcggccgttatccagagcgttgttcttggatgtaccacgcactgccccggacagtggctacgacggacgctgctctaccccaggaccaaaagcaaagtgagcaaagcggggcatgagtggcgagcctttgccgtcgcacaaccggagcctcttttgcgctttgcgctttgctccggcagccattctgatcccgcggtgagggtgtacactccgaagcggctgttccaccagctggaggcggccaaggaggagttcatccgggcgacggccggcgtgtggaaggagcagaagctgcttctccccaagctggtggaggcgtacgccaaggacgtgaggctgtcgccgcagggcctcgtggacatggtccagcgccacctcccggagaccatgagggtggccgtgcagcggtgccagcagggcggcagggcgtcgtcgggcaaggtcgtcgtcgactgggtgccccacaacccggccttccggtacctgctcgcaagggacctcgcgttccctcacctcagctga

SEQ ID NO: 1335 - DNA, 201 bp, Zea mays
  Peptide Sequence Number=SeqID_44710
atgggtatcctagtatctggagctgtgattcagggggttcaggcacacggcttggctccccaggctaaaccctgcaggtccaggtccgagtcgaggctaccttctgggggctgggacaccaactctttcttaggtatgctgccgctggtccgacagagacaaagcgggcagggacacccttcgcaggactcggcactttga

SEQ ID NO: 1336 - DNA, 390 bp, Zea mays
  Peptide Sequence Number=SeqID_44711
atggctagggaaggggctattgctctctggtgtaggagcccggccatggacatggaaaaggccacgccatggggggagggtttcaacccttgctgctggaggtgcaagaaagggaggcgcccattgaaaggagccatggacggacagcctccatggctagagctcgccatggggaaatcgcaggagcagaggctatgcgtgaggggaatggagaggagcggtgggagggagtgtaggaggccaagggtatccatttataggcgagggagcagcaagagtgcggacacaaggcaaccattgcagacgcaagctctgtgcattggtgggcgtgggtggctgccagatttttattctgtcttgatggcactgtttgagatacttagagattga

SEQ ID NO: 1337 - DNA, 333 bp, Zea mays
  Peptide Sequence Number=SeqID_44712
atggctcaccggagttccttcggcccgcccgaggccttctcaccgtcgttctcccctctctactcgtggattcatggccccttctccgccattgagtttgtcatggcgccctcttcctctctgcccaactccggtgacctcaccaccgcggagaggagcagcgccgcccgcagccgttcacccctccccgacaacgagcagtccgaggttcctgagtgtgttgttggagacctccctgagcaacaacctggtgaagatgatgtggttttataccctcatagctacgatgacagaggacctacccattgcattcctatgcatacattgaagtga

SEQ ID NO: 1338 - DNA, 153 bp, Zea mays
  Peptide Sequence Number=SeqID_44713
atgggatgggacgaagagaaacgaagcgccaagaacgtggcaggcagtaacgtgggggtcggaggggagagaaaggaggtgagagtagacgtgggagggacagaggtggaggactggaggtggacggtggagggccaggctaaaaaattttaa

SEQ ID NO: 1339 - DNA, 600 bp, Zea mays
  Peptide Sequence Number=SeqID_44714
atgaccttcagggcaacaatgaggctcggcaacaatccagagattaagaagaggtcaagggaaggctccccgagcttcctaccaactggtggcgtgcatgacgccggcaaatcagcagggcagagctcggtggctacattggcaatggcagctaagcgagggaggagctgcaagacttacccgactcaagaaaagactctcaagggtatgctggttttaaaaggattcaagagcattcacttatcctacactagcttcattttagcagctttagtttcacttgttatctacgatgagggtcgaagatccagtcttcatatccgagaagttcggcgatccgaatcgattaatacccagctggggatctccaaccatatgacatatgtagcattaacccttgcatatgtcaactcgcacccgggtttctcaagaccagaacgggttcacgcgaccagagagcacaataccccaccatccagccacttgccaggtgggcacacgttactcacgccatctctccactcccagtgcgtgcgagctgttctggtattggtccggccgaggcaaagcttacccatgatgaggcatgtggccaattaa

SEQ ID NO: 1340 - DNA, 420 bp, Zea mays
  Peptide Sequence Number=SeqID_44715
atgggcagaggcaagagaggcaagggatggcctcgccgcgctgacgggaagcgcaagcgtcctccgagtccaccctcggaagacttcggggactcggaggaggtttcctccgagtatgatcggtcgcctgctccagcgtcccccgtggcgttgtccgaggactcggacgactccatggggctgtccgttgcggtgcgggcgtactggcgatccatcgagcacgctgggctcgattcctccgactgcaaggagtggagtggcggcgagggcgatggcggtgagggcgacggcagcagcggcgatgacaaccgcaaggacagctacgacgacgacgacgagggcaacggcaacaacaagggcgacggtggtgatagcaacggcggtgacggcaaggccggcggcataatgctgctggcataa

SEQ ID NO: 1341 - DNA, 1554 bp, Zea mays
  Peptide Sequence Number=SeqID_44716
atggtggtgcggcttaccgacggcgaggaaggtccggtgaagggcagggcggtcgggctcatcggcggcgtacgctccggcctgctcatggcggtattgttcaatccaatggcacatgaagcttcacgggctgctaaggatgctaccagtgcaaggaatcaaagaaaggctcactgtggagctcggtctacgtgcgccggcggtcgggtgaagtccggcgacgttgatctggtgtctccgctttcatcctctgccaaaagctcgagcggccacgaacgcttccggcgtggctcggagctggcaaccgtcgtggatttgatcttcccggggcgcctcgagctcgccggcgccagggaaggtggtgacgccagcgtccacggtcaggagatgacgaccgcgcggcagtggtggcggcgcgccacggcggcagtcaaggacaggaggagcttgtacctgagacgcgtggcggcactgcgaccacggccggcctccggggtggccgcggcggtgctgtggagccccgagctggaggcggccgtgatccgcgcgactagccatgacgagcggtctgtagactacgggaatgcggcgcgggtcttcgccctggcgcgcgcgtcgccggtgtcggtgcagccgctcatgtgggcgctggcacgccgcgccgggcggacccggtgctgggccgtggcgctcaaggcgctcatgcttgcgcacggcctacttctgcggcccgacctcgcgccacgctcggtgcgcctcggccgcattcccttcgacctcgctgacttccgcgaccgctcgtcgccgccgtccaaatcgtcgggcttctccgccttcgtgcgcgcctacttccgcttcctcgacacccgctccctcttcatcgcccaggatctagatgccgtcgccgacacgggcgagaccgacggcgaggacgcgaggctggatcacgtgaccaagcagcagcacctgctgcacctgctcctgcaaatccgaccgtacggggacggcatggagctgggcctcatcttcgaggcgatggactgcgtcgttatcgagatcttcgaggtctacagcgagatatgcacgggcattgcccggttcctcgtcgccgttctcggctcggccccgatgacgccacggccacggccgggagagacgttggcggcagcgaggcggcggagggcagtgcaggggatgcgggtactgaaaaatgccgcggagcagagcgcgcagctgtcatcgtactttgagttgtgccagagcttgggcgtgctcaacgccgccgaatttccggccgtggagcgcgtcgcggacgatgacatcagggatctcgagaagatcatcatgaaccacgtcgttgaggaaagccgcgaggacaaacaaatgaaggcgttggtcgccgtggaggaaaccccaccggcctcgaagacagtggtcacaacggagtgggtggtgttcgacgacgacgacaacgccgccgccggcgccaggccgaggaatttcgaaggttacttgaatccgttcgtcactgcgccgtgggatgcgacgccgtag

SEQ ID NO: 1342 - DNA, 885 bp, Zea mays
  Peptide Sequence Number=SeqID_44717
atgacttctcacgaatccttggaaggagggaacgcacattcccacacggacgggcttgcacgagaggggtttccccgcattttgtgggaggtcctgcagggagccggttatacgacgcctccccagtatgcagtgcagttgttcgaggagcaccgggtaccccactgtagggtgaggatgaccttggagcctcatcccttgcagccgggctggcgttcgttggactccgagtctttcgggttcagggctgaagatactatcgagtccattgctctccacgggctgacgaccttttgtggctttcaccccttggagttatcaactcatcccattggcttgttccccgctgaaaaggaggacaacccaatgtggaaggaccgagtggagcatgccaaggatgtgtgggctctttacccggggcagactgctcacctgacagtgcggtgcatgaatgccctgtatcgtctgcaagtagtgcgaggtgaggcaatgtcacagctgatgggattggtggagtctaccaagatcaccctagataacagggaggaccttgtggtagacctgtccactgaattggtggaaaaggacctccaggtggagcagatggccacccaaatccaagagcttgaggagcaagttggggccagggaaaacaccatcgaggttcttgaggatcagctcctgaccactcagcaacaacttgaggaagccaacctgcacttggatatgcaccatcatgaaattcaaggcatggaggcagaaggagccgacgaggatgtcgacatcgagggaggagaggagccggagcctgcatccagcttggacactactggcttagggagaccaccttcccccgagtctagtgttgcctcgtttgcccattag

SEQ ID NO: 1343 - DNA, 207 bp, Zea mays
  Peptide Sequence Number=SeqID_44718
atgcagcttcatatccttagaggtatgaaggcagaagtcatccttgcaattgcagacatttgcactcatgagtttgatattattttacttgctgagatgtgtcatctcactcttgcattactcaatgcagatgcagagagttatgaggttttgaatttatgggtcatgttccgtcaggttctggtggcagatcatagcgtaggctga

SEQ ID NO: 1344 - DNA, 279 bp, Zea mays
  Peptide Sequence Number=SeqID_44719
atggtggagggctcaccggagaagacgacctcaacggggccgaggacaaattcgtcgattgacaacgaaccgtctgttggatcgacaaatcaaaagcatcaggacaaagctctcgacgagacgaacacagcggtaccctcagattctaccgatgacacacggatcaaaagtaaatgctcgccggagttgtcgccggagttgtcactggagttggaaccattccgatcttcggcgagcaattccgggagtttcggatctaaactggggaagtggttttga

SEQ ID NO: 1345 - DNA, 261 bp, Zea mays
  Peptide Sequence Number=SeqID_44720
atggctgaaacagcgtatcaaatgttgccggtgcgagttcatatttatacacctagcacgctgcaacttggagggccccgactgtcattgattattgctattctagcaaagggaaggaaccttcggactcgggatgaagctatacacaatatggaaatcagggtcggaacgaaggttgaaccagcaccgaagctgcacgtaagggagcttcggctcagtagcagaaaaaggaaccgacttaaggaggaaaaggctatctag

SEQ ID NO: 1346 - DNA, 159 bp, Zea mays
  Peptide Sequence Number=SeqID_44721
atgacggcgttcgtgcccgagagtccctacgggtacccaatcttccagggcggcgtgcacagcttcgacatcgaaacgctcaaccgtagctcccaccggccaaagtttgcgccaagtcttgccaccacattcgtcgggggcgtgcttgttagagtgtga

SEQ ID NO: 1347 - DNA, 1050 bp, Zea mays
  Peptide Sequence Number=SeqID_44722
atgggcgcgattcaggtcaaggctccgtccattcaagggacacaatctcgcctcgcccgagcccagcctcgtgcaaaggcagccgacccaggaggattcacgtctcgcccgagggtcccctcaagcaacggacgcaccttcgactcgcccgaggcccagctcgagcaggcttcgcggagaagcaaccttggccagatcgccacgccaaccgaccagacgcttaactataattcaccggactgtctggtgcaccaccggacagtgtccggtgctccagaggagagcgactctgaactcgccagcttcggatttccgctccgctataattcaccggactgtccggtgaaccagcggagcaacgactacttcgcgccaacggtcgtctgcaacacattaaatgcgcgccagcgcgcgcagaggagcagagcacgcgcgggtggcacaccggacagtctacaagacttgtccggtgcaccaccggacagccaggtgggcccacacgtcagagatccaacggtcggaacccaacggcctggtgacgtggctggcgcactggacagtgtccggtggcgcaccggactgtccgcctcgggcgccacaggaagctccgcctcgcccgaccccagagctcgggctcaacctcgacgtcggacgacggacttcgcctcgcccgaccccagggctcggactcaacctccacgccggacgacggacttcgcctcatcgaccctagggctcggactcaacctcgacgccggacgacggactccgccacgcccgaccccagggctcggactcagcctcgacctcggaagacggactccgcctcgcccgaccccagggctcggactcagcctcgacctcagaagacggactccgcctcgcccgaccctagggctcggactcagcctcgacctcagacgacggtctccgcctcgcccgacccccgggctcggactcagccttgacctcggaggagcctccgcctcacccgacctcgggctcagaccgaccacgtcacaaggggggccatcattaccctacccctag

SEQ ID NO: 1348 - DNA, 195 bp, Zea mays
  Peptide Sequence Number=SeqID_44723
atggatgttttgatgattaggaatattggagaggaccagcaaggacttgggaaaggcctaggtgttgaggaggagcagcaagggcgccacaacaggaaggagatcaagcaaggattagccttcgtggcgaggtcaatcacgcagcgcacggttgataaccagaggagaagtggtgctgcgattgcggggttctag

SEQ ID NO: 1349 - DNA, 393 bp, Zea mays
  Peptide Sequence Number=SeqID_44724
atggcatggaaggtgttcggtgaggggttgcgcagcacggtggcaaggagcagaggtacacggcaggggttcttgacgtcgtgcggggcgacggcgacgggcacgactgctccgggcagcacggtttggcagctggcgctagagcgtggaagcagggggagagagagagaagggcaggtggggaggagggagaaggaggaatgggtgcggattcctggcttgggcgcggcggcggcggctagcagcagggaagcggcggctaccaggggggcggcgactaggtgttacaagtgtgccaccagacagtccggtgctgctcgcacagacagtccacaggcaacacacatcttcattcttggaattttcttggatcttcttaatgtcttcttttga

SEQ ID NO: 1350 - DNA, 69 bp, Zea mays
  Peptide Sequence Number=SeqID_44725
atgggcaagagggggagcgagggtgatgctggagattttgatggagaatttatcgacgaggaattctaa

SEQ ID NO: 1351 - DNA, 804 bp, Zea mays
  Peptide Sequence Number=SeqID_44726
atggctcaggagttgcgtggtgagcgggtggacgacctcggggcgctgaacagcgtgctgcctgacccggagccgacccctgcggaggccgtgtccagggtcgccctggagccaaccccggagaccgcggcgatcgcgacggctgcccccacatctgctgcggccggcgaagacctgcccccaaaggtggccgaaggcgcccctgatgcccccgcggctgctgtgccgagtgctgatgatcccgcggcggaggcggcggaaacaacagcagaagcggcggcggagccagcggcggaggctcccgcagcgtcagggccttcgcaggttcaagattttgggcctgcgcacgcaaccgctactgctaaatttttggcggcttcgaccgcggaaggtggtaatgaatgtggtggatctggatctgaattttctgagttttttgatgttgctgattctgggagctcggttgagtggactgaggagtcgtcggaggaggatttggactatttcgcggctttggatgtggctgcggcggagacctcgccgcacgctgcggacgcgcaagatgtgcccggtcctagcaccgggcgccgacggcgaagggcggttgcaaagcgtagagttagtacggaggaaaggtctcggcttcgtgtgagtagggctggtcggcaggaactgttgtctttgccggccgccgcgagtacaggggaaggggaactgtggagtcttttcgcgggtgaggagcttaggataatgttatttaattatagggagatgggaattattcctaaggttgagccgatgtag

SEQ ID NO: 1352 - DNA, 744 bp, Zea mays
  Peptide Sequence Number=SeqID_44727
atggagccagtgtcgaccaccgagaaatgttggatcatgcattttgatgggtcgctgacaaaggagggagctgacgagactgatgggcacgattcaggtcaaggcttcgtctgctcaagggacgcgatctcgccccgccctagcccagcctcgggcgggaacagtagtcccagacgaattctcgcctcgcccgagggcctcttcaagcaacggacgcaccctcaactcgcccgaaccccagcttgggcaggcttcgttgagaagcaaccttggccaaatcgcctcaccaaccgaccgtatcgtaggcgcattcaatgcgaggatcgcctgacgccttatcctgacgcacgtgcctcagtcggcaaggtcgaaagtgaggctgacaacagccaagttcagcctcaggcgcaacaggaagctccgccttgcccgaccctagggctcggcctcaacctcggcctcggaaggaggactctgcctcgcccgaccccaaggctcggcctcagcctcggcctcggagggtggtctccgcctcgcccgaccccagggctcggcctcaacctcgacctcgggaggaatcgcgtcatcgcccgaccctggcctcggcctcaggaggagtctccgcctcgcccgaccttgggctcggatcgaccacgccacgggggatacatcattaccctacccctagctagcttaggctacgggggaacaagaccgacgtcccatccaggctcgccccagtaa

SEQ ID NO: 1353 - DNA, 435 bp, Zea mays
  Peptide Sequence Number=SeqID_44728
atggaggaggatagaggcgagccgagcttgggtggccttgcggcggaggacgactggcgaccacagaggacgatggtggaggacgagctcgggcggccttgcgacgacgaggtgctggcggcggcgcgatcagctttggatgtgggggatggtgacaaggctggctacccgcaatcactaaggtgtaacaaacataatgacatgtcaatgcatatgatgccatgctcaaattttagttctggtaacacccggggtgttacaattaggaaccttggagatgaccatcaaggacttgggaaaggccaagatatcaaggaggagaagatagaacgttcagaacaagagaaagccaagtctgactcaacttcgtctccatctcgaagtccaggaccagtctacactaaaacggacgcccaagatgcatccgaactctga

SEQ ID NO: 1354 - DNA, 270 bp, Zea mays
  Peptide Sequence Number=SeqID_44729
atggacagtgtttacaggttggggatcggtgatggggttgtgagtcgcgatagctttggtcgtcggtctgtttcctcggtggggagtagatctcgaacttcaacttcgagggaattagagcttgatgagcaactaagacaacaacaacaacaagttcaacaactatctcaacaagttcagatgatgcagggaatgctgatgcagatgtatagtgctcagatgggatctccaatgggaccccagttcacccgtccgtcacaatccggatag

SEQ ID NO: 1355 - DNA, 477 bp, Zea mays
  Peptide Sequence Number=SeqID_44730
atgatggtcctcgcctcagttgccaccacttcatttgccattctacttcttttatctctcccctcatgcctccacctccgcgccaccccattctcggtagaggacgtaggagcatgtgcctcctccccatattcgtccgacaccagccccgacaccaactcacgcagtggctattgcacatcaagcgcgcaccatcattttcgcctcgtcggacgccccgttcgtcttcctggccttcgccctgttcttcctccccaacctgctgccctcgcccacggtcgcagccgcgagctgatcaacgctcgtcgacgcgggtacggggcgagtcggtcatgctcctggcctttctctgtgcgtgccgtcgagcatagcgtggcagcagtcgacatatgctacgaagttggtggtggtgttctatcgcttcggcgggtccagggctgggaagacactcgcattctctcacccttcttggattga

SEQ ID NO: 1356 - DNA, 576 bp, Zea mays
  Peptide Sequence Number=SeqID_44731
atgacccagattagatcgcgtgggcgcgcggacgcgactgacaagcggggccagggcgtcagcgagccagggcgggctgaccagccgggcctaggggcagagacgcgggggcgcggggaggttgctcaccttgaggggaagcgctggaggcacggggcaacaacggaggcacagggacgcgacggggcgacggtggcggagctccagctgcacaagaaccactccggtgagcgcggaccggacagaccagatagggggagggaacaccgaagggtgtcccgagtagctgacagcaaggcgaagcttaccgtggcgctggacggggcacgggcgcaacggcggccacggaacaggcggtggacgtcggcgggcggtggcggaggttctcggttcgcgtgggcagagagagagagaaggcaagagagctgggcagagggcacaaatggaggaggggaggtcgacgagcagggcgcggggttcaaaaggggcacgggggctcggtcgtggccggagaacgcgcggacgtgggggcgtccacggtggggagatcgtgggtgggaggttgaggatggctga

SEQ ID NO: 1357 - DNA, 945 bp, Zea mays
  Peptide Sequence Number=SeqID_44732
atggaagatttctatgatgtaaaactaactgaaattgatggacaagctgttagcctgtttggtgttttcgacgaagcaagcgctttcagggatgatggttcaacagcttcaactgcacttttggtgggtgaccatttatatgttgcaaatgttggtgattctcgtgccgttatttcaaaagctggcaaagctatggcgctttcagaagatcacaaacctaacagaattgatgagcgaaagagaattgaaaatgctggtggtattgtcatttgggctggcacttggagggtgggtggtgtattggcaatgtcccgtgcatttggcaatcgtttactgaagccatatgtggtggcagaacctgaaattcaggaagaacaggtcagtggtgggctggaatgcctggttcttgctagtgatgggctttgggatgttgtggaaaatgagacgcccagacccacccccgcggaggcacttaccgtcgtccgtctccggcctcctgtcgtcccctgtcccagccggccagctccaagcggccaagccggcaagcccccaaccccaacccaatccatcgatcccacattccagtatcccacaacgcacaacagaccagagcttcgattcgagagtggtggagccgtcagccgtggaggcctagaccttgtagggtggtcgacgtggatctgcagtagccaacaatctaggtccacggccgccgacatcgaggtccaccttctagagcctagatgccgtcctccacctgtactagtaccaccgttgcatccatgggacaaggacaatgatcatggcgccagcggtgctgatcttgctgttgctgcacgtccatcttcactgagctcaactccaatgccaacatcgacgtcggctacaacagccatgccgacaccaagcaacaatgcgagctctgactcaggcattgctgtgtag

SEQ ID NO: 1358 - DNA, 384 bp, Zea mays
  Peptide Sequence Number=SeqID_44733
atgtggtatcttcggactcaagtcggtatcacagcagaccagaataatacaaaggttgatacaacgccgaaggtgaacagtatccccggcctgttcacgctgattgaacattcgttcttgcgtcacgcttgtacttttatctccttcaagctgaaggtgaacagtatccccgtactgttcacgctgattgaacattcgttcttgcgtcacgcttgtacttttatctccttcaagctgaaggtgaacagtatccccgtactgttcacgctgattgaacattcgttcttgcgtcacgcttgtacttttatctccttcaagctgaagcatttgagaacaagtccccaacaaccctctagtgtgaatacaatgcccacaatatcatag

SEQ ID NO: 1359 - DNA, 267 bp, Zea mays
  Peptide Sequence Number=SeqID_44734
atgacttatttttggcctttgtttggtctcttgtcatttgggtatgcagtaaggagacagtggtcgacaatgaaggtgaagttcatgcgggttcgtgccaatggaccgagagcggcgaatgatgagtgctatgtattgaccaagggattggacaagctaagtgacttgtcgtggtggctggcaccttggaacactgatgggcatgaggatgtggaggagtggttcatgttgtcgatgtggtcgtggatcggtaggacacatgtctag

SEQ ID NO: 1360 - DNA, 789 bp, Zea mays
  Peptide Sequence Number=SeqID_44735
atgacttctcacagatcctcggacgaagggaatgcacagtcccatactaacggacttgcacgagagggtttcccccgtattttgtgggagggtgaggatgccctagagcctcatcccctacagccaggctggcgttcgctggactctgagtcttttggataccgggctgaggatactatcgaggcgattgctcttcatggactgaccaccttctacggattccacgccttggagctgtccactcaccccattggcttgttccccgcggagaaggaggatgacccaatgtggaaggaccgagtggagcatgccaaggatatctgggctatctacccaggtcagactgttcacttgacggtgcggtgcatgaatgccctgtatcgtctgcaagtgatgcgtggtgaggcaatgtcccatctgatggcattgttggaggcgaccaagatcactctggataacagagaggaacttgtggttgacttgtccactgagatggtggaaaaggacttacaagtggagcaactgtcaaatgagatccaagagcttgaggagttagcgggaaccagggagaacactatcgaggttctcgaggatcagcttatcaacactcagcagcaactcgtggaggctaaccagcatctggatatgcaccaccaagagatccaggatatggaagccaacgaggatgtcaacatcgagggaggagaggagcctgcctccagtttgaacacttctggctcagggagaccaccttcccccgagtcgagctttgcctcgtttgctcactag

SEQ ID NO: 1361 - DNA, 356 bp, Zea mays
  Peptide Sequence Number=SeqID_44736
caacgccgtcaccctcgcgcaccgcgccgtctccccctcgctcatgggccgccgctgggccgtaagcgctcccgcgcgcgcgctcgcgcccgaggcacccaaccgcacccagtttccagttcagaggaacaatcagccacagcagcagcagcagcaatatcgtcaggccaatgacaacatgtgtttcacttgtggtaacaccagacattatgccaagaattgccccaggaaccagcagaggcagggacaaaatgccaaccagaatcaaggcaagagacagaaggtgcaagtgaggcaaggcagactgaacttcaccaccatggctgacattccagagggagcacccgtcatgactg

SEQ ID NO: 1362 - DNA, 453 bp, Zea mays
  Peptide Sequence Number=SeqID_44737
atggacgtggggcccaacaaccggatcgttcgtggatgggtcccgcagagaagtattctggcccacaaggcagttggtgggttcatgagccattgcgggtggaactttgtgatggagagccttgccgccgggaaggctggcgctgacgtcgtcgggatcgcggaagtggaggagaaggttcgggagctgatggacgttgaatgcaaggcggcaaagtggatgctagagagggccgcgtgggcgcagcaagtagccaagtcagcggtgagccacagtggaacctcggccacgactttgctcaagcttgtggaagagctacaggagacctatgatgatggggtcattctgacagctccatcggtgttgaagccaggtcacagaaagaaccacgacctttgggcccttgaattgagttcaagcatgagggaggattatttatcatcatctatttga

SEQ ID NO: 1363 - DNA, 306 bp, Zea mays
  Peptide Sequence Number=SeqID_44738
atgccggagcacgtggtggtcagggcgaaggaggttcccgatggggtcaccaagagggccgaccccgataacccgttcacgcgcttcttcatggacgagatcggtgattcggactcgttctacgaggcggccacccgtgcctggctcatgggcccgctgttcatggccaccggcgacatgccgaacaacgagaagaaggagcaagaccctaagggctatctctcgtggctcgacgagagggcggcgcatccggggtcgatggtgtacgtctcgtccgggacgcaggcccacatcatgaacgcgtag

SEQ ID NO: 1364 - DNA, 2034 bp, Zea mays
  Peptide Sequence Number=SeqID_44739
atgcctgttgggcctcaactttgtttctcggcccaccaacgaattacacccgcggcggcccaactcccgctctcgcgcagcctggcgctgacaggccggacccgcgcatcagtcgcaccctcccgcgccgcgttttctttcccggtcactaactggtgggctccgctcgccgagggcgttcacagtcaccgttgcgtgggacccaggcgtcagcccgccttctccgccagggccgttgcaatggcgcccggctcgggcactacttcgcagctgtcgctggtgagaaaaccctttccaactgtttgtcgcattctcccctacgtgcagttcgttcgtatcggggatttgaacgttcctgtgtcaaggtcaggccgcgaccacgtcgtcatcttccctttcatggcgaagggccacatgctcccgctgctccacttcgccacggcactctcggcgcaacacggcaggctccgcgtgaccctggtcaccaccccgggcaacgtggccttcgcccggagccgtctgcccgcgtcggtgggcctcgtcgcgctcccgttcccgtcgttcccgccgctgccggagggcgtcgagtccaccgacgccctcccgtgcccgtcgctgcacctgacgttcatgcaggcgacggggctcctgcgcgggccgttcgccgagttcctggcgtcgctcccgtccccgccgctcgcgctcgtctccgacttcttcctcgggttcacgcgccgcgtggcggccgacgccggcgtccgccgcatcgtgttcaacggcatgtcctgcttcgcctcggcgatctgcaaggcgctcgctgcgagcccgccgaccagcttcgagcccgggaccatgatccaggtgcccggcatgccggagcacgtggcggtcagggcggaggaggttcccgatggggtcaccaagagggccgaccccgacaacccgttcacgcgcttcttcatggacgagatcggtgattcggacgtgcgcagctggggagtcctcagcaacagcctcgacgcgctcgacgcggcctacgtgtcggccttggagtcattctacgagacgggcgcccgtgcctggctcgtgggcccgctgttcatggccgccggcgacatgccggacggcgagaagaaggagcaagaccccgagggctgtctctcgtggctcgacgagagggcggcgcatccggggtcggtggtgtacatctcgttcgggacgcaggcccacatcacggacgtgcagctggacgagctggtgcacgggctggtgcagtccggccatcccttcctctgggccgtccgatctgacacgtggtcgccgccggtggacgtggggcccaacaaccggatcgtccgtggatgggttccgcagagaagtattctggcccataaggcagttggtgggttcgtgagccattgcgggtggaactctgtgatggagagcctcgccgccgggaagcccatgctggcgtggccgatgatcgcggagcagcacctgaacgcaaggcacgtggccaacatcttaggcgccggcgtcaggatagccctgaaggttggcgctgacgtcgtcgggagcgcggaggtggaggagaaggttcgggagctgatggacgctgaaagcaaggcggcgaagcggatgcgggagagggctgtgtgggcgcagcaagcagccaagtcagcggtgagccacggtggaacctcggccatggctttgctcaagcttgtggaagagctacaggagacctatgatgatggggtcatccccctcggtcgtctccccctccgaaacacgggcagcgcggtacgcggtggggacgacttcttgatgccgatcctggtggacgagaacgagggggagtccatcttccgcaggttccggcgggaggtgatgcgcgccgacgtgctgcaggagatcaagcgtcgccggaggtacgagagcaagacggacgagaagaagcgcgaggcgcgcgaggccagacgccgcaactgtcgcaggtacgaacatggctgtgtttcccttgatgctgcatag

SEQ ID NO: 1365 - DNA, 936 bp, Zea mays
  Peptide Sequence Number=SeqID_44740
atgtcctttgcctccctcgtcacctacgagggggtcgtgaatgctttgtcccgcgaggggtgcgggcactttgaggtcttcgaccagtcagacgaaggcttcgaacgtgaaatcttccaggtcgaggacccggtgctgaagcggtcggcgggggcgctcttcgacaggatgtggggccctcacggccgagagacggtccgggagaggtccgaccgggcgattgatcagatggcgcacgacgaagaggttgaggatcttggcgatctggacagcacgctgcccgacagcatgctgcccgaggcattgggggtggagctggcgctgccatccgatgcgagcaagggccccttggcgacccccgcaccgactggagttggcgaagaccccgcgccagcccctgcgctgacgggtgaaggcgcctcgaaggcaatgggcgaaccagctgccgaagaccccgcggcagtggccgggccttcacaggttccgatgtttgggcctacgcaagcaaccgctgctgacaatactgattttgtggcggcctcaaccgtagtgcctgtcgacgatagtttgtttggttctgtgtctgagtgttttgagtctgatggtgaatctgggagttcgtttccttggacggaggagtccttggatgaaggcttggattattttgttgcgttggatgtggctgcagcggagacttcgccgtgtgtggagggtgcaggggatcttcctagtgcgagtactgggtataggcgacgaagggtcgtgggaaaacatagtgtgggtgaattttcgcgaagtggtaggcaccgtcatatggggatggagcgtggtcgtctccgagtagaccgggttggtaaacaagaattgttgtcctcgccgattggggcgagcataggcgagggggatcttcggaagcttttgagggtgaggaattga

SEQ ID NO: 1366 - DNA, 456 bp, Zea mays
  Peptide Sequence Number=SeqID_44741
atggagaaagatcgtcaagatgcggcgcggaagcgccgggcgatcactagggtcggggaccctttccgcgaggcgaagaaggcgcggggaggcgcgaagtctgccgcccctggcagtagcaaaccaccgccggctgcgaagccgaccgcccccgggcctagcaagtcttcgtcaggtgcgagggctgctgcttctggtgcgggcaagctgccctcggtcgagcccgcgaaggagcgaaggccaccgtcgccggcgcgcactgacgtggcggcgacgcgtgttgccgattttgacacggacatctacgtgggggattatctcgttgataagcggccgccttcgccgaccatgtgtgcatcggatgctctgacttcggagtttgctactgaaatcgagcgtcttcgggcgcagcatacagatgttgttcggctgcggaaaacaaaagccgcaggctga

SEQ ID NO: 1367 - DNA, 885 bp, Zea mays
  Peptide Sequence Number=SeqID_44742
atgtcgtcttcttcctcgtctgctgcaaacaggccgccggccgattcgtcatccgaagataccttgagcgatttggcggcggcggagttacagctgggccatatggtggagttcagcgttttgaggatttccttggttcgcgtgcaggatatgcagcagttggggtattttgggaacgacgttgggaccagaaagacttcggtggaagtcgtagagttagttccctgtgctcgcaataactggggcaactggtgggattactggttttatgtttccgggagcaaagtcgaagacctcccaaggctccctgcggccgtgatgtgctcccattgttatgtggcgttcctacaatttgaggtggcggaggatgacgaggacgaaggggccctccgatgcgctgcccgcatgagcagtgggcgtgatttggttgaagagttcattggttatggagtgtggcccctggcgcatggctgggtgctgggcgaagtatgccctcgccagatgcctactttgggccagcagctggtgcgaagtccggccttttctttggatctgcgcggtcgagacccgaccgtgttcgttcgtgaagtggaggatggggcggtgaggattgtggggcagtatgcgccgaggacagagggtctgcggagttgggatatccgagggtccaatgttcgcttgaatcgggtcttcgaattaaaccgtttgccatacgattgttatcctggagatgacgctgctgcggctgctgaccgccgcgggaaaaaaccagtggccgtggctgaggaaggcccttcgcgggaggctgccccagccactaagaagaggaaaataggtactgcagtgggggttttggggtctctgatcattttgctatggagttga

SEQ ID NO: 1368 - DNA, 390 bp, Zea mays
  Peptide Sequence Number=SeqID_44743
atgggctctcccacacggccgcggaggactaccggtgtcactctcctgaatcctgatgctgctgttcctgttgcctccaacacagttagggctaacggcgcctccgccacggcctacggctctcccgcgtcccaccatggcgcgaacggtcccagcaacggcgttcctgtgtcaaggtcaggccgcgaccacgtcgtcagcttccctttcatggcgaagggccacatgctcccgttgctccacttcgccacgacactctcggcgcaacacgggaggctccgtgtgaccctggtcaccaccccgggcaacgtggccttcgcccggaaccgtctgcccgcgtcggtgggcctcgtcgcgctcccgtttccgtcgttcccgccgctgtcgtag

SEQ ID NO: 1369 - DNA, 2046 bp, Zea mays
  Peptide Sequence Number=SeqID_44744
atgatacaaaacccgtcttatgctgagcttcagaaggctgcaaatcaaggtaggagatgcacttgggaaaagttatcagccatcagggcaaattgtgctattgagcttgcactggatgaatgtgttgccctcctaaaccacttgcgtaggctaaagaggagtgcagaaagagcatccgcatcgcaaggatatggtccagtaatcaggttctgcccatctaggaggattccatcctggaatctcatagcgagagaaaattcaactggttctcttgatgaagaaatgctggaatctcctcatacaaatcatcaaggacctggaggagttgctggaacatctactagaaatcggtattttcagagaaatgcacacgagagcagtgacagtgaatctgagagtattgatttacactcttggacaagaaatggtggccctcttatgaggacagcctcagccaataaattcatcagcttcgttcagaatcttgagatcgacacagaattcagaacaattccatcgagggaaaacctaactgatcttgtgacaccaaatgctggtagcttggcagctcatgcagtgaatagagaagcaaccgataggagcttggacatttcagctttagatatccatgataccgctacccctagatcgacatttggccgttcaacaagcatcgttgtttctgaaggtgacttgttgcagcctgaaaagattgaaaatggtattttgtttaatgttgtaaggagggatactctgctgaggaggtccttcgttgacgatgacatgactaggtccgcttgggacattgtgcagtcgtttgctcccagggaacagggaagtgaaccgggagagcgtgtggacactcgttgcaattcggacacagaggaagagagtgaggctgaggatggggtggcagctgtggagagcgagctgaaagagttgaggataggagagaccttcgaggggctcactggaacttcttcattgtcaacgacaaatgatgatgatgcgtccagtacaaccacggaggccatgttcatcatctcactgaatggcaagttcaagcgtaagattaagtcatggatgcgtggtgctcttctgggaagcggctcatttgggatggtgtacgaggggatcagtgatcaaccaactgataaaccattcaggactgaacacatgaggcgtcttgaatttgccttctggttcaaggtaagcacgccaccgcgacgtagcggtgggaggaggagcaggatagggagaagcgagacccacaagcgctggcttcgacgagagctgggcataaccaatgatgtcacgtcgcttttgcagtctggagcttcgtcgaggtgtgctggttgtcaaggttctggcttcaaggtccaaatccggcagttgggacatggaatgattcagcaaatgcaacatccttgcaatgagtgcaagggttctggagagaccatcagcgataaggatagatgcccacaatgcaaaggtgttaaagttgtgccagagaagaaagttcttgaagtggtagttcagaaaggtatgcagaacgggcagaagatcacattccctggcgaagctgatgaagcgtttgttctgactcacttggataacaggcagctgctgatcaaatcgaaccctggcaaagttgtgaaccctggcgaagttgtgaagcctgattctttcaaggcaatcaacgatgaaggcatgcccatgtatcagaggcccttcatgaagggcaagctgtacatccacttctcggtggagttcccggactcgttgagcccggagcagtgcaaggccctggaggctattcccccgcccaagccagtatcacagtacactgacatggagctggacgagtgcgaggagacgatgccctacgacgtgaacatcgaagaggagatgcagaggcggcagcagcagcaccaggaggcctacgacgaggatgatgatgtgccaggcgggtgggcagagggtgcagtgcgcccagcagtaggcagcttgcggcaaatttgctgtttcgctttgggcgactattga

SEQ ID NO: 1370 - DNA, 114 bp, Zea mays
  Peptide Sequence Number=SeqID_44745
atggcgtcgacgtggggtgcgctgcgcagatcaatatctctggcgtcgaagaggcgggagtgggggtggtacgacttgtacctcctggtggtgctgatatgcgtggttgggtag

SEQ ID NO: 1371 - DNA, 291 bp, Zea mays
  Peptide Sequence Number=SeqID_44746
atgacaaactcaacttccctatctggtggcatccgggggtgctggcaatcctctgtggacaaacattggcatattgcccaacctgaccgcacttgtagcatgtggtgcctgcactctgtcctgcgaatctcgctggggtgccagtgggagcagccggacgagtatgtggagtctatggagtcctctatggtgcaaattgagatgggcactaacctcctccagtacgagccaatgtaccctagggtggaacatagcgaggacgaacgctactgctcccctgcccctaggtga

SEQ ID NO: 1372 - DNA, 378 bp, Zea mays
  Peptide Sequence Number=SeqID_44747
atggtgggcctctctgaaggggagaaacacttcatccgcggcggcattgcacaagacgttcgcactgatggacgtaggcggctgcagttccggtccctctccgtccaaaccggagtcattccacaggcgaatggctcagcgcgtgttaggttgggggccactgaaataatcgctagtgtcaaggctgaactaggaaaaccaagcattcttcaccctgacaaaggaaaagttgctatttttgtcgactgtagtccaaccgctgagcctctgtttgagggtagaggctctgaagaattgtctgctgagctctctgtttccctgcaaagatgcttgttgggtggtaaaagcggtgctggtttttggggagatttcatttag

SEQ ID NO: 1373 - DNA, 195 bp, Zea mays
  Peptide Sequence Number=SeqID_44748
atggagatgtcagagcggaacagtgctgcgcagaagtcagaagcacagaagtcagagggcaccagactgtccgggaaggatggacttgccttcgtcgaagctttcctggcacaaaagatctacttccgggagatcgggctccggcccttcttccggggctacgggttccgggccctcggtccccgcttcttctag

SEQ ID NO: 1374 - DNA, 438 bp, Zea mays
  Peptide Sequence Number=SeqID_44749
atggagtgcgggtggaggggacgggatttgggaacggacaggaggggaagtggccagtgggtggggtcaagacaggcggcagacctaggcagctgggactgggactgggaggactggccgcctgggaggctgggactgccggactggccggctcacggctgctgccgcctgccgcctggagtgaggacgccacccgatgctgggaagattggccgtctgggactctgggagtacgccgccggccgcctgggaagacttgaagcgcgtgggagtgggaggctgggagctagggttgcgagttgcgacatcaggccatcagggatatcaactgggcgtggcccgtgggctgtgccgctgttggactggcggttcgtgcagaagcgtaggatcactgcctctggcgaccaagaacgcaccagaacggaaacacatctctaa

SEQ ID NO: 1375 - DNA, 209 bp, Zea mays
  Peptide Sequence Number=SeqID_44750
ggatcgtggacctccacagggacgtgcagacctgcgggtaccacgacgtcgaggtgatgtggggcatgctgggcctggacgccgggccgcccagcgcgccggagcgccggaaccgctcgccgccgttctggacctggacgccgtccttctggcacttcgggtcgtcgcgccgcacgcccacgcccacgcccacgcccgccgcgcggtag

SEQ ID NO: 1376 - DNA, 1359 bp, Zea mays
  Peptide Sequence Number=SeqID_44751
atgacagcgttggatgccgacgaggacgacgagctcatgcaccaggagtataggagtatgattggctacctccttgggtgcggccgagtggtgatcgacgagatcgaacaccaacgcgctctcatggtcgacctgcatgaccttatcctaccaatacttgatccctgcagtaggcaggcgaagcatgttcagcagctcttccaagatatttccagctcctcaagcaaggtcatctccttcgtcctcgagcttgctgacgataacagtaagaaacagcaggccagtaaagttgtcaaagacagaagaaaagcaggtggtaagaatgtcgtggagagccacatgttgttggaggaagctaaagaaatcgggaaaaacagaagatctgtcgcggttagtagcaccagccaccacggctccaagatgagcaatgcggtggcctcgctgctggcgctggcagtggttagagcaacctgtcgaggaagacctccatcctctctcctcctcgacttcccaccccttgcgccgtgcgcgtaccactcaccaccggccgtcagtggaagaagatccgttgtggttagcagcatgtgctaccacggctccaagatgagcaaggcgccctcctcccaaaccaaggcggatccccgggccccggcgttggcactttcctccacaacgaacctagccaacttgctcccaaccggtgtcctgctcgccttcaaccttctggctctcaagtccccattcgacggttgcgtctactacgtcgtcaccagctgcaccggcctcaggctcctcaactacctgccagacgcgtcgccgctgcccgagggagtcaccaggcgttccccaccacaaggcacaggcacacgacatcggatacccatcgtcgccaacaccgtcgcaaagaactactatagatgtgccaacagtaaagaccaagggtgtcctgcaaccaagacagtccagcagaaggaaacagacgggagcggcgcagtgaagttgttcgacgttgactactacggccagcacacttgcaacaaggacggcgtcatccatccgtacgttgttgacacagcacatgacagcgtgccgaccgtcgaccacaaccaaagctgcagcaccccaacgtcgtctgctcacaacaacggtgttcatggaattcttcaggatgacgaaagcttcgagaacctgttcatggtgccaagcataccagaacatctgacggatgaaagcttcgaaaacctagtcatggtgtcaagcataccagagtattatctggcagacttcacagatgttgaaatggccgaaggggcacttgaggttgcctctatgatgatctctgaagatatatgggcgtga

SEQ ID NO: 1377 - DNA, 384 bp, Zea mays
  Peptide Sequence Number=SeqID_44752
atgccactacgagcagcagagaggctgcttcaagaagcttgtttggttgtgagttgtgacaccggcagccggatgccattatatgatgatgcagaatatgtggtatttgaagatccagaacagtttgaggacccatgccatgatcccgatgaaatcgcattgcttgggccagtttcagagtctttagataatttccctccagacttggattgtggattcatcttgagtgatgttgtcaaggaatcacatgggaggccttcaccaattgagtctcctctctctaggtctcgtatggttgaagaaaatcctatgaagcctctgcacttgttttcaattgagtctcctctctctagatcttgtgtggagcacgccattggttcatga

SEQ ID NO: 1378 - DNA, 1203 bp, Zea mays
  Peptide Sequence Number=SeqID_44753
atgaaggttgcagatctacaaaatcaggcttatatgaccgattctaaagatctcaacagtgtttctccaaagaacgacacaaggctgactaatttgtcggtcgctgagcataagaaattagaagatgacatgaagaagctggtcgaggagagccagcgacaacatgatcagggtactcaaggtggcagagaggtgttctgcatgcatggtttatttcaccgtatggacgactgtgacgaagagcaacgtcgttgcgcagtgggctcggagacggagacggtcaacgtggaaggcatcccgttcccggcggagatcaccgtcggcaaccctctctccctcctaggcacaggtatcacggacatcgagatccacttcctgcagatcaagtacaacgccatcggagtctacctccacaacgccggcggcggcgacagcaccacgcccacgctgctgggccacctcggggcctggaagggcaagacggcggaggagctcctagcggacgccgccttctgggccgcgctggtcgcggcccccgtcgagaagctgttccgcgtcgtggtcatcaaggagatcaagggctcgcagtacggcgtgcagcttgagagctccgtccgcgaccgcctcgccgccgccgacctctacgaggacgacgaagaggaggcgctcgagaaggtcgccgacttcttccagtccaagtacttcaagccgggctccgtcgtcaccttccacttcccggcaccggcctccgcctccccgggacccgcggcggagatcaccttcgcgacggagggcaagggcgacgccaggatcgcggtggagaacgggaacgtcgccgggatgatccagacctggtacctcggcggcgactccgcggtgtcccccagcaccgtccgcagcctggccaaccgtttcgccgcgctgctcgccgtcgccgcacctccggaaaccccgtctccgcaaaccttcgcgatagccatgtccgccacaaacatcgtcgccgcaaaacgcccgcccacccgcctcccgccgctccgcctgcccgccacagctcacgctccgcgaatcccgcacgcccgcctgcgcgaaaccctcgcctaccacacgaacgtcgcccgccacgaagcgcccgcgcgaagcactcccgccgccgcgaatcccgccaccacccgtcgtttgaggtttaacatgagggggcgctag

SEQ ID NO: 1379 - DNA, 279 bp, Zea mays
  Peptide Sequence Number=SeqID_44754
atggcactcggcaaagaaggaaacctgggaaccggcaaagacatctttgccgagtgctgttgccaaggcactcgacaaagatactggcaaaggggcccacttgagggttctttgtcgagtgccagtccaccagacactcggcaaagaagccttctttgccgagtgcctattagagctcttggcacagggactggcggtggggtccactggaccagtctttgccgagggcctctcgagcaaacactcggcaaaattggcctctttgccgagttgcactga

SEQ ID NO: 1380 - DNA, 804 bp, Zea mays
  Peptide Sequence Number=SeqID_44755
atggatgatcaatatgatgtgactcaagaatggcttgatagggtgaagatagcaaggaaagggcttcgaggaactaagcgaagaaacttgagagcgctttactgcaggttttacacagcaccagactcttatgcaagcgctttaggtattgcaaaaggcattgataatgtcattctttcagttatctgcaccgccactggtgtcctcattgcagcacttggagatttttcctttgacctatatggatactgcatggctctaacatcagtcttcttccagactatgtatttgattctggtggagaaatcaggtgctgaggatggtctttcctcagtggacttgatgttttacaacagcatattgtcacttccatttctgtttttcctcattatagcaacaggagaattcccccattctcttacagtattatctgcaaaggcagcctctctgatgttcggtgtcattctcgttatctcgctggtgatgggaatcgttctcaatttcactatgttttggtgcacaattgtgaactctgctctgactacaacaatagtaggagttctcaagggtgtcggatcaacaaccctcggtttcgatctgttgggaggtgtcgaagtacttgctctgaatgttactggactggtgatcaacacatttggcggcttatggtactctatatggatgccccaactacttgctgccatgcccctatatggatgccccaactacttactgctatgcccctatatggatgcctcccttattgtagggcaccatggccatgggaccaccacaccgccgtag

SEQ ID NO: 1381 - DNA, 175 bp, Zea mays
  Peptide Sequence Number=SeqID_44756
ccgtgctcgcggttatgagcggccaagggagctccagagattagtgatacttgatcagagatattttggtacaggtggttatgagattgatggttccggttatgattatggtgctggcgaagatgaagctgtggaaggagacttccaggagttccaagattacgacgagttctag

SEQ ID NO: 1382 - DNA, 763 bp, Zea mays
  Peptide Sequence Number=SeqID_44757
acattatggtacaggtgactatgagatcgatggttctggttatgactatggtgctgagatagagtccgtgaggagctgctcccctgtgcttcccctggaggcgccccctgcaccatcactgggcgccccagcttctggagtagctgctggaggagacccagacgacggaggcggcgacgacagctcgagccacgacaccgacttctctgctgaccatgagccggaaggatgggttgctcgacccatcgctcgcgacgctgctcgcgggtgtcacttccacgatgcgctcgataccctgctacgtcgggcacttaaccggcaggcctgctcagagcactattctatctctgagcgggactcagctgaggcagccatgcaagatgctgcacggcgtgcgctttcgcactactgctcggttctcggtggggtagctgacggtctcgacctgaagtattacccccgtcgtccatctggcagcacaggaggcgtgattgtctcacctgtcggtgaggacaatcctaggttgagcagcacagtcaacctagccgccgtgctaaacacagagctggaccatgcattagacgagctgagtagggctcgtgctgagatcgccctgctgcgggctgagcgcgtggaacgtcgtcacctggacgatggttctcccgctcccgtcgggactcagcacccgtaccgctcacctcggcgtggacaccagtcttatggcaatcccgactgcaagaccaagataaatctaggaccatag

SEQ ID NO: 1383 - DNA, 960 bp, Zea mays
  Peptide Sequence Number=SeqID_44758
atgaatggcggcaaccacccccgcggcggtgagccctctttctcgcagctcctccaaagccttcaaaaggggctggagattcttctgtctatcgcgcggagccccgtagcgccagttctcgctggcggcggtcaccactcgttgagaaaacgacgggagcctcccgtcgtcatttcagagataaaaccaccggcgctgccaccctttgttcgaagacgcgaggatggcagggatgtactgcagcgcccgcgcctgcctcaactggaggatgcagccgccagcccgcaccgccatgcgaactcttctttcccccgtcggcgaggcaaaaagctccgcggagaagagatgggtccacaggtcccagtggggggcaatccccaaatatccttcgcaaaccgccgcgaagatggctgcttgcgagatggagttgggactgaggttgtgcagctccaccccatagacgtgcagaatcgcccgcataaaacggctcgccggcactccgaacccccgctcgtgaaaggagacgaagctcaccacaaaccccggtggcggggacggggcggctccgctcggaggggccatccactccgactgcgagtcaccggagagagggcgaagcaaaccatcagcaacaagggcctccagggaccgggaaaggggatactccgaaagggatccttctccgtgaaggaagcgggccttgagcccccctactcatcagaggttcgaaggctggcccctcggaagggttcaacagccgcctcagagcactcgggctccgcgcccactactggtcagagagggaggcatcgtgatgaggacatcactatgagtacgactacaccagtagcacctccacatcaagcgccacttccttcattagctgggccaatcactcgggcccgtgccagagatcttaacttcgtcatgctactgaagaatgagggcccagaagaatag

SEQ ID NO: 1384 - DNA, 375 bp, Zea mays
  Peptide Sequence Number=SeqID_44759
atggccttgtcatcaggttcagcaagagagctgtcgccactggagggagacgtggaccccggagacaccaagtcgcagtggaaatgcttccggctgtgggacaactactgcgtgaagaacaagagatgcgtcgacgagtgcctgggcgtcgaggggaagggctacacccacggacactgcgagctgtggacgtgcatctgctgcaagaagaatgacaatcaaagaatgagacctttttaccatgctccaatcgatatgcttgtgtgtcccccatgcatatgggacaacacagtcgaccgtgaacacactagccagaccaaataccatatgcaggcaaatcatgaattgaccacaaatatgccgcacgtaaggtaa

SEQ ID NO: 1385 - DNA, 360 bp, Zea mays
  Peptide Sequence Number=SeqID_44760
atggaggacgatagaggcgagccgagcttgggtggccttgcgacgaaggacgactggcgaccgcggaggacgatggcggaggacgagctcgggcagccttgcggcggcgaggtgctggcggcggcgcggtcagctttggatgtggggcggggggcgcgtcagaagtatggctcaaactcggttttcctctcttcggccgagaacaatcacatcatggcagaagctgaaggatatgctagtcaccagcttccagggcttccaaacgaagccagtgatgctcaagctctattccaatgcacgcaagaccatgaggagtacttgcaggcatacgttcgaagattcttgcgactcagagcctag

SEQ ID NO: 1386 - DNA, 215 bp, Zea mays
  Peptide Sequence Number=SeqID_44761
atgcggcctcggattggaatgttcaagcacaacatggaaagcttatcaagtctactttcatatggatccagaattatagtcatatctgttctgaggccgccgacgagtgccctagtggccagggtgtcacgctccacaagatcgtgacagccataggaggtggtatatcggttgctaaggcgcagcgtctttggaaggctgtagtcgggccgtga

SEQ ID NO: 1387 - DNA, 231 bp, Zea mays
  Peptide Sequence Number=SeqID_44762
atgtcatctggccgttggattccgaccattggagcttctgtcttctgggccaccggtcaagcactgttcagtgtccggtgcgccatctggctcttctctgactctggcgcgcactgtagcgcattcaatgcggttgcagacgaccgttggcgcgaagtagccgttgctccactggcacaatggacagtccggatcaatgtgcccaagaacatgattaaattgggatcataa

SEQ ID NO: 1388 - DNA, 1074 bp, Zea mays
  Peptide Sequence Number=SeqID_44763
atggccaccgcggcgaagctgccgtccctctacgccgagctcgccgccaagtcctctcgcgtagcggagctggaggtcaggatctcggccctcgaaaccgagaatgcgggcttgaggggaggagctggcggaaaggaggaggacccaatctctcgccaattagcggaacacctacgcggaatcgagcacggggcggtagagaagccgggctggggcgtgactcgccgcgacgcatttgaggtcagcgacaacgaggagggcgctgcggctgtcggtgctaacaagggggaaagcccggacaagggtgtcggtgccgtcccggctcttcggaagcgggtggtggctggagagagcgtgggtgaagctgaagcggatgtcgcacatgttctgcaagacgctcacgggcctccgacaccagcacgcacggtggcttctccgtgccgcgccgcgccgccgaggactgcttcccgccctctggtacgcttacgttggcttggaaagcttccatcttttcgtgtccgggtgctactcttaagggcagccccgcagacaactggatgcagtgcctttgtcaacaagaagaagcttgtctcaagggacgccgtactatttttgaggggtgataatggggagctaagacttggagtgcgccgtgcagctcagcttaaaaatggatctgctttccagctctttataaccagtgctcaaattggcagtgggagattgttggcctacatttctgcctgtcctgggcagtgtggccgagctgatggctacatcctcgaggctaacctacaggggcatttccttttattgaccagctacatccttgaggttccagaggtaaatgtcgtcgtcgctggtgaagaacgagccctacatgtgtgctgtcaagatctacctcaagagcctagacatccaaatggagaaacagctagccaagacatggagaagcacaaggggtcgtacaaccagggaccaagggaggacttggagatcgacctcgccaagcttctatcaaccaaaagaaaatcatggtcctcaacagatagcagaacatcctatttgaaatga

SEQ ID NO: 1389 - DNA, 294 bp, Zea mays
  Peptide Sequence Number=SeqID_44764
atggccagcccctttcccgtcctcctccgttcgatccaagccctcagacaacttcctgactgtaaccttgctgacggagagtacgtcctcgtgccggtgcaaggagctgctcaggaggtagccccggatccagcccagagcctgcacccgaggacctgcctgccactgctttggaaggcaagccccggttctctggaggacatggttgctggagtgacttggccgtccatcttgccaccgggctggactgtcgagtgggaccccgcctcggctgaggaggagcatgaggagtga

SEQ ID NO: 1390 - DNA, 144 bp, Zea mays
  Peptide Sequence Number=SeqID_44765
atgaatagacgggattattggaaaccagaacatgaagtgcggacaggacgaagcctgaaccagacgaaggacgggctgattaccaagctccacgaaggatggtgcacagctgaagctgtgcgcagggaagcttcgtcgcgatag

SEQ ID NO: 1391 - DNA, 210 bp, Zea mays
  Peptide Sequence Number=SeqID_44766
atggcagaagcaagcttccacgtgttcgacgcgagctggcaaccgggggcgcgctcagagcacgcccactgtaaccttgctgacggagagtacgtcctcgtgccggagcaaggagctgctcaggaggtagccccggatccagccccagagcctgcacccgaggacctgcctgccactgctttggaaggcaagccccggttttatgcataa

SEQ ID NO: 1392 - DNA, 402 bp, Zea mays
  Peptide Sequence Number=SeqID_44767
atgtccggtgcaccagaggactccaactccaactcgtcaccttcgggaaattccaaaggcaactccgctataattcaccggactgtccggtgtacaccggacagtgtccggtgctccaaggaagagcggcctcaggaactcgccagcctcgggaattcgcttcggctgctccgctataattcaccggacatgtccggtgtacaccggactgtccggtgtaacagcggggcaacgactacttcgcgccaatggtcacctgcaacagcaattaatgcgcgccagagcgcgcagaagtcaggcacgcgcgtagtggcgcaccggacactctacagtgtatgtctggtgcgccaccggacatccaggcgggcccagaagtcagagctccaacggtcggaaccctaa

SEQ ID NO: 1393 - DNA, 528 bp, Zea mays
  Peptide Sequence Number=SeqID_44768
atgtggcctaccatgcgtgacgtaagcccatgggcagagcctgacgtaagacctctgggccgcgctgtctctgcatttattgtggagaagacgcgccgcctgactaccccgctgacaagtgatgtgccctttcagcatttaaagtgtcctgtccactcagctggcaggcggcgtctaggccatcctgcaggcggcgtgcctgtccatcccattgccaaacagtacgcccacgctgcaaggtgcactgtgcccgtccaccatcactcgtacattgccagggaatcttcccctgcacgccaatgctacacagatcgcggatatcagggcgcaaggaagattgcgctggggatgggcactagtcactccaagtattacatccgttatgtccctaggcccacatgtcgaggctcaacacccatgtacgtgccccccttggactataaaagggagggcacgcaacgttacagattgatccagactcaagccatcctagacacaactcaagctcatgagcaatacaacacatag

SEQ ID NO: 1394 - DNA, 462 bp, Zea mays
  Peptide Sequence Number=SeqID_44769
atgggcaagaacaataaacacaagcgtgagccgactcctccgtcggaggatttcggcgactcggaatactcggaggaggagttctcctccgagtccgagggatctccggctcccgtctctcccctggcgtcgtctgatgattcagacgactcccaggagattgccgcggaggtctggacgtacatccgggccgtcgagcgatccgggctcaagggctcggatgagtctgcgttctcctcggacgaggaggactcggacggcggcgaggacgaagatgacgatgacgacgacggcgacgacgacgatgatggcgacggcgacggcagcaacggcggcgggggcagcggcggcaggggcggcaccagaggcggtagcagcacgggcagcaccagaggcggcagcagcaagggcagcaccaggggcggcggcggcaagggcagcaacagcaaggccagtggctaa

SEQ ID NO: 1395 - DNA, 162 bp, Zea mays
  Peptide Sequence Number=SeqID_44770
atgcggtcactgcacggcggcagccggggtcagtggagcattgaatgccaaggcggtaccatgcaggatgtagttgatggtgtgacttggcctaccaccctgccaccgggttggacggtcgagtgggatgttgctccggcaggagaggagcatgaggagtag

SEQ ID NO: 1396 - DNA, 1494 bp, Zea mays
  Peptide Sequence Number=SeqID_44771
atgacgatgtcgtcacaagaggtaactgtagaacttctgttaggcgatggctctaattacaagtcttggtctgtctctatttataatgctttcatgagtgttgatcctgatttgagacaggtctttagtagaagtatttttccctttaatgttagtaaaaatccttctaatgatgaactaagatgtctatctctaaatcaccatgcttgcaacatcttagttgattctctttctagagatgcctattttgccatcatgagtagtgataatgatttatttattgatgctcatgatttatggaatagaattaaagtaaaatattttgtggcaaattgtactgctcctactccctatattgcttgtggtgctaacctttcaaagggagaagaacaagaacgatgggcaccaaacgatgaatccacctcgtcaacaggtttgttctccactagtaataaatgttttattgctaaaaatgatggtggagacgaaagccatgatgaggaggaatatgaggatgatagcgaggatgaatcttcatcaccacaaggtgcattttcctgtattgcttccactaacattgatgacagggaaatgagaccgacgatgtggaagaagaggagattcgccggttctacatccatctcaacaaaagaggacaaagcgctcttggttaaactgttgagaaggaacaaggaacaaggtgagacacttctcaggctagaggagtccctcatcaaaactaacaacagcctggagaagatgaccaaagaacatgagaagctaaagtgctctcatgatgatttggtccaacggagtcaagttgaaaagataaacttagaaaaacttgctctaggtgaaaagtatgatatgctgtcatattctcataataaattagttgatgaccatatcatgcttaatgttgctcatgaggtcggtcacaaaagaaattatgtgggaacaagaagcaaagacagcaaaggagaagacgcattgctcgactttctcaagatatccacgggcgcgtgggtgaagaagcttgagaaaggaaaaactgcagcaagtgttaagctccataagaagaatgttcctaaagatgaagaaatcaacatgagcttggaaaagaacaaaaagagaaaagggaaaaggaggtgctttaagtgcaacaagtcaggacacctcattgcgtcgtgtccatacaccaacaagggtgaagggataaggagatgcttcagatgcaatgacaagagtcacacgatcacttcttgtccgctaataatgaaccaagcatgtgcagtctccaagatgactctcaccaagaaaaatgacaaacagcaagcgtcatgtcagggtgagcgacgcttctgctacaagtgtggtgagcagggtcatctatccaagtctcaaggtggaaaagagaagataagcaagaaatggagcaatcaggactggggtacctctgtaagtcaaggaattggtatcttaagtcatgagtaa

SEQ ID NO: 1397 - DNA, 567 bp, Zea mays
  Peptide Sequence Number=SeqID_44772
atgaggacggtgcactccacagctgctggcatttgcatccttcttctcatggtcatgtcttgcaccctcatgacgacacccacctgggcagcagaggattgctaccagcagtacccgacatgccaggacgccgtgtgcgaggcaaaatgcagtgaggaattccactccaagctctccggtttcaggtgcacgagccgccacagcgcgacgcagctgtcggaggagtactggcctgcagcggcggcggcggccgccgctagctcctcgcagcatcacgccggcgcggataacgacgagctcccatccccgccgtcggctggtggaggcagcagcagcagcaccagcgctgtcgtccccgccgtcggctggcgggcggatgcagaggcggggcgcctaggcggtgttccaggcgcggtcacgtcgggtgcacgccggcaggggctgcgcggccaggtcgggtgggggctcggggtagagaaaggggtagggagaaggagaagagagagaaagggggagggagaaggagtggcggcggcttgggagagggagcagggtagtggcagctag

SEQ ID NO: 1398 - DNA, 1362 bp, Zea mays
  Peptide Sequence Number=SeqID_44773
atggcgcgcaagaagatccgggagtacgactccaagcgcctcctcagggagcacctcaagcgcctcgccggcatcgacctcaccatcctctccgcccagatcacgcaatcaacggacttcgcggagcttgtgagccagcagccatggctgtcaaccatgaagctagtggtgaagcctgatatgctgttcgggaagcgtgggaagagcggcctcgtggctctcaacttggatttcaatcaagtcaaggagtttgtcaaggagcggctgggggttgaggttgagatgggtggctgcaaggctccaatcacgaccttcatcgtcgagccatttgtgccacatgatcaagagtactacctttcgattgtctcagagaggttgggcagcaccatcagcttctcagagtgtggagggattgagattgaggagaactgggacaaggttaagactattttccttcctactgagaagccaatgacgtctgattcatgtgctcctttgattgcaacccttccattggaggtacttgttgctttcctcctcagctctaacctcaatacctccatgttatctcatttctcacattggaggtactccttatttgctgatcaggcacgcggaaaaattggtgacttcattaaaggagtgtttgccgtcttcctagacttggatttctcatttcttgagatgaatccgttcaccatggtcaatggggagccatatcctctggacatgagaggagaactagatgacacagcagctttcaagaacttcaagaagtggggaggtatagaatttcctctaccttttggaagagtactcagccctacagaaagtttcatccatgaactagatgagaagacaagtgcctctctgaagttcacggttttgaacccgaaaggtcgcatctggaccatggtcgctggtggtggtgctagtgtcatttatgctgatacagttggagacttgggatatgcatcagagcttggaaactatgcagagtatagtggtgctcctaatgaggaggaggttctgaattattctagagttgttcttgattgtgcaactgctgatcctgatggccgcaagagagcccttctcattggaggtggcatagctaacttcactgatgttgctaccacattcaatggcatcatccgagccttaagggagaaggaatccaagttgaaggcttcaagaatgcacatttatgtccgccgaggtggtccaaattaccaatctggactggctaaaatgcgtaagcttggtgcagaactcggcgttccaattgaggtgtatgggccagaagcgactatgactggaatctgcaaacaagcaattgaatgcatcatggctgcagcgtaa

SEQ ID NO: 1399 - DNA, 2946 bp, Zea mays
  Peptide Sequence Number=SeqID_44774
atggacatcgagacccacgccgccgccctggcccgcgacgagctgcggcggctcctggccgccaccctcagccccgacaaggcgtcggttgacgctgccgcggcggggctcgacgcgctctcttccgacccacgcttccccctcgccatcctcgccgtcgctgcagttatatccgaaaagccactaaaagtaggtccagaggtgctttcagatttacactacgagaaattccgccaagttgttgaaaaagattttgtcaaggataacttgtggcctgagcttatccctcagttgaaactagtgatccagagcagcaatctaattagtccaggccagcatcctgagtgcaatactattaatgcactcacagtacttcaatctgttgtaaggcccttccagtatttcttgaatccaaaagttgtgaaagagcctgttccacaacagttggagcaaattgcagcagagattcttgtaccattgcaagtgacattccatcacttctctgacaaggttcttttgtcacctgatgggactaacttggaatatgagcagctcctactcatcacatgcaaatgcatgtatttcactgtgaggtcatacatgccatctagggtgaaacaaattttgccttccttttgcaaagacatgttccgtatactagattctttgaactttaatagtcttattgaagatggatctaccatgaagctcaagattgcaaagagatgtctcattatattttgtgcacttgttacacgtcaccggaaacatacagataaccagatgccacatattgtcaactgtgcaatcaaaatatcaaaacaaagcatccatttaagtaaactcgactctctccccaatcggattgtttcattggcatttgatgtgatttctcgagttttggaaacaggaccgggatggcgactagtttcaccacatttttcttcacttcttgattcagcaatttttccagcattagcattgaatgagaaggatatagaagaatgggaggaggatactgatgagtatatgcaaaagaatcttccttctgaacttgatgacatttctggatggactgaggatttgttcactgccagaaaaagtgcaatcaatttacttggtgttatagcgctatcaaagggtccaccagttgcatctgcagcatcgaagcgtaagaaaggtgataaaaataaagggaaatctgaaatgagctcaattggggagttattggtcaccccattcctttcaaagtttcctataccttcccatggtgaagatgcatcatcagtagcagtgcggaattatttcggtgttttgatggcatatggaggcctccaagatgacatgagttctagtatttatgagtccttaatgaaggcgttgaccatggagtatgtggaggacataacttgttatccggtttgtgcctctgcttctggtgctattgcagaactcattgagaatagttatgttccacctgactggctcattcttctgcaagtggttctgaaaagaataagtactggagatgaaaatgagtctgctcttctgttcaagcttctgggcacaatagttgagggtggacaggaaaaagttctgtctcatattcctgaaattgtatccaacattgccagtactgtaatggagctcctaccccctgtcccagatccttggcctcagggtttcgcagccctcgtagcaatggtgcaagcttgggagagctctgcaccagatgaaaacaagacacctgaaaagaggttctggcagtcaggccagtctgcaattgcccaaacaatttcattactgttacaaaaagcttggttgttgcaagctgacaatatggagggctctgcattaccacctccgtcatgcgtaaacgatgcttctgtgctacttgagtttgtcatgagttctgtcacttgcatggaagaaacggcaaatctgaaggtctttgaactggtagctacatgggctgacgctattgccaactgggactcctgggaggagatggaggatcagggtgttttcaacacaattaaagaagctgtcaatttccaccagagatttgacctcgacggtctcttcctgaaaacgcttccgtcgcagtctgaaaatggttcacagagttcagtcatcggccgtgtctctaattttgtgactagggcaattgcagcttacccatccgcaacgtggagggcatgctcgtgcgtccatacactgctgcacgctccaaaattctcccttggagcacaagacactagaaagactatttccgaatcctttgcacaagcagcgttttcccgcttcaaatctgtatccgacagtcctgctgggctatggaaaccactgctgttggcgatatcctcgtgctacatctgctatcccgatgccatcgaacaagtcctgaacaacgttgatggtaacggttttgcgatctgggcgtctgcattggcacaagtctcaagcagcttgttcaatcctggcctgtcatctgaatccgagatcaagttagctgactgctatgcatcactgatggagtcttgcattcagctgaaggaagttcaggacgatggggacaatgacgatgatgatgatggtgctgaagatgttgatgacaacgatgaagaggaagacaccgaagatgatgatgaggattcggacgacgacgacgatgcgagagaagaaacagaagaggaatttctggaaagatatgcactagcggcggctgcgggcgagtcagtcgaggaaggagacattgatgaagagacccaagacatcgaattgggctctctggatgacgtggacatacagcaggtggttattcccctgatgcagaaacttcctgctctgcagcccgccggagcgtttccggacagcctggttgaaagaattgcagaaacattcccggaatacgaacagtttttgcaagcccttcgacgagcttag

SEQ ID NO: 1400 - DNA, 609 bp, Zea mays
  Peptide Sequence Number=SeqID_44775
atgcgggcaatcaatcaggccccttatatcatgattgtcgccaacagcctgatgcaagagaactgtcgagtgaatgaggaaaggcttcacagtcatgggtggccgctgatgaacctcgagaagcaacagaacttcactgatagtacctcctactattctttttctttttgctcattgtatgctgcgacttccacctcgagaagcggttggaatgacaatggaagggacacagagctgcagattattgttagggaaaacaagcttccaattgaagtgatggctgaaaataatggtttattgtgggccgaggaaccagaacatggcctcacagcagctggtcctaaaagagcagaggaggaagaggtggagcactatatggatcttggttttgaggcagaaggagatgatccaactggagctgacgaagaatggaggtatttcaagaatgcagatttcgatcatccaactgacgcaagagctgcagatttggatcatccaattgaggcaagacttgatgctgtaccaaatgatgaagctgcaatgattggtgatgcaattgcggcacaaactacatatgatcgggagaatccaaaaatagtagtgggatga

SEQ ID NO: 1401 - DNA, 345 bp, Zea mays
  Peptide Sequence Number=SeqID_44776
atgatacaaatacttccacaaactgaagtgaggaagaattccaaggtaggcctcgcacagatgaacaaaggcagaaatttgcagaatagagttgggattcaggacagtaaccccacgacaaatccgccaagagcaaagctccttcggaggaagaactccgacatcgacaaggtggggaagatccaacttggaaacaacagacatatgattacctgcgaaaggcaactagctattgagattgataggaggaatgactgcagcagcagaattctggttcttccgcttgggcgccatcgcaatctcatcggtggattgagcggaagcaaaatcaaaggaaaactgtag

SEQ ID NO: 1402 - DNA, 399 bp, Zea mays
  Peptide Sequence Number=SeqID_44777
atgggcaagagaaagaaaggcggaagttcgtcgcaccactccggcgacaagcggaagcgcgagccgagccctccctcggaggacttcggtgattccgagtactcggaggaggagttttcctccgagtccgagaggtcaccggggatcgccgccgaggtgtggacatacatccgggccgtcgagcgcttcgggctcgagggctcggatgagtcggaggtctccttggacgaggagaactcctctgactcgtccgaggaggagagcggcggtgacggcgacgatgagggcgacggcgacgacggaggcgacggtgatggtgacggcgacaagggcgacggtggcgacgacaagagcggcagcggcagcagcaaggccagtggcaaagcgccactggcttaa

SEQ ID NO: 1403 - DNA, 642 bp, Zea mays
  Peptide Sequence Number=SeqID_44778
atgcaggtggcatgcaactgcaccacggagatgcaccctttcgacttcgacgcatccagcatggaggcccaggcccacacgtcatgtaaccggcgcgccggttactacgtgcgaaaaactgcaccgccacttacgccaatgtcgcgccttctcgactgcggaaccggtgccacgactcgaggcaaccctacgcatggcccaacagtgccaaccaagcgcatcggtcacgggtcagccagccgcgagagaaggcgcgacggtcgatatggccaaaagtgggccggcagtaatggcggcagcaggcgggcagaagcagcattcaaatcgtctgcaggctcacgtcccctcctggagcagcaggggagccctctcccatggcatgaagacgacgcgcccgtgttccgtccctcgaacggctcgcgcaacggctgccccgcgaaccacccgtcccgtcgcattaacttcgcggcagggcaggcgacacctttggcagggaccgagaaaggggatactctgaaagggatccttccccgcgaaggaagcgggccccgagccctcctactgatcaggggttcgaaggctagcccctcggaagggttcgacagccgccccagagcactcgggcttcaggctcattactaa

SEQ ID NO: 1404 - DNA, 396 bp, Zea mays
  Peptide Sequence Number=SeqID_44779
atggggagcgcccgcgttgctttcgtcttgctgctgttggaggagcgcaatttcgtggaggttggcaccttcagccattgctcggcttcaaggattttcatcaggcagcccggctgcattctctcaccaatggtcacccaggacggtttccaccagttcgatggtggggagaagcaagccgggctgtggcctctgccccgccctcagcttcaaggatcttcatcatccttgctggggcgggggcgagctgagccggagctctacctcccgtacgggccggcgggccacctcttccttcagcattcaggggagagggcgctcaccggtgaaagggaaatgtacccttgggccatttctaagtattttggtgatttagtgtccaacacaagtgcctaa

SEQ ID NO: 1405 - DNA, 390 bp, Zea mays
  Peptide Sequence Number=SeqID_44780
atgcacagtcttttccgagggtcgggcgtggctgggaagggctctgctggccggtctacggtggcggggaatcgggtggccgcgggcacgctgtctgcagggcaaacgccggtgatctctggctccggtgaggttgagcgtgcgcggaggagtacagtcgatgtctatgggggctttatagacgcgggcgcgacaacggcgccggctcggctttggcacgacgcggggcacacgggcgcgcgcacgagcgtgctctggcgagctcagagcgcgtcgaacacgtggctctttgcttctgttcgtgttctaccctctgctgagcggccaaaacgtgcgaatcttgccctaagacctgtgagagatttcttccctgcacctagggctacctag

SEQ ID NO: 1406 - DNA, 339 bp, Zea mays
  Peptide Sequence Number=SeqID_44781
atggccgccgttgtcgctgtcgcgcggcagaggaaggagtaccatgtcgtagctaccgtcgagggacacgaacttgagactcccgaaacggagcagcgtcccgggctggagaggttgctggagactacccatctggagcttgacgggaagctgttcgtcaacacgcagcaggcccctacctggcgtgccaactatcggcgtttcgaccccggggggtccctggaccgacgagaggctgagaaccgccatcgtcataggagcacgcggggtgccatcattacttgtttaccggggaaagccagatgggacgcccgtcttgttccccgtaacctgagctag

SEQ ID NO: 1407 - DNA, 1032 bp, Zea mays
  Peptide Sequence Number=SeqID_44782
atggggtccgggcacattacttgctctgccgagatggcccgtatcaggtgcattgcacgtaagtctgtgatcccctttttgccttcccgcctggtggagcgtcccctgcgtcgcacggtgccaggtcagttcagtcacctggagagactgcatcgtcgcctgcacgaggagcaggagcaacaggactcttcctccttgcctcaacaggaggtggagtctgataggccgccttcccctgcacctcagccagagatgccccctgcaccacctcaggacatcccggctgctggaggagaccctgacggagacggagacgacgccgacgccggtggcagttcgagccacgacacagagctttcggagaagctggagccggatggatggatcgctagacccatcactcgtgacgctgctcgcgggtgtcacttccacgacgctctcgataccctattgcgtcgggcctttgaccgagacacttggtctatcgagtaccgttgtgtagtctaccagcatcgtcacgggctatacccggaccagtgggaggctacttgcttggtgcgctgtccggacgatgatctccaggctgcagaagccttctcaaagcactattctatcactgagagggatactgccgaggcagccatgcaagatgtagcacgacgaacattttcccagtattgctcattgttcagcggggtagctgacggccttgacctgaagtactaccctcgcctttcgaccgagagtgctggaggtgtgattgtctcgccagttggtgagggcaatcccaggctgaacaacatggtcaatctggtcgccatgctcaacacagagttggaccacgcccttgacgagttgggcaaggttcgggcagaggttgcggaattgcgtgctgaatgcacgacacgccactatcttgatggtggttctcccgcccctattgggattcagcatccttaccgttcaccgccccgtggtcgcttcgactatggtaccctacactgcaggacccggatagatttagatccttag

SEQ ID NO: 1408 - DNA, 393 bp, Zea mays
  Peptide Sequence Number=SeqID_44783
atggcgctaggaagcaaggcggagtggaaagcagtactagatgctggcgcatggatgttcaatgtcgtcacatctgttggtatcatcatggtcaacaaagccttaatggcgacacatggttttagttttggaattgtagctcatagcccaactttcattggagggccagatttcacaaaatacaagggggagattttgatctttattttttggaagaaggttgctacaaagaggacatcctggatgtataacttatcaaggctagatctatcatacatatccgaggtccataggtttattgatgtcgctacgaaccatgcttgtagaacaaagacaaagcacatttattgtccatgcatggattgcaaaaatgatgttgtatttgatggctga

SEQ ID NO: 1409 - DNA, 519 bp, Zea mays
  Peptide Sequence Number=SeqID_44784
atgtacctggcagcaagtggatcaagtgatcatagggacgcgcaggcgcctgtgaggctcgtcgaaaactgcacagtactattagaggaggcgagtctaacaacggttggtggtggtcaaggctccgtccactcaagggacacgatctcgcctcgcccgagcccagccttgggtaaagatagccgacccaggaggattcgtgtctcgcccgagggtctcctcaagcaacgggcacaccttcgactcgcccgaggcccagctcgggcaggcttcgcggagaagcaaccttggccagatcgccacgccaaccgaccgtatcgcaggagcattcaatgcaaggatcgtctgacaccttatcctgacgtgcgctcctcagtcgacagggccgaagtgacctgccacttcgccgctccactgaccgacctgacaggaaaacaacgccgcctgccctgctccgactgctgtgccacccgtcagggtgaggctgacagccgccaagtccggcctcaggcgccatag

SEQ ID NO: 1410 - DNA, 450 bp, Zea mays
  Peptide Sequence Number=SeqID_44785
atggttgccccgcctcctcctccgtcggcggggaaggtgacaggacaaacccggatgctgttcttccgccacgtggggaagacgtcattgattccgccgccggcgggcgggctaacggccgccatcatcgttgtcgcgcggcggaggaaggagtatcatgtcgtagctgccgtcgagggacttgaactcaagactcccgaaacggagcaccgtcccagggtggagaggttgctggagactacccatctggagcttgacgggaagctgttcgtcaacacgcagcaggcccctacctggcgcgccaactgtcggcgtttcgaccccggggggttcctggacagacgagtaaattgtcgctgcgtgtcccagcccagatgggtcggcgcgagacggaacacaagggggaaaacagtaagaggaaaccacggcctcgtgttgtcctgcgcctag

SEQ ID NO: 1411 - DNA, 249 bp, Zea mays
  Peptide Sequence Number=SeqID_44786
atgggcgcaattcaggtcaaggctccgtccactcaagggacacgatctcgcctcgcccgagcccagcctcgggcaaagatagccgacccaggaggattcgcgtctcgcccgagggtctcctcaagcaacgggcgcaccttcgactcgcccgaggcccacctcgggcaggcttcgcggagaagcaaccttggccagatcgccacgccaaccgaccgtatcgcaggagcattcaatggaaggatcgtctga

SEQ ID NO: 1412 - DNA, 792 bp, Zea mays
  Peptide Sequence Number=SeqID_44787
atgagccacgtaaagcaggaactacacaccctcagctgccagtggacgatgcattcatttgggattatcgtgctcttcttagaggagccaaacctttttttcctagttctaattgtatctcttggatatttttcacaatttgcatatgacatgacacatgagtattattatgatgtaattcagaaggaacaggggagtttttatgggggaaaagctataattgtgtcattcaaagaatattctaggaaggaaaatgtaatgcaagtggcattatggaaagttaatggtaggccttggtttgacctgtactttaggaaaaatccatttggtggggagttcactgtttttgctggccttgaggagtgcatcaaatttatggcgaattttaagttcacagaacatgacatttctttcctgcaatcagtcatgccaacatgtgcgggtgctttcttcgattatctcggggaagttgactgctctgatgtagaggtgtactctattcctgagggatcagtagtttttccaaaagtgcccttgatgagagttgaaggtccggttgctgtagttcaacttcttgagaccccatttgtaaatcttatcaattatgcttctttggtaactactaatgctgcacgtcatcgtcatgttgctggaaagtcaaaagttctgttagaatttggtttaagacgagcacagggacctgatggagcaataagtgcctcaaaatattgttttatgggaggttttgacgcaactaggtggattatttttgcatttatagtttacaactaa

SEQ ID NO: 1413 - DNA, 363 bp, Zea mays
  Peptide Sequence Number=SeqID_44788
atggccgataaaggcaaaggcaagggcatcgtcattggcgatcctcgcatgtcaactgctcaaaaggcttcggacgagaaggctaaaaagtccgaaggcgctgggggtagatcaccatatattgttggaggagatttcaatattattaaattctctcaagaaaagaataaaggtggtggcctgcacaagcactctgagctctttaatgagattattcaagacaatgagctggttgagattgagatgattaggggtggtttcactttctttgataaggaagattttattaatttcaagaacattacatcgagtggatacaagtccttgaaacttctcccagcctctgctagtgaaagcacatag

SEQ ID NO: 1414 - DNA, 519 bp, Zea mays
  Peptide Sequence Number=SeqID_44789
atggatgtaggcatggaagtgcatgatgtcctcggtgtgtatgccggtgatggtgtgtggggagacgaccaggatgcctcgtcgagcagttgtaacacaacccttggtgacgacgctcagccatctcgaccggtccttgggttcttggaactcgacattgatccgaattttctccttatgaccctgaacgatgagagccttgatgagataccaaacaaggccctcaggaacaaagatggctcaagagtttgcgaggattttgttagtttagtgcaagagtggcttcaaaagtttcaggcagcagattcattaggtggtgtatttggtgatacaaataaaagtgagctggctgcatttgcatcctacgcattggcttttccaagcaactttcttgctcttgtggacacatatgacacatatatggacttttgtgtcctgagggtagactgctcggtgattgcatatgttgagcaccgttttgagctggcggacggtccgcgcatgagtagagcagtttag

SEQ ID NO: 1415 - DNA, 420 bp, Zea mays
  Peptide Sequence Number=SeqID_44790
atggcgagctcgtcggtgctcgccgtcccctccatccctctccctctcccgggcgcctataaaaggacccgcccgagccccgttccctccacaccagctccggccatctcctccgctttcccccgagccaatcgagctagcgccgccgcactcccccgtcgctccgatgagccccgctcttccctcccaacggaagagggatccgatcctccggaatttatagctccggaagaagggcaagaacccgacccctctgagataatcctcttgtgccaggaaagcttcgacgaaggcaagtccatccttcccttgatgcattatttacctatttctctctaccactgcctaagcctggaatatgggatgggaatcgaattgcatggtgagcatgagagagcccgcattaacaatcacctttga

SEQ ID NO: 1416 - DNA, 522 bp, Zea mays
  Peptide Sequence Number=SeqID_44791
atgggtaagaacaacaagcgcaagcgtgagccaactcctccatcggaggattttggtgactcggagtactcagaggaggagttctcctctgagtctgaagggtctccggctcccatccccctgagtgagtcgtctgacgactcagacgactccgaggggctcgcggcggaggtctggacgtacacccgggccgtcgagcgctccaggctcgagggctcggatgatcggagtactcctcggatgaggaggactcatccgaggaggacgactgcggcgacggcgaggatgacgacgacgacgacgacgacgaaggcggtggcgacggtgatggtgacggtggcggcagcagcggcagcaagggcgacggcggcggcagcagtaggggcggcagcagcaggggcagcagcagggccagtggctagatgccactggtccttagatgtagctgccgagcgacttgtagatgatgtcagagttttagaggtaactgccgagcgactgaagacaacatcagcgttttag

SEQ ID NO: 1417 - DNA, 165 bp, Zea mays
  Peptide Sequence Number=SeqID_44792
atgggatcacggcttgtgggtggttatgagattgatggttttgattatgactatggtgctggtacgctacaggatatggttgatggtttgacttggccttccaccctgccaccgggttggatggtcgagtgggatgctgcctcgacaggagaggaccaggagtag

SEQ ID NO: 1418 - DNA, 873 bp, Zea mays
  Peptide Sequence Number=SeqID_44793
atggtgacctccagcttgatggtgggggaaagcgagccgggctgcggcctctccccctccctcagcctcaaggattttcatcaccaaggctggggaggggactgcagcgtgcccggctttcggacgcgagtggcttcggagccgctcgtggcgccggcgtctgccacggcagctggaaggggttcttccaccggcgtgatagccgaggctggccacggaccgacctccaactctacggccttctgcccgtccttgccttacgagttttggcatgggcaggggcctcctggcagcagcatccgccctgaggtcagtgctgccgctgttcggccccctggagcagaagtcgtcgtcgtcaccgctgctggagcaggtgacggcgcgccgttcgtcggtcttccgttgctccgcaggcccacccccatcgagtggggttgctcctctagcttagttaaagagaccccttggccgctcttcgacgagccgaggccaggccgaggcctcggatcgggctggcgcccttggaagatggttggccgaggcccctggggtaaccgaccgagccgcctgctcgggccggattcccggagaagtccctggaccgcgtcgccgtccgaggctgggtcggacctcgctgaaggcatcgtcgatgccgagggtgctacagcccccttccagcgtgaagacccgagcctgcaggatcagattgtcttggatgtttgtgcgagcgagagttgcttctcgtggaaggtgatgagtgagaaggtgatgagtgaggtatccgtatcccggaggcgtaggagtccctcggctcggtcagccttggctgcttacgtgtactccgtcgttttcaggatccgcttttcaaagtag

SEQ ID NO: 1419 - DNA, 415 bp, Zea mays
  Peptide Sequence Number=SeqID_44794
atggataagaggggaaagagagtgagcaaatgtgcaaaacatggatcttcctccctaggccgtatctgccccggcgtctcacagtcgagtgacagccctaggtatcaggaagaggtctgcggcggacttttgcaaagattcgcacgtatgcgacctctggcgacatttgaacactggaagaaacaaaccgccacgtgttcgacgccgtctgccgcgccagagcacgcccccgcgcgcgcccgcgccgcgcccaagccgagccagcgccctgccattcccagccccgtccagctctcggagaggactgtgcgcgtctccgtgaagctccccgagcgaggaatcgggctctgcttcaccggagaggccggcccaaggtcaccggacttcaaccgaccgccggcaaccgtggaccgag

SEQ ID NO: 1420 - DNA, 309 bp, Zea mays
  Peptide Sequence Number=SeqID_44795
atggcgcttcctgttgacgtggctggcctgcgccctaggtcgggcgacgtggaggctcctccgaagccgaggtcgaaggccagggcggagtccgagccctggggtcgggcgaagcggagttcgtcgtcttctggggctgagcccgagtccgagccctgggtcgggcggagcggagttcgccatcttccggggcctagcccgagtccgagccctgggtcgggcggagcggagttcgccgtcttccggggcttagcccgagtccgagccctgggtcgggcggagcggagttcgccgtcttccggggcttag

SEQ ID NO: 1421 - DNA, 441 bp, Zea mays
  Peptide Sequence Number=SeqID_44796
atgacaaccgtccccatcgattccccgttcgcgtccaggcctcaccaccttggcatacaatgctccactgaccccggctgccgccgtgcagtgaccgcacttgtacccaccataactagcatgggagacccagtctcaggtcgcatgagggataaagtccgcgcccggcttcaatcaggtactaggtttaccggttaccatttttcccggcatgtgcttagtacgttcaaaagcttgactcaggtgcttcagaatttacaacttttgacgatgtacgacctatctgagttagacaaggttaacttcacttatgtaagaccctggggtggtatacttggtaaattgggtccaactttagctaagggaagaaggggtgctttgaactacaactattatttaacagtgggtaattctctaaaacttatttttgctggcttttag

SEQ ID NO: 1422 - DNA, 456 bp, Zea mays
  Peptide Sequence Number=SeqID_44797
atgccgctctcatcgagggtcggcaacgtggccagcaccgccgttcgcagccctggatcatcacagagcgccgggatgtcctgggggagtatcaaggatttagggataaatgactcaccagtaatccccttcaccaggagttccagctcctcccaggatagatcgatacccagcccacgctggatcctgccgatatcattcgggccagtgaaccaacatcacaggcgcggcctcctctgcagcggcatgacccgccgcttcagaaagtcaccgaccacatgcatggaggtcagaccaccggttactaaggtcttgatcctgtccagtacgggtaggagctctggcgatagcgatggcttggtcatccagtgcttgcgatcgagggatggcccgttgctcggtaggacgaggcggtcattggcctcgacgctggcgatcacccagtcggcgtgctaa

SEQ ID NO: 1423 - DNA, 1383 bp, Zea mays
  Peptide Sequence Number=SeqID_44798
atggcccccagctccatggacaggggcaagggacctgcaagcaactcctctgccccaggtggcaccgagggttcagaggaagagaggcgacgccggctgcgtcgtgccgacgggtcgcttgtttcgaacccccccagaagcgtcagaggactgctggtagggccgaggaggccggctcccaggcccagggcgcgcagaggcacatcggtcctccaccacctccaccattgggcccgccaccaccaccaccaccaccaccattggtccctccgccaccaccacctaggggtgatctccctcaggggcaccagcagcagcaacaaccacagcagcagcaacaacaacaacaaccgcagcagcaacaatagcagcggtcgcccctcttccagggtcgctggaaagtacagggccccaagcactaggcccaccgatgggtccggctctcagcagcagggatctgctgggagtggtgccggcggtccgcctccagccgctgcccagacagcgcctacagcttctcaagccccagccaggggtccggcggtagtggcgttagcatcaggcgacgtcacaacgacggaggaggtcccaactgcgcccactcccgccatcgaggatgatgtggggggcgcacccagctccatcctgtcgcccactccggaggagacagaggtggtttttgggcggcggctccggtccggcgccaagccagaactagcgccagttcccctcctccaggtgctgtctcgtgcccatcaggctcttcatgagactgaggcaacgatcctgcgggagtgggaggtgcttgaggccgagcaccacaagagctcgagggcaaggccagtgacggacctcgccaggcgggagatgtatctctccaggcgggagacagatctcgccaggcgggagatgtatctctccaggcgggagacagatctcaccttccgggaagaaatgctgacccggcaaggcgagatgctggccgagcatgagctcgaggtggagaagaaggaaaaggagctggaggagcgtatccagcagttccaggcgccgcaggcggcaccagggattagtcccatcccggtgtcggagctgccgacgtctatctccgacgcgctcccggtgctggactctgccgccgactgcctccgacgcgttgaccagattcttggcgccctcctggagaccgtgggcggcaggctctgtcgggcggtgatcgagtatatcttgacatgcttccagagccatgacccggccatatccttggagccggtgatcgctggtccggtggccgatactgaagacgccgcccgggagggcgtacaagatactgtggagctggtggccgagcgcttccagcgagatcctgctgataacgagtaa

SEQ ID NO: 1424 - DNA, 174 bp, Zea mays
  Peptide Sequence Number=SeqID_44799
atggagagtcatgatctccgggcagaatgggaatcacggcttgtgggtggttatgagattgatggttttgattatgactatggtgctggttgtcagcattgcaaccactgctcaggcgaagatgaagctgtggaaggagacttccaggagttccaagactacgacgagttctag

SEQ ID NO: 1425 - DNA, 210 bp, Zea mays
  Peptide Sequence Number=SeqID_44800
atggcggaataccagcaaaggatagataataccgatggtgtagagtggaagcgatgtctttgccgaatactccatttccctttcaatctaagacttaatacacaagatactcatggtgtgatgctcatgacagactatgcacttatgaaagcatgttggaaccattttaagcaattacccgaacggggcgtttggatcccttcattttag

SEQ ID NO: 1426 - DNA, 882 bp, Zea mays
  Peptide Sequence Number=SeqID_44801
atggagcgaccacccgggaaaacagtgctaccacaaggccttacactacatgaactcccacctttggtgagttcatgccacattattccccacgacttgttgagctatgaacatgcacccggttttgtccctttaaaaccgggtgttacagtggacgacttcggggcgctgaacagcgcgctgcctgagccggagacgacccctgcggaggccgcgactggagtcgccccgggaccgaccccggagactgcggaagatgcaccgggcgctcctgcatctgccgcggccggcgaagaccttcccccaaaggtggccaaaggcgcgccagatgcccccgcagctgctgtgccgagcgctgaagatccagcagaggcagcggcggaggctcccgcagcggccgggccttcgcaggttcaagattttgggcctgcgcacgcaaccgctaccactgagtttttggcggcttcgaccgcggaagatggaaatgaatgtggtgggtctgtttctgagttttttgatgttactgactctgggagctcggttgagtggactgaggagtcatcggaggaggacttggattattttgcggccttggacgtggctgcggcggaggctgcaccacatgctgcggacgcgccaggcgtgcccggtcctagcaccgggcaccgacgacgaagggcggttgcaaagcgtaggattagtgcggaggaaggggctcggcttcgcgttagtagggctggccggcaggagctgctgtctttgccggccgcctcgggtgtaggggaaggggagctgcgaagcctttttgcgggtgaggagcttaggataatgttgtttaattatagagagatggggattattcctaaggttgagccgatgtag

SEQ ID NO: 1427 - DNA, 894 bp, Zea mays
  Peptide Sequence Number=SeqID_44802
atggcgcttcctgttgacgtggcgggtctgtgccctaggcagggtgacatgggggctcctccgaagccgaggttgagtctgtcctttgttgccgaggccgagcccgagccatggggtcgggcgaggcggaagtcgttcggccgaggccagggcggagtccgagccctggggtcgggcgaggcggagtttcgtcgtcttccggcccgagtccgagccctggggtcgggcggagcggagttcgccgtcttctgggtcttagcccgagtccgagccctggggtcgggcggagcggagttcgccgtcttccgggtcttagcccgagtccgagccctggggtcgggcggagcggagttcgccgtcttctgggtcttagcccgagtccgagccctggggtcgggcggagcggagttcgccgtcttccgggtcttagcccgagtccgagccctggggtcgggcggagcggagttcgccgtcttccgggtcttagcccgagtccgagctctggggtcgggcggagcggagttcgccgtggcgcttttggcaaggcctgactgcctgtcagactcactctgtcgagtggcaccgcagtcggagtggcgcaggcggcgctgtctttctgtcagactgctttatgctgatgggggttaccagctgagaattaggcgtcttgaggcagacgcgtacgcgcgggggaggaagaatgggaaaggagagagaggatggggcgggctcacctcggcggcgcgggcgcggcactccggcgacggggacgaggcgaggctccggcggcggatcggagaggcaaagcagcgatgggcgagaactgcgcaggggatcgcgggcgttcgtggcgagaaaactgggcaacgggtggaagaaatcgtgcgcaactag

SEQ ID NO: 1428 - DNA, 1218 bp, Zea mays
  Peptide Sequence Number=SeqID_44803
atgcaggcagcatgcaaccgcaccaagggggcgcaccctttcgacttcgacgcgtccagcatggaggcccaggcccacacgtcatgtaaccggcgcgccgattactacgtgcgggaaactgcaccgccacttgcgccagtaccgcgccttctcgactgcggaaccggtgccgcgactcgaggcaaccctgcgcatggcccaacagtgccaaccgagcacatcgatcatgggtcagtcagccacaggagaaggcgcgatggtcgatatggccaaaagtgggccggcagtaatggtggcggcaggcgggcggaagcagcagtcaagtcgctggcccctcggaagggttcgacagctgcctcagagcactcgggctccgcgcccactactgatcagaggctggcccccgaagggttcgacaaccgcctcagagcacgcagagcgagggatgactctgggtacgtccgatacatggccgaggctcgggctacgctcccgagaaaggcgacgcaggggcgtatgaaaaaagccaagtcagtccttgaccgtcctttcgctctgtgcggaggctcgggggctgctctcgcaaacccggctccggccaaaccgttgacaacgtcaacataccagcccgagaactcggaacctgactatgcacccgggctacgaccagaaaacagcgctgcctgccctgctccgactgctgtgccacccgtcagggtgaggctgacagcggccaagaccgccctcaggcgccataggaagctccgcctcgcccgacccctgagctcggactccacctcgacctcggaaggcggtctccgcctcgcccggcccccggggctcgaactgaacctcgacctcggacgacggtcttcgcctcgcccgacccccgggcccggactcagcctcgacctcggaagacggactctgcctcgcccgatcctagggctcggactcagcctcgacctcggaagacggtctctgcctcgcccgacccccggggctcggactcaacctcgtcctcggacgacagtctccgcctcgcccgacccccgggcccagactcagcctcgacctcggaggagcctccgcctcgcccgacctcgggctcggaccgaccacgtcatagggggggccatcattaccctacccctagctagctcaggctacggggaacaagaccgacgtcccatccggctcgccccggtaaacaagtaa

SEQ ID NO: 1429 - DNA, 849 bp, Zea mays
  Peptide Sequence Number=SeqID_44804
atgggggttgggacccacatgtcatacgagctgatccgaagcatgaagaaggcgaaccgccgcacacgaggcatggaccgggaaaggggacgttgtggaaaggatccttctcggtggaggaagcgggccccgagccctcctactgatcaggggttcgaaggctggcccctcggaaaggtttcgacagccgccccagagcactcggacttcaagcccattactgatcaggggttcaaaggctggcccctcggaagggctggcccctcggaagggttcgacagtcgccccagagcatgcagagtgagggataactctagaatcccaccggagggaggcatcgagccctcggaccctgtcgaaggggtctgggtctggcgaatcacccgcagacgagttcacgcctcgcccgagggcctcctcaggcagcaggcgcctcctcggctctccagaggcccggctcgggcaggctttgttgtgaagcaaccttggccagaccgcctcaccaaccgactgcttcgcaggcgcattaaatgcaggggatgcctgacgctgtatcctgacacacgcgcatcagatgggcaggccgaagtgaccgcagtcacttcgcccctcttctttactgtacgatatgacaggaaaacagcgccgctcgccccgctccgactgccgtgtcagccaccccggcaacgactgatgacaagtcacgatcaaccactgagttcggcctcgggcgcaacaggaagccccgcctcgcccgacctcatgctccagcctcgggaggaggtctccgcctcgcccgacctcaggctccggcctcaggaggaggtctccgccttgcccgacccctag

SEQ ID NO: 1430 - DNA, 459 bp, Zea mays
  Peptide Sequence Number=SeqID_44805
atggtcgtctctctttctgttccagcaagtagatccattggtgatggtgttccattgacacatagggctacagttaccgttgatctcccatgcggcttcagccgtgcctacagcaaaaaagccatcctccagctctgcgtcgggcgccgctgcctcatcttccagcttctccacgccgactacgtccccaacacgctggatgagttcctcagcgaccctgactacacattcgtcggcgtgggcatggctgcagacgtcgagcagctcgagaacgactacgacctggaggtggcgaacgcggaggacctggccgaactcacggcgaaggagatggggcgcccggacctccgcaacgcgggcctacagggcatcgcgagagccgtcatggacgcccacgtcgagaagccacagcgggtgaggacgggcccctgggacgcatcatccctctccgacgagtag

SEQ ID NO: 1431 - DNA, 396 bp, Zea mays
  Peptide Sequence Number=SeqID_44806
atgggcaagaacaagaaaggcggaaattcgtcgcaccactccggcgacaagcgaaagcgcgagccaagtcccccctggaggacttcggtgactccgaacgattcccaggggatcgctaccaaggtgtggacgtacattcgggccatcgagcgctccgggctcgagggctcggatgagtcggagatctcctcagacgaggagaactcctctgactcgtccgaggaggagagcggcggtgacgacgatgacgagggcgacggcggcgatggaggcgacgacggcggtgatggcgatggcgacgacaagggcgacggcgacggtgacaagggcaacggcggtagcagcaagggtgacagcggcagcaacaaggccagtggcaaagcgccactggcttaa

SEQ ID NO: 1432 - DNA, 162 bp, Zea mays
  Peptide Sequence Number=SeqID_44807
atggagggtacaagtgcggtcactgcacggcggcagccggggttagtggagcattgtacgcttcaggttatagttgatggtgtgacttggcctaccaccctgccaccgggttggacggtcgagtgggatgttgctccgtcaggagaggagcacgaggattag

SEQ ID NO: 1433 - DNA, 741 bp, Zea mays
  Peptide Sequence Number=SeqID_44808
atggagaggagtaaagatctggcgcttgggatgaacttggggtactgttgtgctcggccactcatccaccgcaccggcgacgtggctaaccggccgtcgtcgagtacaggctcgccggagctcggccaggcgccgttcgccgtcgaggactgcgggatatatgccgcctcgcacaaggaaaccgcgcgcaagtccactagaccgattggtgtgcctcgccatcagctggccccaaggcatgaggatagtagcagcggcagcaatgaccccattggagatctggaagcccaggtggagcagcttcgaatggagctacgtcacagaaacagtgtgtgggtcgaggatggtcagcgcataaatgagttaagaactgacatccgacatctgcaagacgagcttgccgaacgagatttggcactcgattgggccgtcaactcgcgctccattgcttgggaccgagaggctaaagctcgagtccgcatggaggagcttagcacggtcgtcgacaacttgcaggtgtactgcaatacattacatgaggaagttcatgaattgtattcacgactgcatcccgacgtacctgccgaccctgtcggaatgggagttggaccttctagaacagcaagtgaagcatttggtggggaactggatcttttcaagccccctccttcaatgaacctggctgatgaatggacccctacatccgacaacgaagctgcaaaggataataaatactactag

SEQ ID NO: 1434 - DNA, 675 bp, Zea mays
  Peptide Sequence Number=SeqID_44809
atggtccgcgccagctctataattccttttgctcaacttgtcaccttcgggctgaaccaggtcttcacatgcgaacggatttttgccaagattcgcacgtttgcgatctcagcaagcgttagaacacgggcagaaacaaacgcccacgtgttcgacgcgttcttgcgtgctagagcacgcctcggcgctcagccccgcgcgcaccgcgccgcgccgagccaaacccgtgcttctgcccgtgcccgcgcctataaagccagccaaggcttcaaccgtatgcccccactcgctctcgacctcgtcggagcgcaagatcaccggcgtttgccctgcacacggtgtgccagcggccgcccgagcacccaccaccatagaccggccaaccgagccattcctagccccgtccgaccttcgagagagactctacgtgcctcggtgaaactcccagagcaaggaatcgagctctgcctcgccggagacaccgattcagggatcaccggacttcaccagatcgccgacgagcgtagaccgggctccacagtgagcctttcttcaattcctagcacgggttctctggaggacatggttgctggagtgacttggccgtccatcttgccaccgggttggacagtcgagtgggaccctacctcggcagacgaggagcatgaggagtga

SEQ ID NO: 1435 - DNA, 969 bp, Zea mays
  Peptide Sequence Number=SeqID_44810
atgtgggtcctctttcaccgggtcgtctccctcgcgagaaattcgcgccgtgggcggagccaatggcccgagcgcagagcgcggaactccttccccttctcccggaactgcaaggccacgaccccgactccgtgggctcggtggataaaagccgagcgcacgcgctccttctcccctatcccctcttttagcccgatttctcatcgccaccagaacgccgccgcgcgccgtgtgaggggattcggtccgccgtcgtcgaccggtcgatttctcagcgataggaccgaagtctggggtgcgggagctacgcctggtgcggtgggtcacggctgtaaccttgcattggcgcatcgcgcggcgaacttcggggaattcctcgccgtggctgaagactctcggtcggaccgcctaacgccgtgggcagagcttcttcgcggggagagattcacgttctggaatcttaaaacgcaaccaaaggggcttcccatgagaagcgattttcgaaaatttacagattcccgcaagtcattttggaatcacgtgccagccagcgcgtgcatccgtcggaggagactcctgccgtcgcccctggatccgccccttggatcccctcccgtcgccgccgcccctggatccatacccgccgccgccccaggtcctctcccgccgccgcccctggtcctctcccgctgccgccctagggtgtccagccgacgtcgcccctgtctccatggcgggctagggttgaggtcggaggtgtgggcgcgcaggtacctgggccagcagttctacctccgggtgtacacgccgtcgcacttgttccgcgacgagctgcccatcccggacaacgcaccaccagtagccgccgccaacccctgccgttacaataaaagctgcgtctccaatcaagtgcccagggttgcaatcaagcgtcggctgcaaggtatgtcatcctatccagcgccctaa

SEQ ID NO: 1436 - DNA, 444 bp, Zea mays
  Peptide Sequence Number=SeqID_44811
atgggtcagggagcttcaccagaaatcaaggaagatgtgagcgcgaggaatttgagaatggctcaccggatcgctcggtctacgcgtggccatgggcaaccaaagtccggcgaaggcaatcttgggtctccggtgaggttctgtcgggtccgagagcttggaaagcttaatgggccactagcgaagctaaccgagggacaggcacagcttggacgcggctggagcaagctggccattgtggccgaggcttgggcagtgatggcgggcgaaggagagctcgccgaagctaaggaggggtgtctggccagcgagggtttcgttgactggatcaagagatatggaggggtaaagtttggtttgtctcactgtcgagcacatggagaagatcccgggtttgacgtgtccagggcatgcatcccaatgccatcttctggtatgatgtag

SEQ ID NO: 1437 - DNA, 306 bp, Zea mays
  Peptide Sequence Number=SeqID_44812
atgcgctccacgggatggcgtagaggatatgtgcgcaaggaatcgaagaatggggcagaggcttacccggtctacgttcaccggcggtcgggtgaagtccggcgaccatggactggcctctccggcgagacaaagtccgattccttgctcggtgctgcacttgtccaaaaggggtttgaattagggcttgggcaattctccccattatatgtgcataacaagccaagccctccccccttaaaggaatctcgtcccgagattttaggtagagtcctttggaggagtgctatgaaggtgtgttggtag

SEQ ID NO: 1438 - DNA, 684 bp, Zea mays
  Peptide Sequence Number=SeqID_44813
atgatgaacatccttgaagctgagggcagggcggaggccgcagcccggcttgcttctcccaccacaaggctggtgatcatccctacggatgaccattgcagccgccctagagcactcaggcccccgagccctcctactgataaggggttcgaaggttgcgccctacggggtccagcaatcgccccagagcactcgggctccacgcctattactgatcaggggttcgaaggctggcccctcggaagggctcgacagccgccccagaccactcaggctccgcacccattactgatcaggggttcaaaggctagcccctcggaagggttcgacagccgccccagagcacgcagagtgagggatgaccctgggtacgtccgttacatggccgaggctcgggctacgctcctgaggtaccctaggacatttccgagaccagcaggaacgatttgtaatggaatcccatcggagggaggcaccgagccctcggaccctatcgaaatgggtccgggtccagcaaatcccctgcagaggctcaggggctgccctcgcactcggctgcggccaaaactattgacagtgtcaacaaaccagctcgaaaacttggagcctgaccatgcacccgggctgcggcctggccgcatgagggaacagccaggccgaccgaggcatcacagcaagaattaa

SEQ ID NO: 1439 - DNA, 1176 bp, Zea mays
  Peptide Sequence Number=SeqID_44814
atgtgctctagggttcccaccccacgacacgggggctgggtcccacacgtcatcagaactgacccgagacgcgaaggaggcaaaccgccgcacgcgaagcatgtaactgccctgcggttacaagcgttccctcatcctcgccagaaccagcggacgaaagggcaagtcgccacgcagggagcctgcaaccgcaccgtggttacgcaccccttcggcttcgtcgcatccggtggaccaagcacgaaggcctggtcccacatatcatgtaaccggcgccacggtcactacgtgcaaggaaaccgcactgccacctgcgccaatgatgcgccttctcgactgtggaaccagtaccgtgactcaaggcggccccgcgcagcaagcaacacctttggaaggcgaagcaggcgacgtttcacctccgtcataatggccgcgtcaaaaaaggggttcgaaggctggcccctcggaagggttcaacagccgccccagagcactcgggctccgtgcccattactgatcaggggttcgaaggctggccccttgaaagggttcgacagccgccccagaacacacagagtgagggatgaccctgggtacgtccgatacatggccgaggctcgggctacactcctgaggtaccctaggacatttccgagaccagcgagaatgatttgtaatggaatcccatcggagggaggcaccgagccctcagaccctattgaaatgggtccgagtccagcaaatcccctgcaggaagctccgcctcgcctgaccccaggcctcggcctcggcctcggcttcgggaggagatctccgcctcgcccgaccccagggctcggcctcggcctcggcctcaggaagagtcacgccctcgcccgacctagggcctcgaccccggcctcggcctcggaggagccgccgcctcgcccgacctcaggcttagatcgaccgcgccacaagggatacatcattaccctactcctagctagctcaggctacgaaggaacaagaccggtgtcccatccagcttaccccgcgccaacagctgtgctgctacagggcttaaggcacttctccaacgaccacgatactacctctacagggctcgagatgccccccgacggccacgttattatctgtacagggctcagggcacttccctgccagccacgttag

SEQ ID NO: 1440 - DNA, 426 bp, Zea mays
  Peptide Sequence Number=SeqID_44815
atggagcacacctgcgcggctttcttcttgctgctgtttgaggagcgcgagctcatgggggttggcgctctccagtcgtcgctcggcttcaaggattttcgtcatgcagcctggctgcattccctcaccaatggtcatccggtgctgctttccgtcctccacccgagcggtggtcgtgccacgcgcgggtggccgctgtcaccggcgctggagtgggggctaccgctggtgaggctccccaccgcagcggttgcctccgccgacgagaccgtcggtgctagctgcgctccagaccttcggctctttggctttaatgtctggttcttgtcccccgtgaggggacgtgaacgagggcctcttagtagcagcgtttgccctgaggtcgggaaagccgccgagggcgctgccgacgcctacatagcatag

SEQ ID NO: 1441 - DNA, 705 bp, Zea mays
  Peptide Sequence Number=SeqID_44816
atggaagacagactcgacctcggcttcggaggagcctccacgtcgcccgacctaaggcacaggcccgccacgtccacaggaagcgccatcatcactctaccccgagccgactcgggccacagagaacaagaccgctcccttacggaagcagggggacgtcagcaaggactcaaccgctccgacagctgtccctccgccaggctccattgctcctccgacagccacgacatcacaccagcagggtgccaagatctctccggctgccacattggcatggccttcttagagaaggttggccgcgcggggacgaggacggggcaggcgctctcttggggccgctcgcttccctcacccgcgtggacgcttgtaaccccctactgcaagcgcacccgacctgggcgcgggacgaacacgaaggccgcgggatttccacctctctcacgcccgtctccggccacctcgcttccccccttcgcgctcgtccacgcgctcgacccatctgggctggggcacgcggcacactcactcgtcggccttagggaccccccgccgggtatttatggaggatcggtctgggaccggatgcgggatccactcgagtggttccattccgacactcccccctcccctcgtcaggttccgccatgtccgactccaagctcggtgccgcgggattcgaccgggagcgagttctttaagggttga

SEQ ID NO: 1442 - DNA, 2322 bp, Zea mays
  Peptide Sequence Number=SeqID_44817
atggaggcgagggcgtcgccgcgtccgtcggtctccatcggtggcggcggcggcttcggagctgggcggggtgacgacagcgccttctcgtttctctcaaaggggtggcgcgaggtgcgggattccgccaccgccgacctgcgcctcatgcgtgcgagggctgattccctccgcacgctcgcggaccgcgagctcgagcacatcctcgcgtccgcctccactgcgctgacctccgcgccgccgccgccgctcgccgcgggggcgcccatagccgagctcgagttcgtgcgcacacggatccagcccaagatctccgaactgcggcgccggtacgtgtcgcaggagcgggagctcggccgcagggtgctcgaggggtgggcgccgcgcggggcggggaaacccgcgcgcgcacgtgttgacctctctgggatcaccgccatccgcaacgccatcgtctctgaagtggatggcggggagcgctggaggcgcgtggtgtggaacggggaggcggaagaggggaaagaatgggaggtgctcaggatgatacgggacggcatcaaagagttcgagcgccggagccagaccaaggagatttttgagggattgcgcagtaccggcgagctcgtcgagaaattcaagtccagcctgaaatcattcaacatggagtctcaaggatccaaggaaatccaaccactggatctacctgaaatactggcaaatcttgtaaggcagtctgaaccatttttggatcaacttggtgtacggagagaaaacacatccttgcctgtaaatgataagtcatcagacgaacttgacttgagaatcgcaagcgtgcttcaaagttctggttatcatgctgatgatggtttctggagtgaacctacaaagtctgaggtctcagacgataaaagacatgtggctatagtcaccacagcaagtttaccatggatgacaggaacagcagttaatccattgttccgtgcagcatatctcgcaaaaggtactagacaagatgtgacactggtagtgccttggctttgcaaatcagaccaagaactggtatacccaaatagcatgacgttcagttcaccagaagagcaggaaacttatataaggagctggctggaggaaagactaggatttgaatcaaacttcaagatatccttttatcctggcaagttctcaaaagagcggcgtagcatcattccagctggtgatacgtctcagttcataccgtcaagagaagctgatatagcaatattggaagaaccagaacatctcaattggtatcatcatgggaaacgctggactgacaagttcaaccatgttgttggtgtagttcatacaaactacctggaatatatcaagagagagaagaatggagctcttcaggcctttctagttaaacacatcaacaattgggtgaccagagcatactgtgacaaggtcttacgtctttctgcagcaactcaagatttaccaaagtctattgtttgcaatgttcatggtgttaacccaaagttcctgaagattggagaagaaataactgccaatagggggagtggggagcctccattttccaagggagcatattttcttgggaagatggtttgggccaaaggttatagggaactcatagatttgatggctaaacataaaagcgacttagaaggattcaagttagatgtatacggaagtggtgaggactcgcaagaagttcaatccactgccaggaggttagatttgagtctcaattttttcaagggaagggatcatgctgataattcactccatgggtacaaggttttcataaatccgagcattagtgatgtcctgtgcacagcaacggcagaggctcttgcaatggggaaattcgtgatctgcgcagaacatccatcaaatgagtttttcatgtcatttccgaactgtttgacatacaagacttcagaggagtttgttgcgagagtgaaagaggcaatggatagagaaccccaaccgctaacccctgagcaaagatacaacctttcgtgggaggcagcgactgagagattcatggagtactcagaccttgacaaggttctgaacaatgaggctgctcagcctggacaaggtaggaaaagaaagaataaaagaacctcacagcctaatttgtccgacataatggatggcggtctagcgttggcccatcgatgcttaactggcaatgaggttctcaggctggcaaccggagccattcctggtacccgggactacgataagcagcactgtgtggatatgggtctcttgcctcctcaagtacagcaccctgtatatggctggtga

SEQ ID NO: 1443 - DNA, 447 bp, Zea mays
  Peptide Sequence Number=SeqID_44818
atggatggctccgggaccaccacgtggccaaagaagatgatatatcccaaggtatcaacagtgagtccggaccccatgggaaagcgccggacccgtgtatataaagaccggacccccgggcggagccccgatgctgccacgtggcatagtgcacgtgacgtaagccaacgggcggagcctgacgtaaggcctctgggccgtgcggccgctgcttttaatgcggataagacgcaccgcctgtctattccactagcaggggtcatacactttaggtttttgcttgtcttcctgctcgacacaatggtccagatcgtcgagcaccacgccgagacttctgaggacttcctggtggaggaagaagctgcatcttccatgccacgagtgtctaaccgccctgcgcctagggctgctgctgtgcatgctgcgtggcagcacacgcctgcgtag

SEQ ID NO: 1444 - DNA, 141 bp, Zea mays
  Peptide Sequence Number=SeqID_44819
atggaaattggaataaagattaaggtgtggtaccgttctctggaagacatggttgctggagtgacttggccgtccatcttgccactgggatggacagtcgagtgggaccctgcctcggctgaggaggagcatgaggagtga

SEQ ID NO: 1445 - DNA, 482 bp, Zea mays
  Peptide Sequence Number=SeqID_44820
atggcaggaagagcgcgtcgtgtcagaatgggcgtgttcctccaccaccgccaccacctcctactctgcaagagttgatggctcagcagaacgagattctgcgacagttggcgcagccagccacttatcaggagttcctcagtacccagccaccgttgttcaccagggcagaggacccacttgatgctgatgtatggctgagagtagtggaatccaaattcccgctactccatggagtttgttcagagtatgccggatatcatgcagacaccgacgagaagaagagggacaggttcaggagggagctcagcactaagctccgtgaccgtctcaacacagtcagggccaacaactataatgagttagtcaacatggccatttctcaggaggattgtatcacagctcgtcaggaagagaagaagaggaagaccccctgtggcaggaccctcagctcagccacagcgcttccggatcgtatctga

SEQ ID NO: 1446 - DNA, 237 bp, Zea mays
  Peptide Sequence Number=SeqID_44821
atggagacccgtgcactcttgttttgcttaggaaccagggagaagaccgaaagggaaaaggatttgaacatgctggattcggactgcagaagaacaccaacttgtgacggtcaccacgatctggacgagtgccctagtggccagggtgtcacgctccacaagatcgtgacagccataggaggtggtgtatcggttgctaaggcgcagcgtctttggaaggctgtagtcgggctgtga

SEQ ID NO: 1447 - DNA, 240 bp, Zea mays
  Peptide Sequence Number=SeqID_44822
atggatcaattccgcacctgtgacaccctagtgtcacctagggcttttctcagtgctaactcaagaaccatcatttcatgccggaatcctcaccgccgacgagctcccccgcctgtgctcgtggaccggccgactccgaccatccccgaaggcgacccgcacatcgccgtgaccctcaggacctcccctacaccctcgaccacctcaccggagcagtctcaccgccgagtttggagttga

SEQ ID NO: 1448 - DNA, 252 bp, Zea mays
  Peptide Sequence Number=SeqID_44823
atgcccctccttagctccggcgagcttttcctccgcccgccaccactacccaagcctcggccaccgcggccagcccgctccattcgcgtccaagttgcgtctgcccctcggttagcttcgccagtggcccgtgaagctttccaagcgctcggacctggcagaacctcaccggagacccaagatcatcctcataggacttcggtcgcccgcctacgcgcgaagatcgagcaatccgagtttggaattgattaa

SEQ ID NO: 1449 - DNA, 731 bp, Zea mays
  Peptide Sequence Number=SeqID_44824
atgacttcacccaccccatcaatggaggagacactcttttcagtttcgactacctttctcacgagggtttccccgccatcttgtgggaggtgctctgctccgctggttaccctacaccccctctgtacatggtgcagttgtacgaggagcatcgggtgccacgttgccaggtttggctgactctagaggctcaccctctacagccgggttggcgttcccttgactctgatactgtcgggttcagggcggacgacaccaccgaggccgcagcactgaagaccttgacaaccttctgcgggtatcatcccttagagatggtgatgcacccactgggactcttccccgccgagaaaagggatgaccccatgtggtgcaacagagtgagccacgtgaaggacgtgtgggctatgcatcccaaccaagttgggaggatcactgttcagtccaggatgcgcccgcgcgtgctgaagtcgtggcccactggtcagcttcttgtgtcatcgcctatcgccgacagtgttgcgttgtccgcgagtggagaaagcctctgcgcgtggagcaattcctcgtcggtcttcgcgggcaccgggatatcgcccctcgccgcgggtagctccccagcgaccgtctctagccccgagctccggccatgggccgtcgccactccaggcggcgccgtcgtggttggtagggaggagggtaggaaaacgtttaggccgttgattttctag

SEQ ID NO: 1450 - DNA, 456 bp, Zea mays
  Peptide Sequence Number=SeqID_44825
atgggatacaagacttgtgggtacagggtacaacctctgcagaatgtaaaactgagcgacatcgtggcacacctcactaaccttgctcagactactaagatcactgtcgagagtcgagaggacttcgtggtcgacttgtcttcagaattggtggaaaaagacttacagatggcagctaggcagcgtcgtgggcagaacgaacagattcccccaccacctcctccagctcccacggtgcaggagctaatggctcagcagaatgagattctacagcagttatattacagcgccaaccccaccctcagcagtatggtggaggccagccgaggcaacctatcaagagttcttgagcacgctgccgcccttgttcaccaaggcagaagatctgctggacgccgatgtgtggctaagggttatggagtcaaagttcccactcctcatgggaggttgccctga

SEQ ID NO: 1451 - DNA, 234 bp, Zea mays
  Peptide Sequence Number=SeqID_44826
atgatagagggagccagcctaaaagaccacaacacagctcctaatcttcagggcaacaacaaagctctttcaggccaccagccccaaggggcacaggcggcaggggcttcagaggaagaagacaagggccacactacaagaacatgccaagttacaattcagaagcaaaaggagatcgccgaagctgaagcacagcagaatcagatgaagaaggttttacatactgcttcatga

SEQ ID NO: 1452 - DNA, 264 bp, Zea mays
  Peptide Sequence Number=SeqID_44827
atggtgagtactcttccgctagtgattctgaagaaattgaacatgcactacttgccactgaccatgcagctcaggcggaggtacatgtcaacccgggcgacgctgataggtcactttgcccgagaagaatcagcgacacactctgttccatacaagggtgtgtggcaggagcggtccaattcgtattcattatcgacagccggtagttgcacaattggcgagtaccatgctggtcgaaaagttggttggttacccacctcgtaa

SEQ ID NO: 1453 - DNA, 5503 bp, Zea mays
  Peptide Sequence Number=SeqID_44828
atggaccgaaggtccatgacacctggtatcagctccaggttatcctcaccaccaccagccgcccatccctcaccaccaccagccgttgcaacgccctcccactcgccctctccaactccagatgcattcactcggctcgaagagagttttggccgtctcgaagagaagtgggatcaattcgttgtgatgttccaccgctacaaggagaagacagagaaggaactccaagcagcggtgcggcttcaggcggcagcgcgagggttcctggcacgccgccaggtacagtcccttcgtggggagaagcaccttgctgtggcctccagggccaccccatggccgtcatcacatgagcaggccgtggtgcgcctgcaagccgcagtgcgcggcttccttgttaggcgggcggtgcggaagctgcacttgctgatcagctcatcgctgcaccaactcgcagcctgcgcgcccaaccaccaggtctcgtctatactttttgaaccccctgcagaagtcgagatctgggtatgcagcccccctgcacggccagagagggtcgtctccttcattcgggcaactgccttggtgctggacagacccaacataagaacggcttggttcctccttcacctgtcatccaacgtgaagtccgcagttcagctctttccttgggatccaggaggacaggaggacatagctggagttcaaatttatattttagttccacaattattttgtattttcgtcttaaataataaagaaccaagcctgcggcagaggggtataacctcgccggagaagacagctatccccatggaccgaaggtccatgacacctggtatcagctccaggttatcctcaccaccaccagccgcccatccctcaccaccaccagccgtcgcaacgccctcccactcgccctctccaactccagatgcattcactcggctcgaagagagttttggccgtctcgaagagaagtgggatcaattcgttgtgatgttccaccgctacaaggagaagacagagaaggaactccaagcagcggtgcggcttcaggcggcagcgcgagggttcctggcacgccgccaggtacagtcccttcgtggggagaagcaccttgctgtggcctccagggccaccccatggccgtcatcacatgagcaggccgtggtgcgcctgcaagccgcagtgcgcggcttccttgttaggcgggcggtgcggaagctgcacttgctgatcagctcatcgctgcaccaactcgcagcctgcgcgcccaaccaccaggtctcgtctatactttttgaaccccctgcagaagtcgagatctgggtatgcagcccccctgcacggccagagagggtcgtctccttcattcgggcaactgccttggtgctggacagacccaacataagaacgggttggttcctccttcacctgtcatccaacgtgaagtccacagttcagctctttccttgggatccaggaggacaggaggacatagctggagttcaaatttatattttagttccacaattattttgtattttcgtcttaaataataaagaactaagcctgcggcagaggggtataacctcgccggagaagacagctatccccatggaccgaagtatggaattcctctctaggacatcttctagcgatgctcctcttgttgcctttgggtcatctgatggtgtcatcagggtcctttcgatgttgacatggaagcttgtgcgtaggtatacgggtggacataaaggagcaatagcttgcttaatgacgtacatgtctgcagctggtgaggcccatgatggaggtgttgttgcagttgaactttctagggtgatggggagtgctccgcagctcattacaataggggctgataaaactttagccatatgggatactgttactttcaaggaaataagacgcattaaaccagtgcctaaacttgcttgtcatagtgttgcatcgtggtgtcatccccgtgcaccaaaccttgatattctaacttgtgtcaaggactcacatatttgggccatagagcacccaacttattctgctttaacaagaccgctctgcgagctgtcatcactagttcccccacaggtccttgcactgcataagaaactgagggtttactgcatggtggcacaccccttgcagccgcatcttgttgctactggaactaatattggtatcatattaagcgagtttgacccaagagcacttccagctattgctcctttaccaacaccaacaggcaacaaggaacattctgctgtttacatagttgaaagagaacttaagttactgaatttccaattgtcaaacacagcgaatccatcccttgggaatgctggtgttgcatctgatgcaggaaggtcaatgaacaattcaatagaacagttgatagtaaagcagaccaagaagcatatcagcactcctgctccccacgattcctattcggtcctttcagttagcagttctggaaacctcatattgaatacaagtgctattcataacatggtactagagctagaaattagggccgcgcagttcttctcgcgcctgttggccgtctgcccgccagccgcccgtcgggaggccatcactcgcctgcctgttggtcagcacgcatgcaccatggaggcggctgcatctcgcatcaaggagccggtgctgcttgcatattatgatgagcaactggcatcttatgaggctcagtttagtgcttatcgaacatggctggatgatgatgctcgagttggttctattctcactgtcagtatggatgatcactttgctgcagagatgtatggggcccgaccccctttgcttcaaaagggggtcatcgatattatatcaccaggtcaggggttcgacgccgcctctccgcagtgtgagggcacagggaagctttttgcctgggacacttgtcgagacagatatgctctggtagagagtgcattggccccaagaatgccacttgttgttaaaggtggttcttctaaaaaggcaaaagaagcagcagcagctgcagctcaagcagcagctgcagcagctagtgctgcttctgctgccacagtgcaagttattggattgcatggtggtgctttacttggtgtcacataccgtacatctcgtagaatcagtcctttgacagcaacagctatatcaactgttcaatcgatgcccttatcaggttttggtggaagtggatcatcttttgcatctgatgatccattttcctctaaggaagggcctccacaaaatttccaactgtacagctgggagacctatcagcctgttagtggcctacttgcacaacctgagtggactgtgtgggaccaaactgttgagtattgtgcatttgcttatcagcagtgtgtctttgttgatgctggagtggcagcgattgacattgaaacaaaaaggataaaacaagaaatgaaagcaagagaagctcagagtcgggcagctgaagagcatggagatttggctcttatcactgttgaagctccccaggttactgtgagtgaaaaagtatcattgaggccaccaatgttgcagaaagaactggatgacagaaggtatgctgaagttgctgtcgctggaggaggtgtgtctgttgcagtaactcgcttccctcctgaacagaagagacctatcggacctcttgttgtggttggtgtaagagatggagttctctggcttgttgacagccatcctggtataagatgccgttgccttgcagcatatggggaccctgttagtgctgtgaaatgggcaacgagacttggcagagagcatcacgatgacctggctcagtttatgctgggtatgggctatgccactgaagctctccatttgcctggaatatctaagaggctggagttcgaccttgcaatgcagagcaatgacctgaaaagagcacttgcttgtctattaacaatgagcaatagccgagatgtgggacaagaaacagctgctgctgatgccactgacgttacccagattcttagtttggcagtagctaagcaagctaagcaggaaagtcttacagatgccgtgcagggaatagtgaaattcgtcaaggagttttttgaccttattgatgcagcagatgccactggtcaatctgacattgctcgtgaagttttaaagagattagcggctgcagcttctgtaaagggagcactccatggacaaatgctgcgaggcctggcactccgtcttggaaatcatggggagcttactagattgtcgggtctggtaagcaatttgattacagctggccatggacgcgaagcagcatttgctgccgcagttctgggagataatgccctaatggagaaagcatggcaggacacaggaatgttagctgaggctgttttacatgctcaggcccatggtcgtccatcattaaggaacttggttataacatggaacaagatgctacaaaaggaactggatcacacaccgactgtaaaaaccgatgccgccgccgcattcttggcttctctcgaggatccaaagctcacaagcttgggggaaactgagaaaaagcctcccatcgaaatacttcctcctgggatgcctcccctatctgcacctccgatcgtgattaaaaaggctggagcaaaacctggtctccctaatgcagcaaaggcgtcaaatgggcctataggtgctcctatggctcaaggtgctcccatggctcatggtactcctgggccacaaggagtccccatgaatcaagttactccatcacagggcagtcatgacgaggcaaggccatcagatgctacagtggctgatgcagctgccgcggttgcagaaggtacagcagctcccccggctgcagaaggtacatcagctcctccggctgcagaaggtacagcaactcccagcagtgaggaagctaaagcagcacctggtaatgaggaaggcacatcaaatccaatcaacgaggaagccacagcagctgcagtttcagttgctgcaggcagccctgactctgctgctgctcctgcagctgatactagctcggacgcacctgctgttaatcccacggaagataccgtctctgccccctcaacggaggcaccaccagagttgacggataagccatcttcagcagaggcatcgttgccacctccacccagtgtttctggtatcgccgctcgggctttgcgactggggttcgacttcgacgtgaaaagagaccgtctgttccgaggttttgcttccatgtcgacgagaggcggcgaggccgcgaggcaggcgacggtgaagatcatcgagacggtgcacgtggaggcggaccggtacagcttcaagtccatcgtccagaggctcacggggagagacgcggtggtcggcggcggcggcgactactcggaaggggcgcccgaccgtggatcatatgaagaggcggcggcgcagcgggctgctgggtttacgagcaagcaagcgagcaggcccttcgctgatcgccacgcgt

SEQ ID NO: 1454 - DNA, 191 bp, Zea mays
  Peptide Sequence Number=SeqID_44829
atgagccgggtcaccaagtcctccaaggtgatcaccgagctcccaacgccactaagccgtctaggtgatgccgatcaccaagagccggccgcccaacctctgcactccgcggtgcaccgtcaccactactattttgagtgcctgcctgcctggtggtacgttgctggagtgctgtggggaccagggggaag

SEQ ID NO: 1455 - DNA, 822 bp, Zea mays
  Peptide Sequence Number=SeqID_44830
atggccatgatgggtacaacatccggaaaagatgtacctctgtcaggatccactcttagcaaagcatttacgcaaaacagagtctttgatcttgagataccttaccttgactcccttataacgagcatacccttgagagtcttttctttagtcggattatgtaatcacttccgcatttcgatatctccgatgttctgtaatgtctgcaagacgggagaaacattcctggaaagagaaatgccgccgcgcacgaggaagaccgcgcgtaagtcaactggcccaattggagtacctcgtcatcaacttgccccacgggatgagaatagtagtagcggaagcaacgatccaattggggatctcgaagcccgagtgaatcagcttcaaacggaactgcaacgcaggaccagcatatgggtcgcggatggcgacagaataaacgaattgagaggttacatccgccgtctgcaggatcagcttgctgatcgggatttagcgctcgactgggcggtacagtctcgttcagtggcatgggctaaggaagcaaaggctcgagctcgagtcgaagaacttagcgctgccattgacaatctgcaggcgtattgcaataccctacatgaggaagtccatgtactgtattcgcaactacatcccaatgcacctacggatcctgtcgggtcggaagccggaccctcgcacgttgcgggagaagcacttggtggtgagctagacctttttaagccccctccttctatgaggctggtcgatgaatggtctcccacacccgacgacaaggctgccaggagcaaccagaagcaggaataa

SEQ ID NO: 1456 - DNA, 315 bp, Zea mays
  Peptide Sequence Number=SeqID_44831
atggccccgctcggcctcgggccaatgcccttgccctcgctcgctagcttttctggctgccctgctgggctgctcggcccaaccggcctggcgcggtcggtcgggcagggctgtggaattgctcgtcggagcaatgaatccgccgcggtaccactatgctacgtgaccggctgcctcggcgctatccttcctgtgaggcgaggcaccagccatggcaccgccgtggttgtgcgccgccgcgccagggtcagatcggggccgttggatcttgatccaacgatgggtggcgcgtaccggttcgatgcttcactctag

SEQ ID NO: 1457 - DNA, 654 bp, Zea mays
  Peptide Sequence Number=SeqID_44832
atggccacccgctgggccgctaccaggccggttgggccgagcagcccagcagggcagccagaaaagctagcgagcgagggcaagggcattggcccgaggccgagcggggccatgaggccgagcggcggcgctcaaccgtgcgcccgacttccgcgccgtgcgacgtgctcctctctgcgatatctcctcctcaacggcctccgatttcgtggcttgctcgactccttaaagtgggtgaggcatcccctggctgagacaggacgcagccgctggttctctgctctttctcctctctctgttcactactctgatccgattccatcgccaaccggtggtggttctagctgtgttcgtgcacctgtgtggtgccgtgcatcttctctggtctctgtccaccgtggcctggtgcttgggctccctgctgcgcggtgttcctcttctcgggctggtgccgtggacgtctccctcggctccggcagcggctctagtatctccgtcaacctcccgccgtgcaggctcataatatttgttctaaaaccctgttttggttctacttatacccggttgaggcctgtgatctccggtggagtcttgcaacagcctaggacggggtcagactcgatgaaggctctgacgcattgggcccgtgcgtaa

SEQ ID NO: 1458 - DNA, 57 bp, Zea mays
  Peptide Sequence Number=SeqID_44833
atggtctgcggatctgcttctggctctagatctgatctggtaaggtcgtggccgtga

SEQ ID NO: 1459 - DNA, 330 bp, Zea mays
  Peptide Sequence Number=SeqID_44834
atgattgacgcccccaagtggataagcacgagcggcaagctccaaggattgccccagcgaagtccggaccgtggtctagcgcagctgggctggcggcggcgtactttcctctcccctattctctgttggtggcgcgggtgggtgaacacgctacgaagcatggccaggtggggaagaaaaaggaactgccctggccacctttatacggaggagaggaggtcggtagcgcctggattgcggatatggccgagaatcacggcagcccaggcggggtctgtgcggcttcctagcgccggtagtttacccgagtgcgaggatgcaggaggctaa

SEQ ID NO: 1460 - DNA, 891 bp, Zea mays
  Peptide Sequence Number=SeqID_44835
atggccggagctccactgcaccgcgcccagctccctctgctcgggttcaagctcctgcgcacttctcctgctccagctcgccatggcgcgccagccctcaacgccgagcacctcccagccgaggtccttttcctgcgtgcgcagtctctttcctcccccaagcgccctcgcttcctcccatggctgctgcgcgcgctcggctgcagaccgccggtcgagctccctccaacagcgccgtcgttctgcgcactggccttgccaatttctgtccatgcctccacactctgcttcgaccagacatcacgcctgtcagtctgtgatcgccatggctacagcgttactctggtcgtcatggagactcctctagcgccgtgcagcagtgcgcccttaccaaactcgtggtcacggtctcgccttgctgccgcagccgcgcctactgccgcgcacgacctgctcccttgtgcgcgctctgcttccttgccgagctcgtccctgcgcgccgaggtcgcgcgcagctctcccagctcgttggtgttcccagctcgccctgtctgcgcgccgtgctcccttgtcgtggctttctgcttcctcgtcgtgcgtgtagtattccgttgttcctgcgcgtgcttcggcgaaggtccctgttcaattctcctctatcgtgttgtcgtgcgcgcgaaactgctcgcagtcgacatcgtgtccgtaacacgcgcgctggacacgcagtttgatcgaagattttattcggagactgtcgacattctcgcaagctttaagtcagatttaatggacggtacgttaattaatcgcgtgatgcggaagacaagccaagtcgatcccaagcgcggactacttcgcatggtgatgctaatggacgaacctgtctga

SEQ ID NO: 1461 - DNA, 408 bp, Zea mays
  Peptide Sequence Number=SeqID_44836
atggatcttggcacacatatggtatgcgctcagttctgccccctggaaccggatggttcgtacccttcaaaccaccgggttaacagtagctacgcccctccgccacggcaaatacctgtctacccagcggtagtagaggaagtcccggtggacctccctcgcattcgagtggagcatggagtcatcctagaagacagcttggaggaacttctgccgacgcccaccccgttggcggaatcattggccttcgtagctacgtcattgacctcagcaccgcctgcatcagccgttcaagctcgtgcacccggaggcgacgacccagacaactctagggacgacgatgatgaggatgacgacgacaacaaggacgaagaggaacaagtcaacgaggaggccaactacacctag

SEQ ID NO: 1462 - DNA, 453 bp, Zea mays
  Peptide Sequence Number=SeqID_44837
atggggctgcacccaacacaaagctccatacaaccatttcatggaacacctagagcgcttcgaacgggatggacgatgtcgtgggacggggctactgctgttgcaacacaggaagggcaagctcaccatggtgaagctgcaggcggccatgggaagaggtggagcagtgagaggcgacttaaggtaagggtgccatggcaggcctgctgcaggggagggcgtcgagctgcagcaaggagggacggccatgggagatggggcgagctcccgggcagggaggagagggcactgaccagccatccagagaggaggcgtccatgggggaagagcagggcgaccagttgtaggagatggggagggctggtcgctggaggcctggagaggatgaggttgagagagagggcggcatgcgtgctgccagcaagggaagacgtgggaaaatatcccagatag

SEQ ID NO: 1463 - DNA, 126 bp, Zea mays
  Peptide Sequence Number=SeqID_44838
atggcgagagtagcgtgtaccctccatggcaagaggctggacggtggtgtatctgtgctctcgcatacccttgagagtcttttctttagtcgggttacaagtcactttgattgtggttggtgttaa

SEQ ID NO: 1464 - DNA, 513 bp, Zea mays
  Peptide Sequence Number=SeqID_44839
atggcgcctcctgttgacgtggccagtctacgccctaggttgggcgatgtggaagctcctccgaagccgaggtcgagtctatcttccgtggccgagcccgagtccgagccctgggtcgggcggagcggagttcgtcgtcttctggggctgagcccaagtccgagccctgggtcgggcggagcggagttcgccgtcttccggggcttagcccgagtccgagccctgggtcgggcggagcggagttcgccgtcttccggggctgagcccaagtccgagccctgggtcgggcggagcggagttcgccgtcttccggggcttagcccgagtccgagccctgggtcgggcggagcggagcttcctatgaccggtcagtggagcggcgaagtgaaggcggtcacttcggctctgtcggctaggggggcgcgcgtcaggataaagctttatgctgatgggggttaccagctgagaattaggagccttgagggtacccctaattatggtccccgacagtag

SEQ ID NO: 1465 - DNA, 1980 bp, Zea mays
  Peptide Sequence Number=SeqID_44840
atggagggggagcagcagcaccctcagcgtcaaccccaccttcggcgaagtccgaccgagcctcggacggcaatacgggcgaaggatctccgctccgaaagacgacatcagcaccacgcccgggccatcaccgccagggtctcctccagggacccgacccgagcagatggctcggcctggccgccccgaagcctcagccagctgtcccccgaggacaccagcccggctcgtggcctcggcaactcgactccggcgtcggtcccgccagtggacggcccgaccaggctccggctggcgaagtcttcttttcgagccaactctgcctctgtccatgctgacaccgctgcctccggctctggctcaccgcagagcgaccgagggtacgaacaatcaccccacattggagggcctgcggggcgacgaaaccccaggcggctcatcgccgcccgctccggcagcagcgacaacgacttccgctccgggcggccaaacagcagcagcgatgacctcagggcagacgctgctgcgacaaggccctcgctcgcgtccccgcccaaggagcgaggacatgcagaaggccgtagagttggaggtcagtccgcgggtggcgccggttatctcgtcggcggagaaacctctttcgactgcctcggtgggaggtggcaccggaagcagcgccgaagccgctcaggccggagagccagacacgcggcagctgccagcgccacgaacggcgaacgcccttccccccgatcactgagggaaggagcgggccgctgcccgcgcggagaccggccccaactcggcacactcccctccccagcattgatgatgaacatccttgaagctgagggaggggcagaggccgcagcccggcttgcttctccccaccctcaaactggtggtcaccgtcttgggacagaaggagccaaaaccgccgcgcgcggtgcgcgcaactgcccagcagttacaagcattcctccactatcgtctggaccagcgggtgaaagggcggaccgccatgacaggcggcacctttggcaggcgaagcaggcgacgcttcacctccgccataatgaccacgtcaaaaaagggaccgggaaaggggatactccgaaagggatccttctccgcgaaggaagcgggccccgagcccccctactgatcagaggtttgaaggctggcccctcggaagggttcaacagctgcctcagagcactcgggctccgtgcccactactgttcagaggttcgaaggctggcccctcggaagggttcaacagccgcctcaggccactcgggctccgcgcccattactgatcaggggttcgtaggctggcccccgaagggttcagacagccgcctcagagcacgcagagcgagggatgaccctgggtacgttcgatacataaccaaggctcgggctacgctcccgaggtcaaggctcagtccactcaaggaacacgatctcgcctcgcccgagcccagcctcgggcaaaggcagccgaccccggaggattcacgtctcgcccgagggccccctcaagcaaccctcgggcaccataggaagctccgcctcgcccaaccccagggctcgggctcaacctcgatgctggacgacggactttgcttcgcccgaccccagggctcggactcagcctcggctctggaagacgacggactccgcttcgcccgaccccagggctcggacttagcctcggctccggaagacgacgaattccgcctcgcccgaccccagggctcggactcagcctcggctccggaagacgacgaactccgcctcgcccgaccccagggctcagactcggcctcggctccggaagacgacgaactccgcctcgcccgaccccagggctcagactcagcctcggttccggaagacgacgaactccgcctcacccgagcccagggctcggcctcgacctcgacctcggaggagcctctgcctcgcccaacctaa

SEQ ID NO: 1466 - DNA, 732 bp, Zea mays
  Peptide Sequence Number=SeqID_44841
atggagtacacgaaacacacgctacaagacaatccgatcctgcaggctcggaccttgacacttgaagggagcagcagcaccctcggcatcgacaacaccttcggcgaggtccgacctagcctcggacggcgacgcggcccgaagatctccactctgaaggacggcgtcatcgccacgcccgggccatcgccgtcagggtcttctccgagagtccggctcgggcaggtggctcggctggtcaccccgaggcctcggccggctgtcccctgcggacatcagctcgacccgaggcctcggcaggcctcgacagccacaatgaacaaaaacactggcattcaaagtgccattacaaacggaactccggttccacctccgcagcgcgcgacatcttgggcggtcctcccgtgcacacggcgcggcaaccgccttccggcaggagggggcaccgggagccaagccgacgagcccgacgcgctgaggctgacgacgcccgccgtcgaccggccccgcgttgttgaagtccgacccgcccgcagggccagtgagcaccctctccctcaaacgccgaaggagaggccgacccgcgaacccacgcgggaggtagagctccggctcagcccggcctccaccccagcgaggatgatgaacatccttgaagctgagggtgggaccaagatcgcagcccggcttgcttctccccacccaggggctggtggtcaccgtctcgggtga

SEQ ID NO: 1467 - DNA, 531 bp, Zea mays
  Peptide Sequence Number=SeqID_44842
atggagaaccgtcccgggttggaaaggttgctggagactacccatctggagcttgacgggaagctgttcgtcaacacgcagcaggcccctacctggcgcgtcaactgtcggtgtttcgaccccggggggtccctggaccgacgagtcgggcgaggcggaggctcctccgaggtcgaggctgagccctgggctcgggcgaggtggagttcgtcgtcttccggaaccgaggttgagtccgagccatggggtcgggcgaggcagagttcgtcgtcttccggagctgaggctgagtccgagccctggggtcgggcgaggcggagttcatcgtcttccggagccgaggctgagtccgagccctggggtcgggcgaggcggagttcgtcgtcttccggagccgaggctgagtccgagccctggggtcgggcgaggcggaattcatcgtcttccggagccgaggctgagtccgagccctggggtcgggcgaagcggagtccgtcgtcttccggaaccgagtctgagtccgagccctag

SEQ ID NO: 1468 - DNA, 249 bp, Zea mays
  Peptide Sequence Number=SeqID_44843
atgccggaacaagccgagggcgcgacccggacggagaccgatgtgacccccttcgctctggcgtcgcagatgaaggccccgcttgatgtcgacgggctttccacgtccacaccgccggggaaggcccattctgacctgcagtctgccagtttgactggcagactgactgtcagcctgccccaggcggttgaaccggtcctaggggcagttcaaccggtcctccacagccaaaatcagcccaacggctag

SEQ ID NO: 1469 - DNA, 435 bp, Zea mays
  Peptide Sequence Number=SeqID_44844
atggccggaaatggccagatcgacatcccggccgtccgtttaccactccatggcttacgtatcatctccctccccaggcgaccggcacggcggcacagggccatcccccagcggcgccagtccggcaaccgatatgcaggtatcgacgacgacggctcctcctctgtacttcggcgagctccacgcccggcgctacggtgttctgatttgaaaggggtttgtgccacgcggttcctggatgaggacgaagcaggtagtggatttcttaccgagaatgaagaggccgacagggctgtccacacgagcagtgcgattcacggcgatgaggtgggtagcgaggaatcaggacgaccccgcggcagtttccaaacatgtagatatcttggaggcttctaccagaccctgcgcctatcggagaggcacgccacgacctag

SEQ ID NO: 1470 - DNA, 72 bp, Zea mays
  Peptide Sequence Number=SeqID_44845
atggggaagcctgtcccatcactcctcatgctcctcctcagccgagtacaatggatcaagcagtctcattag

SEQ ID NO: 1471 - DNA, 816 bp, Zea mays
  Peptide Sequence Number=SeqID_44846
atgccgcgactcgaggcgacccagcgcacgacccagcggcgccagcctggcgcgacggtcaatgcggccgaaagtgggccggcagtaatgacggtggcaggcgggcggaagcagcggtcacgtcgtcagccaggctcacgtcccatccaggggcagcaagagagcctcctctcacggcgtgaagacgacgcgcccgtgatccgttcctccaacggctcgcgcacgcgcaacggccgccctgccaaccactcgccccgtcgcattaactccgcggcgggacaggcggcgcttctggcaagagaagcgggcgacgcttcgccttcgccggaccgggaaaggggggataccccgaaaaggatccttccctgtgaaggaaccgggctccgagccctccctactgatcagagggctcggactcgggctaggccacggaagacggcgaactccgctccgcccgacccagggctcggactcgggctaggccccggaagacggcgaactccgctccgcctgacccagggctccgactcgggctcagccccggaagacgacgaactccgcttcgccctaccccagggctcggactccgccctggcctctaccgaacaacctccgcctcgcccgacccaggggctcgggctcggcctcggccatggaagacagactcgacctcggcttcggaggagcctccacgtcgcccgacctagggcacaggcccgccacgtcaacaggaagcgccatcatcaccctaccccgagccgactcgggccgcagagaacaagaccggtgtcccgtctggctagctccgccagatag

SEQ ID NO: 1472 - DNA, 558 bp, Zea mays
  Peptide Sequence Number=SeqID_44847
atgacttctcacggatcctcggacgaagggaacgcacagtcccacacagacgaacttgcacgagagagttttccccgtatcttgtgggaggctgaggatactattgaggcgattgctctccacgggctgaccaccttttgtggttttcaccccttggagctgtctactcatcccattggcttattccctgctaaaaaggaggacgacccaatgtggaaagaccgagtggagcatgccaaggatatatgggctctttacccagggcagactgcgcacttgacggtgaggcgaggagaggcaatgtctcatctgatggcattgttggaggctaccaagattaccttggataacagagaggaacttgtggtagacctatcaactgagatggtggaaaaggacctacaggtggaacagatgtccaatgagattcaggagcttgaggaactagtgggaaccagggagaacaccattgaggttctcgaggatcagctaatcaacactcaacagcaacttgcggacgctaaccaacatttggatatgcaccaccaggagatctag

SEQ ID NO: 1473 - DNA, 222 bp, Zea mays
  Peptide Sequence Number=SeqID_44848
atggctgatattccagagggagcacccatcatgactgttttatcagtaccaaatttagtgccaagtgccaattaccttttcaccacaccaatgggggtattaccatttcaacatcaggaggcaggcttgccacctatcaaatcaacaggcatgtgcctattgtcacacccggatttcggggcaccaagacccgggcgcgaacataatcaccaggtgtgctag

SEQ ID NO: 1474 - DNA, 429 bp, Zea mays
  Peptide Sequence Number=SeqID_44849
atggcgaagcctggccacgctactcctcctggtcctctcctgcgaaagcaggaacccactcgaccatctatcctggtggcagggatggaggccaagtcacaccatcaaccaaatcaaggaggtacctgcaaaaattatgccacaagcaaggctgagtatactaatactcagctagacttacccgtggccacacttgtacccaccatatctagaatgggagacccagtcttaggtcgcgtgagggataaagtccgcacccggcttcactcaggtactaggtttaccggttaccatatttcccgacatgtgtttagtacgttaaaacgcttgacacagccaaatcccaaaacaaacaagcagtcgactcaagacagctacaacaaagtagggcaatcaatcacattcaacatgtttgggacaacaacatag

SEQ ID NO: 1475 - DNA, 363 bp, Zea mays
  Peptide Sequence Number=SeqID_44850
atggccgaaaacgaagaagagatcgaagtaactgaagagaagacaccaccaccttcggaatctcaggccggaaattgtttctactttgatatctgcgggttcgagcctgactcacctattaacgaaggcaagccccgaaaaacaaaaggatttgttttacaaaagatgattggcaaagtgggagggttgttttcaaaaataaaatgtgatggtggatccatcatggtcgtgatgggttcaacattggaacagatgtacctctgccaggtgaggaagcaacaaacttttgttgcttttgctctaaagtggttccaaatgaagaaaaacaagagtgaagctgcgggaggacatggtcctccataa

SEQ ID NO: 1476 - DNA, 2009 bp, Zea mays
  Peptide Sequence Number=SeqID_44851
atggccatggggggtcctcaggttggcttgggatgctcggatttggatttctccgacgatgctccttgcgattgtgctcagagtctgtggggcttctccttcaatctttcattggtggctcggcggacttattcagggtctcgcccctttctgatcgggtctttcgtttctcgctttcttgcaagaatgttggtttcgcggtttatcggcttcgttcttactcctgctctgtgttcaaagcgtatctgcacctatggaactctggcggtccaaattggatcattgaatggcagcgttattcagaggaagaatcgaagtcttggaaattggtttctcatcgccgttcttcaccggtctcgttcgctgatatcgttcgccccctctgctgtcgcttacaggtgggcctccttcgccgccctttttaacaattttgctgagttcactcaggcggttctatcgagtagaaactcttcgccttccatggaacttgcactgttcacaaaaccccattccgctccgctgccgtggaagaatccgtcgactttgagctctccgctgagtgtggtgcttccgccgccttcgcggtttgcttctctcagagccgctgaagaaatggcttttcacagagttgatcctgtgtcgttcctcccccatggctttgtggcgcagcaggtcgatcatcgtgaaatcatggtgcgtactgtgactcgtcctcaaccctctgcgcatgaagattggggcattgtgcttgttcaacctttgccggagcatgaggtcaatttccacatctttaaggatatcattcgtgagtatcttgtgggggtccggcgtgttcaagtcaggagcattcagcgctcccatttgggacaggcacttgaagtgccccagttcatcgtgttctcggtggctaaaggtttccagggaatttcatggactgtccaatgtgacatcgtgcaacaatttatgcttggtgctcaacctcaagatgaggatcccgtgccaccctacccacatgatgggcaccagctttcagtagagatttttggaatgggtcagccggtggccaattttcagttcgatctcaacattcctcccatggaagggaacaatgttgaggaagatgttgccaacaatgatgatgaaggttgggacccttggccagttcagcaggctcaactccctgagccagtggccaatgcaaataatgcaaacgttgcgaacaatgcagaagaacagttcagttatcagttgtcgggtcttgaggaccttccttctgatgaatcggtgggctactttaacgatatcattatccctcagggagtccagttccatcaggaggaagccccggtgccggctgaagcagttctcgccttgccagcattccctcccgaagacatgattttggagggaaataacgaccagggagaagacaacatgcaaattgaagataacatcaatgtgggcctcatgccagattcttttgactgggccaagaaatttctgttgtcaggagctacctctaccttcgtcgagcccagcatggacaccattttaatcaagattccctccaagtgtctgctcccttccagtcaggacacccatgttgagccacagtccccatccccgacaaaggcagctcttaggaaaaggcagcctatcatggtcgacactgcagttaggaggagtgccaggcttagggcaaaggccaagggatttaaaacctgcactaggattggtaaaagggattgttcatgctgcgcacaatgcgctccaccctccattcagcacgatatcatcaagaagttgggagctgaattttgtaaggtggacccatccaaacttaatcctgatgacctaagcagatccagggccactggtattgctattcagaggccagatgctcctcccagcagcaaggacgatgagcccaggatatctgaagaccaggcggtggactccctctttgatgatgatgatgatgatgcgggatctagtgcctcgacggggtt

SEQ ID NO: 1477 - DNA, 816 bp, Zea mays
  Peptide Sequence Number=SeqID_44852
atgacgcgccttctcgactacggaaccggtgccgcgactcgaggcagccctgcgcatgacccaacagtgccaatcgagcacaacgatcacggggcaagcgacacctttggcaggcgaagcgggcatcgtttcacctccgccatgatgaccgcgtcaaaaaaggctggcccctcggaagggttcgacagccgccccagagcacgcagagtgagggatgactctgggtacgtccgttacatggtcgaggcttgggctacgctcccgagtcacttcaccctttcgctgaccgacctgacaggaaaacagcgccgctcgccccgctccgactgctgtgccacccaccagggtgaggctgacgacagccatgttcagcctcgggcgcaacaggaagctctgcctcgcccgaccttaggcctcggaaggaggtctccgcctcgcctgaccccagggctcggcctcaacctcgacctcggaaggtggtctccgcctcgcccgaccccagggctcggcctcaacctcggcctcgggaggaatcgcgtcctcgctcgaccccggccttggcctcaggagaagtctccgcctcgcccgaccttgggctcggaccgaccgcgccatgggggatacatcattaccctacccctagctagctcaggctacgtgggaacaagaccggcgtcccatctagctcgccccgggctcaagcacttctccaacggccacgttatcgcctacgcagggctcaagcgcttctccgacagctacgttggcatgtacacagggctcaggcacttccctgccagacacgttagcgcctag

SEQ ID NO: 1478 - DNA, 516 bp, Zea mays
  Peptide Sequence Number=SeqID_44853
atgtccggtgcaccagaggactccaactctaactcgtcaccttcgggaatttctagaggcaactccgctataattcaccggactgtccgtgcaccatacgacagtcagccccaccaaacggctccatcggaggagtttggtgactcagagtactcagaggaggagttctcctctgagtccgaggggtctccggctcccatccccctgcgtgagtcgtctgacgactcagacgactcccaggggcttgcggcggaggtctggacgtacatccgggccgtcgagcgctccgggctcgagggctcggatgagtcggagtactcctcggatgaggaggactcggacggcggcggcgaggacgaggacgacgacgacgatggcgacggtggcggcaggggcagcggcggcggcagcaaggacggcgacggcggcggcagcaggggcagcaaccgtggcggcagcagcaggggcagcaccaggggcggcagcggcggcggcagcaacagggccagtggctag

SEQ ID NO: 1479 - DNA, 621 bp, Zea mays
  Peptide Sequence Number=SeqID_44854
atggacatgtggttacctgcgaaaggcaactggctgttggggtcgattggaggaatcaccacagcagacgagctcgcggtcttcctcttgggtgccatctcgattctaccagcgagcagagcgggaggcgaatggcggagaggattcggaagcgggaaagcaagaactaggacacagaaagcaaaggcggctaaaagtgcagctcttatgggatattctcgagccagataccgtttcaaaaagtgcccagtcatcacccagcggttatttccaaaaccccagcatgccacgtggaaacccggcagttatctccagaacaccggtgcgccacctcatcactcgcccatcgtcctcaaagtggctcgcgcggcctgctatcactcggcgtcgcctccaaaacgccgatttcgtgttcagtcgctcggcattacctctaaaatgccgacgtcgccttccagtcggtcggcgttgcctccaaaacaccgatttcgtgttcagtcgctcggcattacctctaaaatgccgacgtcaccttccagtcggtcggcgttgcctccaagacgccgatttcgtgttcagtcgctcggcattacctctaaaaatgccggcgtcgctttctaa

SEQ ID NO: 1480 - DNA, 1053 bp, Zea mays
  Peptide Sequence Number=SeqID_44855
atggcgcttcctgttgacgtggcgcccgagtccgagccctggggtcgggcggagcggagtttcgtcgtcttccgggtcttagcccgagtccgagccctggggtcgggcggagcggagttcgccgtcttccgggtcttagcccgagtccgagccctggggtcgggcggagcggagttcgccgtcttccgggtcttagcccgagtccgagccctggggtcgggcggagcggagttcgccgtcttccgggtcttagcccgagtccgagccctggggtcgggcggagcggagttcgtcgtcttccgggtcttagcccgagtccgagccctggggtcgggcggggcggagttcgccgtggcggcgctgtccttctgtcagactggccagtggagcggtggagtgacggcggtcacttcggctctgccgggggcgcgtgtcaggatgaagctttatgctgatgggggttaccagctgagaattaggcgtcttgaggaaaagatagagcagaacctatgcacacaaaatagtggagttgttgtgaaaggagatgaaaactccggtaatattgactggtacgaaattgatcttgactcactggacgtggggttggaaggcatgagtgtttcaggcagcgatgatgtattggtgcagtggagaaggtctgacatggaaggtgtgatcggtgatgcttgtgtcattgagaaggcacttgctgaatttgtagaagaatcacatgatattgggttagcagatgaggaggaagaagacgacacgtacattgatgatggatatgtagcacctgtggactcttcacgcgactcaaatgatgatgattttttgtttaaaaggaaagtggttgacgaggccctcatcgccctcctcctcctcgtcctggagcgtgtagaagccaacggaggaagagaaggaggaagcggacctgatcacctcgcctgctctcacctcgggcacttcccagccccaccgctccggatctactcgacgtacgcatggtcggcgggggtacggctggttgggagcgggagcatgtgggggtag

SEQ ID NO: 1481 - DNA, 957 bp, Zea mays
  Peptide Sequence Number=SeqID_44856
atgccggggaaggcgaactgttgctgcccagctaggatgcaacattccatcctctgtccttgctttcgtggcgagaatgggagcgaggacctgccggtgcgctttggagcggcccgcgcttgctggtgtggcgttggtggacaggcggacgccgctgttggtgctgacgtggtggcagctggagaaagcttctccgtcgttgaggccgtcggcgccgcctacggaccaacctccggctctttggctttaatgtctggttcgcgtcccttgagtggggacgcgaacgagagccttccggtggctgtgtctgtcctgggaccatggctgctgctgcagaggtcgctggcgagtcacctggagcttgtcaccccgcaggctctccggtgtggaggttgttcatacccgcgggggcggaaccggagttccgtttgtaatggcaccttgagtgccggtgtctgttcattgtggttgtcggggcctgaacatctggctgaggcttcggggtggccactgagccgtctgctcgggccggattcctggaggagaccctggcggcgatggcccgggcgtggtgctgatgtcgtccttcggagcagagatcctccgtccatgttgccgtccgaggctcggtcggacttcgccgaaggtgtagttgacgccgagggtgctgctgctccccctccatcaaggcccgagcctgcaggatcggtttatcttgtagtgtgcgattctgctatcgatatagtcgagaaggcacgaaaaatcgttttggcagaagagttttcgagcgtgaagacttgttcggtccgcggaatcgcttatccgagcgtgagttacttatcgcagaaggtgatgagtgaggtatccgtatcccggaggcgtaggagtccctcggctcggtcagccttggctgcttacgtgtactccgtcgttttcaggatcccactttcgaagtag

SEQ ID NO: 1482 - DNA, 486 bp, Zea mays
  Peptide Sequence Number=SeqID_44857
atgggcttgctagaccctcctgagtgcttccagtccgaggtggcactcaacttggtgcgcaacctgctcggatgggatgcgccgacgttcactggaaggatccgtgttggcgcctctcccttcggcgatttccccgccgaggagttcatgctcttcgtctccaacctcccatgcgggttggcgctgccgatctcgtctttcttcgtgctgctgctggaggagcttggcctccaacctcaacacttcacgccccacttcatccttcgggcggccatcttcgcctacttctgtgagctccaactccacgaggtgggaagcgagctgagctgcggctccatctctttggctttaatggcctcgacgtcgcctccaacggcgaccgctggtccggttgcggatactaaagacgccgtccgggaggtcgtacaagatgccgtggagacggcggccgcgcgcttccagcgtgaccctactgatgtcgaatag

SEQ ID NO: 1483 - DNA, 336 bp, Zea mays
  Peptide Sequence Number=SeqID_44858
atgaataatgactgtaaccttgctgacggagagtacgtcctcgtgctggagcaaagagctgctcaggaggtagccccggatccagcaccagagcctgcaccagaggacctgcctgccactgctttggaaggcaagccccgcagattgccctcctcacgcgacctgagacgaggtctcccattccggttatggtgggtacaagtgcggtcactgcacaacggcagtcggggttctctagaggaaatggttgcgggagtgacttggccgtccatcttgccaccaggttggactgtcgagtgggaccctacctcggctgaggaagagcatgaggagtga

SEQ ID NO: 1484 - DNA, 312 bp, Zea mays
  Peptide Sequence Number=SeqID_44859
atggcgtctctgccgtttgatctgagcgaacgatggagattagaagtcgcgtaccctttcgtgcgaatggatctggaccgttgggttaggatcgatacctgccaggcagatgctgactgggcgggcttttgggctcacacggcactggcgtgcatgcgggctctcgggccggcacgacacggttacgaaccagtcgtgccatgcttgggcctgaaggcaagcacgtcgggcgacccagcccgatccaatcatgtaaacagacctatagtgctcggacctgttgaaagtcgcctagagggggggggtgaatag

SEQ ID NO: 1485 - DNA, 504 bp, Zea mays
  Peptide Sequence Number=SeqID_44860
atgggtgtagcccccgaccttcaaatggattttttaaggataatccattcgaaggtcttccttttgcttgtaaaaattggcatgaagctatttgcattatgctttggaggtatttactgcgtgccctgcacggatgtgaccgttttgaaaaatatactgataattcctgggcgtccccctcaatgggtgtgggcaagggacggcttggtctggacgtacatccgggccgtcgagcgctccgggctcgagggctcggatgagtctgagttctcctcggacgaggaggactcggacggcggcgaggacgaagatgacgacgacgacgacggcgacgacgacgatggtggcgacggcgacggtgacggcaacaacagcggcgggggcagcggcggcaagggcagcaccagaggcggcagcagcacgggcagcaccagaggcggcagcagcaagggcagcaccaggggcggcggcgacaagggcagcagcagcaaggccagtggctaa

SEQ ID NO: 1486 - DNA, 999 bp, Zea mays
  Peptide Sequence Number=SeqID_44861
atgggcgcgcctgacttctgcgcgtgcagagcgcgcattaaatgtgccgcagacaataagttgacaagcccagatgcatatgacaaagtgatttgtgcagagataccagagaaggataaataccatgttttgcataatctggtcatcaagcatatgctacatggaccttgtggagttttaaataaaaagtgtccttgtatggtcaatgaagagtgtcgttttcgctatcctcgacaattctgtgctgcaacacaacaaggaaaggattcataccctttgtataggaggagagatgatgggcgtcgtgtaaaggtaagaggatgtgtgttagataacaggtgggtggttccatacaatcctggattgcttatgaggtataactgccacataaatgttgaagcttgctcaagcatcaaagccattaagtacatgtgcaaatatgtttacaaaggccacgatcgtgcatcattctcagttgaccctgctcataaggaagatggagtaatcaatgagattcggcagtacagggatgccagatacatatccccacctgaagctgtacataggattcttggttttccattgtttggtgtcaatccttctgttttgcaactccaatgccatttaccaggtatgcagtctgttattattgacgagacagctaaactacaagacattgtcaatgagccaacttcttctatgacaacactcacagagtacttcactaagaatcatactgatagttttgcaaggacattattgtataaagattttccagaatactacaggtggattcctggtagcaagcgctggcagagacgaaaacaaaggggacagattggtcgaattgtgtatgcacaccctgctgaaggggagagatatttcttgagagtacttctaaatcatgttagaggtgcatactcatttgaggatttaagaacattgggtgacatcacatgctcaactttcagagaagcatgcgaaaaaaaggactcatag

SEQ ID NO: 1487 - DNA, 429 bp, Zea mays
  Peptide Sequence Number=SeqID_44862
atggacatgaatcctccattaccaggtaaggatgttgtttattacactgaaatagacgctgtctcacatccgttacccgcacttgacgcacccagccagagaattgcgccgttctttcctttgctctatctaccttctcttccacaaccgaaccctggcagccgctacccaaccctagccgccgcatccatggatcccactgctcctgtcgccgcatccatggatcccactgctcctgtcgtcgccgtggcagcagctgttgatgctgctcgtgctgcggcagttgcagcagctgaggctagatgtgctgcgttggtggcggagaaggaggcacgagctgcggtggaatctgccagtaatgccgccgataaggttcaacttgccgtccaagctgtgaagcatcgaagctttgtccccaaggtttactga

SEQ ID NO: 1488 - DNA, 654 bp, Zea mays
  Peptide Sequence Number=SeqID_44863
atgccgtcgtggcagccggagaggtttcggcaccctgttcatgtgatgtcgtggccgtcggaggagcgttggagccttgcggaaggacagatgtcggggctgtcaaggtcgggcgaggcggaggctcctccgaggtcgaggtcgagtctgtcttccaaggtcgaggacgagtccgagcctcgggtcgggcgaggcggagaccgttgtccgaggcgaaggctgagtccgagccctagggtcgggcgaggcggagtttgtcgtcttccgggggccgagcccgagtccgagccctggggtcgggcgaggcggagttcgtcgtcttccggagccgaggctgagtccgagccatggggtcgggcgaggcggagtccatcgtccgaggccgagacgggggccgagccctggggtcgggtgaggcggagcttcctatggcgcccgaggccggacttggctgctgttaacctcactctgtcgagtggcacaacagtcggagcggcgcaggccatccttgcattaaatgctcctgcgatacggtcggtcggcgtggcgatctggccaaggttgcttctcggcgaagaccgggcctcgggcgagccgaagctttgtgctgatgggggttaccagctgagattaggagtcttggggtacccctaa

SEQ ID NO: 1489 - DNA, 1167 bp, Zea mays
  Peptide Sequence Number=SeqID_44864
atggggagcactcgcgtcgctttcgtcttgttgtcgttggaggaacgcaacttcgcggaagttgacagcccgactgcttcccctcgccggtggtcacccaagacggtgaccaccagttccagggtggggagaaacaagccaggctgcggcctctgccccgccctcagcttcaaggatcttcatcatccttgctggggcggagagcgaggtgagccggggctctacctcccgcacgggtcggctggccaccccttctcccaacttctggtggtggaaaccatcctccagctctgcggaggaggcgccctccagccctgccggggaaggcgaactgttgctgcccagctaggatgcaacattccagctaggatgcagcattccgtcctctgtcctcgctttcgtggcgaggacgggagtgaggacctgccggtgcgctttggagcggcctgcgcttgctggtgcggcgttggtggacaggcggacgtcgccgtcggtgatgacgtggtggcagctggagaaagcttctccgccgtcgaggccatcagcgccgcctacggaccgacctccggctctttggctttaatgtctggttcgcgtcccttgagtggggacgcgaacgagagcctttcggtggctgcgtccgtcctgggaccatggctgctgctgcagaggtcgctggcgagtcgcctggagcttgtcgccccgcaggccctccaacgtggggggttgaagcttcgaccgctcttcgatgagccgggaccggaggcagcggtgtcagtgtggacagaggcagagttggctcgaaaagaagacttcgtcggccggagcctggctaggccgtccactggcgggaccagcgccggggtcgggagaccctggcggcgatggcccgggcgtggtgctgacgtcgtccttcggagtggagatcctccgaccgtgttgccgtccgaggctcggtcggacttcaccgaaggtggagttgacgccgagggtgctgctgctctccctccgtcaagcggaatcgcttatccgagcgtgagttacttatcgcagaaggtgatgagtgaggatcccacttttgaagtagccaaaaagcacgaaagacgttctggtggaaagactttttccgaggatagttttgacacagagggggtgccccccttctag

SEQ ID NO: 1490 - DNA, 411 bp, Zea mays
  Peptide Sequence Number=SeqID_44865
atgaagctaccaagaataagcaggagtagtgatgtagcttgtagaaataatgccgaccaggactcgaggacaggacgcagccggaacttctgggggaagggatgttaccccaaatccacctccggttcctcccacgttggcgaggcgattgccgccttggtaaatgccaccgcagacaatacccgcttccttagggaaatggcgggtcaacagcaattccagcagcaggcaggaaggggttatcagcaaggcccccgtgaaaccacctatctggacttctctgaaactcgtccacccctattcgtcaaggcagaggacccgttggaagccgacgagtggatacgggttattgaacaaaagtttggtcttctccgttgttcagaaacgcagaagccattattcgcagcatag

SEQ ID NO: 1491 - DNA, 915 bp, Zea mays
  Peptide Sequence Number=SeqID_44866
atgaaatttgaatttgagccacacggaatgtgttgcagaaagggaaagattaaagtgcacatacctgatgttcctactgagttgaaaaggttgttcaccagtcagggagatgacgatgcaaaatattttagaaaaaacatacggtacttcaactctcatttctccttcaccagtcttggagttacattggaccgacgagttagcacagcagctaatacgggtatatatatatttcgtgtccaaggtgccttgtatcatcgtctcgaccatttagtgcccggttctcaaggccctcgtcatttgcaactttacttctatgatacagaagatgctacattggcccacagggcacggagatcaccagaccttgatattaatatcattaaaaatatcttgacaatattagagggaaatccatatgtacaaactttcaatagacttggatccattccaaatctagatgactatgttattgaactcaacactaatgtaacgcctgaccaacgaaggtacctcattattatttggatgaagacaaccaacaagatgactatgacatttcaaatggaggagtggttcaatctgcaagggcgacttttccaacaatgggtcgttgacatgtatatcaagattgagtctatgaggcttgattggtactctaaccctgttaaccagaaaattatacgggctgaactataccagccccaaccaccaaacatgaccgttggtggaggctgtctgtcgtatggtgcaccggacaatccggtgcacaccggacatgtccggtgcaccagccatgtcaccaatgtcgttggattccgaccgttggagcttctgtcttctgggcccgcctggatgtccggtgcacaccggacacgtactgttcaatgtccggtgaccgttggcgcgaagtag

SEQ ID NO: 1492 - DNA, 285 bp, Zea mays
  Peptide Sequence Number=SeqID_44867
atgtggtgctggcctgatctggtctctgtccaccgtggcctagtgcttgggctccctgctgcgcggtgttcctcttctcgcctggtgcttgggctccctgctgcgcgttgttcctcttctcgggctggtgccgtggacgtctccctcggctccggcagcggctctagtatcttcgtcaacctcccgccgtgcaggtatcttcagactcaggtcaaaactatacacgatgtgaaaagcatgcctgagacgaaggctgatgttgctctgaaggtatgtccttcatga

SEQ ID NO: 1493 - DNA, 660 bp, Zea mays
  Peptide Sequence Number=SeqID_44868
atggccgggggcttgcaagccacaagggactggtcgcggcagcacgcagggaggcttagacggcctgggcagttgcgcaggaacatgatcacaccggggtcaaggggctgcgctagcaggggacctcgccggatgctggcagccatgcagccgccatggattcggccatgggtagctcggctcggtgaaagagaagagcaaaagcagggtagggcgagatccagggaggggctacaggcgaccatggaagctgagagagatagagacgaggacgactgctccagggcttcacgatgtcaacgatcgagaaggccgaggtgggcgcgtagcttttggtggccaacctccatgccggatcgagcaaggaagggcagggctagacgagggcgagcggggcctgcacgccgaggcgtcgggctggctgcacgctgggccgcgctggctacgctcaggggctctaggccgcgtgccatggtctcttggtcgtgctgccgcgccgcgcgcagtgtaacacccggttttaagggacaaagccgggtgcatctcatacatgcgccaaagaagacaacatatataatcacagagtgtatagagataaatgtcataataatcagagtacttattacacagcggaagacttattacaaaataaaagaataa

SEQ ID NO: 1494 - DNA, 471 bp, Zea mays
  Peptide Sequence Number=SeqID_44869
atgggcgcgcagaacgccgagcagagactggagcagggaccgagctcgacacagggagtttcacggcgcggtggccatgtctgggaccaggggcgcgacgatgggaactgggggaaaaaatggagctctagccggacgtcaggaagacgaccgagcagggcaccgaggaggaagtccagggcgtggcgattttggctgccgcgtcaactgttgccctctgttcccaccggaagaaacgacgaatggtggcgagcaggcacggctgggttggaaggtgcacagcgcgcagataaaaaggaaccgtgggcggcgagattttatcctctggcgactggagatcttttctccatgagcggcggccggatgaagatgatgacgcgcaggaaatatcccagggagataaacgatgcagcaaggaggttgaagataagagatgtacgcatgaaaaaatcaacgtcacgagctttttaa

SEQ ID NO: 1495 - DNA, 594 bp, Zea mays
  Peptide Sequence Number=SeqID_44870
atgaagcgccatagctggagcaagagcgggacacgaactaggcgacgacagcgcgcaaggacgatcttggctaggggaaaaactccgcgggcagggatccgagctgaaaggagccgggggagatgggcgcgtagaacgccgagcagagactggagcaaggaccgagctcgacacagggagtttcacggcgcggtggccatgtctgggaccaggggcgcgacgatgggaactgggggaaaaaaatggagctctagccggacgtcaggaagacgaccgagcagggcaccgaggaggaagtccagggcgtggcgattttggctgccgcgtcaactgttgccctctgttcccaccggaagaaacgccgaatggtggcgagcaggcacggctgggttggaaggtgcacagcgcgcagataaaaaggaaccgtgggcggcgagattttatcccctggcgactggagatcttttctccatgagcggcggccggatgaagatgatgacacgcaggaaatatcccagggagataaacgatgcagcaaggaggttgaagataagagatgtacgcatgaaaaaatcaatgtcaggagctttttaa

SEQ ID NO: 1496 - DNA, 387 bp, Zea mays
  Peptide Sequence Number=SeqID_44871
atgagcgatcaacggtccatgatgctcgatgccaagacgccgcccagatctaatcgtgtgcgtacactgtggatccaacggcccaggcctgtcttcctcccccagcgcggcccgacggtggcgccacccacccaggcggtgttcggcgcattcgtcgagcagttcaaccgtggggtcgcgctcaggcagaagggctctgcctcggggttccagctccatggcctcaacatggagccagggacaaggttgtccacatcgtcccttccgacgacgggctcgttctgtgcccagcccaagcccaagcccaaggacatgtcatcttcagacgctaagccgggcagcacgacaaggcagtcagcgatcgcccgtcgtcgcaagaggcattag

SEQ ID NO: 1497 - DNA, 183 bp, Zea mays
  Peptide Sequence Number=SeqID_44872
atggacgaagccgcctccgcctccgctgccgccgcgcgcctccgcgcctccaccccgcgctctaagaaactgtcacacccggttttagaaggcaaaccgaatgcgaaccatgcacgtgccaggatcagcaattcactggttgcaatgctgacaacctggggatggggggggtttggtgtgtag

SEQ ID NO: 1498 - DNA, 426 bp, Zea mays
  Peptide Sequence Number=SeqID_44873
atgggcaaaggcaggagaggtcaaggctcgccccgtcgtgctggcgacaagcggaagcgcgacccaagtcctccctcagaggactccggcgattcggagtattcggaggaggtttcctccgattccgagggatcgctggctctcgcttctcccccagcgtcgtccgacgactcggacgactccccagggatgagtcaaaggctttcaatatcgaagcatgccagaaggctttcaacaatatacaaagatcagtttgaagagccgaatgatgactggctgacctgtgttgaggcgactagcgatgagttgcttggggcactatacttatccctcgcgaaagcagggaaagaaaaggataactactacttcgcccatttctgctacgccgaagggcaaaaagatcaaggtttgaacgcaccggcctag

SEQ ID NO: 1499 - DNA, 369 bp, Zea mays
  Peptide Sequence Number=SeqID_44874
atggggctcggtgtatacggctcactctgccaagcttgggtggcaatgagattgatggttcttggttttgactcttgtaatgctagtccactacagccaaacaggatacttgctgagtatgttgatgtgtactcacccttgctctacacaccaaaccccccccatccccaggttgtcagcattgcaaccactgctcaggagaagatgaagccatggaaggagacttccaggagttccaagactacgacgagttctaggcgtgggttagcggcaacccccagtcggctgtctgtgaaggccgcgtttatctacgtttcttttccgcactttgattattgtaaagactatgtggatgtctcagacatatga

SEQ ID NO: 1500 - DNA, 492 bp, Zea mays
  Peptide Sequence Number=SeqID_44875
atggagtttgctctccacttctcaagtgtttatccagaaccaaaggctggctcgagcgaagtggccgctctcgggaattcaccgacgacgtacgactataattcaccggactgtccggtgtgcaccggactgtccggtgagccaacggtcggccgcgcaatctgcgcgggacacgtggccgagccaacggctagaagggggcaccggactgtccggtgtgcaccggacatgtccggtgcgccaatggctctcaggctgccaacggtcgactgcgccaattttggaaagaaatcaggcaccggacagtgtccggtgcgccagtcgacagaaggcaagatcagccttcctagattgctctcaacggctcctagctgccttggggctataaaagggacccttaggcgcatggaggagaacaccaagcattcctacaacattcctaagcaccaagacctcgaattcgcgcatttgtttctttgtgatagcatatag

SEQ ID NO: 1501 - DNA, 426 bp, Zea mays
  Peptide Sequence Number=SeqID_44876
atgatgacagaggaagccagtttcagaggccacaacaaagctcacagtcttcagggcaacaacagcgctcttccaggccaccagcacccatgctctcgtgacacaatccctgctctctcatcaccaacgccgctcgatccgctccgtggaaggtccctgctctacgctctcccctgctcccacgctctacatggaaggcaagccagcaccccgctctcctctgctctcatgctctacatggaaggaggtgccggcgaccaaatcgagcggaagcactgctcgcgaacgggattgctgcctcgattcatgctctcccctgctctcgcgctgtacatggaaggcgaagccagcgccccgctctcccctgctctcgcgctctacatggaaggaggtgtcggcgcccaaattgagcggaatcactgctag

SEQ ID NO: 1502 - DNA, 330 bp, Zea mays
  Peptide Sequence Number=SeqID_44877
atggcgattagaagagggggcgtgcgggaatgggcgtggagactgaccggcggggcccacaggtcagcggtccagggtggaccccatgcgcgtcgcgagcgcaggcgcaccctgacgggaccaagccgatgtaggcttgatgatcgaggaccttttaactggccacatgcctcatcatgggtaagctttgcctcggtcggaccaataccagaaaggctaccacgcaatgggagtggagagatgacgagagtagcatgtaccctctgtggcaagaggttgaacggtggagtacctgtgatctcagttggcgtgaacccattctggtcttga

SEQ ID NO: 1503 - DNA, 417 bp, Zea mays
  Peptide Sequence Number=SeqID_44878
atgcctacccagtgcaacatcccgtttacttcattagtgaagttctgggtccctcgaagaaaaaacctcctttccacctcccccacgctgctcacacgccaaagcgccgccgccattaaccgccgccacccgagcccgtttctccgtcgccgttggagccccgccgtgccctctgccacgtcgccgaggtccgccaccgtcgactcgggctaccgccgcgccttcgccgccaccgaggagtccccggagttcgccttgagggccgtttcccccccgcaccccgccttcctgccatttgggccccgcctgtcagccgtccgcccccgcgctgcccgcccggccccacctgtcagccgtccgcccccgcgctgcccgcccggccccgccgcgcgctcgtgcgcccgcccgcggatctaa

SEQ ID NO: 1504 - DNA, 894 bp, Zea mays
  Peptide Sequence Number=SeqID_44879
atgaacaagacaccggcactcaaggtgccattacaaacggaactctggttccacctccgcaggtacgaacaaccccacacgattggggggcctgcggagcaacagaaggctgacgggtggctcgccgccgcccgctccaacgacgacgacgacgacttctgctccgaggggccgaacagcagcagcgatgacctcagggcggatgctgctgccatagggccctcgcccacttcctcactcgagaggcaaggacgagcagaaggccgtatagttggaggtcagtccgtgggcggcaccggctatcttgtcggcggagaaacctcttccggttgccgtggcggaaggcggcgccggaagcggctccgaagccgctcgggtcagagagccgggcacgcggcagctgccagcgccacgaacggcggacgcccttccccccgatcactgagggaaggagcgggccgctgcccgcgcagagaccgaccccaactcggcgcactcccctccccagcactgatgatgaacatccttgaagctgagggaggggcagaggctgcagcccgggttgcttctccccacccaggagctggtggtcaccgtcttgggtgttccccatccgggggctcggaaggtggaaagacgcgatgcataagggagcgcgaagacatggtcgcctttcaagggggtcatcctccttttaaaggcaactctccccacttgcgtcctcagccatcacgggctgagtcttctccaacacgctccaagatcctccccctacgacacaggggctgggtcccacgcgtcacacaagctggctcaaggcagaagaagccaaacctccgcgcgcggtgcatgcaactgcccagcggttacaagtgttcctccactttcacctag

SEQ ID NO: 1505 - DNA, 339 bp, Zea mays
  Peptide Sequence Number=SeqID_44880
atgacgcacgacgtcatttcaaggagttcaagaaggagttcggccggccgggaggacgccagggtgccacctactataaggtttatattagatggagagatgccgccttatttacttgcaaaggacctgattttgcaaattattggtgagatttcagtatctggtgcgacctacaaatcaatggagtttgttggatcaactgtagaaagtctaaccctttttctgaccagcttttttgagaatttggctgtgaggagaatctggctgtggagagaatctgagtatcgtggggattacgtgcggaggaagatgaagtggtctaaagggttcaggatctag

SEQ ID NO: 1506 - DNA, 459 bp, Zea mays
  Peptide Sequence Number=SeqID_44881
atggccggacgaggcggactgtggctactacctccgcacgacgctgcgacgggcgctcctcagatcggcagagacctctttcgaacgcaagtagccgggagattcggaatcccgcgcgcgagttgggcctggccagcagataatcgaattgctttgccgtggaaacaggagaagtgtaaaaagcactttttcctaacaatatgttatttcccagactactatgattcgttggcatgcccctcacttttaactttctttcaggctgcaattgagtatattcattctttatcaagggcacagcctgctcgttctctcaatggtgctggcctttgtcctgctagtagatcacttagcacccaggccgccactacgtcaagcacaccacagttgaaagcacaccccacgtcaagcagccaggccgccactacgttaagcaaaacagaagacgagaagaactga

SEQ ID NO: 1507 - DNA, 447 bp, Zea mays
  Peptide Sequence Number=SeqID_44882
atgggcaagaataacaagcgcaagcgtgaaccgactcctccatcggaggacttcggtgattcggagtactcagaggagttctcctctgagtccgaggggtctccggctcccatccctctgcgtgagtcgtctgacgattcagacgactcccaggggcttgcggcggaggtctggacttatatccgggccgtcgagcgctccgggctcgagggctcggatgagtcagagtactcctcggacgaggaggactcgtccgagggcggtggcggcgatggcggcgacgacgacgatgacggaggcggtggcggcaatgacagtgacggcggcgatgacagtgacggcggcgacaggggcggcagcggcggcagcaaggatggcgacggcagcagcagcaggggcagcaacaggggcggcagcggcagaggcagcaacagggccagtggctag

SEQ ID NO: 1508 - DNA, 429 bp, Zea mays
  Peptide Sequence Number=SeqID_44883
atggctcaacttcgatcatccaggcaagtacctgctcctcgtcgatccggtgatccgagagaacagggtaaagaaggtgttggtggacaggggaagcaacatcaacgttaccttcccccggacactcttaggcttattatgagttctacaggtgccaaaggttcacaacaaaccaataaaaagaccaagaaagggttcaaattaaaagagcaaaaacaaccgaagtgtgccctggtctggcgcaccggactgtccggtgtgccaccggacagtgtccggtgcaccaaggaaccaaactccaaacttgccaccttcgggaattctcggggtaacggctacacagcgccaacggtcgtctgcaacgagcagttaatgcgctacagtacacgcagaagtcagagcagatccagaaggcgcaccagacaatga

SEQ ID NO: 1509 - DNA, 1086 bp, Zea mays
  Peptide Sequence Number=SeqID_44884
atggcgggggagaggacggggcgagctcgaatgttgttctcccaccacgcggggaagacgtcgtcgattccgccgccggcgggcgggttgtcggccgccattgtcgtcgtcgcgcggcggtggaaggagtatcatgtcgtagctgccgtcgagggacatgaactcaagactcccgaaacggagcactgtcccgggttggagaggttgttggagactgcccatctggagcttgatgggaaactgctcgtcaacacgcagcaggcccctacctggcgcgccaactgtcggcgtctcgagaccggggggtccctaagccgacgagtcgggcgacgtggaggctcctccgaagccgaggtcgagtctgtcttccatggccgaggccgagcccgagctcctgggtcgggcgaggcagaggtcgttcggcggaggccagggcggagtccgaaccctggggtcgggcgaagcggagttcgtcgtcttctggggctgagcctgagtccgagccctgggtcgggcgaagcggagttcgccgtcttcgagggcctagcccgagtccgagccctgggtcgggcggagcggagttcgccgtcttccggggcttggcccgagtccgagccctgggttgggcggagcggagttcgccgtcttccggggcttagcccgagtccgagccctgggtcgggcggagcggagttcgccgtctttgagggcctagcccgagtccgagccctgggtcgggcggagcggagttcgccgtcttccggggcttggcccgagtccgagccctgggtcgggcggagcggagttcgccgtcttccggggcttagcccgagtccgagccctgggccgggcggagcggagttcgccgtcttccggggcttagcccgagtccgagccctgggtcgggcggagcggagtttcctatggcgcctttggcaaggcctgactgcctgtcagtctcactctgtcaagtggcactgcagtcggagtggcgcaggcggcgctgtccttctgtcagaccggtcagtggagcggcaaagtgacggcggtcacttcggctctgccggggggcgcgcgtcaggataa

SEQ ID NO: 1510 - DNA, 2301 bp, Zea mays
  Peptide Sequence Number=SeqID_44885
atggcgccgcccgccgtcgccgcgtcggcattccctttccgcctcttctccgcggaggcgcgccggaacaataagagcggccgaggcaagcggagcgccgccaggccgctcaagtcctcgcccccacctcgccctccctcctcctcttccgtcataggcggcggcgtcgcggccaccacgttcacgcggctcccactccgcgatgcgccagagtccaccgaggtcacgctcgaccgcttccccaccgccccggccaacccgggggcgcccgctctcacgctcgggagtgtccaacggctggagaacgaggagttcgatgttgggtggaggcccaactctgtcgcgcggatccctctgcgggactcgtcggacggtgtggagctcaccattggccagttcgaggcccgcgcggccggcaggaagagcactggcggtcgcgggtttacgcggcaaacggtcgaacgccttggcgacgacggtgagggggaggagctcgtagtcaccagcctcgatgtgttcgaggtcaaaaacggcaggagagatcgtggtcttgttcccgaagtgctcgacgacggcgacgacgtcgtggtgttcgacccggactacggcgtcgacagcgacgacgaggaggaggagttcgagatgttcccgttcgacaaaagtcatcatgaagaagctgatgccgttccacgcgcggagatcggtgaggtagagtatggcgacgagaatgatgacaacgacggtgacgaggttgtagtgttctacgcagactacgacgaggaggaggactctgaggaagacggctacgaggttgagaacgcggaggaaggggaaggtgatgtgaaggagaagggagtgccggcagtgatgcggtgtttcgacaccgccaagatattcgccaaggccggggacggcgggaacggcgtggttgcgttccgccgcgagaagtacgtgccgtacggggggccgtcaggcggcgacggaggccgcgggggcgacgtgtacgtgcaggtggacggggagatgaactcgctgctgccgttccgcaagtccgtgcacttccgcgccggccgtggtgcgcacggcatgggccagcagcaggccggggccaagggcgaggacgtcgttgtgaaggtgccgccggggacggtggtgcggacctcagatggaggcgtggagcttcttgaactgatgaagcccgggcagcgcgcgctgctgctccccggtggccgcggcggccggggcaatgcggcgttcaagtccgggacgaataaggtgcccaggatcgcagagaagggggagaaaggcccagaaatgttaaaatttaaattaccatcaggcatagataatgatcaccaatgcaccatatggtggctagagttggagctgaagttagtcgccgatgtagggattgtaggtgctccaaatgctgggaagagcactctcttgagcgttattagtgctgccaagccagctatagccaattatccttttaccacattgctaccgaaccttggcgtggtctcattagattttgatgctacaatggtagttgctgaccttcctggcttactggaaggcgctcatcgtggttatggtttgggtcatgagttcctaaggcatagtgagcgatgctctgtattggtgcatgtcgttgatggttctgcacaacaaccagaatatgagtttgaggcagttcgcttggaactggagttatttagcccgtctctggttgacaaaccctatgtggtggtgtacaataagatggaccttccagaggcatctgagagatggaatacatttaaagaaaggctacagtctgaaggcattgaacctttctgcattagtgcaataaacaggcagggcacacaggacgtcattcatgctgcttacaagcttctgcagaaagagaggcaaaggatgaaggaaactgaaggatggagcgggacagaaaatctgaaccacgtgtctgaggcaataaaaaaggaaagacgtgcacccatgaatgagtttgaggttttccatgataagggtacaaatacatggaatgttgtcggagctggaatccagcgtttcgtccagatgactaactggcagtactcggattccttgaaaaggtttcagcatgccctagaggcatgtggcgtgaaccgggctcttatgaaacagggagttaaggagggtgatacggtgataattggcgagatggaaatggtttggaacaacgaaacggatagagcacgcccgtcaaagacgatgaacacgcaagatgatgctgtccgttggcccgaatttggctag

SEQ ID NO: 1511 - DNA, 387 bp, Zea mays
  Peptide Sequence Number=SeqID_44886
atgcccggcataccgagggatgtcgccaaacactcgctggatattcgggccggggcccgatccgtcaggcagcctctgcgcctcgatcatcaaggaaggatcggcctcgccttggcggagcccgaccctccctcgggggctacaaagagggtacccctctgcgtcaagatctttttaaatcaaaaaaaggggcctcctgcattctcccagctacgttctcctggctatgtcagaagccgggtctcgaggagcgaacgcgggtacatgaaaacggcaaggccgattgagccgaggaactcccgtacctccgggttagggatacctcactcatcacctgccgcgaagaatggcccaactcgagaagccaccccattattgacgagctag

SEQ ID NO: 1512 - DNA, 351 bp, Zea mays
  Peptide Sequence Number=SeqID_44887
atggcggcgcgggggggcagggagggcggtttctctctcctccgactaaagtttcccgggttgcgaaaacctaaagggaaaagaagggagcggagcgaagaaccgtcaccggaccccctctcaaggaccgggaaagggggataccccgaaagggatccttctccgcgaaggaaccgggctccgagccccccactactgatcaggggttcgaaggctggccctccgaagggttcaacagtcgcctcagatcgcgtgggcccgacacccactactggtcaggggttcgaaggccagccccccgaagggttccatggccgcctcaggctactcgggctccgcgcccattactga

SEQ ID NO: 1513 - DNA, 861 bp, Zea mays
  Peptide Sequence Number=SeqID_44888
atggggggtgtagcagagtgctacgtgtctagcggagggagagctagcgccctaggtacatgccaatgtggcagccggagagatctgggcaccctgctgggcgacgtgggggttcctccgaagccgaggtcgagtccgtcttctgttgccgtggccgagcccgagccatggggtcgggcgaggcggaagccgttcggccgaggccagggcggagtccgagccctagggtcgggcgaggcggagtttcgtgtcttccgggtcttagcccgagtccgagccctggggtcgggcggagcggagttcgccgtcttccgggtcttagcccgagtccgagccctggggtcgggcggtgcggagttcgccgtcttccgggtcttagcccgagtccgagccctggggtcgggcggagcggagttcgccgtcttccgggtcttagcccgagtccgagccctggggtcgggcggagcggagttcgccgtcttccgggtcttagcccgagtccgagccctggggtcgggcggagcggagttcgccgtcttccgggtcttagcccgagtccgagccctggggtcgggcggagcggagttcgccgtcttccgggtcttagcccgagtccgagccctggggtcgggcggagcggagttcgccgtcttccgggtcttagcccgagtccgagccctggggtcgggcggagcggagttcgtcgtggcgcctttgttaagacctgactgccggtcagactcactctgtcgagtggcgctgcagtcggagtgtggcaggcggcgctgtccctctgtcagactgctttatgctgatgggggttaccagctgagaattaggcgtcttgagggtaccccctaa

SEQ ID NO: 1514 - DNA, 207 bp, Zea mays
  Peptide Sequence Number=SeqID_44889
atggcgggcggaattaagctcgccggagctaagggaaggtggctggccggagaggagatatggagccaggaaatctggtctgtctccctacccaaacccgaggcaaatcccagaaaaatcctaggtgacactggggtgtcacaaccttccccccttaaaggaatctcgtcccgagattcgggccagagtcctcccggggtgaagtga

SEQ ID NO: 1515 - DNA, 252 bp, Zea mays
  Peptide Sequence Number=SeqID_44890
atgtgggcccagcttgtcaggagcgtcttcccaacggaattcgctggtctcccgccgtggatctcgcgtgggagacttgaccaccgcctcctaatccgcgagcttgcggtttccttgcctcagctagcgcaacaacctcccactcgcccgcaagctggactcctctgcgctgtatctgaagccgagctcgcgcgccccgtgaccgaactccgcgcagagctcacgcaggcggccaacggaatccgcgggtga

SEQ ID NO: 1516 - DNA, 222 bp, Zea mays
  Peptide Sequence Number=SeqID_44891
gccggagcacacgccgccgacgagcccgccgcctgcgcacatggctcgaccgattccggccattaccgtcgacgagccatacctcgacgtgaccgcaaggacttcccggagctaaccccacccttcgccggacctccctcgccgccggagccagcaccagagcctgccatcgaggatctgcctgccccagcattggaaggcaagccccggttttatgcataa

SEQ ID NO: 1517 - DNA, 300 bp, Zea mays
  Peptide Sequence Number=SeqID_44892
atgatagttcaaaaatgcttaataagaagcacaataggaggaaaaaggggaattttgggagaactagataatgtacaactaaaaccttctaaaaatctcatgaaacctaagaatgaaattaaagattataagttcattcaagatcccaaaaatgaagactgtaatctcgctggcggggagtacatcctcgttctggagcaaggagttgctcaggaggtagtccaggagccagcaccagagcctaccatcgaggatctgcctgccccagctttagaagggaagccccggttttatgcataa

SEQ ID NO: 1518 - DNA, 317 bp, Zea mays
  Peptide Sequence Number=SeqID_44893
atgagcatcatcctgcagtacctgatcttgacctgtggtgtatgtgagacagcaagagtgagctcacatacgttcatcgctcaacaagttgtggggaataatgtgcatgaactcgccaaagatgggagctcacgtgaagtaggttgcacatctttacccacaagtcatgttacccatctgccaagggatcgcgacttcccatacacctctaccgaggaggcgaggcagggaatcccttgcaggaccgccatcgcagcaaaatcctcccgagggcctccctacactgaccactcccctactgcccttgcccctttcgg

SEQ ID NO: 1519 - DNA, 675 bp, Zea mays
  Peptide Sequence Number=SeqID_44894
atgacctctcacggttcctcggaaggagggaacgcacattcccacacggacggacttgcacaagagggttttccccgtatcttgtgggaggtacttcaaggagcaggttacacgacgcctccccagtacatagtgcagctgttcgagaagcaccaggtgccccgctgtagggtgaggatgaccttggagcctcatcccttacagccaggctggcgttcgttggactccgagtctttcggatacctggctgaggacactatcgaggccattgctctccacgggctgaccaccttttgtggttttcaccccttggagctgtccactcaccccattggtttgttcctcgcggagaaggaggacaacccaatgtggaaggatcgagtggaacatgccaacgatgctaccaagatcaccctagataacagagaggaacttgtggtggacctgtccactgagatggtggaaaaggacctgcaggtggaacagatggccaaccagatccaggagcttgaggagctagtgggagccagggagaacaccattgaggacatggaggccaacgaggatgttgacatcgagggaggagtggagccggagcccgcatctagcctggacactgctggctcagggagaccaccttcccccgagtcaagcgttgcctcgtttgttcattaa

SEQ ID NO: 1520 - DNA, 156 bp, Zea mays
  Peptide Sequence Number=SeqID_44895
atggcagtcggggtcagtgaggcattgtacgccaaggcgaatgttacaggttctctggaggacatggttgctggagtgacttggtcgtccatcttgccaccgggctggactgacgagtgggaccctacctcagctgaggaggagcatgaggagtga

SEQ ID NO: 1521 - DNA, 354 bp, Zea mays
  Peptide Sequence Number=SeqID_44896
atggctcagcagaatgagtttctgcgacagttggctcagcgtcagccgccacctcagcactatggtggtggtgatcaccatcaacgtcccccagcagcagccacttatcaggagttcctcagcactcagccgccgttgttcactcaggcagaggatccacttgatgctgatgtatggctcagggtagtggaatccaaattcccactgcttaatggagtttgtttagatgtggctaagtatgctggataccacgcagacactgacgagaagaagagggacagttcaggaggggccttagtactaagctccgcgaccgtctcaacaaagtcagggcaaacaactacaatgagttag

SEQ ID NO: 1522 - DNA, 78 bp, Zea mays
  Peptide Sequence Number=SeqID_44897
atggagacgatttttctaattcccaggactaggcgcacaaaccagaggactgcaggggtctctgcgcaagttgcctaa

SEQ ID NO: 1523 - DNA, 246 bp, Zea mays
  Peptide Sequence Number=SeqID_44898
atgaataatgacggtaaccttgctgacggagagtacgtcctcgtgccggagcaaggagctgctcaggaggtagccccggatccagcaccagagcctgcactagaggacctgcctgccactgctttggaaggcaagcccggttctctggaggaaatggttgctggagtgacttggccgtccatcttgccaccgggttggactgtcgagtgggatcctgcctcggctgaggaggagcatgaggagtga

SEQ ID NO: 1524 - DNA, 735 bp, Zea mays
  Peptide Sequence Number=SeqID_44899
atgcgcgcaacaaatttggaaaaggtgcagaggcttacccggtccacgtgcgctggcgggtttttgaactccggcgagcacgattgtgctattccggtgacgcgggtccacgggtcaagcttgagcaagcttcacggcctcaccagggagctatctgagggcttggatcgaacggaggaggacgggaaaggggctggccacggtggttgctctcgggcggcactggcgagtcgcggggaggtcgccggagctaatggctggctcggagtaaggctgacagcagccaagtccggcctcgggcgccataggaaactccgcctcacccgacccagggctcggactcgggctcggtcccggaagacgacgaactccgcctcgcccgacccagggctcggactcgggctcggccccagaagacgacgaactctgcctcgcccgacccagggctcggactcgggctcagccccggaagacgacgaactctgcttcgcccgaccccagggctcggactcagccctggcctcagccgacggtctccgcctcgcccgacccaggggctcggactcgacctcggcctcggaagacagactcgacctcaacctcggaggagcctccacctcgcccaacccagggctcggaccgaccacgtcacaggaggcaccatcattaccctaccccaagctaactcaggctacggggaacaagaccggcgtcccatctggctcgccccggtaa

SEQ ID NO: 1525 - DNA, 198 bp, Zea mays
  Peptide Sequence Number=SeqID_44900
atggtctcccattcaggttatggtgggtacaagtgcggtcactgcacgacggcagtcggggttagtgaggcattatacgccaaggcgctaggttctctggaggatatggttgctggaatgacttggccgtccatcttgccaccgggttggacagtcgagtgggaccctacctcggcagaggaggagcatgaggagtga

SEQ ID NO: 1526 - DNA, 260 bp, Zea mays
  Peptide Sequence Number=SeqID_44901
atggaggaccttgtggtagacttgtccaccgaattggtggaaaaggacctccaggtggagcatatggccacccaaatccaagagcttgaggagcaagtaggggccagggagaataccatcgaggttctcgaggatcagctccttaccacgcagcaacaacttgaggaagccaaccagcacttggatatgcaccatcaagaaattcaagacatggaggcagaaggagccgatgaggatgtcgacatcgagggaggagagga

SEQ ID NO: 1527 - DNA, 438 bp, Zea mays
  Peptide Sequence Number=SeqID_44902
atggggaagcctgtcccatcactcctcatgctcctcctctgccgagtgaccgcacttgtacccaccataaccggaatgggagaccacgtctcaggtcacatcaggggtaaagtctgtgggcaggttcactcagacactcgttgtgccaaattaacaaaagtaaagaaaaagacctactggatatttagttgtgattttctaaagtttaatgccaaaaaggtcgggccacgtgcgcaggcgggtgggctcggcggcggcgtgtgctctgacctgctcacggtggtaaagttcaatgcaagggcacagggagcttcacggggtgctaaagaaactacccgtgcaaggaatcgaagaaagactcaccgtggagctcggtctacgcacggcggcggtcgggtgaagtccggcaacgtcgatccggggtctccggcgaggtag

SEQ ID NO: 1528 - DNA, 444 bp, Zea mays
  Peptide Sequence Number=SeqID_44903
atgaacaagacaccggcactcaagttgccattacaaacggaactccggttccacctccgcaggtacgaacaaccccacacgattggggggcctgcggagcaacagaaggccgacgggtggctcgccgccgcccgctccaacaatgacgacgacgacttctgctccgaggggccgaatagcagcagcgatgacctcagggcggatgctgctgccatagggccctcgcccacttcctcactcgagaggcaaggacgagcagaaggccgtagagttggaggtcagtccgtgggtggcaccggctatctcgtcgacggagaaacctcttccggctgccgtggcggaaggcggcaccggaagcggctccgaagccgctcgggtcggagagccgggcacgcggcagctgccagcgccacgaacggcgaacgcccttccccctatcactga

SEQ ID NO: 1529 - DNA, 591 bp, Zea mays
  Peptide Sequence Number=SeqID_44904
atgcagtcggcatgcaaccacgacaagtgggcgcacgccttcgactccaacacgcccagcatggagacccaggcccacacgtcatgcaaccggcgcgctggttgctacgtgcaagcaaccgcaccgcccctcgcgccactaccgcgcctcctcgactgcagaaccagtaccgcgactcgaggcaaccctgcgtatgacccaacagtgccagccaggcgcatcggtcacgggacaggcggcacctttggcagaagaagcgggcgacacttcgccttcgccataatgaccgcgtcaaaaaagggaccaggaaagggggataccccgaaagggatccttctccgcgaaggaaacgggccccgagcccccctactgatcagaggttcgaaggctggcccctcggaggggttcaacagccgcctcagagcgctcgggctccgcgcccactactggtcagaggttcgaaggccggcccctcggaagggttcaacggccgcctcaggccactcgggctccgcgcccactactgatcaggggttcgtaggctggccctcgaagggttcacagccacctcagacgcagagcgagggatga

SEQ ID NO: 1530 - DNA, 246 bp, Zea mays
  Peptide Sequence Number=SeqID_44905
atgaataatgactgtaaccttgctgacggagagtatgtcctcgtgccggagcaaggagctgctcaggaggtagccccggatccagcaccagagcctgcaccagaggacctgcctgccactgctttggaaggcaagcccggttctctggaggaaatggttgctggagtgacttggccgtccatcttgtcaccgggttggactgtcgagtgggatcctgcctcggctgaggaggagcatgaggagtga

SEQ ID NO: 1531 - DNA, 432 bp, Zea mays
  Peptide Sequence Number=SeqID_44906
atggaactgtgccatggaagcagggagcgtgcacgagataatcgtcgtattgctgagctattggcggaggttgatcgcttacagcgggagatcgtggaacgagacagggctatagactgggctataaattcacgatctatagcctgggattgcaacgcgaatgcccgggtggtggagctaagcgtagccctggaaaatctacaatcgtacaataacactctgcatgaggaagtgcacgtgctatacgaccagctgcatccgaacgtgccaccagaggttgcaacaatgggagccgaaacatctggagaagctcgcggaggaccttatggggagttggatctttttggagcccctccttccatgaacctcgcggatgttcgttctctcgaagctggtagtggagcgggagcagccaaggacgcagataactag

SEQ ID NO: 1532 - DNA, 1212 bp, Zea mays
  Peptide Sequence Number=SeqID_44907
atgtcttcgcgctcccttatgcatcgtgtctttccaccttccgagccccaggatgggggatgcccgcagtccttccaccttgtcgttgggggaacgcaactccgcgggagttggtacctttcagccatcgttcggcttcaaggattttcatcatgcagcccggctgcacccctccgccggcggtcacccaagacggtgacctccagcccctggatggggagaggcaagccgggctgtgatcttggtcccgccctcagcttcaaggatgttcatcatccttgctggggcggagagcgaggcgagccggggctctacctcccgcgcgggccggctggccacctcttcttccagcttctggtggtggcaaccatcctccagctctgcggaggaggcgtcctccagccatgccggggaaggcgaactgttgctgcccagctaggatgcaacattccgccctcttcctcgctttcgtggcgaggacgggaacgaggacctgccggtgcgcttcggagcggcccgctctttggctttgatggccggttcgcgtcccttgagcgggaacgcgaacgagagccttccggtggccgcgtccgtcctgtgaccatggctgctgctgcagaggtcgctggcgagtcacccggagctcgtcgccccgcaggctccccggagtccctcggctcggtcggccttgctgtccgaggcttctcttgcttagttaaaggaacccctcggccgctcttcgatgagccgaggccaagggtagcggtgtcagcacggacagaggcagagttggctcgaaaagaagacttggtcggccggagcctggccgggtcgtccgttagcgggaccgacaccggagttgatctaccgaggcctcgggtcgggctgatgtctttgggggacagctggccgaggcctcggggtaaccagccgagccgcctgctcgagccggattctcggagaagaccctggcggcgatggcccgggcgtggtgatgacgccgtccttcagagtggagatcctcagaccgcatcgccgtccgaggctaggtcggacctcgccgaaggtgttgtcgacgccgagggtgttgctgctcccttcaacgtcaagatccgagcctgcaggatcggattatcttgtagcgagtccctcggctcggtcggccttgccgcttacgcgcactcttacccgttcatagggttctgtcactaa

SEQ ID NO: 1533 - DNA, 1092 bp, Zea mays
  Peptide Sequence Number=SeqID_44908
atggatacccaaacggaagaatcaagccagactcagctatgtgagatacagacacccaatcatccctcatcacctgttggtcaagcaaagttgactcgcaaagaactcaaagcaagagatgcttgtttctactgcaagaatgaagaacatattattcgcgaatgccccaagaagcgtctagaccaactaaagaagaacacggtgaagcgagacccaaacaataatcgagaagaccaaccagttataaccgaggacgacgcaccaggagcgcccgacgccacgaagccccagccgccgccaggggggaaatccccttcttccctgccgcgacccgccagcaaccgcctgggcgccttgcagctccgagccgaggaccgcccaggctgcgcgcgctcaagctgcgcgcccagccctgttccgcgcgaccccgctgccgagcgcgcccaggaccccgaccgaaacgtcgcgcctgaccgcctccatgagccggaaacgggcagccgtttctccctctctctcccattaatggcgataattatagtgcagcaaatagccttcaaggcgcgtgaagccattcgatttctcctcccatccttggcctatttaagcacaaccgtcattgttgcgtcgtcgcttgccgccgacgtagttcctgcgcccgtcgggttattgcgaagtcgcgcccacaatcgcctcctcgccgtgactgcgcgcatgctctgcttgcctctattacttgccaccaagttccttgtcagcgtcgtcgctctacagtcgctcgcagctcgctggaattcgccgttgcgacgtcgccgaagcctctgctgtgcatcgggtgtctgttcgtgtcatcgtcgtgcgtcgctcgccggctgtgaatcccctgcccacgcccagttccctgtcgtcgccctcgccgaagctattgctcttggctgctatgcacaatcatcattcgtcgacgtttcccgatcgtgccgaagccacctcgtcatccactcgccatcgacgttgttcgtccttgctcgtcggtcattggctcattgccctcgtgggagctccacgacgaagcttcgcccctcgtgccattaa

SEQ ID NO: 1534 - DNA, 666 bp, Zea mays
  Peptide Sequence Number=SeqID_44909
atggctgaaaggtaccaactcccgcggagttgcgttcccccaacgacaaggtggaaggactgcgggcatcccccatcctggggctcggaaggtggaaagacacgatgcataagggagcgcgaagacatggtcgcctttcaagggggtcaccctcctttaaaggcgactctccctacttgcgtccctagccgtcgtgggctgagtcttctccaacacgctccaaggtcctccccctacggcgcgggggctgggtcccacacgtcatgcaagtcgtcccagagcagaagaagccaaaccgccgcgcgtggtgcatgcaaccgcccagcggttacaagtggccctccacttttgcccagaccagcgggcgaaagggcggggactgggaaaggggataccccgaaaaggatccttctccgagaaggaaccaggctccgagcctccctactgatcagaggttcgaaggctggcccctcggaggggttcaatagccgcctcagagcgcgtgggctccacacccactactggtcagaggttcaaaggccggcccctcggaagggttcaacgaccgcctcaggctactcgggctccgcgcccactactgatcaggggttcgaaggctggccctcgaagggttcacagccgcctcagacaaagagcgagggatga

SEQ ID NO: 1535 - DNA, 546 bp, Zea mays
  Peptide Sequence Number=SeqID_44910
atgaggctttcaccaaatacacttaatacgaagcaacccgctaaggtttctaaagacgatggtggtggccccctgggtgagatccgagagcccaacaagcgcacccgcctctggctcggctcctttgccactgccgaggaggccgcgctcgcctacgacgaggtcgcgcgcaggctctacggccccgacgccttcctcaacctgccgcacctctgcgcctccgctgtctcctccgtcgccgcgcaccagaggcttaggtggctcgctgcctccgccaggggcaccgccgccgtcccggcctacgacctgctcaacctcaacgcgcagcacaacgataagcagttgaagtctcatcctccaaagaacgttgaatcgaaaatcttgtgtgagcatatcaagaaagagagggaggtagcaaaggctagaaaacgaccatactatctgaagaaatctgaacttcacgaaaggaagctgatgaacaagtacaacgagctcaagctttatgatagtgctatcgaattcggcatcttatcgatagacctttga

SEQ ID NO: 1536 - DNA, 336 bp, Zea mays
  Peptide Sequence Number=SeqID_44911
atgatgtatgtagtggaaaagcgcatccggtggtgcaacggccaggggtactacctcgctgatgagcccggggtgcacttcgtttggcagcccaaccaagagtcatcggtactcgtcatgtcgcgtgcgttcgacgactactatatcgaggattgtggcatcatcttggcgccggaggtgacacagaggaggatcgacaacagtgaccagttcgtcatcctcgccaccatcaggagggtgatgctagaaactttaatggagattttgacgacgaggaattctaagtctaacgatgcaccggtcatcttcctgtgggagatcgcccctgttatttaa

SEQ ID NO: 1537 - DNA, 1509 bp, Zea mays
  Peptide Sequence Number=SeqID_44912
atggagaggctccgttgggggaatgaggtcctcatgaggaggatgcagcctggcgacgccaacgccgaggtcagctccgagatgctcaggcaaatcaaaagtaacacttggtctgatggctatgtggctgcgcgcgtccggtcactgcgccaccgccgacgagccaccaccagcagctcgggctgcgcgcgtccggtcactgcgccaccgccgacgagccgccctcctccgccctgctctgggccgcttcagtggcggtggccaggcaaggtggaggcctcggtggacggccgcgtccctgtccccgtcgcggtcccgctgccgctccgacgcacctcctcgattgtcctcaccacgtccgccatggcgcccgcgcccgccgccccacaggcacagccggccgctggcgtgttgcgctcgtgctgggcaaggcgcgcagcaagcggtcgcgcgtcgcgccatgcagctgggcctcccgcgtgctcgtgctcctgccacctcctggctcgccggcgtccgcggccatctcgccgtccgagtccggcactgcggtcccctgggagtgacggcgctgaagacggcagcatggccaaagagacttattctcacggcgagagattaattaacgtctgtaacgggttttatgtctatatcagcgtttcgtcgtcgtctgcatctctaaactgtcgaagccctctcctgcacctctatttccacgaagccccagccgccgccaggggggaaatccccttcttccctgccgcgacccgccagcaaccggctgagcgccttgcagctccgagccgaggaccgcccaggctgcgcgcgctcaagccgcgcgcccagccccgttccgcaattatagtgcagcaaatagccttcaaggcgcgtgaagccattcgatttctcctcccatccttggcctatttaagcacaaccatcattgttgcgtcgtcgcttgccgccgacgtagttcctgcgcccgtcgggttattgcgaagtcgcgcccacaatcgcctcctcgccgtgactgcgcgcatgctctgcttgcctctattacttgccaccaagttccttatcagcgtcgtcgctctacagtcgctcgcagctcgctggaatttgccgtcgcgatgtcgccgaagcctttgctgtgcaccgggtgtctgttcgtgtcatcgtcgtgcgtcgctcgccggctgtgaatcccctgcccacgcccagttccctgtcgtcgccctcgccgaagctattgctcttggctgctatgcacaatcatcattcgtcgacgtatcccgatcgtgccgaagccaccttgtcatccactcgccatcgacgttgttcgtccttgctcatcggtcattgccctcgtgggagctccacgacgaagcttcgcccctcctgccattaacatcccacgtccgagacctgccaccggaggcctccctgcattgtgtttccaccggcgcctgttctgttgccgtgacgaaggtagaagacgacattttgtga

SEQ ID NO: 1538 - DNA, 657 bp, Zea mays
  Peptide Sequence Number=SeqID_44913
atgaggaaaaaacacggcttcatgccaaaaatacatacatgttcaagccccgacaaccacaatgaacagacaccggcactcaaggtgccattacaaacggaactccggttccgcccccacgggtatgaacaacctccacaccggagagcctgcggggcgacaagctccgggcggctcgccagcgacctctacagcagcagcgatggtcccaggacggacgctgcagctggaaggctctcgttcgcgtccccactcaagggacgcgaaccagacattaaagccaaagtgccgaaggtcggtccgcgggtagcgctgatgggcttgtcggcggagaagctttctctagctgccaccacgtcagcaccgacggcggcgtccaccaacaccgcaccagcgagcgccggtggccccaaagcgcaccggcaggtcctcactcccgtcctcgccacaaaagcgaggacagaggacagaatgttgcatcctagctgggcagcaacagtccgccttccccggcatggctgggggggcgcctcctccgcagagctggaggatggtttccacccccagaagctggaagaggcgggacgccagcccacgcgaaggcaggccccggctcgcctcgctctccgccccaacaaggatgatgaagatccttga

SEQ ID NO: 1539 - DNA, 303 bp, Zea mays
  Peptide Sequence Number=SeqID_44914
atgggtgaaacgttcctggtaaggaatgatctatgggtcacggatgcagccatccgctacttgcaagaccaactcgcgaaacgagatttagcactcgattggctggttcactctcgtttattcgcctgggctaaggaagccaaagctcggaaccgcatggaggagcttatcttatccatggataacttgctcgtctgttataatatcctacatgagccaaactcatgtgttgtatttacaactgcccccgaacgtccctgcaaatccagtctgaaaggaacccgtaacttttcatggctctag

SEQ ID NO: 1540 - DNA, 2814 bp, Zea mays
  Peptide Sequence Number=SeqID_44915
atggttgaggacggagttgcccagttcgggtcatgcacattcacgccgaagaccggcaagaccacaatgccagtagtggagttggtcccgtgcgcccgcaacaagtggggcaattggaatgaattttggttttatgttgctgaggctactgtcgaaggccatgaagggctccccgtgtccttaatgtgctctcactattactctgcgtatccaccttatgaagtggcagaagaggatgcggacgaaggggcccttcggtgcgccgccggtcagagcagcggtcgagatttagttgaagagttcgtggcgtacggggtctggcccttggcgcacggctgggcgctgggcgaagtatgccctcgccagatgccctttcacggaggaagggtggtgcgaagtcctgccttcgcactgaatttgcgaaaccgtgacccggctgcctttgtgcgtgatgcggagggcttggcggtgcggctcgtggggcgttacgtgccgaggacggaaggccagcgcagctttgacatccgcgggtcaaatgaacgtttgaacagggtcttcgaattaaatcaactgccgtacgacggttaccctggtcaagacgaagcggaccgccgtgggaagaagccggcggtggagactggaggcgaccctgcgctggtggccgccgcctcctcgaaaaagagaaaattaggtactgcgatgggaagacttggggtgtctgatagtttcgctagagatttaatgaggacgtgtgcggccccgggggagaggatgtcttcgcccgagctccgggagtcttcggctcggatgctgagggttaccgggggttgttggcctaaaaacattcctatcccctgcgcggctgaggatgactgttttacatctcgtatggttcatcggtggaaagtttttccttatgggcgaaatatcggtcatgttgtgtgggcagtgatggacaaggatcgccaaggcgcggcgcgaaaacgccaggcgactgtgagggttcacgaagcccggccgaaaaggcagcggggaacggcgaaggctgaggcctccggcggaggcaagccgccgctgccgacgaaggtgggcgccttcgcgcctggcaaggcgccggagacgacggtgggcgccggaggccccaagctgtcgaaggtggtgccgtctgtcagcggggtggcggaggctacgaaggcggcccgatcgctaccgccgcctggcaaacgcgttgccgacttcggcaccgagattgatgtggaggattatcttggggggtcggacgagggcccgcttgctctagttgtgcctggcgcggcgatcgcgacggctgcgccagcgccgaaggcggggggagagacccttggcgctggaggcgaggtgtctgccctcgcgctggtcagagacgaggcgggcgtggcgacccgtcggctgaagggagcgacggaggcgctgagtcgagcgacggaggcgctgagtcaggtggctgacttcaccagcggcactgcgtcgggggcccttacggcagcgttgtctgccgaggtcgagagacttcggacgcaacatgcggacgctgtccgtgagaagtcggcctccgacagcaagtgccgcaaactggcggagaaggtggccgcccttgagaaggagaaggctgacctccggcgccagctggcgggggagaggagggaggccaacgaagccatcgccaaagagcaggctgcgcaggcggaggccaggctggcgcgggcggaaggcaatatcgccaaggagctcgccggagagctgcagcggcggcttactgcccaggagagccgcgcggagggggccgaggcagcgatgaacgcgctctctcgcgaaggctgccggcacttcgaggccctcgaccaggtggatgaggattttgggcgtgatatctttgaggtcgaagaccccgtggtgaaggaatccgccggggccctctatgaccggatgtggggttcgtacggtcgtgaggtggtccgggcgcgggccgaggctgcgagggctcaggtaacgttgtcgcttgcccggcgtctgctggatgcggtctgccgagcgcgcgagcgggtggacgacttcggggcgctgaacagcgcgctgcctgagccggagacgacccctgcggaggccgcgactggagtcgccccgggaccgaccccggagactgcggaagatgcaccgggcgctcctgcatctgccgcggccggcgaagaccttcccccaaaggtggccgaaggcgcgccagatgcccccgcagctgctgtgccgagcgctgaagatccagcagaggcagcggcggaggctcccgcagcggccgggccttcgcaggttcaagattttgggcctgcgcacgcaaccgctaccactgagtttttggcggcttcgaccgcggaagatggaaatgaatgtgatgggtctgtttctgagttttttgatgttactgactctgggagctcggttgagtggactgaggagtcgtcggaggaggacttggattattttgcggccttggacgtggctgcggcggaggctgcaccacatgctgcggacgcgccaggcgtgcccggtcctagcaccgggcaccgacgacgaagggcggttgcaaagcgtaggattagtgcggaggaaggggctcggcttcgcgttagtagggctggccggcaggagctgctgtctttgccggccgcctcgggtgtaggtgaaggggagctgcaaagcctttttgcgggtgaggagcttaggataatgttatttaattatagagagatggggattattcctaaggttgagccgatgtag

SEQ ID NO: 1541 - DNA, 1233 bp, Zea mays
  Peptide Sequence Number=SeqID_44916
atgggcggcagtccacgtggcggcatcgggcctccgcctgagcggggagtggaagcgcactggataaagcctgggcacgtgtctgtactggaccttcgcctgcccttgacgaaggccaggggatccaacgctttcttgaggaggtccggacctactgatggtatcctagagtataccacctcttctgtccacatgggactggcgcccaaggagggtgactcgtgggctcggacccccatgtcagagcctgggctgttggttttggcggagacgaagaggtgcatttaccgcgggcggtggcgtgctcctcacgcggcagactggtcctctgctttcggcggaggtgaagagacgcactaccgcgggcggtggcatgctcctttcgtggcggttcgccttctccgcacacggaggtcgatgcccaaggagtatgactcgtgggcccgggccctcgtgccagagactggtcaccttggcgcgcgtcgagtgaggccttctgcggcactttggggccccgaggtggcactcaaattagcgagcaacccgctcggatggggtgtgctggcgtttaccggaaggatccgtgtcggtgtctctcctcatgacgacctcgccgctggagagtttgtgttcttcgtctccaaactccccaacgggtttgtgctgccgatcccatctttcttcgtgttgctgctggaggggcttggcctccagcctctacacgttacaccctgcttcatccttcaggcgaccatcatcgcctacctccatctctttggctttgatggcttcggtgccgcctccaacgccgccttctgccgccaagcggggcgtggctgcccgtccaccacactggcgatggaggacggaggcgagggcctcctcgccatggcgcgcacgctgaggtggtcgccaccgctgcgagccgctggtgaagaggtggtcgccgccgctggcaagccgctcggagctagcttccaacgcgaccctattggtgtagagctcgacgtgtcgagactggatgccagcatacctgaaagagttgggaacgcccccaggaggcagcttcgactgggacctggacctgaacacaactttggctatggagcgctcacggtacgggaccaggctgagcggctacacggcttcagaccaccccaggagacaagagtccattctctagagccggaccccaagttgtcggacccacaggactatagctccaaatactag

SEQ ID NO: 1542 - DNA, 798 bp, Zea mays
  Peptide Sequence Number=SeqID_44917
atgggcatagctcccactctgcactacactgaacttgatgactacatcgattgggcattatgcctaccacgtgggtcggtgaagatcgtcggcggcgcctggatctcgctcccggaagtgaccccatcggggaggacagatcccaggccgacgggagttattcgaaataaccaccgcgtgcctttcttcttcctttctgtttctgtttcttcctttcttcttcaccgcgccgttttgcccaccgccgccggccgacgtcgccgcctcgccgccgtcccgccgctgccccgctctcccgccgccccactcgcccgccgcaccgccgcgccgcaccgccgccccgctcgcccaccgccgcgctcgcaccgccgccccgctcgcaccgccgccccgctcgcccaccgccgcgccgccgtcacaccgctcgcccagccaccgcaccgagcccacggccgccgcccccgcccacggctgccggtcccaagccgcgccgccccgcgcccacggccgcagccccgcgcccacggccaccgctcccgccctcgcccgggcgcccgacgaccgccgccgaacgccgtcgcccgcccaacgccgtcactcgccgccgtccacggtagccgcggcttccccacaccgacgtcgtacaccaccgtcgtccgcgcaccaccgtcgtccgcgcaaagcattcaagccgcaatatgggtgatagacgtgattggatgtatgaaggtttcaagaagggtgggtgtcacacaagtgaatgctgctttgtcacaaatatgcgaggatcaccaatga

SEQ ID NO: 1543 - DNA, 618 bp, Zea mays
  Peptide Sequence Number=SeqID_44918
atgactcgtcctagcctcgggcgactactctgggtccacaacatcgccagaccccaccacaagggcgggtctggagccgccacatgtccagagaaagtgatataccccaaggcctcaacagtgagtccggagccccatggtagagtgccggacccctggatatacagtccagaccaccaaggtggcgtgcacagtccacgatacgcgggtcgtgccgttatttaccattactcgtacgtttcggctatcaatgctgcatggactgcggtcatcaagactcctggtgattgctcaggtgttactagcattaattactcacataatgtattccttccgttatgctcctgggcccgcatgtcggggctcagcattcttgattacggcgggtgcattccgccatccggctggaggattttctctccgacatttggcgcaccaggtaggggctttggcattaggtttttgcttgttttcctgctcgacaccatggttcaaatcgtcgagcaccgtgacttcattcccgaggacttcccgatggaggaagaggatgcgtcttctatgccacggggctccaaccgccctgcgcctgctgctgctgctgtgcgcgctgcgcagtag

SEQ ID NO: 1544 - DNA, 1263 bp, Zea mays
  Peptide Sequence Number=SeqID_44919
atgacaccatttggaccaaggtcaactgctcggcggtatgattacactccatggtcacatcaagttactactccaggacagtgtgctaaacgctctgcgtaccaagacgccccttggtcacacccattgggggtcaacagcactccgccaatagctctagcctggcccaagaagggatggcctggcggggtaactgacccgaggccccacgcgaggccctttcgccttctagtggacccgagggatatccatcccccacagaagacgaaggtaaggctgacgccctgcacaaaaacatcggcggcggcgggcggtctgcttcacacgggccagatctccgacgagcaagagcaaggagggcagacgagcagcgagcggtttgagaaggcagttagggttttcgcggagcgcggaaagataaagttcaaaacgcgccgccccccgtccccttttatacacagggcgcggcgcttcgggaaacccgcaatccaacagtacggcgtcaatcaacggtcatgtcaaaaacccccgcggaaccacttcgagcgagggcagcgtctccgccatctagcgacgtctttggcaccagatgacttagtcgaactggtccctcggagggcaaatgttgggacgaaggcgaagacgccacccttcgctcgatgccttcgtcgtcctcgctgcaccaacggagacaagacaacgggcagactcacccttcgtcccatacgtcaccggacgaagacctgtgacgaggtcgtctcatcttgcgtcctcgtccagcatgaaggcccacgtgtgatccggcccattgtaacaggccctgcgtggccgctacgcattatgggcctaatttgtaaaggcctccctgtaattacggtctgtaaccccgctttatgggaatattccggggataacctagagctattgccatctcgtgcaaaaaccctgtttgcgttgttacactcccccgttggatcaacttgcaccatagagcaagttccaacatttggcgtcttcacccagcgcatacaggctctaaataaataccaagcccaaataaaagcatggcgtgaccacgcagtcatcccgagggaattcagcgaaggggacctcgtactcgtccaaacagcccagacggagtccaggggcaagctagagcccaaagtgggagggccctttcatcgtcaagacgaaggcatcccccagcgcatacaggctcgcaacgccaaacgacgaagacttggagcattcctggaacattga

SEQ ID NO: 1545 - DNA, 2085 bp, Zea mays
  Peptide Sequence Number=SeqID_44920
atgaagggaggacttggggttttcgatagtgttgctatggagttgatggggacctgcacggcccccgggggaaggatgtcttcgcccgagctccaagagtcttcggcgcggatgctgaaggttaccgggggttggtggcctaagaacgttcctatcccccgggcggccggcgaagacttttttacatctcgcatggttcgtgatatgagggtgtttccttatggacggaatattgctgctgtagtgtcggcagtgatggacaaggatcgtcaggaggctgcgcagaagcgtcgggcggtcatcaggctgcccgaggctaggccgaaaagggcgcgggggactgcgaagtctaccgcccccggcggtggccagtcgacgctggcggcgaagtcggccgcccctgggtccagcaagatgccgaaggccgagaaggcagccggaaccggcggaaccaagtctgcctcggccggagccgcgatgacccaggaattgcctgcgccggggaagcgcgtagccaacttcgccaccgatatcagcgtggacgattacctcgttggatcgggcgaggggcaacttgttgttccgcctgcggtggcgcccgcggtatctgccgcggtgcctggggcgaagggtagcgctctcaacgctggcagtgagatttcggcgctcgctgctgtcaaggacgaggcgggcgctgtgtcgcgccggctgaaggaggcgtcgcagcggctaagtcagggggcccttacggcaggtgtgtctgccgaggtcgagagacttcgggcgcagcatgctgaggccgtccgggaaaagtcggccgccgacagcaagtgccgcaaactggcggagaaggcggaggccaatgtggcgcgggtggagggtagcctcgcccgccaacgcgccgaggaatgggaggagcggctcaacgctctgcaggcccgcatggagagcgccgaggcttctacgcgctcggaagttgagcggacgtgcaagcagcttatggactcataccacgagctgggcacgcggaccgctgacttcgaagtgcccgaccaagagtcaagccttcgttgcctcgagtggctgcaagaggagttgttggtgctcccgaccattgtggagggatttatgtcctatgcctccctggtcacctgcgaaggggcgatgaacgcgctgtcccgcgaagggtgtcgtcactatgtggtcttcgaccgatctgttgaggatttcgagcgcgagatttacaaggttgaggaccctgtggtgaaggaatccgccagagccctctttgaccggatgtggggcccccacggtcgggaggtggtcagggagcggtccgacacggcgaggggtcaggcggcgcgtgacgagaaggtggaggacttcggggctttgaacagcgcgcggcctgaggcggagtcgaacccggtggcggctggcaccgaggtcgccccggcgccgcccccaaaatccgtccaaggctcccttgatgcccccgcggccactgaggccggtggaggctcgtcgccaaccgctgtgccgagggctgagggtcccccgaagacggcgacggagctggcagcggaggatcccacggcggctgggtcttcgcaggttcaagattttgggcctacgcacgcaaccgctactgctaattttttggcggcttcgaccgtggatgctgggaatgaatcggatgagtctgcgtctaagttttctgattttggtgactctgggagttcggttgagtggacggaagagtcgtcgaatgaggacttggattactttgcggccttggatgtggcagcggcggaggcttcgccgcgtgctgcggatgctgaagttgtgcctggtccgagtgctgggcgtaggcggcgaagagcggttgcgaagcgtagagtgagtgagacggacggcggtcggcttcgtgtgggcagggctggcaagcaggaactgttgtcctcgccggccgttgcgagtgtagttgagggggagctgcgaagtctttttgagggtgaggagctgaggataatgctatttaactatagggagatgggaatcattccgaaggttgaaccgatgtaa

SEQ ID NO: 1546 - DNA, 297 bp, Zea mays
  Peptide Sequence Number=SeqID_44921
atggggaagcctatcccatcactcctcatgctcctcctcagccgaggcaggtacaatggatcaagcagtctcattagctgcgagaagcagacgattcaaatcgagttttcatccttgcaagtgaccgcacttgtacccaccataaccggaatgggagaccacgtctcaggtcgcatgaggagggcaatctgctgccaggttgaatcagacatcgcaaccccccatgggtccaagtccatagacccttatcattctattatcaaggtggatacaatcaattttcctgaccttgcgtga

SEQ ID NO: 1547 - DNA, 312 bp, Zea mays
  Peptide Sequence Number=SeqID_44922
atgtgtccagagaaagtgatatactccaaggcctcaatagtgagtccggacccccatggtagagtgccggacccatggatatacagtccggacctccaagatggcatgcacagtccacgatacgcgggccgtgctgttatttaccattactcatacattttggctatcaatgctacatggactgtggtcatcaagactctcggtgattgctcaggcgttactagcattaattactcacataatgtattccttctgttatgctcttgggcccgcatgtcggggctcagcattcttgtatgtgccttcccttag

SEQ ID NO: 1548 - DNA, 195 bp, Zea mays
  Peptide Sequence Number=SeqID_44923
atgcaagggccgttaacaggccaaactttggcatgtctcaagctgaccttgttgacattccggccgaagcccgaagcattggtaacagatttattacccagatctaggcgaagggcggccgagaactggatggagttgaagctcgaaatctacttagtaaggatcttcggctacgaagcatacccccaacagtag

SEQ ID NO: 1549 - DNA, 573 bp, Zea mays
  Peptide Sequence Number=SeqID_44924
atgaagccgtggaaggagacttccaggagttccaagatttcgacgagttctaggcgtgggttagtggcagcccccagtcggctgcctgtgaaggccgctttcatttcaaaaaaatggacccttagctcggcgccgtcatcattggcgccgaggttgtgtgtcggcgccaattttttcggcatgcatatgtcagacgtagttatgccgtggaaccgacatggcacgtacctcggcgccgtagatcttggcgccgagctaggctccatcaatctcgcgcctacctcggtgccaagatttacgacgccgaggatgtctagacgtggtaaagctgctaaacaaaggaagggtcctttgacaggaactgccttcgacccgctgcctttgccaactggtgttccagtgcctatgtgtttttgtggtgatccttgtaaggttgataagtctgaggatcatgaaaatcgaaagagggaagagaaggagaagaagcttgagcgtgcacgtcgtgtaaaggaagcaatggaggagaaccctgatggatttcgcaagggcaaatggccccgttgcactcagtag

SEQ ID NO: 1550 - DNA, 822 bp, Zea mays
  Peptide Sequence Number=SeqID_44925
atgaccaccaaccccttggtggggagaagcaagccgggctacgatcttggtcccgccctcatcttcaaggatcttcatcatcctggctggggcgggggccgggctgagccggagctctgcctcctgggcagctccgcgggtcaccttctccctcagcattcgagggagagggcgctcaccggcctagcaggagggtcagacttcgacaacgcggggctggtcgacagcgagcgtcgtcagcttcagcgtgttgggctcgctggctcagctggctctagctcggctcccggtgcctcctcctgccgcaagagcggtcgtcgcgccgcgtgcaccggaggaccgcccaagacgtcgagcgctgctagggcggcgttcgtgttttggggctgtcctgcctttgccccgatacggcgcttccgcgcggaggtcggtgctccgctcgtccgggaggatccgagtggggatctgccggtgggcagatggcttccgtcgtcggcgctgaggtggtggcggctgaagaagtcctcgtcgccaacgggatcaccgccaccatccgcgctccgggcctccggctctttggctttgatagcttgtcctcgcccctcgagcagagacgtgggcgagggcattgttgcggcggcgtccgccctaaggccatcgccgctgcagtttggccacctggagcggaggttgttgtcgctgctgctggagcgggcggcggcgggccacctggagccttatcgccccgcgggcgctccaatgtggggggttgttcgtacccgcggaggcggaaccggagttccgtttgtaatggcaccttga

SEQ ID NO: 1551 - DNA, 1481 bp, Zea mays
  Peptide Sequence Number=SeqID_44926
atgcataaggagagcgcgaagacatggttgcctttcaagggggtcaccctccttttaaaggcaattctccccacttgcgtcctcagccatcacgggctaagtcttctccaacacgctccaaggtcctccccctacgacacgggggctgggtcccacgcgtcatgcaagctggctaggggcagaagaagccaaaccgccgcgcgcgcggtacacgcaactgcccagcggttacgagcaatcctccactttcgcccagaccagcgggtgaaagggcggaccgccatgcaggcggcatgcaaccacaccaaaggggcgcaccttttcgactttgacgcgtccagcatggaggcccaggcccacacatcatataaccggcacgccgattgctacgtgcaagaaactgcaccgccactcgcgccactaccgcgcctcctcgactgcggaaccagtaccgcgactcgaggcaaccctgcgcatgacccaacagtgccaaccaagcacatcggtcacgggccagcgagcgaaagcagcggtcaagtcgtcagccaagctcacgtcccctcctgggacagcgggagagccctctcccacggcgtgaagacggcactcccgtgtcccgttcctcgaacgactcatgcacgcgcaacggctgccccgcgaaccactcgtctcatcacattaactctgcggtgggacaggcggcacctttggcaggagaagcgggcgacgcttcgccttcgccataatgaccgcgtcaaaaaggctggcccctcggaggggttcaacagccgcctcggagcgctcgggctccacgcccactactggctggcccttaaagggttcatagccgcctcagacgcagagcgagggatgaccctggccccggaagacgacgaactccgcatcgcccgaccccagggctcagactcgggctcagccctggaagacgacgaactccgcctcgcccgatcccagggctcggactcgggctcagccccggaagacgacgaactccgcctcgcccgacctcagggctcggactcagccttggcctcagccgacggtctccgcctcgcccgacctaggggctcggactcgacctcggcctcggaagacagactcgacctcgacctcagaggagcctccacctcgcccaacccagggctcggaccgaccacatcacaggaggcgccatcattaccctaccccaagctaactcaggctacggggaacaagaccggcgtcccatctggctcgcaccggctcttgtgctcctccgacggccacgacaccacacgaacagggtgtcaaaacctctccggctgccacgacggcatggccctcttacagagggttggccgcgcggggaaggacgggatgacgctcgcggaccccccccggggtcgaaacgccgacaccagtgctttgcaacttggtggaccctgtttgtcattgactgttgctattctagcaaagggaag

SEQ ID NO: 1552 - DNA, 291 bp, Zea mays
  Peptide Sequence Number=SeqID_44927
atgacccccgccgcctgtgctcgtggccagggtagctccgaccacctccgacgccgacccgcacaccgacgtgaccgtcgtgacctccccgacgtcactgaccaccccgccggagctctactgccgccgcaccagagcctgcagcagaggatctgcctgccacagctttggaaggcaagccccggctctttggaggacatggttgctggagtgacttggccgtccatcttgccaccgggttggacattcgagtgggatcctgcctcggctgaggaggagcatgaggagtga

SEQ ID NO: 1553 - DNA, 1422 bp, Zea mays
  Peptide Sequence Number=SeqID_44928
atggaatctctatttgtaggcttgtctcataacaagccaaaaaaatcggtggcaaccgcaatagttcgagaagttttatctcatgactggttgctcctagactatatttgcacgcaaggtaatcttgctctcatcgattttatcaaggaaatcccttgtgaaccaagggtagaagtcattcttattgatgatgcctttgttgaaaggaagtggatggagtgtttatttcagccgagcgcatatttaggtgacgagattaaaggactgcaaagacaaatagatatgatatctcaacgtaaggagttaaaagaccacaggtggccagacctccaagttgcttcttggccgctcagagaaatagacatgcgatatgcaaagcagacagatagctcttcatgtggcctctttcttttgaactatatcgaatactggacaggggatgaactgtctgacagttttacccaggatgacatgtcacactttagaaaaaaaatggctgctatattactatcttcagacctgaataagagaagggggtgtctgttatacaaaaatgaaaaagaagttgactctggaagcccatctgatgttgagatattagaaaacccaacagattctaataagaggaaactactccacgtgcttgatgatagcgaagtagtgtttgaagatgaggaaggccctattactcaagcagacttgcaaaggtggtttgttgatgattgggataaaagagctcctgtaaaagtctctaacgatggttgcaccaatgactttttaatggttggtctttccacaaaggacatgccagtgaccaaagccgattcaatagatgttttatgtgattatatcatggcaatagaagacgatacgacactagagagaacatgggtgcgaactttcaatccttttaagatagaaatatctgtcaaagacctgcaaaacatattaacgacaactcaagatatgattctaagatgttttgatatggttgttcggctgcttgccaataaagagtcacgtagaccgaaagaagaaatcataaataatagaaagcattatatggacatgcgtttttgggttctcatgccatggaaattcaatggatgtcacgcccttttcgtaatagatcatgttaaaaagcatgtgacttttatcgatttacaccgactcaagattggtgtaaacacatgccatacaagagttgcccaaatattattctataggtttaataccagctacctcgttctacaagctatggccatgtgggggaatgacagacgactgaaatttgttggggatgcaaagactcttcgaagaaactttgtgattgatcttttaagttatgaggacaattcgtgccgatatgccatccctgcaaacatacaacaaagacttgtcgatatcgctaaaaaggattag

SEQ ID NO: 1554 - DNA, 564 bp, Zea mays
  Peptide Sequence Number=SeqID_44929
atgaaggcccgggcccgcatgtcatgcaaccggcgcaacggttactgcgtgcaaggaaaccgcaccgccactcgtgccaatgccatatcttctcgacttcggaaccagtgccggaccgggaaaggggatatttcgaaaaggatccttctcagcgaaggaaacgggcccccgagccctcctactgatcaggggctggcccctcgaaagggttcgacagccgccccagagcacttgggctccgagcccattactgatcaggggttcgaaggctggcccctcgaaagggttcgacagccgccccagagcactcgggctccgcgccctttactgatcaggggttcaaaggctggcccctcagaagggttcaacagctaccctagagcacgcagagtgagggatgactctaggagcgattttgtaacggaatcccaccggagggaggcatcgagccctcggaccctatcgaatgggtccgggtccggcaaatcacctgcagaggcttggggactactctcgcaacccgcctacggccaaactgttgacagcgtaaacaaaccagcctaa

SEQ ID NO: 1555 - DNA, 1632 bp, Zea mays
  Peptide Sequence Number=SeqID_44930
atggacaaggaccgccagggagcggcacaaaagcgccaggcggttgtcaggctcgttgaagctaggccgaagagacagcgggggtcggcgaaggctgcggcccccggtggaggcaagccgccgctggcggcgaagtcagggtcgggcgaaggccaacttgctatagttgcgcctgccgcggcgacaacgacggctgccgtagcgccaaaggcgaagggcggggctcttagctccggaggtgaggtggcggccctcgcggtcgtcagggatgaggcgggcgctgcgtcccgccggctgaaggaggtggtggagtcgctaagtcaggtggctgacttcgccaaccgcacggcgtcgggggccctcacggccgttgtgtctgccgaagtcgagagacttcggacacaacatgctgacgccgtccgagagaaatcggccgccgacagcaagtgccgcaagctggcggacaaggtggccgcgctggagggagagaaggctgacctccggcgccaattggcgggggagaggagggagaccaacgaggccctcgccaaggcgcaggctgcgcaggcggagaccaatctggcacgggcggagggcaaccttgccagggagcgcgccgagcagctgcaggagcggctcatcgccctggagagccgcgtggagcgggccgaggccgcggcgcgcgcggaggccgaacggacgcgcactcagcttatggatacatatcgtgagctgggtgcacggaccggtgacttcgaagtgccggaccgagagcccggacttcgctgtctggaatgggtgcaggaggagctgcaggcactcccccactgttgtggaggggtttatgtcgtcttcgaccaggccgatgaagattttgaacgagatatctataaggttgaagaccccgtagtgaaggaatccgccggggccatctacgaccggatgtggggtccgcacggtcgccaggtggtcagagagcgggccgagacggcgaggtctcaggcggcgcgcggagagcgggtggacgacttcggggcgttgaacatcgcgctgcctgacccggagccgaccccgggggaggccgtgtctagggtcgccctggagccaaccccggagactgaggaagacgcaccggatgcccccgcatccgctgcggccggcgaggacctgctcccaaaggtggccgaaggcgcgcctgatgcccccgcagctgctgtgccgagtgctgaagatcccgcggtggtggcggcggaaacaacaacggaggcgacggcggagccaacggcggaggctcccgcaacgtcagggccttcgcaggttcaagattttgggcctgcgcacgcaaccgctactactaaatttttggcggcttcgaccgcggaaggtggtaatgaatgtggtggatctgcatctgagttttttgattttgctgattctgggagctcggttgagtggactgaggagtcgtcggaggaggacttggactactttgcagccttggatgtggctgcggcggaggcttcgccacacgccgtggacgcacaagatgtgccaggtcctagcaccgggcgccgacgacgaagggcgattgcgaagcgtagggttagtggggaggagggggctcggcttcgt

SEQ ID NO: 1556 - DNA, 210 bp, Zea mays
  Peptide Sequence Number=SeqID_44931
atggggctcctgatgaagaagacttcggctgacttcagtacttcaaagaatggcaagttcctttctgccgatcttgaaataaatttgttcaatgaggccaaccttcctgtcagccattgggcaccttttcttgacttcggtggctccatccgatgtataccttctgttggggaccttcggcatccgaaggtcctcaaaaacatgatttaa

SEQ ID NO: 1557 - DNA, 173 bp, Zea mays
  Peptide Sequence Number=SeqID_44932
atgcagaatgtgaatccatggttcatgggcacaggagtccctttggcaaatgtgcggtgggggaattatgcattctcagctgctttcgggggactattcgctgtgcttagcttccaggttcatggttttccagatgctgttgcttgtgcgcagcctgttgggttccattatgg

SEQ ID NO: 1558 - DNA, 456 bp, Zea mays
  Peptide Sequence Number=SeqID_44933
atggcgcctcctgttgacgaggtcggtccgcgccctaggttgggcgatgtggaggctcctccgaggtcgaggtcgagtctgtcttccgtggccgaggtcgagtccgagcccctgggtctagcgaggcggagaccgtcggctgaagccagggctgagtccgagccctggggtcgggcgaagcggagggctgagcccgagtccgagccctgggtcgggcggagcggagttcgccatcttccggggcttatcctgagtccgagccctgggtcgggcggagcggagttcgccgtcttccggggcttagcccgagtccgagccctgggtcgggcggagcggagttcgccgtcttccggggctgagcccgagtccgagccctgggtcgggcggagcggagtttcctatggctggttagtggagcggcgaagtgactgcggtcacttcggctctgtcgactga

SEQ ID NO: 1559 - DNA, 162 bp, Zea mays
  Peptide Sequence Number=SeqID_44934
atggcgcggcagaggtccccggacggagaggaggatgaggacgacgacgacgatcgagcaggcgaccagcaggagccacgcgccgggacgagaaccaaggaaaaaaacgcgaaagggacgtcctttttgcaggttgtcgttggttcgatatcgatcagctag

SEQ ID NO: 1560 - DNA, 282 bp, Zea mays
  Peptide Sequence Number=SeqID_44935
atggcgcgcccgcccggctcgccgcccctgctcgcggcgcagcgcggcgtgccccctcccggcacggctccccagccccggccacaatcccaacagaatgatctggttgaggagcccgaagaactcgcaggagaagcccctgagcagcattcggtggcaatgagattgatggttcttggtattgactctggtaatggttgtcagcattgcaacccctgctcaggagaagatgaagttgtggaaggagaccaccaggagttccaggattacgacgagttctag

SEQ ID NO: 1561 - DNA, 2061 bp, Zea mays
  Peptide Sequence Number=SeqID_44936
atgagactgaggttcgtcctctggtttcggatcctcgtctgtttgatcttcagcgtgctactgcagcacggggctcagatgtctgctcagatagcgctgcgagtgcaccgcctcttggatcttccagcttttctgcttgcagccggtgctgagtctgaagcacatctcacctatctgcctggcctcctgacccttctgactatcagcggcagatatgttgaggagtgggtccacgtcttctacgcctccgtttggattgacccggatcatcattggatgaggttccgctttgagcgcgaggatgtcacgatcactgccagtcagatccgacagctatttggattccctgagtcgacgactcgccttcacagcctctgctacggcacttctgatcctccaagtcgccctcacggcggtgtggctccagggacagctcacgtcgcggctctgttctgcccgcctttcaccgatgggtcgcgacgttctccagcagactttactacagcagcgaagtacttatatgagctcgtcagacggacactcctgccgaggatgggatacagggaggctaccactcatattcagctttggctccttggtgccctggtatcccactcacagtttgatgttgtggacttcctgatctgtgagatcgaggacactgttctggatgggattcgtgctcgtcggcagctaccttatgctcactacttgtgccacatctttgcgcagctgattcagccacctcgatttcagagcacccttgaggcctcacgccttgtatttggatcttaccgtcctgctcctgagattccagtgccagcttatgcttctgtgtttgactctcaggccgaggatgcagctcttcgtcagtttgacactcagggtccagcagctgatgatgatgatgatgatgattttggggttcctcctccgcctccgcctcctatgcctccacgctcacatgatcatgaggctgggagctctagtgctgcccctgctactcctcaggctatggaccctgctcttgcttcgattctccagactctctctcagcagcaggctcacctggcagccgagcatgcccgtttatccgagaggatgctctcgatgtttcagaacatgcaggacaggcaggatgcacttcagcagcagcttattcaggatagggcagagaatagggcattcatggcactcatgcttcagcattctggtatctcagcacctccggttcagtctgctccgcctcctccgcttcacgctccagtggtgccatcgattctgtctggaccccctgttgatacctctccgctccggccggtcaccttggcgttcacttctccggttctcagctctatctgtccgcagccgccagtgccaccagcatctgctgttcccactaccgctgtggcagtatctgtgaccgcttctgttctgagacaaatgcccgaggtcgggcgaggcggtgactcctccgaggtcgaggctgagttcgaaccctggggtcgggcgaggcggagaccgtcttccggagtcgaggctgagtccgagccctggggtcgggcgaggcggagaccgtcttccgaggtcgaggctgagtccgagctcaggggtcgggtgaggcaaagtccgtctttcgaggtcgaggtggagttcgagccctggggtcgggcgaggcggagaccgtcttccgaggtcgaggtggagtccgagccctggggtcgggcgaggcggagaccgtcttccgaggctgagacgggggccgagccctggggtcgggcgaggcggagaccgtcttccgaggtcgaggtggagtccgagccctggggtcgggcgaggcggagaccgtcttccgaggccgagacgggggccgagccctggggtcgggcgaggcggagaccgtcgtccgaggtcgaggttgagtccgagccctggggtcgggcgaggtggagcttcccatggcgcctgaggccggtcttggcggctgtcagcctcaccctgatgggtggcacaacagtcggagcagcacaggcggcgctgttttcctatcaggtcagctag

SEQ ID NO: 1562 - DNA, 354 bp, Zea mays
  Peptide Sequence Number=SeqID_44937
atggcgggcggaaatacgctcgccggagctaaggaacggtggctggccgatgagggtgagtgcggggcgaagagaggaagtaatggctcttggtgtggctttttaagagaaaccctaggtgacactggggtgtcacaccgagcccctgggtcgggcgaggcggaggttgttcggcagaggccagggcggagtccgagccctggggtcgggcgaagcggagttcgtcgtcttctggggctgagcccaagttcgagccctgggtcgggcggagcggagttcgccgtcttccgggacttagcccgagtccgagccctgggtcgggcggagcggagttcgccgtcttccgggacttag

SEQ ID NO: 1563 - DNA, 603 bp, Zea mays
  Peptide Sequence Number=SeqID_44938
atggaagacagactcgacctcggcttcggaggaacctccacgtcgcccgacctagggcacaggcccgccacgtcaacaggaagcgccatcatcaccctaccccgagccgactcgggccgcagagaacaagaccgctcccttacggaagcagggggacgtcagcaaggactcgaccgctccgacagctgtccctccgccaggctccattgctcctccgacagccacgacatcacactagcagggtgtcaagatctctccggctgtcacattggcatggccttcttagagaaggttggccacgcggggacgaggacgggacaggcgctctcttggggccgctcgcttccgtcacccgcgtggacgcttgtaaccccctactgcaagcgcacccgacctgggcgcgggacgaacacgaaggtcgcgggatttccacctctctcacgcccgtctccggccacctcgcttccccccttcacgctcgcccacgcgctcgacccatctgggctggggcacgcggcacactcactcgtcggcttagggaccccccggtctcgagacgccgacaatatttatcttttatcctgtaagacttccgctatgtaa

SEQ ID NO: 1564 - DNA, 363 bp, Zea mays
  Peptide Sequence Number=SeqID_44939
atggtggcggttgcactctcctctctgtcccactacacagggcgtcttggtggttctcaactcgacttcgtggctgtgctggtttcgtggggccgcaacagagaggtggaggtggattatatggaggtgtggcatagaaacaaagatgatctgtttctactcatatcgttcattgtcgaagttaaccttcttcatgagtcggattcagggaccatcagtcgtggtgttagatgccattatccgagttgggatatcaattgcgagtacatggatgtaattgtggacattactccacaactcatcacactcaatcaaagatccaaatcaaacaagtatcataagaacaagcactcaagcgtatag

SEQ ID NO: 1565 - DNA, 705 bp, Zea mays
  Peptide Sequence Number=SeqID_44940
atgtcttcttgctcccttatgcgtcgcgtctttccaccttccaagcccccggatgggggcccggctgcacccctccaccggtggtcacccaagatggtgacctccagcttgatggtgggggaaagcgagccgggctgcggcctctccccctccctcagcctcaaggattttcatcaccaaggctggggaggggactgcagcgtgcccggctttcggacgcgagtggcttcggagccgctcgcggcgccggcgtctgccacggcagctggaagaggttcttccgccggcgtgatagccaaggctggccacagaccgacctctaactctacggccttctgcccgtccttgccttacgagttttggcatgggcgggggcctcctagcagcagcacccgccctgaggtcagtgctgccgctgttcggccccctggagcagaagtcgtcgtcgtcgctgctgctggagcaggtgacggcgcgccgttcgtcggtcttccgttgctccgcaggccttcccccatggagtggggttactcgcctgttgattatttgaaccgcttcaccaagcatgagtcgccccgtgtcaaggtgacgagtgagcacgaacagaggcggagttggctcgaaaatgaaaacctggttggccggagcctagtcgggttgtccgtcagcgggaccgatgccggagttgatcagccgaggccttag

SEQ ID NO: 1566 - DNA, 723 bp, Zea mays
  Peptide Sequence Number=SeqID_44941
atggctcgtcttagacacaccgcacagaagtctgtcatccccttcttaccctctcatctcgcggagcgtccgcttcgccgtcccgtggccggtcagtccagccacttggagaggctgcaccactgcctgcatgaggagcaggaatgtcaacgacaggagcagcagggctcttctttctcgctccagaaggagatagagtcacacagtcgcggggtctacccggaccaatgggaggcgacctgcttggtgcgccgtccggagaacagtctccggggtgtggaggtctgctcagagcactattccatctctgagcgggactcagctgaggcggccatgcaagatgctgcacggcgtgcgctttcgcactactgctcagttctcggtggggtagctgatggtctcaacctgaagtactacccccgccatccatctggcagcacaggatgcgtgattgtctcacctgttggtgaggacaatcctaggttgagcagcacagtcaacctagccgccatgctaaacacggagctggaccatgcattagacgagctgagtagggctcgtgctgagatcgccctgctgtgggcaaagcgcgcggagcgtcgtcacctggatgatggctcccccgctcctttcgggactcagcacccgtaccgctcatctcggcgtggacaccagtcttatggcaaccccgactgcaagaccaagataaatttagagccatag

SEQ ID NO: 1567 - DNA, 1443 bp, Zea mays
  Peptide Sequence Number=SeqID_44942
atggtcctcgcaagaaccaagtgctcactacgagatgatcctttgccactccggcgcggtggatccctcgagaccgcttacaaacttgagtcgggtcaccaacaagatcttcacgggaccctccggggtcgaaacgccgacaatagcggagcggcctcccattttcccgaaggtggcaagttcagcttcgagttccctggtgcaccggacagtccggttgacagctctgcatgcttttgccgagtggacagatcatccgccgcggcggcggcgaggcgaatcccagtgtcgaaggcgtgcgtgcaaccgagcctcagggcgtccatccacccgctgaagccacggccgggcgcagagcggagccgcggaggggcgtgcccgctgctcccaggccttccggacgacctcgccattgcctgtctcatccgggtgcccagagccgaccactggaagctgaggctggtgtgccggaagtggtgccgcctgctcgccggcaactacttctacggcctacgccggcggctcgggctcgcggagcagtggctgtacgccgtgaagcgcgacggcagggacgggcgcgtgtcgtgggacgtgctcgacccgtcgcgcggcgagtggcgcgcgctgccgcccgtgccgggcgagtacgcggaggccgacgggttcggctgcgccgtgctcggcggctgccacctgtacctgctcggcggcagggacccgcgcaggggcagcgccatgcggcgggtggtgttctacagcgcccggagcaaccggtggcaccgcgcgccggacatgctgcgccgccggcagttcttcgacgtgtgcgtcatgggcaaccgcctgtacgtcgcgggcggtgagggtggcggcggcgggctcaggtccgctgaggtgttcgacccggccaagaaccgctggtccttcgtggccgagatggccgcgccgatggcgccgttcgtcagcgcggtgcatggcgggcggtggttcgtgaagggtattggcgcgcagcagcaggtgctaagccaggcatactccccggagtctgactcgtggtccatcgtcctcgacggcatggtcaccggctggcggagcgccagcgcgtgcctcaacggccggctctatgctgcagagtgcatggacggatgccggttgagggcctacgacgaggccgtggacgcgtggagcacctgcgccgacagcaagcagcaccgagggagctcccaggcggctgccattgtcgccctccacggaaggctcttcgtcgtccgcaacgacatgagcgtctcggccgtccaggtggcggccgaggcgggaaagcagaggtggcagaccctcgccggcaaagcgcataccaagagctttgtcacgggcctgttgtccaacctcgctggtcgcagccgcgccaagaacaacatcctccattgccaagttcttgaggtctag

SEQ ID NO: 1568 - DNA, 561 bp, Zea mays
  Peptide Sequence Number=SeqID_44943
atgccatctcctcctagccccagattgcatctgcctcttcttcctctggttctttcggctcgggcagaatgcctcttttttcttcttcttcttactcgtaggctgcgggcttatgctcaaaggcgcgatctttatgctcggagtggcttcgatttaggagacgggggatttcttctcgtccttttcctcgccctgcgactgtggaataccggggccggtctggatttgctcgagagtgagaggagggagaaagcgaaggatgtgatcaagtctgtaaagaagtgtatagggagcaggagcaagaccactcaactctttgctgttatgctattggagatgcttctgaataattgcggagagcctgtccataggcatgtcattgataatggccttcttccaatacttgtcaagatagtgaagaaaaagacagatttaccagttcgagaaaaaatatttcttctgttagatgcaacacaaacatcccttggtggagctaaagaaaggttccctcagtactatgaggcatactatgagttggtggactcaacatgcaaaaactag

SEQ ID NO: 1569 - DNA, 231 bp, Zea mays
  Peptide Sequence Number=SeqID_44944
atgaactcgctgctctcaggaatcaccgagggcgctgcggctaaaattcaccgaactgtccgctcttgcgtgtgtttctttccctcccttactcttgtggttttccttgagatcaatattgtaagggtgagagactccaacttgtggatattcctcacaaagggaacatctactataaggaagaaaaccgtgatattcaagtggatcattggattgcttgaaaggagttga

SEQ ID NO: 1570 - DNA, 330 bp, Zea mays
  Peptide Sequence Number=SeqID_44945
atgccctttacatttgctaataactctatagtaatccatcggggtctaaatagccttttctcctttaagtcggtttccttttctgctatcacgccgaagctctcctacgaacagcttcggctctgcgccatccttcgtattctttgtgcttcttcacattgtggttttgacctaagtctgaagattttctttagcttcggctttaagagcacgctttcaacatttccgaagatgtctcaagacaaaaaagctattgctgaaacgaagctgagcctttctgaggagaagaatcttggctttattgaatcgatagcaaagacaaatacatag

SEQ ID NO: 1571 - DNA, 150 bp, Zea mays
  Peptide Sequence Number=SeqID_44946
atgcggcttcatatccttagaggtataaaggcagaagtcatccttgcatttgcagacatttgcactcatgagtttgatattattttacttgctgagatgtgtcatctcactcttgcattactcaatgcagggggcttcagcatcgactaa

SEQ ID NO: 1572 - DNA, 426 bp, Zea mays
  Peptide Sequence Number=SeqID_44947
atgagaaaggctttttcctgcaagttgaaggtgcgtcaatcgataaacaggatcatgctgcgaatccttagtgggcaaattggcgagacggtcgatctcgatgaagccgtacaacgggcgctggaattcgctaaaaaggagggtaacacgctggtcatagtcaccgctgatcacgcccacgccagccagattgttgcgccggataccaaagctccgggcctcacccaggcgctaaataccaaagatggcgcagtgatggtgatgagttacgggaactccgaagaggattcacaagaacatgccggcagtcacccccgaccaccggcgtatcaaggcatccaagttttcagccattgcattcaatacaagagctctagacttcactccaagacacaaatcaagagatcaaatcctctccaagtctaa

SEQ ID NO: 1573 - DNA, 375 bp, Zea mays
  Peptide Sequence Number=SeqID_44948
atggctaggaaaaaggaagagaaggggtctctgcgaaacaatcccgagactcagagaataggaaatgaggacggcgggttaaataacttcaccactcccacggagatgcgtgaccccgcggcggccttggagctgcggcgagcgattcactggacaccgaatgcctccgcagccaagcacatgcccggtcacaatccacttgctctggcgattctcccagaccccaccatgggcaccgaatggaggcggagatgccagaccatgattgcggcgttacctcgctccccaggtggcggtggcgagtccatagacacggagcactcggaggactggttcaaaggagggtattggggtccggtctgtggggatctgtga

SEQ ID NO: 1574 - DNA, 441 bp, Zea mays
  Peptide Sequence Number=SeqID_44949
atgactaagaggaagcgccagaagatggaggacaagaaacgcaagattggtggatctcaggccgagagtagcagccaaacacataaacccacctcagtagatcaagcaaggtcaccagcatcagcatcagcgtcagcaccagcagtagtaccagagatagttcccttagtagcagcagcagtaccgctagagcaaccaggcacctcgccttcctgccctagcgatcaaccagaacaaccaagcagctccagcgcaaggaggaggtcgtggatgtttccactacggggaacaaggccactgggtgaatcattgcccaaagagagcatctcagcagcagtcagctcccaatgcccctataagacagaatgcacctcaacaaggaggcaacaaccgtgggcaccctcgtgcccagtatggaaaggtgaaccacctggaggctga

SEQ ID NO: 1575 - DNA, 1143 bp, Zea mays
  Peptide Sequence Number=SeqID_44950
atgccttcgcactcccctcatgcatcgcgtccttccaccttccgagcccccagatggggagcgtccgcgttgcttttgtcttgttgtcttggaggaacgcaacttcgcggaagttggtacctttcagccatcgctcggcttcaaggattttcatcaggcagcccggctgcatccccttgccgatggtcacccaagacggtgaccaccagtttgatggtggggagaagcaagccgggctacgacctctgccccgccctcagcttcaaggatcttcatcatccttgctgggcggaggccgggctgagccggggcctaccttcgcgtgggccggcgtcccgtttcttcctccagcttctgggggtggaaaccatcctccagccatgccggggaaggcgaactgttgctgcccagtccagggtgcaacattccgtcttttgtccgggcgacggtggccagtcgcaccggggggtctcccaacacgtcgtacgccacgagggcggtactcgtgttctgggacggtcccattctcgtttttgtggcgaggacgggagtgaggacctgccggtgtgctttggggcgaccggcgcccgctggtgcggtgttggtgggcaggtggacgtcaccgtcggtgctgaggtggtggcagctggagaaagcttctccgtcgacgagaccgtcagcgccacccgcggaccaacctccgactctttggctttaatatctggttcccatcccccgcgaggggacgcgaacgaaagccttccagcggttgcgcccgtcctgggtccgtcgctgttgctgcagaggtcgccggcaagtcacccggagtttatcgtcccgcaggttctccgatgtggaggttgttcatacccacgagagtggaaccggagttccgtttgtaatggcaccttgagtgtcggtgtctgttcattgtggctgtcggggcctgaacatccggagccggaggcagcggtgtcagcacagacagaggcggagttggctcgaaaagaagacttcgtcggcccaggagcagttgacttcctaggccgaggaggcgtagcagcggcggctggaacctggccaggtcgtccactggtgggaccaaccatggagtcgcggtgccgaggccataggccgggctga

SEQ ID NO: 1576 - DNA, 174 bp, Zea mays
  Peptide Sequence Number=SeqID_44951
atggagagtcatgatctccgggcagaatgggaatcacggcttgtgggtggttatgagatcgatggttctggttatgactatggtgctggttgtcagcattgcaaccactgctcaggcgaagatgaagctgtggaaggagacttccaggagttccaagactacgacgagttctag

SEQ ID NO: 1577 - DNA, 2292 bp, Zea mays
  Peptide Sequence Number=SeqID_44952
atggagttgcagccgggccacacggtggagttcagcaccttgaggatttcctcggttcgtgtgcaggagatgcagcagcttgggtacttcggtgacggtgttgggcgcgtttcgggcgctgaggagattcctgagcctgagggcgaattagttgtgttcgaggcattcttcatcgccggccttcgccttccagcacatcgtttcgtggtggagccatccgtggaggtcttcgccaagaactattgtctgcactggcaaaagaggaaaattggtaataagattgcacaatttggatcgtgcaccttcacgccgaggaccggaaagactttggcagaagttgtggaaatagtcccctgcgctcggaacaagtggggcaactggtgggactattggttttatgtctcgggaggggaagtcgaagatttcccagggctccctgtggccgttatgtgctcccactattacgtggcattcccaccatttgaggtggcggaggaagatgaggacgaaggggccctccggtatgctgcccgcatgagtagcgggcgtgatctggttgaggagttcattggatatggagtgtggcccttggcccacgattgggtactgggcgaagtgtgccctcgccagatgcctaccttgggcgggcagttggtgcaaagtcctaccttcgccttggatttgcgcggccgaaacccagccatgacggagactttgcggagttgggatattcgcggttccaatgtccgtttgaaccgtgttttcgagttgaaccatctgtcgtatggcggttacctgggagacgacgctgctactactgtcggtcgccggggaaaaaaggcggtggcttcggttgaggaaggcccttcatgggaagccgcgccggctgtggtcactaaaaagagaaaactaggtactacggctgaagggttgggggtcttcgattgttttgctgtggatttaatgggaacttgtgcggcccccgggggaaagatgtcttcgctcgagctccgggaatcttcggcgcgaatgctagaggttaccgagggtcgctggcctaggaatgttccaatccctcgggcatccggtgaggacatttttacgtctcgctcagcccgtgagatgaagatttttccttatagacggaatgttgttgttgtatcggcagtgatgaataaagatcgccaagatgcgcggaaatgtcgggtgttcactagggtcgaggaccctagtcgcaaggtcaagaaggcgtgggggatctcgaggtctaccgccatcggcagtagcaaaccaccgccagctgtgaagcctgtcgtccctggccccagcaagccttcatcgggtgcgaaggtcgtcgctctcggctcgagcaagctgccctctgttgagcccacgcaggagcgagggccatcgtctccaatgtgcactgccgaggcggtggcaggtggggccgaactctccatggacatctgcgtggatgactacaacgtgggtggggtcatgatgtttgatgcccgcatggggcgagggcttgccgccgccgctgctaaagacgtggcgggctcagttgcgcagcagctgaggcatgcggctgccttcgttgatcatgttgtgtcgggcgttctgacctcggaactgatggagaagttgtcggttgcgaaggccgagagagaggatcttagccgtctgttggcggcgaagaagaaggatgcggatagggcctgtgctgaggcagaggccgcacgtgtcgaggccaagctcgcgcgtgctgaggccaatctcgctcgccaacatgctgaggaggcggaagcgagtcgcagcagtctgcgcggctgcctggacaaagcggaggcctctactcgcgtagaggtcgaccgtacgcatgcacagctcgtggacgcgtaccggcagcttggtgcgcggactgctccctttaatgcgtccggtaaggatgtaggcctccgctctctcggatggctgcaggaggagctagaggtgctcccgacgattgtgacgggcctcatgtcctttgcctcgctcatcacctgtgaaggggtcgtgaatgccttgtctcattgcaacctcgcggacggagagtacatcctcgtgccagagcaaggagttgctcaggaggtagccccggatccagcaccagagcctgccccagaggatctgcctgccctagctttggaaggcaagccccggttctctggaggacatggttgctggaatgacttggacatccaccttgccaccgggttggacagtcgagtgggaccctacctcttctga

SEQ ID NO: 1578 - DNA, 279 bp, Zea mays
  Peptide Sequence Number=SeqID_44953
atgaagctcccggagcaaggaatcggacttttcctcgccggagaagccagtccacggtcgccggacttcacccgaccgccggtgaacgaagaccgagctccacgcatgcatatatcttattcattgcattcgatagattgcaacctcgcggacggagagtacatcctcgtgccagagcaaggagttgctcaggaggtagccccggatccagcaccagagcctgccccagaggatctgcctgccctagctttggaaggcaagccccggttttatgcataa

SEQ ID NO: 1579 - DNA, 2196 bp, Zea mays
  Peptide Sequence Number=SeqID_44954
atgaacaagacactggcactcaaggtgccattacaaacggaactccggttccacctccgcaggtacgaacaaccccccacgattggagggcctgcggagcaacagaaggccgacggacggctcgccgctgcccacttcagcagcagcgacgacgacttctgctccgagcgaccgaacagcagcagcgatgacctcagggcggatgctgctgccataaggcccttgcccacgtccccactcgaggggcgaggacgagcagaaggccgtagagttggaggtcagtccgtgggcggcaccgactatctcgtcggcggagaaacctcttccggctaccgtggcggaaggtggcactggaagcggcgccgaagccgttcgggccgaagagccggacacgcggcagctgccagcgccacgaacggcgaacgcccttccccccgatcgctgagggaaggagcgggccgctgcccgcgtagagaccgaccccaactcggcgcactcccctccccatcactgatgatgaacatccttgaagctgagggaggggcagaggccgcagcccggcttgcttctccccacccaggggctggtggtcaccgtcttggaaggtggaaagacacgatgcatgaggggagcgcgaagacatggttgcctatcaagggggtcaccctccttttaaaggcgactctccccacttgcgtccttagccatcgcgggctgagtcttctccaacacgctccaagatcctccccctacgatacgggggctgggtcccacgcgtcatgcaagctggcccagggcagaagaagccaaaccgccacgcgcggtgctcgcaactgcccagcggttacaagcattcctccactttcgcccagaccagcgggtgaaagggcggaccgccatgcaggaggcatgcaaccgcaccaagtgagcgcaccctttcgactccaacgcgtccagcatgggggcccaggccacacgtcatgcaaccggtgcgccggttgctacgtgcgagaaactgcaccgccactcacgccactaccgtgcctcctcgactgcggaaccagtaccgcgactcgaggcaaccctgcgtatgacccaacagtgccagccaggcacatcgttcacgggtcagtcagccgcgggagaaggcgcgacggtcgatacggccagaaatgggccggcagtaatggcggtggcaggcgggcggaagcagcggtcaagtcgtcagccaagctcacgtcccctccggggacagcgagagaaccctctcccacggccgggcggcacctttggcgggcgaagcaggcgacgcttcgccttcgccataatgaccgcgtcaaaaaagggaccgggaaaggggataccccgaaagggatccttctccgcgaaggaaacgggccccgagcccccctactgatcagaggttcgaaggctggcccctcggaggggttcaacagccgcctcagagcgctcgggccccgcgcccactactggctggcccccgaaagggttcacagccgcctcagacgcagagcgagggatgacccgggctcactggagacaccatgttcggcgccctccaagggcaacatggcgctttcccccctcctccttgcagaaaggcgacacaggggcggctcggactcgggctcagccccggaagacgacgaactccgcctcgcccgacccagggctcggactcgggctcagctccggaagacgacgaactccgcctcgcccgacccagggctcggactcgggctcggccccggaagacgacgaactccgcctcgcccgaccccagggctcggactcgacctcggcctcagccgacgatctccgtctcgcccgacccaagggctcggactcgacctcgacctcggaagacagactcgacctcgacctcggaggagcctctgcctcgccctacccagggctcggaccgaccacgtcacaggaggggccatcattaccctacccctagctaactctggctacggggaacaagaccgacgtcccatctggctcgccccggtaaaacaaacaatgatggcgccccgcatcctccatgacgacggcggctctcagcccccttacggaagcaaggagacgtcagcaaggactcaacagccccgacagctgtccttccgcaaggctccagcgctccttcgacggccacgacatcacatgaacagg

SEQ ID NO: 1580 - DNA, 285 bp, Zea mays
  Peptide Sequence Number=SeqID_44955
atgcacagtcccacactgacggacttgcccgagagggttttcctcgtatcttgtgggagggctcaggatactatcgaggcgattgctcttcacggactgaccaccttctgtggattccaccccttggagctgtccactcaccccattggtttgttccccgcggagaaggaggacgacccaatgtggaaggaccgagtggagcatgccaaggatatatgggctatctacccagatcagactgctcacttgacggtgcggtgcatgaatgccctgtatcgtctgtaa

SEQ ID NO: 1581 - DNA, 1527 bp, Zea mays
  Peptide Sequence Number=SeqID_44956
atgtctactcaggggtataaacggaaaagcaaagtttttagggttgttgctgcccgtgtgccaggcgaaaaacgtagcctcgcactctcgcaggcggcggcgcatcgagaaacagggctgcggctgttgcttcttccacctctccggccatccggcggtccatcgttccgtgccggcggcctcccctcctacgcccctgccgattcttcaatcttcaccaacgggaagctgggcggagggtcattgcggcacggcgtccaggcgtacagaaggcaccagcaacagcccatggcaaacgccgcagatgaccctatggcagatgaagccggagtagaagatgccttcacacaggagatcaatcattcgtacgtccctagataccatgtgttgagttggatggaaactgtggaggggatggtggccggtgtggcgtcgcttccgccgaagcctgatccatttggatggattgttgctgaaaagagtgccctgattgctgcagccaaatcgttgccaattaacttgcaccattgcaaaaacaatcaaaatgctttccagtgcctcaagatggagaaggcacttctcaggtactgtgctagctttctcactcctgacgacaaaaggctgatcctccggatcaaggaccaggcaaagcaaatgatccaatcagagggtgatcaatctttgattgtaactatatgcttggaggaggccgagttaatgtacaattatttgccttgtgattttgacaccaccgaagaagtcgccgtctgcaataaggttcggcggtctgccttgaatcttatgctctacaaaggttctgaatctgctgttgctgctggtgccatgatgcttgggaaggaatttgcttgcgagactgctactgtgaacagctcatcagcgcggcctatgggggtcagtgatgttagagatctgaactctgaagtatctggttcaatggaagactcagccttactagtgcaaaacgtcatatatctccaacaaagcaagcagaggagggcgtccagcaagcagaggagggcggcggcgcttacagcagcagcaagcagaggagggcggcgctcagagcagcagcaagcagaggagggcggcagcgctcagagcagcagcaagcagaggagggcggcggcgctcacagcagcagcaagcagaggagggcggcgctcagagcagcagcaagcagaggagggcggcagcgctcagagcagcagcaagcagagaagggcggcgacgctcacagcagcagcaagcagaggagggcggcgctcacagcagcagcaagcagaggagggcggcggcgctcagagcagcagcaagcaggggagggcggcggcgctcagagcagttagcagcaagcagatgaagcggtggcgctcaactccagctaggttaaagactgtaacggcattggcacagtttcaggcttttcagcccccctggtgggccggcccaaatagaaaagagcagcctggagcccaaaacaaagcacctagtcgagaacaaccctaa

SEQ ID NO: 1582 - DNA, 327 bp, Zea mays
  Peptide Sequence Number=SeqID_44957
atgtcaaccgtcgccatcgattccccgttcgcgtccaggcctaaccgccttggaatacaatgctccactgaccccggctgccgccgtgcagtgaccacacttgcgggggagctcgtcggaggcgaggagtccggcctatccagggcacaattgatcaatcaaatgggtcagagagcttcaccagggatcaaggaaggcgagcggccgaagtccggcgaggacgatcttggttctccggtgaagttctgccgggtccgagagcttgggaagctttacaagctcttggcgaagctaactgagcggctggcgcggcttggaagcgactag

SEQ ID NO: 1583 - DNA, 1761 bp, Zea mays
  Peptide Sequence Number=SeqID_44958
atggctgtaaaagcaggagctgagcttataggcatgatactatggcccaactctaaacgctctgtctcgttattggaggcaaaagaaatatcaagagttgcgcaatcttatggcgctgaatcagttggtgtctttgtggatgataatgaagagagaattctacgggtgtctgattcatgtgaccttaactttgtccagcttcatggtgatgaatctcgtgcattggttcatactctttcaaagaataatcgtatcatttatgtactaaatgctgatgacgatggaaaactaatcaacattcctgatattgaatacgaacttgattggtacttagtggacagtgcaaagggcggaagtggaaagggattcaactggcagaagttccagatgccatctgtcaaaagcaagaatggatggctattagctggagggcttcatgcagataatgtttgtgaagccttttctgctctgaaaccagatggtgttgatcgtggtggggatgctaagaacccgaacatcactgacagcgacgcgctcacgaacgaagtgcaggtcgatctccacgtgcttcgtgcattgatgttgcacgggattggtggagaggtagaccgcgctaacgttgtcacagtagacaagggtggcgcactgaagggggttgtgaagcttctggagaagctagcgcatccaagaggccacaccacgccgttagccacgtggtactcggcctctacactggagcaggagacgattgattgtcgcttggcgacccaggagatgagctcaccggagaccgacccaggcctccccgagctccgccccgtggtgagacactcgtccccgtgcccaatttcccttattgcgccctgtgttcgtccaatttcgccttcgccggtgctcgaccgcggggacaatgagcagtccgagattcctgagtgtgttgttggagaccttcctgagcagcaacctggtgaaggcaaccacctggagagactgcaccgtcgcctgcacgaggagcaggagcgccgacgccaggagcaggagcaggagcatgagcagcaggactcttcccccttgcctcagcgggaggtggagtctgagaggccgctttcccctgcacctcagccagagatgccccctgcaccacctcagggcatcccggctgctggaggagaccctgacggagacaaagatgatgacaacgccggtggcagttcgagccacgacacggaggttttggaggagccggagccgaatggatggatcgctagacccatcactcatgacgccgctcgcgggtgtcacttccacgacgctcttgataccctgttgcgttgggccttcaaccgacacacctggtctatcgagtaccgttgtgtagtctaccagcatcatcgcgggctatacccggaccagtgggaggctacttgcttggtgcgccgtccggacgatgatctccggggtgcagaggccttcttagagcattattctattactgagagggatactgccgaggcagccatgcaagatgcagcacgatgggcgctttctcagtattgctcgttgttcagcggggtagctgatggccttgacctaaagtactaccctcgccgttcgaccggcagtgctggaggtgtgattgtctcgctagttggtgagggcaatcccaagctgagcagcatgcacccttaccgttcaccgccccgtggtcgcttcgactatggtaccccagactgcaggacccgcatagacatagatccatag

SEQ ID NO: 1584 - DNA, 516 bp, Zea mays
  Peptide Sequence Number=SeqID_44959
atggcgcgcatgctgaggtggtcaccatcgctgggggggctgcccagcgcagaggtggtcgccgccgctgaggtggccgctgtcgtcggtgctgaggtggtcgcctccgctggcgagccgctcagagctagctaccacgcggtcctactaaccagtgtacctaagaaagagtcggtgatggccctcaggagaccccaggttgtcgaacccacaggacttatagctccaaatactatgtacccgtcacgaagtggtggagtgtgcaggcttccggaccaacaggcagggcttatgagggcggacctcaccgggttggcgtacacagatgctccagaggtggggaagaggtactctttcagtcatagcaagatagtcacccccgggtcggcgtattcccgccaccttgaagggtccttcccagctaggggagagttgcggagcccttcttggtttgaggcttggacccgtggggagtccagaagggtttctaggggaaggcaagcttcggccccatag

SEQ ID NO: 1585 - DNA, 531 bp, Zea mays
  Peptide Sequence Number=SeqID_44960
atggcgaggactaggaagacttcggttgaaattattgaaattgttccttgtgccaagaataaatggggtaactggtgggacttttggttttatgtggcgcccggggatgttgaagggttgcctaccttgcccccggccattctgtgctcgcattgctatgtggcctttccacattttaaggtgaagaagggggatcgggacgaggaggcccttcgctatgtgactcgactgaacagcagtcgtgatttggtcgaagagtttattgcctacggagtgtggccgctagtgcacgggtggggtttgggcgaaattagacctcgtcagttgccaacactaagggataagatggtggagtcggaagccattaagattgttggaaagtatgtgccaaagactgagatgctaaagagttgggatatccgcggttccaacgtcaggttgaaccgtgtttttgagttgaatagcttgccatacggttcctacccagagggggactctgttgacgatggcgacgaccgaggaaacaagtga

SEQ ID NO: 1586 - DNA, 450 bp, Zea mays
  Peptide Sequence Number=SeqID_44961
atggtcgtcgtcgatgggtctaggcggtggatggccgacgctcgtcgagagcacctagaaaaagaatttgaagtggaagtggaagaggagtctgctcctacatctgaaacttctcccactgaagttgtctctgaaggtcctccagaaggtgccccaataggcctcggctggaccaataccagaaaggtcggccagcaatgggagtggagagatggcgagagtatcgtgtatccacctggcaagaggctggatggtggggtactgagctctcggttggcggggacccgttcttgtcttgagaaacccgggtgcgaattgacatatgcaagggttaagcgctacatatgtcgtgtggttggagatccccatctgggtactaatcatttcggatcgccgaacttctcggatacgaagattggatcttcgaccctcatcgtagataagaagtga

SEQ ID NO: 1587 - DNA, 321 bp, Zea mays
  Peptide Sequence Number=SeqID_44962
atggggggggggggggggttgggcccctttcgcgcgcagggccgggtcggaccgggccggctgggctgggctgggctgggctggctgggccgaagatatcgcttgaaaacccacgacgtgcgcggaccactaaacggaattaaatcgcaaatcgaaatccggaacggaacgagacgaacactcaacatcagacaaagaaatgtgcttcggcatgatgcaacacccatgacacttaggtttatacatgacacggacacctgtcgctatactggtttgaaattgggaagaaggagcaaaacggggaaagagaaaagagagtaa

SEQ ID NO: 1588 - DNA, 174 bp, Zea mays
  Peptide Sequence Number=SeqID_44963
atggagagtcatgatctccgggcagaatgggaatcacgacttgtgggtggttatgagatctatggttttggttatgactatggtgctggttgtcagcattgcaaccactgctcaggagaagatgaagccgtggaaggagacttccaggagttccaagactacgacgagttctag

SEQ ID NO: 1589 - DNA, 267 bp, Zea mays
  Peptide Sequence Number=SeqID_44964
atgaggagttgttttggatgcaatgataaggatcatatgatcacttcatgcccgctcatgaagaatcaaagacgtgcattctccatgatgaccctcaccaaaaacaagaatggacaacaagcatcataccaagctgagcgacgcttctgctacaagtgtggtgagcaaggtcatctacgtaagtctcaaggtggaaaagggaagatgagcaagaaatggagcaatcgggacttgggtacctccacaagtcgagtacttggtatctaa

SEQ ID NO: 1590 - DNA, 321 bp, Zea mays
  Peptide Sequence Number=SeqID_44965
atggtggggagaagcaagccgggctgcgacctctgccccgccctcagcttcaaggatcttcatcatccttgctggggcggagggcgagctgagccggagctctacctcccgtacgggccggcgggccacctcctccttcagcattcaggggagagggcgctcgccggcttagcggaaggggcggacttcgacaacgcggggccgatcggaccttctggtgccacctcccaccgctgggcggagtgcggctatctgccgccatacgggcggctgttgcgccacgcgcactgggggaccgcccaagacgtcgcgcgctgctag

SEQ ID NO: 1591 - DNA, 291 bp, Zea mays
  Peptide Sequence Number=SeqID_44966
atgcggcatggggctgtcccaaacaccaacacgacggcgtgggtcgggactgcgcagatcgagcgaagcacgcaatgtggaggggaatccggggctgctgctgcggaccggcaccgctgcgcagatcgggtcgacgctggctgcggacaagcgcacaagagctatggcctgcggcctggcgaggtcggacggcgcagctgcagtagagcacaaggcagagctcgaagcagggtgcggtcatcaaagctaggcgctaggagaagatctggtgtagggcatccatgggggtag

SEQ ID NO: 1592 - DNA, 630 bp, Zea mays
  Peptide Sequence Number=SeqID_44967
atgttcggctacctcaacttccctgccacctccaccggtgagcttcgcctcgccgaccctgatgtgcccgtcaccatgggtgcaatacccacacgctccaccaggagcaaggcagagaagcaatacttcaaaaggtgtgccgcctccctgaagcgacgccttaataggcgcgccgtcgccatcaagaagaagggggcgcagccctcccaatccacaaaggcccgagttcctgcaaaaaaccatcttgggaaacccacgatgcctagtaaattctcgacaaccggcgtcgagagcaggaggaagtcgagcaaccacgcgaaaggaggtgactatcgcccagccacatggcaggaatcagagatgaccacttcatcatctagtacctccccatccacctcatggagggcacgagggcctggcttgagcgcctgtcaagctgcaccatccatgactgggtggaccataggaaggcctttgtcaagaacttctagggcaccgacaaacaccctcggagctcttggaacctcaaaagatgcacccaaaagagtgcggagagtcttcaggactacatccgaaggttttcatagaaaaagaacaaactctttgatgccactgacgctgacgtggtaa

SEQ ID NO: 1593 - DNA, 192 bp, Zea mays
  Peptide Sequence Number=SeqID_44968
atgtcggacgaccttgttgttcctgtccactttgaagttggccaagaattttgctttcgcctcctggatcatccgctccttgtgctcctcaaactggagctgctcgtcagccggcaaggggcggcgaaagtcaccgacggcggcctggatctcgctcccgggagggaccccgtcggggaggagagatcctag

SEQ ID NO: 1594 - DNA, 162 bp, Zea mays
  Peptide Sequence Number=SeqID_44969
atgtccggtgccccagccacgtcaccaatgccgttggattccgaccgttggagttctgacttctgggcccgcctggatgtagccgttggcgccgaaatagccgttgctcccggagttgcaccggacagtccggtgtacaccggacagtccggtgaattttag

SEQ ID NO: 1595 - DNA, 927 bp, Zea mays
  Peptide Sequence Number=SeqID_44970
atgtccaaaccggacaaaacattcccccttcttatcctctcggtgctccccagccttcttaaccctggggttggaccgcacgagtttggattgagtgactgcccacaccgtctcaagtggttgtactataaaggagtacagaagatctacttctggaagttcgggctccggcccttcttccggggctacgggttccggatctgcggcgcgggcgcgcttacggcccaccggcgtcccacgagcgagggggagacggcgcgggtgcgcgagggcgacggcgtcgctgcgggccgactcgtcagcgagagaggaggggggaaacggcgttgcggccagacggcgtgggcgaaccggccgagcgagggagaagggccggccgctggtgggctcgatggcggtttgccgccggtgacccggttctcggtccaagggagggtggttcagcacgggcagaggctggcgattctaagggtaggctcaattcggccagagggggttgggagggggctgtccacggggaggtggcggagttccgcggcggggatcgccgctggtgggctctggctgagggactggggctggaaagggggcagcgcaaaagacctacgtgatccactgtgtcaacctactattgggctctgtggcgccaaggctcaacttgtagaccacggcacaagcccatggcatttgggggtagcgacgctccagcaaaataggaaggaggccaacaatggctacaccttcatcaacctcaccacgatgaaggaagcctaccggtcgtgggggccctcatggggctcaagctacatggcgttcgaggtagcagccatccaccatcgtcaagctctacccttgactatcgctaaggcagaacaggctgctgcctacacttcgaatctgacgcgcaacagtgctaaagtggtttag

SEQ ID NO: 1596 - DNA, 750 bp, Zea mays
  Peptide Sequence Number=SeqID_44971
atggtgaatggagcccaaatttacggctccaaaatcgcgcgccaccggtcgtgtgcaggttctggctcggacggatttaagctgcccctactgccgcgcgtcggggccggcgcggtgcgtgacgacgcagccgccgctctcgcgcgccgtctccgagtgctccgcctgcgcccgaatcgtcctcgagcgccacctccacacgcaccccttcttccccctcctcccctcactccatccgctcccccttgtcaccccgacctcgccacagccatcgatcccgccccatctccttcccccggtgacgaagatgacgaggacccctttctccccgcgggcttcgtctccgccttctcggctttctccctcgagcgccaccccgtcctcgcccgctccgcctccaccttctctggacacctcgccgagctcgagcgcgcgctcgccgtcgactccgccaccgcggcctccaacccggaccccgccggccccatggtctccgtcgacagcctccgtgcctacctccagatcgtcgacgtcgcctccatactcaggctcgacagggacatagcggaccacgctttcgagctcttcaaggattgctcgtctgcgacttgcctcaggaatcggagcgtcgaggcgctcgcgaccgccgcgctcgtgcaggctatccacgcgcgtcgagccaacgccgtagagcccctgaggtggcgaacagcagagcaggagatccggacgccggtggccggtgcctag

SEQ ID NO: 1597 - DNA, 495 bp, Zea mays
  Peptide Sequence Number=SeqID_44972
atgggcggactggcagtaattgcatcaatgggcgcgcaggggcagggagccaatcgccaatcagactttggccccaccttcaggctcgtatcctcccctgaggcgggcccaggggccactgtcggtaccctaaatcaggggtaccccctactacagcggcgccagggccatcctgtagacggcgtacctgtccagtccattgtcaaaaagtgcgcccatgctgcgctgcgcactgtgctcatgatcccttatacgagaagcttcccctgcacgccgatgcttcgcagatcttggacgtcagggcgcaagaagattactccagcaacaaacattagtagctccaagtacgacatttgttatgttcttgggcccacatgtcggggctcagtacccttgtacatgccccccttagctataaaaggggaggcatgcaacgttaaaaaacagactctcaactctcaagcttccacagcaatccaacacacagtggagtag

SEQ ID NO: 1598 - DNA, 462 bp, Zea mays
  Peptide Sequence Number=SeqID_44973
atgatggtcctcgtctcaattgccaccacctcgttccacatcctgcttcttttctctctcccctcatgcctccacctccgcaccaccccattctcggcagaggacgtaggagcaggcgcctcctccccatattcttccgacaccagccccgacaccgactcacgcagtggctattgcatgtccacgaggatgtttcacatcatgcgtgcaccatcgttttcaccatcgtcgaacgtctcgttcgtctttccggccttcgtcctgtttttcctccccatcctgctgccccccgcctacgatcgcagccgcgagcggacgacgctcgtcgacgcgggtacatggcgagttggtcatgcttctggcatttctttgtgcgtgtcgtcgaggaggacatggtggcgcctgccacgcttaggttatcttggtgatgaggagttcaggtttgagatattggacaattaa

SEQ ID NO: 1599 - DNA, 447 bp, Zea mays
  Peptide Sequence Number=SeqID_44974
atggcgcaccggacagtccggtgcgccaccggacactgtctggtgcgcctgccacatcagccggccgttggattccgaccgttggagcttctgtcttctgggccaccggacagtctggtggtgcaccggacaggcaaaaatggccatccctacattttgttgcaagctctatcactgtcttgtatctgtattattgaaagctctcttggttcaacacaagtgaacaaatgtgatggtccaagaactggattatggatacataatggacatcacaagcaagatggacattgcaaaagtgatactcgggtgcgtagctcggaggcaactgatcaagccaaggatggaggcaagaaaagcttcgaggtaccaagtgcacgggagaaggtcaaggaggctgaggaacccaaagccaagggtgaagaagaaggcttgcaaagtcaagggtaa

SEQ ID NO: 1600 - DNA, 369 bp, Zea mays
  Peptide Sequence Number=SeqID_44975
atggagcaatcaggacttgggtacctctgctttaattgtgttgcccatcaatcaccaaaaagggggaagattgaaagctctcttggttcaacacaagtgaacaaatgtgatggtccaagaactggattatggatacataatggacatcacaagcaagatggacattgcaaaagtgatactcgggtgcgtagctcggagacaactgatcaagccaaggacggaggcaagaaaagcttcgaggtaccaagtgcacgggagaaggtcaaggaggctgaggaacccaaagccaagggtgaagaagaaggcttgcaaagtcaagggatgttggagctaagaaatgtcaatctagatcaagtcaagctgacttga

SEQ ID NO: 1601 - DNA, 159 bp, Zea mays
  Peptide Sequence Number=SeqID_44976
atgaggtgcatgagcaaaaggagccttgaattggtgataacaagtgctctcataaaggcaaagtctctaggtggaaaagagaagatgtgcaagaaatggagcaatcaggacttgggtacctctgtaagtcaagaaattggtatctcaagtcatgagtaa

SEQ ID NO: 1602 - DNA, 666 bp, Zea mays
  Peptide Sequence Number=SeqID_44977
atgaacgaaaatggagatttgcaggatagaattggggttcaaatgggtcaagttaagattgtagaaatcaaggaggccgcggaaaaagggagaaatggggaggccaaggccgcggagaaggaaaggggcatagacaacagactcatgggtatcctcagttggaacagtaaacccatggcaaatccgccaagaacagagttcccgcggaggaagaaccccgatagatacgaggtggagaagttcaggctcggaaatgacggacatgtggttacctgcgaaaggcaactggctattggggtcgattggaggaatcaccacagcagacgaactcgagaccagtggcatctagccactggccctgttgctgccgccgctgctgccgcccctggtgctgcccctgctgctgccgccccggttgatgcccctgctgccgccgccgtcaccgtccttgctgccgccgccaccgcccttgccgctgccgtcaccgtcaccgtcgccaccgccgccatcgtcgtcgtcgtcgtccttgtcctcgtcctcgccgccaccgtccgagtcctcctcatccgaggagtactccgactcatccgagccctcgagcccggagcgctcgatggcccggatgtacgtccagacctccgccgtgagcccctgggagacgtctga

SEQ ID NO: 1603 - DNA, 501 bp, Zea mays
  Peptide Sequence Number=SeqID_44978
atgggcaagaacaacaagcgcaagcgtgagccaactcctccatcagaggagtttggtgactcggagtactcagaggaggagttctcctctgagtctgaggggtctccggctcccatccccctgcgtgagtcgtctgacgactcagacgtctcccaggggctcacggcggaggtctggacgtacatccgggccatcgagcgctccgggctcgagggctcggatgagtcggagtactcctcggatgaggaggactcggacggtggcggcgaggacgaggacaaggacgacgacgacgacgatggcggcggtggcgacggtgacggtgacggcagcggcaagggcggtggcggcggcagcaaggacggtgacggcggcggcagcaggggcatcaaccgggggcggcagcagcagggggcagcacccagggggcggcagcagcggcggcagcaacagggccagtggctagatgccactggtcttttagatattagtatagtatag

SEQ ID NO: 1604 - DNA, 168 bp, Zea mays
  Peptide Sequence Number=SeqID_44979
atgcagattattgaaagaaggtgcgaggctcaaaagggtgctggtataaggagaaaaaaaacactcgataaactcaccgatcaacctggaaatatgataccacttgatagagctggagtgcccgatctttcggaaaaacatgatgagtggtcattaattcaaaaatga

SEQ ID NO: 1605 - DNA, 714 bp, Zea mays
  Peptide Sequence Number=SeqID_44980
atgatctcggtcatactcttcctgccgccttatcttactttcgtgccgatgatcgtgcaaatcattgatattgctctgcgcgtctcattgactgttgatgacatagtgcatgtccgtacccggatgagcgggtggaagaagatggtttgctgcctaggtgaggatcttttggtagccctccgtgtccaggagccccaccgacttcgctcggtgtgttcacgcttgggcgaagtcgagcaacgggttccggggaaggggcgggttctcgcttcggtgcctagcatcatgctccgttcgttcctattcacgttcctgggtgtggcgacgatcgcagcgtcgggaattgctacgctcgtggagcaccgtgttgttaggagtctcttttacctcagatgcctcgtctcgatatacgggttacgcggggtcccgttctccggccttgtggtgacgctgaatgttatgacacctgttccggtgttggcgtgcctcgcgctgtggggctcctcccccaatacagtgggctcgtcatcagagatgggagcatcctctattcacccctggataaagaggacatctgggaagaaagagctcagaggcacgtcccatgcttcggccatctctcctgtgagcagggcggccaatatggccgtcagtcttgttctcgcggccatgctggtgccggggctgtccactccttttaaccgagtgatctga

SEQ ID NO: 1606 - DNA, 581 bp, Zea mays
  Peptide Sequence Number=SeqID_44981
aggctgagcaggagcgtcggcgacaggagttggagcagcagggctcttctttctcgcttcagcaggaggtagagtctgtgaggagctgctctcctatgcccccgctggaggcgccccctgcactaccactgagtgccccagtcgctggagtggctgttggaggagaccccaacaacagagctgaggcggccatgcaagatgccgcacggcgtgcgctttcgcactactgctcagtgtttggtggggtggccgatggtcttaacctgaagtattacccccgccatccatctggcagcacaggaggtgtggttgtctcacctattagtgaggacaatcctaggttgatcagcacaatcaacctagccgccgtgctaaatacggagctggaccacgctttagatgagctgagtagggcttgtgctgagatcgcccagttgcgggctgagcgcgcggagcgtcgtcacctggaggatggctcccccgctcccatcgggactcagcactcgtaccgctcacctcggcgtggacaccaggcttatggcaaccccgactttaggaccaggataaatttagaaccatag

SEQ ID NO: 1607 - DNA, 750 bp, Zea mays
  Peptide Sequence Number=SeqID_44982
atggcccggatggctgatattgactggtgtcaactagtttatactgaattgtgtgatgctgatagtcgttggcacaaaaggaacaaaacaaacattacaacaacaatatatggatgttcactcattgttctaatttactatcttgatcacttacatcaccctgcatcacctgataacaaatatgatatcccacccactacctcgatgcctccaacaaatgctccagtatccactccacctgttcgaacccctgataatcagcaacacgatcaggaaatacatgttcctactgatgatatcaaagtaccagaacaggaaggacaaaatactgttaaacatgatactcccgtatctggtgcaccacagtttgacaaaaccccattgacagaagcaactactgaacttgttgcaagggatatttcctctaaatctgcagttgctgaacctccccacgtatcacgtgaagaatgtgctcgccaactatttaagttcatttgttcaggacaactagatccgagcatgtctatcattgattttggaggatatggaggttttgtcctggatgttgtccaatcgtttggccctaataaatgccttcagaaccttttcatgcagggatttatcgattgtattcgtgatgatgatttattattgtcggggaccataattaggggtaccctcaaggctcctaattctcagctggtaacccccatcagcataaagctgcaaaggcctgatgggtgcgattaa

SEQ ID NO: 1608 - DNA, 324 bp, Zea mays
  Peptide Sequence Number=SeqID_44983
atgcaaggaaacaaagcggagtttgttgggatgagagaaggcaatactgttaaagggacctacaacttcacttctactcaaccaagtggtccagatctcacacaaattgggactgaagatattcttatcaacgtagaagaccataaagatgtgggagaccctttggcagaccacagacaaaatgaagtagaagacagagtgtatgaagttgaaggagtggatgtaaatgctgacagacaggatgaaaggccaaaaagaactgttgatgttccaaggaacggagaagaaaagggatcaaagaggcaaaaaagagttccaacataa

SEQ ID NO: 1609 - DNA, 306 bp, Zea mays
  Peptide Sequence Number=SeqID_44984
atggagcctggcggagggacagctgtcggagctgttgagtccttgctgacgtcctcttgcttccctcggggtagggtgatgatggcgcctcctgttgacgtggctggtctgcgccctaggttgggcgacgtggaagctcctccgaagccgaggtcgagtctgtcttccgtggccgaggtcgagtccgagcccctggttcgggcgaggcggagaccgccggctgaggccggggcagagtccgagccctggggtcgggcgaagcagagttcgtcgtcttctggggccgagcccgagtccgagccctag

SEQ ID NO: 1610 - DNA, 861 bp, Zea mays
  Peptide Sequence Number=SeqID_44985
atggataatgatgtcatatcaacagcgtttgccgttaacaacacttcatttgtaaaaggacagaaatggacacatggaattaaacctattgctaagttgccaaatgccaatacggttttaccggcggcgacggttccctcaggcgtgcgagaaggcgcccgtgagcaggagagccccggccgccgcggcgctctccagccggcggattggcggacgtggagggggcgcgaggaggaggagcctcagcgtccgcggcggtacagcttcaggaggcaccggtcgggcgcggcggagtgggcggcggtggtgctgttcaaggtgctggcggtcgtggtgctgctgggcaccgtggccgtccttgtggtggtggtgctgctgcagccccgcgcgccgtacgtggcggtgcgggcggcgagcctgtacgcgctggtgtacgggcagacgggggcgctggacgacgtgcaggtcacggtccgggtggaggcccgcaacggcaacgtgcactcgacggcctacttctcgcgcctcgagtgccgcctcgcattcgccggcgcaacgctggcggtgctccgcgcctacccgttccgcgtgcccgccaggggcgtcctcccgctggcgtacgtggcgcacgcgcagggcgccccgctgggcgacgccggcagcgccgccatggcgaccgcgctccgcgacggcgtggtgccgttccgggtggagggggaggcccggacgcgatggaaggtcgcggggatcgtcagcgtcgaccagtggacgcgcctggcgtgccagctccgcttcttctggcccaacggcaccgtgctcccctccagatgcagctccaagtccaagttcttgttcttctga

SEQ ID NO: 1611 - DNA, 1248 bp, Zea mays
  Peptide Sequence Number=SeqID_44986
atgtcttcgcgctccccttatgcatcgcgtctttccaccttccaagcccccggatggggaacactcgcaatccttccgccttgtcgttggaggaacgcaacttcgcggaagttggtacctttcagccatcgttcggcttcaaggattttcatcaggcagcccggccgcagcccctcgccggtggtcacccaagacggtgaccaccagctcctgggtggggagaagcaagctgggttgcggcctctgcccctccctcagcttcaaggatgttcatcatcagtgctggggaggggagtgtgccgagttgggtcggtctccgcgcgggcagcggcccgctccttccctcagcgatcgggaggaagggcgttcgccgttcgtggcgtcggcagttgccgcgtgtccggctctccggttcgagcggctttggcgctgcttccggtgccaccttccgccgcggcagccggaagaggtttctccaccgacgagatagtcagtgccgcccgcggactgacctccgactctacggccttctactcgtccccgcccctcgagtggggacgtgggcgagggccttatggcagcagcatccgccctgaggtcatcgctgctgttgttcggccgctcagagcagaagtcgtcgccgtcgctgccggagcgggcggcggagtccctcggctcggtcggccttgtcgcccgaggcttctcttgcttagtcaaaggatccctcggtcgctcttcgatgagccgaagccggaggcagcggtgtcagcacggacggaggcggagttggctcgaaaagaagacttcgtcggccggagcctggccgagccgtccactagcgggaccgacgccggagtcgagttgccgaggccacgagccgggctgatgtcctcgggggatagctggctgaggcttcgggatggccggccgagctatctgctcgggccggattcctggagaagaccctggcggcgatggcccgggcgaggtgctgatgtcgtccgtcggagtggagatcctccgaccgcgttgctgtccgaggctaggtcggacttcgccgaaggtgtagttgacgccgagggtgctgctgctccccctccgtcaaggtccaatcctgcaggatcggtttatcttgtaaaggtgatgagtgaggtatccgtatcccggaggcgtaggagtccctcggcttggtcagccttggctgcttacgtgtactccgtcgttttcgggatcccactttcgaagtag

SEQ ID NO: 1612 - DNA, 633 bp, Zea mays
  Peptide Sequence Number=SeqID_44987
atggaatctgccgccgagatttgtgcccagaagttgtccttggcggttgttgcagcccgtgacacactgaatgcttctgctgccgcgagtattgttgctggtgattattgcgccacgttttccataggtaacgatgtggtttctactcttgatgttcttgaatccgctgtggcggcggaaaaaagtgctatgcattcttacaaacaggccagtgcagctgtcgattgtgctaaggagacagtggccaagtattctgaggtgaaccaaaaactagctcaagcactcagatatgccatgtctcaaatgagtgatacggctaagaaactacaagatactgcctctttgcgctacacagatgaagatgttgtagacggtttcaagcttactcaagtagctcgttcaatggacgagttagctgaaatgcttgaaggaactgcaattgactgccaagtctcgatgatggatccaacaactatgttagaagctggctatgctagtgaagatagtgcggtgtgggaggacgtattccgtgaccgagaaataatgaatcagccattagaagcggagacacttgctgagcactgtgctaagtgggggcttaattacaatgagatctgggatagatcagtgtaa

SEQ ID NO: 1613 - DNA, 552 bp, Zea mays
  Peptide Sequence Number=SeqID_44988
atgacggcagtcgaggtcagtgaggcattgtacgccaaggcagtgagccctgatctgctgacagggaatcgatggggacagttgatggctgaggatactatggaggcaattgcccttcacgaactgaccaccttctgcggattccaccccttggagctgtccactcaccccactggcttgttccccgtggagaaggaggatgatccaatgtggaaggaccgagtggagcatgccaaagatatctgggctatctacccagaggcaatgtcccatctgatggcattgttggaggcgaccaagatcactttggataacagagaggaacttgtggttgacttgtccactgagatggtggaaaaagacctacaagtggaacaattgtcaaatgagatccaagagcttgaggagctagtgggaacgagggagaacaccatcgaggccaacgaggatgtcgacatcgagggaggagaggagcctgcctccagcttggacactgctggctcagggagaccaccttcccccgagtcgagcgtcgccttgtttgcccactag

SEQ ID NO: 1614 - DNA, 711 bp, Zea mays
  Peptide Sequence Number=SeqID_44989
atgccgcgccttctcgactgtagaaccagagcagcgactcaaggcagccccgcgcgtgacccaacaatgccaattaagtgcgacgatcacggggatcgagaaaaggggatatttcgaaaggatccttccagtgaaggaagcgggccccgagccctcctactgatcaggggttcgaaggttgcgccctgcggggttcggcaaccgccccagagcactcaggctccgagccctttactgatcaggggttcgaaggctggcccctcggaagggttcgacagccgctccagagcatgcagagtcagggatgaccatgggtacgtccgttacatggccaaggctcgggctacgctcccgaggtaccctaggacatttccgataccaacggaaacgatttgtaatggaatcccaccggagggaggcaccgagccctcggaccctatcaaatgggtccgggtccagcaaatcacctgcagggtaaaactaacgacagtaaatcacgacctccctcgagttcagcctcgggcacaacagggagctccgcctcgcccgacctcaggcctcggcctcagcctcggcctcgggagaaggtctccgcctcgcccgacctcgggcctcagcctcagcctcggcctcaggagaagtctctacctcgcccgacctcggcctcggaccgactacgccaccggggagacatcattaccctacccttag

SEQ ID NO: 1615 - DNA, 291 bp, Zea mays
  Peptide Sequence Number=SeqID_44990
atggctcaccggagttactccggcccgcccgagactttttcaccgccgttctcccttctctgcccgtggattcatggcctcttccccgccattaagttcgccgtggtgccctctccctctctgcccaactccggcgaccccggagccaccctagctcgcgccagcctcaactccggcgacctcaccgccgcggagaggagcggcgccgcccgcagccgcctgtttccccctggaggtgaagttggcaacatggatgacttcgaggagttccaggaatacgacgagttctag

SEQ ID NO: 1616 - DNA, 723 bp, Zea mays
  Peptide Sequence Number=SeqID_44991
atgccccctgcaccaccacagggaatcctggctgctggaggagaccccgacggagacggggacgacgacgacgccgatggcagttcaagccacgacacggagcgttcagaggagccggagggatggatcgcgagacccatcactcatgacgctgctcgcgggtgtcacttccacgacgctctcgataccttgttgcgtcgagctttcgaccggcacacttggtctatcaagtacctttgtgtagtctaccagcatcgtcgcggctatacccggaccagtgggaggctacttgcttggtgcgccgtccggacgatgatctccggggtgcagaggccttctcagagcactattctatcactgagagggataccgccgaggcagccatgcaagatgcagcacgacaggcactttctcagtattgctcgttgttcagcgagtgttggaggtgtgattgtctcgccaatcggtgagggaaatcccaggctgagcagcatggtcaacttggccgccatgctcaacacagagttggaccacgcccttgacgagttgggcaaggttcgggcggaggttgtggaattgcgtgatgaatgcgcggcacaccactatcttgctgatggttctcccgcccctatagggattcagcacccttaccatttaccaccccgtggtcacttcgagtatggtaccccagactgcaggacccgcatagatttagatccatag

SEQ ID NO: 1617 - DNA, 336 bp, Zea mays
  Peptide Sequence Number=SeqID_44992
atggctcaccggagttactccggcccgccccagacctcccttctctgcttgtggattcatggcctcttccctgcctttgagttcgtcgtggtgccctctccctctctacccaactctggtgacctcgaagccaccctagatcgcgccagcctcaactccgacgacctcaccgccgcggagaggagcgacgccgcccgcagccgtctgtttccccctgacaacgagcagctcgtggttcctgagtgtgttgctgaagatccctctgagcaacaacctggaggtgaagttggcaacatggatgacttcgaggagttccaggaatacgacgagttctag

SEQ ID NO: 1618 - DNA, 483 bp, Zea mays
  Peptide Sequence Number=SeqID_44993
atggatcttatattcaggctcttgcatctgtctgaaggccttagcaaatataatgtccgctgcactgcctgtgtcaaccaaaacattgtggaccagaaatcctttgataacacaagagataaccatagcatcattgtgagggtagtccttgagctaaagatcctcttgggagaagccggctctgagcatgaaccgcctgttatcgggagtacaaacttcggagccgaagcaactccagctttgaacgaagccatcagctcagaaagtggaagtgagatcaccggaggatcgtgcgaacagtgccgggatattgttcacctatttataggcacaggatgcaacctgcacaaaattacatttatgtcctttacaatcgactacaataatgatacaaaacatcatgggtctctaagtcaattcatctttaagtcggttcgacccttcatcttgagatttgtctttacgccgaagctttatagataa

SEQ ID NO: 1619 - DNA, 366 bp, Zea mays
  Peptide Sequence Number=SeqID_44994
atgggttcaacatctgaaaagaagtacctctatcaggatcgtgccgatgtaggcttgatgatcgaggaccttttaactggccacattcctcgtcatggagacatggcatgcaccgagactacccagcggaaggcgaccggacctcagggtgtacctcggcaccagttggctcctcgacatgaggggagcagtagagggagtaatgatcccataggggatctggaggtcagagttgaacgcctaacgatggaactgtgccatggaagcagggagcgtgcgcgtgatagtcgccgcatcgctgagttgtcagcagaggttgaccgtttgcagcgggagaatgtggagcgggatagggcaattgactag

SEQ ID NO: 1620 - DNA, 210 bp, Zea mays
  Peptide Sequence Number=SeqID_44995
atggcggtcaggcgagggatccctgcattggagcttcctagaaactataacagttttctgaagctattggaactttgtaaaggcctcatagtgttaccctgcctcgcctcctcggtagaggtgtatgggaagtcgcgatcccttggcagacgggtcaagaacaggtaccacaggatgaggcgcttggaggatgctgtgacgagatcgtga

SEQ ID NO: 1621 - DNA, 122 bp, Zea mays
  Peptide Sequence Number=SeqID_44996
atggctgacgagcgggtcctgcgcgtgagtggacatgggagccacggctccccgcgcgcgtggaggatgggcccaggcgagggttgttctttagtgggccgaaagtgggatccgaggcccag

SEQ ID NO: 1622 - DNA, 432 bp, Zea mays
  Peptide Sequence Number=SeqID_44997
atgcatatatcttactcactgcatccattagattgcaatctcgctgacagagagtacgtgctcatccctgatcaaggacctatccatgaggaagacgaggagcaagctcccgagcctgtcatcaaggatctccccgcagccccaacatttgaaggcaagccccgctatggtgggtacaagtgcggtcactgcacggcggaagccggggtcagtggagcattgtatgccaaggcgctgtacgaggaacatcgagtaccacgttgccgagtctggctgactctggaggctcatccccttcagccgggttggcgttcccttgactccgagacgattggattcaagacggacgacaccaccgaagcagcagccatgaagaccctgacgactttctatggctaccatcccctggagatggtgatgcaccccttgtga

SEQ ID NO: 1623 - DNA, 738 bp, Zea mays
  Peptide Sequence Number=SeqID_44998
atgccccctgcaccatcacaggccatcccggctgctggaggagaccctgacggagacgacgatgatgctagtggcagttcgaatcacggcacggagcgctcggaggagccggagccggaggggtggatcgctaggcccatcactcgtgacgctgctcgcaggtgtcacttccacgatgctctcgataccctgttgtgtcgggccttcgatcgacacacttggtctatcgagtaccgttgtgtagtctaccagcatcattgcgggttatacccggaccagtggaaggctacttgcttgaggccttctcagagcactattctatcactgagagggataatgccaaggcaaccatgcaatgcagcacgacaggcactttctcagtattgctcgttgttcagcggggtagctgacggccttgacctgaagtactaccctcgccgttcaaccggtagtgctggaggcgtgattgtctcgccagttggtgagggcaatcccaggctgagcagcatggtcaacctggtcgccatgctcaacacagagctggaccacgcccttgacgagttgggcaaggttcgggcggaggttgcggaattgcgtgctgaatgcgcggcacaccactatcttgatggtggttctcccgcccctatagggattcagcacccttaccgttcaccaccccgtggtcgcttcgactatggtaccccagactgcaggacccgcatagatattgatccatag

SEQ ID NO: 1624 - DNA, 252 bp, Zea mays
  Peptide Sequence Number=SeqID_44999
atggcctacacgctggcgcagaagcacaagagggcgcagaccacagcggagcgggctaacggcggcgctggattgctccggcgagcaatcgcgcgagctatagaaagtgctggtgtcgcgaagcaacggcagaggcgcaggggctcgacggggcgacggtggcggactccggctgcgcaagaaaactcttcgatgatcgcggaccggacgcagcagggagggagagggcacaccgaagggtgtcctgagtag

SEQ ID NO: 1625 - DNA, 891 bp, Zea mays
  Peptide Sequence Number=SeqID_45000
atgagtttgtacctagttgctcggcgtggacggtgcacgacggcgaacgggcgtgacggcgtggaggtcgcgacggcgtggagggcgcgacgacgggcttgcgagggcgtggagggcgcgacggcggcgaaccggacggcgaggggcgtgtcgaggggcgcgacggcggcgaaccgggcgggcgcggcggcggcgaaccggacgggcacggcgaggggcgcgggcgggcggcggtcccggcgcggcgagggcgacggcgaggagctcgggcgggcgagtgcgacggcgaggagctcgggcgggcgagggcgacggcgaggagctcgggcgggcgagggcgacggcgaggagctcgggcgggcgaggggcgcgggcgggcagccccggcgcggcgagggcgtgggcgggcggccccggcacggcgaggtcgagggcggggggcgcggtggcggcgaaacgggcggcgagggcgcggtggcggcgacgatgtggcactcggcaaaggcgactttgccgagtgtcaaccgggagacactcggcaaagattctgtcattacactttgccgagtgtctagagatgacactcggcaaagaatgctttgccgagtgtctactatgtggcactcggcaaagaagcctctttgccgagtgccagccgttggctctcggcaaagactgacggccgtcagctctaggacggccgctgacggccctttgccgagagccccctttgccgagtgtttgacactcgacaaacttgtctttgccgagtgccgccctgtgccgagtgttcagcactcggtaaaggggctctttgccgagagcctaactttatcgagtgcggcactcggcaaagaatacaacactcggcaaagcctcggattccggtag

SEQ ID NO: 1626 - DNA, 303 bp, Zea mays
  Peptide Sequence Number=SeqID_45001
atgaatcctaagggtaaggggatcgtgatcaacgacaaggagaaagagattctcaatgtcgacgagccaaaaggtgacaagatcaccgacttaggggcggaccgtccggaccaggggcgcggaccgtccgcggtcggcagaaagggagcaatggctaggaagtggttgggggctataaatacaaccccaaccacctccattcacttcacccaagcactccaatccttcacattcaatacaagagcttgcaatccattcaaagacacaatcaaagattccaatctctccaagttccacaattga

SEQ ID NO: 1627 - DNA, 627 bp, Zea mays
  Peptide Sequence Number=SeqID_45002
atggaggcggccctggaggcggcgcgcgccaaggacaccaaggagcgcctggccagggttgagcggctgcacgaggcgctcaacgccgcggcgtgccgtgggctgaccactactgagggcggcctccaggcgctctccgccgccgccatcgtcagcggcaaccacttcaagatccacctcaacgccctcgtcccggccgccgtcgaacgcctcggcgacggcaagcagcccgttcacgacgccgcacgacagctcctcattactctgatggaggtcgagctggtgcaggttggagatttgaggcttgtttttttagtaaaagttcattctaagaaagaattacttcgggaatttgagaagatcgcagctacccttgttccagaaaaggattggtctttacgtattgctgccttgcaaaggattgaagccctggtttatggaggtgccattgattattcatcatttcttatgctcttgaagcaactggttcctccattgtcgactcagctgtctgatcgacgttctagtattgtcaaacagtaccatattggaagttcaaaggacaaatcaatcaacttaaataggtggaccattggtgcatctattgagaagttgagaaaaggatga

SEQ ID NO: 1628 - DNA, 675 bp, Zea mays
  Peptide Sequence Number=SeqID_45003
atgcggagttcgtcgtcttccggggctgaggctgagtccgagccctggggtcgggcgaagcggagttcgtcgtcttccggggctgagcccgagtccgagccctggggtcgggcgatgcagagttcgtcgtcttccggggctgagcccgagtccgagccctggggtcgggcgatgcggagtttgtcgtcttccagggctgagcccgagtccgagccctggggtcgggcgaagcggagttcgtcgtcttccggggctgagcccgagtccgagccctggggtcgggtgatgcgaagtttcccatggcgcctgaggccggacttggctactgtcagcctcactctgtcgagtggcacagcagtcggagcggcgcaggcggcgctgtcctcttgtcaggcctgtcagtggagcggcgaagccacctttgcattaaatgctcctgcaatacggtcggtcggcgtggcgacttggccaaggttgcttcttggtgaagactgggcctcgggtgagccgaagctttgtgctgatgggggttaccagctgagattaggagtcttgaggggcgccgagcatggtgtcttcagtgagctgctaacggtattgggcgcggagcccgagcgctctgaggcggctgttgaacccctccgagggatcggccttcgaacctctgatcagtag

SEQ ID NO: 1629 - DNA, 390 bp, Zea mays
  Peptide Sequence Number=SeqID_45004
atggagcagaggattacccggtctacgttcaccggcggtcgggtgaagtccggcgacccgtggactggcttctccggcgaagcaaagtccgattccttgctcggggagcttcaccgaggcgtgcacagtcgcttccgatggtcgggcatggctgggaagggctctgttggccggtctacggtggcagaggctcggatgtccgcgggcacgccgtgcacggggcaacgccgatggtttcgggctccgttccaagggaagataatccctaggtcagaagatatgcggtcgccaaatctggctggtctccctgcccacttcgcgacaaaagtgatgccaaggcatgtcaaacgtcaagggctcggtctcaactttttccagggggtgccttag

SEQ ID NO: 1630 - DNA, 693 bp, Zea mays
  Peptide Sequence Number=SeqID_45005
atgccccctgcaccaccacagggcatcccagctactggaggacaccctgacgaagacagagatgacgacaccggtgcagttcgagccacaacacggagctctcggaggagcaagagccagagtgatgcatcgctagacccatcactcgcgccgccactcgcggtctaccaacatcgtcgcgggttatacccggaccagtgggaggctactagcttggtgcgccgtctggacgatgatctccgaggcgcagaggccttctcagagcactattatatcactgagagggttactaccgaggcaaccatgcaagatgctgcacgacatgcactttcacagtattgctcgttgttcagcggggtagctgatggccttgacctgaagtactacactcgtcgttcgatcgacagtgctggaggtgtgattgtctcacccgttggtgagggcaatcctaagcagaacaacatggtcaacttggtcgtcgtgctcaacaccgagctggaccacgcccttgacgagttgggcaaggttcgggcggaggttgcggaattgcgtgctgagcgcgcaacgtgccactatctgaatggtggttctcccacccctgtcgggattcagcacccttaccgttcaccgtcctgtggtcactttgattatggtacccctgactgcaggacccaaatagatttggatccgtag

SEQ ID NO: 1631 - DNA, 681 bp, Zea mays
  Peptide Sequence Number=SeqID_45006
atggatgtaggggagaatttcagtcgcaactgcctctatatctcctcctctgaccgtggggagtacgccttctctcgccaccaccaaaacccacgccgccgacctccgcattaccaaccatctcacaaccaagggcagccaccagagatgtcgcctaggatacagggcgccacaccaagactcgcctatgctgatgcggagccgtctgccggtgcgggcacacgcaagcatggtgcccagccccaaccaccaaaagtggtcgttgggaggctgtctgctcgatggcgcaccggacagtccggtgcacaccggacagtccggtgccccctgccacgtcatcactgccgttggattctgaccgttggagcttctgacttgtgggcccgccttggtgtccggtgcacaccggacaggtactgttggctgtccggtgtgccagcatgggcgattctgacttctgcgcgcgctgcgcgcgcatttattgctcggcagagagccgttggcgcggagatagccgttgccccggagtcgcaccggacagtccggtgcacaccggacagtccggtgaattatagtggacgagccgttggcttttcccgaagctggcgagttcctgaggccgacctcccttggcgcaccggacactgtccggtgtacaccggacagtccggtgaattatag

SEQ ID NO: 1632 - DNA, 288 bp, Zea mays
  Peptide Sequence Number=SeqID_45007
atgactccatctgactttgcacattgtgatggtcttccttcaagtgactctgtctgcggtctcaaggatttgcgttggcttctcaacgtaggtagagtttgccatttatttcacattgtgcttaaagttaaagaaaataggaaagattgcagcctcgctgacggagagtacgtcctcgtgccggagcaaggagttgctcaggaggtagccccggatccagcaccagagcctgcaccagaggatctgcctgccactgctttggaaggcaagccccggttttatgcataa

SEQ ID NO: 1633 - DNA, 498 bp, Zea mays
  Peptide Sequence Number=SeqID_45008
atggagtttgctcagaggtcactaaggtcaggttcgccacccagtagcttcgcggacccgcaaggacctggtgggaccattttcttgctatgcagccagatgaccgagaggtggaatggagagagttcaaggcagctttcagggggcaccatataccagcaggcattatggaccgaaagctcaacgagtttctggcactcactcagggaaaccgaacattgttatagtatgctcaggccttcaatgacctgtgccagtatgccggatatcatgcaaacgcggacgagaagaagagggacatgtttaggagggggctcagcactaagctccgtgaccgtctcaacaccgtctgatgaggacatcactatgagtacgactacaccagcagcacctccacatcaagcgcaacttccttcattagctgggccaatcactagggcccgtgccagagatcttaacttcgtcatgctactgaagaatgagggcccagatgaatag

SEQ ID NO: 1634 - DNA, 1260 bp, Zea mays
  Peptide Sequence Number=SeqID_45009
atggcacgtcggcacccactggccgctgcatccagctgccagcgcgcacccgcgacccgcctggcgccttggcctaagtgcctgccacggcacccgcatggccgcccaggggcccagcggccaacacgcactgcgcacgcgccgtggggccgtgccccagccggccagcggcccagccccacgcggccaggtcccagccaccacccgccagcaatcaagctccaagcgggggcggccagccgtccaaggctccactgcgccaccgcctcgcaaggacagcagctgcaaactcgggcccgctgccagctccaacccgtcggccaacacccagcttcttccccaactccagcagccatggcgccacctccacggcaacccgtctcaccgactgccacggggacggccggagctgtctcccctgctccttcccgacctctgggacatagagtttctcttcctccccgacctccttttagttcgtctatcgctgctgctatcgactgccaactcgggtcgtccatttccatggatgggaaccggaacttgaatcgaatcgatgacaatactagccaatcatttgtcgatcctctgactttcagttccactaatcatcctaatcacactgagcagaattttgcggatggtccttgctgcgatcacactgaagaacaccgtccgggccttgagactccctccggaaatgcctcgactccggtgcacattgaagagcaaacccaacatggtgatttttctgatcaggcggattgtaattctaatgggcagcaaggctttactagagatttgtgctctgttccaagtggcatacatcgtgcgggccttgaggctcccttcagagatgcctcggctccggtgcacattgaggaacatttccatcaatctattccaagtcagtcctctgcaccatcaggaagaaggctcatagaggcaccaaacctgcttgtttaccatagaaaaaggaagcataacaagccgctggttgaaattgcagaagaggcagtggataacatttcagccctgcaagtagatggcgaggaccctctagcagccaaaaaagaggaattttttaaacaaatagtgaaagaagtctctggtattctaccagccccagcagatccacctccaaagcccaaaaacactgatagttccactgctgtgtccctgcgccgcagccgccatattgctggaatgggagcagaaattggcaagcaagatctttgctcaagagcaacaaagttatga

SEQ ID NO: 1635 - DNA, 201 bp, Zea mays
  Peptide Sequence Number=SeqID_45010
atgccgtcaatggggctcggtgtatgcggctcgctctgccaagtttgggttcgccctcttggggaggagtgcggtggcaatgagattgatggttttggttatgactatggtgctggttgtcagcattgcaaccactgctcaggagaagatgaagctgcggaaggagacttccaggagttccaagactacgacgagttctag

SEQ ID NO: 1636 - DNA, 1017 bp, Zea mays
  Peptide Sequence Number=SeqID_45011
atggccattgagaagatgctccaccgtctcaacccttcaaaggccaaagcgaatgatggagaggggcctgaattactgaggagtgcatccagcggagaggccagtactcattctgattcgttaactgcaacattagctgaacatcgccagcatttagtcagtatacagggtctaattaatcaactcaaggaggctattccagcaatgcagcagtctatagacgaactctcagaagaagtgaatagtgtatctattaactcaatggaccaattgaactcgaggctgccactgccagtacaaattgcagggtttggaacatcagaagaaagcagcagtgaagtttcggagatcaattctaagctctcttctacacacttggataagcctgggggcagtcctgctctaaagctaccaccattatttagtctgactccaagttcttctggaaaaggaatacagacacaaaaacggagtgcattggctcgtcaacgtagccaggacatcacatcagaacagaaaacgcttaccatcccctcaactaaggatcaaatgaatggttcaatgcacgaaaatgatgactattctgctcatgacattagacgttctgttcgtgaagctgctttatctaagccattgaagaatacagagagaccacaagataaaaatagtgatgatggttcggaacacttctttattccgctgtcaattagtgctgcgaagaaggaaatggattcggtggcaaatcgatgtaaccaaagattaggtttgtcacctcagatgaagttcccaaagagcacaagctacaatgcagataccccaatcaacaaaagtccaattctgttaagtgaactcaatggacatgattcgatcagtgccatgagtttccttgacccggctggtggtctggcacatcagtcctttatcactgatgatgctctggatcaagtattctctcctctattgatggaatcttcgttgttccatgatgcagatgaggatctacttggtaagtcataa

SEQ ID NO: 1637 - DNA, 396 bp, Zea mays
  Peptide Sequence Number=SeqID_45012
atggagcataactttccactcccaaggttgtttagtgcaaataactacttgttggaaagctctcttcgtctactttcatgttcaaggctgttcttggcacggcaagagcagcaacaacaggagccggagacggtgtacctgtcgctcaaggcgccacaccatcttggttgtggtagtcgggcagccaacgtcgttctccaacaagttttccacctccatcatctctcatcgaaagatcgggcgcccttctacccgttgggtttatcaagtggttcaaggttgttcttggcacggcaagagcagcaacaacaggagccggagacggtgtacctgtcgctcaaggcgccacaccatcttggttgtggtagtcgggcagccaacgtcgttctccaacaa

SEQ ID NO: 1638 - DNA, 546 bp, Zea mays
  Peptide Sequence Number=SeqID_45013
atggagggcacgcaccgggcgatagaactaggtggacacctaggtgaagaagtgtgcgagggtggcaaaagtgttggacttgcgctacagaggaaaattccggagaaatgggataaatcatcgaggatgaccagatactaccgaaaaccaaagaggcttggaacaggggatgtccaaaggcatggcaaagcaaggtggtgtagccgcgagggcaaagaatggtcgaggaggccgagagttgagagaggacatcgtggccgagttggccaagacggcggtgccaagtggaggcaagggcgtagggttggacaacatgggcgaaggaaggtggagtggggaagcgaatatggtataggggccgaagttgtcgtagcaagcaaccacagcacgagtggtaagatctcgtatggtgagcccccaaggatcgaactccatagagcagtggttgtcaatggtgaagcgatgagcaacaaggatgttgttgaggtacaacggaccaggagggaccgtgtcacctatagagttgacagtgacaggcaaggttga

SEQ ID NO: 1639 - DNA, 234 bp, Zea mays
  Peptide Sequence Number=SeqID_45014
atggcggcgaactgcgagatgctacatggggttggtggagaggtacaccgctctgacgttgtcacagtagacgagggtggagtgctcgaggggactgtggagcttctaaaaaagctggcggagctaagaggcatcggccacagcgttggccacagcgtggtactcggcctcagcgctggagcaggagacgacgaaatagcacttcgaggcccaagagacgaggtaggcgcctag

SEQ ID NO: 1640 - DNA, 1098 bp, Zea mays
  Peptide Sequence Number=SeqID_45015
atggagctgtggctcagcccgctgcccacctccacgaggctggacaccacgggtagagcccgggggccaggcccctccaacagctgcacgaagaaagatgggatcgacgagatcgacccgctggagagtttgctgggcgcgctcgagatgaagtcacaaggccatggtaaactatggcgacacaaagcaggaaccttgaaggcaaaggggcgtagagacctcgaaggcgaaagggcaccgcgagtgggagagaagcaagacatggcagctactcgaaggacctcacatgtcatacaagctggcccgaagcgcgaagaaggcgaattgtcgcacaaggagcgtgcaaccgccctgctgttatacgcccttccatcttcgccgcaaccagcagtcaaggaagcgaaccgccgcacaaggagcgtgcaaccgccccgcggttttgtgccccctcggcttcgaccggtgatccaacctctggcatgggggcccaggcccacatgtcatacacccggcgcgccggtttctgggtgcagaaaagttgcaccgccgctcgcgccaataccgcgcctcctcgagaagataaattttcaaaaccaatgcagcgactcgaggcaccccgcgcatggcccaacaaagacattaagtgcggaggtcacgggccagtcagccgcggggacaggcatggcagtcggcgtgaccatgggcgggccgacagtaattgcaccaacgggcgcgcaggagcagcgagccaatcgccagtcaaaccttggcctcacccgcaggctcgcatcctcccctgaggcgggctcggaggccattgtcggtaccctgaatcaggggtaccccttactacagtttgaagacgcggtgcccgatgtatcagtcaagccggacctccacgagggagcgccagacacctatacgcacaacccagacccccgattatggcccagtactcccaagcggagacccgatgcggccatgtggctcgttgcccgtgacataagccagcgggcggagcctgacgcgatgtgccccctcaacatttattgcgtcatgtccactccactggcaggcggcgccagggccatcctgtag

SEQ ID NO: 1641 - DNA, 396 bp, Zea mays
  Peptide Sequence Number=SeqID_45016
atggtcgccggagttcacaaccccgccggagtgcgtggaccggatcgccgtgatttggccggcacacccgccgccgacgagaacacccgcctgcgcgcgtggaccgagcgattccggccatcaccgccggcgagccactgcaaccttgctgacggagagtacgtcctcgtgccggagcaaggagctgctcaagaggtagccccagatccagcaccagagcctgcaccagaggacctgcctgccactgctttggaaggcaagccccggaatccttttgagatgaatactagttctctggaggacatggttgctggagtgacttggccgtccatcttgccaccgggttggactatcgagtgggaccccgcctcggctgaggaggagcatgaggagtga

SEQ ID NO: 1642 - DNA, 795 bp, Zea mays
  Peptide Sequence Number=SeqID_45017
atgacttcctatggatcctcagacgacggaaatgcactgtcccacactgacgggcttgcacgagagggctttccccgcattttgtgggaggtacttcaggggcccggatacacgacaccccctcagtacgcggtgcagcagttcgagaagcaccgagtgccccgctgtagggtgaggatgaccttggagcctcatcccctgcagccaggctggcgctcgctggactctgagtcttttggataccgagctgaggacacgatcgaggcgatcgctctgcacgggttgaccactttctgcggattccatcctttggagctggctacccaccccattggcttgttccccgccgaaagggaggacgacccaatgtggaaggatcgggtggagcatgccaaggatatctgggccatctacccaggacagactccgcacttgaccgtacagtgcatgaatgccctgtaccgtctgcaagtgatgcgcggtgaggcgatgtcccatctgatggcactattggaggcaaccaagattactttggacaacagggaggagctcgtggttgatttgtccactgaaatggtggaaaaggacttgcaggtggagcagctatccactgatatccaagagttggaggaattggtgggcaccagggagaacaccatcgaggagatccaggatatggaggccaacgaggacgtcgacatcgagggaggagatgagcctgcctctagtgtggacactgctggctcagggagaccaccttcccccgagtcgagtgttgcctcattcgctcactag

SEQ ID NO: 1643 - DNA, 213 bp, Zea mays
  Peptide Sequence Number=SeqID_45018
atggcggcccctgccccggcgtggtggctggccgtggcctcgccggccatggcgcccgcgcggcagaacgatccggttgaagagcccgaagaactcacaggagaagcccctgagcagcagtcggttggtggaggcaagtgtcccttgacctatctctgtcctattcattctttcattcacctcccgcattacacatttatacctaaggattga

SEQ ID NO: 1644 - DNA, 453 bp, Zea mays
  Peptide Sequence Number=SeqID_45019
atggagagtcatgatctccgggcagaaagggaatcacggcttgtgggtaaagtgcacaacctctgcagagtgtttgaaactgatatatcagccgtgctcgtgatgtctcgtcttagacacaccgcacggaagtctgtcatccccttcttaccctctcgtctcgcggagcgtccgcttcgccgtcccgtggccggtcagtccagccacttggagaggctgcaccaccgcctgcatgaggagcaggagcgtcgatggcaggagcagcagggctcttctttctcgccccagcaggagatagagtctgtgaggagctgctcccttgtgcttcccctggaggcgccccctgcaccaccactcggcgcccaagcctctggagtagctgctggaggagacccagacgacggaggtggcgacgacagctcgagccacgacaccgacttctctgctgactag

SEQ ID NO: 1645 - DNA, 333 bp, Zea mays
  Peptide Sequence Number=SeqID_45020
atggtcctgttcgccttgcacctgagcattgtcttgggcatgggtctcaccgtcgtgctaggacttgctatgaggttcggggctggcattttcacaagcgacgtgcccgtgatccaatttgtcgccgacacacagaccatcaattccctggccttcgtgtttgatggcatcaactttggagcgtcagactacagatactctgcttactccatgataagactacagaaacaatcgaagcagttagaagagtggaccactgctgccttctcatctgaacttacagctactaaacacaaagagattgattcgcagcaagtgtttggctgcatataa

SEQ ID NO: 1646 - DNA, 303 bp, Zea mays
  Peptide Sequence Number=SeqID_45021
atggaggagtacaccaagcaacctttgagcattcttgatcatccacactcagtctttgcgcatccgtttgttattccaagtgattcaagctccgttcttgtgagaactgttcctaaatccaagatcaatgctgaatggttagaaagagatatggtttccgtcggcgttactaaggttgtaagagacttgctttactttatgcgtcgtgaagttcttcatcaacaagggctattctacaatacaaatggaaatttgcaaaaattcccagaactaagtttgtacacaatatcacacagtgtttag

SEQ ID NO: 1647 - DNA, 426 bp, Zea mays
  Peptide Sequence Number=SeqID_45022
atgatgagctacggatccagggcgagggaaaacttcgatgagaaattcccacccacccacggcatcacgagcttcgattcgacttcgattatcatcccctcacgctggcgacgctacttgactggaatcccgaccccgaacgccattccccattggattcgccctaggcggctaatacctctccgcacatggcgatactgctatggaaaagggggagagcagacccgattttatattccgagaggggcgcgatggtcgggggaatcagctcggattcgttgcgaggttcacagtgtgggagctgaacctgacaagtgggcccacacggtagccagttcagtgcgcaagtccgcgaggaggaagcccacgcaggagtggccccacatggtggtgagagcaggacccaagcgccacgctggagactga

SEQ ID NO: 1648 - DNA, 84 bp, Zea mays
  Peptide Sequence Number=SeqID_45023
atggcgttcgtgagggaccagcagacgtggacagagtaccgaacttgttctgatcatcgctggctgccagtaaatgaagtttag

SEQ ID NO: 1649 - DNA, 501 bp, Zea mays
  Peptide Sequence Number=SeqID_45024
atggagtccgcgggcagctttgacggggctcacccggagatccagcgggattctgttcacaacgcccccgcgaaggtcggcatggtggttgaagacgggcccgacatcatggccccacgcaggcgggatgcagggaaggaagacggcgcgggcgggagcgggattgcaggaaggaagacggcacgggcgggggctggagcgggggcacgatttcatcccgcatattacgtgcatagggcccacgatcccacccacgtgctcgcagttatccagtcccacgccgccactttaaaaacacccccacgccgccagggattaggttttagcggcggtggcgtttctctcgggtgtgcgagcgccgatgatcctaggggccagcagcggtgccgccccgaggcaggcgaccgacggtggcgctctaccaggaacgagcgacaacgacgctcccgaggcgagcgcgcaagcagcgacggtgttctcgaagcggacggacgacggtag

SEQ ID NO: 1650 - DNA, 1152 bp, Zea mays
  Peptide Sequence Number=SeqID_45025
atgtatctcggccaaaaccctcccctcaactcgcttaccctgctcgaccctgctagctcatgcgcacgcgatcactggaggagccatggccgccgcctctggcttgctgcggatctcgcgggccgttataaccgccttcgcttaggtgcgcttcggacccgagactataaagcaaggagccttgaaccccccacccccacccttctcctagtcggggcatcgttgttgccgaggccaaggtcacctcaaaagatcgctgtcgggcttggggagtcctcggagctcggtgaatcgctcgccagaatcctgaagccgccgtgcagcgaggggagcttccctatcgctgccatacctggcgcccactactggtcagagcttcgaaggctggcccctcggaggggttcgatagccgcctcaagccactcgggctccgcgcccactactgatcaggggttcgtaggctggcccccaaagggttcgacagccgcctcagagcatgcagagcgagggatgactctgggtacgttcgatacacaaccaaggctcgggctacgctcccgaggctcgggggctgctctcgcaaacccggctccagccaaaccgttgacagcgtcaacaaaccagcccaagaacttggaactcgactatgcacccgggctacgaccagaaaacatcgccgcctgccccgctccgactactgtgccactcgatagagtgaggctgacagcagctaagtccagcctcgggcgccataggaagctccgcctcgcccgaccccagggctcggactcagcctcggcctcggaagacggactccgcctcgcccgacctagggctcggactcagcctcggcctcggaagacggtctccgcctcgcccgaccccagggctcggactcagcctcggcctcggaagacggactccacctcgcccgacccagggctcggactcagcctcggcgtaggaagacggtctccgcctcgcccgaccccagggctcggactcagcctcgacatcggaagacgaactccgcctcgcccgacccagggctcggattcgacctcgacctcagaggagccttcgcctcgcccgacctcgggctcggacccgccacaccacagggaaggccatcattaccctacccctagctag

SEQ ID NO: 1651 - DNA, 234 bp, Zea mays
  Peptide Sequence Number=SeqID_45026
atgagggtggaatgggacgcccttagttggttaattagaggaaccagaggtgtagttggcttcgtcgtagggccgtcaatggggtccgagcacagtacttgctctgccgaggctggttgcagagaatgggaatcacgacttgtgggtaaagtgtgcgacctctgcagagtgttagaaattggtatatcaatcgtgcttacggttaagagcggccttgggatcctctttgattag

SEQ ID NO: 1652 - DNA, 891 bp, Zea mays
  Peptide Sequence Number=SeqID_45027
atgaccgcgtcaaacaaggtgcgccacgtcgttcgatttcatatccctttttctcttcccctttctctctcttgctacagggaccaggaaaggggatactccgaaagggatccttctccgcgaaggaagcgggccccgagcccccctactgatcaaaggttcgaaggctggcccctcggaagggttcggcagccgcctcagagcactcaggctctgcgcctactactgatcagaggttcgaaggctggcccctcggaagggttcgacagccgcctcagagcactcgggctccgcgcccactactggtcagaggttcgaaggctggcccctcggaggggttcgacagccgcctcaagccactcgggctccgcgcccactactgatcaggggttcataggctggcccccaaagggttcgacagccgcctcagagcatgcagagcgagggatgactctgggtacgttcgatacacaaccaaggctcgggctatgctcccgaggctcgggggctgctcttgcaaacccggctccagccaaaccattgacagcgtcaacataccagcccgagaacttggaactcgactatgcacccgggctacgaccactaagtccagcctcgggcgccataggaagctccgcctcgcccgaccccagggctcggactcagcctcggcctcggaagatgaactccgcctcgcccgaccctagggctcggactcagcctcggcctcggaagacggactccgcctcgcccgacctagggctcggactcagcctcggcctcggaagacggtctccgccttgcccgaccccagggctcggactcagcctcggcctcggaagacggtctctgcctcgcccgacccagggctcggactcagcctcggcctag

SEQ ID NO: 1653 - DNA, 372 bp, Zea mays
  Peptide Sequence Number=SeqID_45028
atgacggaggcgcaaggattcgatggggcgacgacggtgggactccggctgcatgaagattgctctgggcatggggctcaaatggggcgcgggtgcgcggacgtggccggagaacgtgtggacgtgggcgcgtccaaggtgggggatcgtgggcgggaggttgaggacgagctgacaggtggggtcggcgagacagagagagaagcgggcgcacaattgagatcccagcaacaccttctgctcggctatgtcttcacatcgaagcatgggcttcagttgcctcttgacttccatgcacagctatgggaccttggtctgatggtatcttcatgcatagatatgctggtgaagtattgcttcgaaggcgtttaa

SEQ ID NO: 1654 - DNA, 321 bp, Zea mays
  Peptide Sequence Number=SeqID_45029
atgcccaatcttgtcgtgaaacaacctatttggattcaaagtttattggctaaggggagttcattgccagtggaagtgatgatggtagatggtttatatgggagaaaagaacaggaaggcttattaaaatgcttgcaggggatggagctgtctcatcccttcgattgtgcagttgcaacaagcggaattgataacacaataaagctatggacatcagatgcaaatgctacatctatggttgctggaccagaacttgatgtattaagtgccatagagaataaccagcggacgttatgtcggaagcgtcaaattgtactgtaa

SEQ ID NO: 1655 - DNA, 1017 bp, Zea mays
  Peptide Sequence Number=SeqID_45030
atgaagggggtggcggcggagcggacaaggggtcgggaaaggggatatttcgaaagggatccttctctgcgaaggaagcgggccccgagccctcctactgatcaggggctggcccctcggaagggttcaacagccgcctcagagcactcgggctacgcgcccactactgatcaggggttcgaaggctggcccctcgaagggttcgacagccgccccagagcacgtagagcgagggatgactctgggagcgattttgtaacggaataccatcagagggaggcatcgagccctcggaccctatcaaatgggaccgggtccggcaaatcacctgcagaggctgatgggcgcaattcaggtcaaggcttcgtctactcaagggacgcgatctcgcctcgcccgggcctagcctcaggcgggaacagtagtcccagacggattcacgcctcgcccgagggcctcctcaagcaacgggcactccctcgactcgcccgaggcccggctcgggcaggcttcgtagtgaagcaaccttggccaaatcgcctcaccaaccgaccgtatcgcaagcgcattcaatgcaaggatcgcctggcgccttatcctgacacgcgtgcctcagtcggcaaggtcgaagaaaacagcgccgctcgcccctctccgactgctgtgccacccgcaggggcgaaactgacagcagctgagtccagcctcaggcgccacaggaagctccgcctcgcccgacctcgggcctcggcctcaggagaagtcttcgcctcgcccgaccctagggcccagcctcaatctcgaccttgggaggaatcgcgtcctcgcccgaccccggcctcggcctcaggaggagtctccgcctcgcccgatctcgggctcggaccgaccacgccgcaggagccccttatggaagcaaggagacgtcagcaaggtcccgacagccccgacagctatgcttctacagggctcaaacgctcctccgacgaccacgacaccatgtacacagggccctag

SEQ ID NO: 1656 - DNA, 2769 bp, Zea mays
  Peptide Sequence Number=SeqID_45031
atgacttcgtacggcggacagccatcagtcgaagtcttcgcgaagtactattgcctgcactggcagaagaggatgattggagatgaagttgcccagtttgggtcctgtacatttacgccgaagaccggcaagaccacgatggaggtagttgagttggttccttgcgcccgcaacaagtggggcaattggcatgagttttggttctacgtcgcggagggcacagtcgaagaccatccggggctccccgtgtccgagatgtgctcgcatttttactcagcatacccgccgtttgaagtggcggaggaggacgcggacgaaggggcccttcggtgcgccgtcggcctgcgcagtgggcgcgatttggttgaggagtttgtggtgtacggggtgtggcctttggcgcatggctgggcgttgggtgaagtatgccctcgccagatgccttcccatggtgggaagctggtgcgaagtcccgccttcgcgctggatctgcatagccgcgatccggccgcctttgtgcgtgaggcggaggatggggcggtgtggatcgttggtcggtacgtgccgaagacagagggccagcgtagctgggatattcgtgggtcgaatgaccgcttgaacatggtttttgagttgaatcgtctatcgtatggcggttatctcggccaagacgatgtggatcgtcgcgggaagaaaccggtggtagagactggagacgaccccgcgtcggcgaccgccccgtcctctaagaagaggaaactaggtactgctatgggaggacttggggtttccgatggttttgctagagaattgatgaggacatgcgcggccctggggggaaggatgtcttcgcccgagctccgggagtcttcggcgcggatgctgatggttaccgggggttggtgtcctaagaatgttcctatcccccgcgcggccggcgaagacttttttacatctcgcatggttcatgattggaaagtgtttccttacgggcggaatattgttgctgttgtgtcggcagtgatggataaggatcgccagggagctacacagaagcgccaggcggtcatcaggcttcatgaggccaggccgaagaggcagcggggggctgcgaaggctactgcccctggcggaggccagtcgccgctggcggcgaagtcggccgtccctgcatccagcagggcgccgggggctgcgaaggcggctgccgtcggtggttccaagtctgcgaaggctgcccctgcatccagcagggtgccggaggccgcgaaggaggcccgagggttgccgccgccgggcaagcgcgttgctgacttcgccaccgacattagtgtggacgattatcttgtcgggtcggacgaaggccaacttgttgttgttccgcctgccgtggcgaccgcgacggctgccgtggtgccaagggcgaagggcagtgctcttagtgccggcggcgagataccggcactcactgccgtcagggatgaggcaggtgctgtgtcccgccggctgaaggagatgaaggaggcactaagtcaggcggctgacttcgcagaccgcgcggcgtcgggggccctgacggcagttgtgtctgccgaagtcgagagacttcggacgcaacatgctgacgccgtccgggaaaagtcggccgccgacagtaagtgccgcaagctgacggataaggtggctgcgctggagggtgagaagactgacctccggcgccaactggcggaggagaggaaggaggctaatgaggccctcgccaaggcgcaggctgcgcaggcggaggccaatttggcgcgggcggagggcagtcttgctaggcagcacgccgagcagttggaggagcggctcagcgctctgcagagccgcgtggagagggccgaggcctcgacgagctcggaggctgagcggacacgcaaacagcttatggattcataccatgagctgggcgcgcggaccgccgacttcgaagtgccagaccgagagcccggacttcgctgcctcgagtggatacaggaggagttgcaggcgctccccaccatcgtggaggggtttatgtcttatgcctccctggtcacctgcaagggggcgatgaacgcgctctctcgcgaagggtgccgacactttgaggtcttcgaccaagctgatgaggatttcgagcgtgatatctacaaggttgaggaccctatagtgaaggaatccaccggagccctctatgaccggatgtggggcccccacggtcgggaggtggtcagggagcgggccgagacggcgaggggtcaggcggcgcgtggcgagagggtggatgactttggggctttgaacagcgtgctgcctgacccggagccgaacccgacggaggctgtgcctgaggccgccctgcagccgcctccggaaaccgccgaaggcgttcctgatgcccccacagccactacagccggcggaggcccgtcgccaactgccgcgccgagggctgaggatcctgtgaaggtggcggcggagccgacagcggaggagcccgcgacagctgggtcttcgcaggttcaagattttgggcctgcgcacgcaaccgctactactaattttttggcggcttcgaccgtggatgttggtaataaatcgaatgggtctgcatctaagttttctgattttggtgactctgggagctcggttgagtggactgaggagtcgtcggatgaggacttggactactttgtggccttggatgtggcagcggcggaggcttcgccgcatgctgcgggatgctga

SEQ ID NO: 1657 - DNA, 252 bp, Zea mays
  Peptide Sequence Number=SeqID_45032
atggggaggacactcccaatccgccactggtacctcctaccttggccgaggctatcgctgccttggtcagctccaccgccgacaacacgtgctttctacgtgaaatggcgggcaaccaatttcaacaacacagtggaagagttccccctctgggaccccgagatactacctatctggaattctctgaaactcgaccaccgctcttcgtcaaggcagaggaacccttggaagctgacgaatgggtgcgagtga

SEQ ID NO: 1658 - DNA, 399 bp, Zea mays
  Peptide Sequence Number=SeqID_45033
atggccgaaatcgctcaccggagtttctccggcccgtccgagaccttctcaccgccgtcctgccctatttgcccgtggattcatggcctcttccccgccatcgagttcgtcgtggcaccctcttcccctctacccaactccggcgaccctagagctaccctagctcgtgctcgcctcaactccggcgacttcaccaccgcggagaggagcggcgccgcccgcagccgtctgtttccctggtctaatcccctccgtctgattcagatcgaacggcccggaccgtgggataccgacaacgagcagtccgagtttcctgagtgtgttgttggagacctccctgagcaacaacctggtgaaggcaagtgtcctctgacccattatgtcctacatactttatga

SEQ ID NO: 1659 - DNA, 444 bp, Zea mays
  Peptide Sequence Number=SeqID_45034
atgctggtagactacacaacggtactcgatagaccatgtgtgtcggtcgaaggcccgacgcagcagggtatcgagagcgtcatggaagtgacacccgcgagtggcgtcacgagtgatgggtctggcgatccatccatccggctctggctcctccgagagctctgtgtcgtggctcgaactaccaccggcgtcgtcgtcatctccgtctccgttaagggggcatctctggctgaggtgcaggggaaggcggcctctcagactcaacctcctgctgaggcgagggggaagagtcctactgctcctggtcctactcctgctcatggtgtcggcgctcctgctcctcgtgcaggcgacgatgcagtctctccagctggtaggactgacctggcaccgtgcgacgcagaggacgctccgccaggcgagaaggcaaaaaggggatcatag

SEQ ID NO: 1660 - DNA, 459 bp, Zea mays
  Peptide Sequence Number=SeqID_45035
atgccccctgcaccacctcagggcatcccagctgctggaggagaccctgatagagatggagacgatgacgacgtcggtggcagttcgagccacggcacagagctctcggaggagccggacggggtagctgatggccttgacctgaagtactaccctcgccgttcgaccaacagtgctggaggtgtgattgtctcgctagtgggtgagggcaatcctaggctgagcagcatggtcaacttggtcgccgtgctcaaaatagagttggaccacgcccttgacgagttgggcaaggttcgggcggaggttgcggaattgcgtgttgaatgcgcggcacgccactatcttgatggtggttctcccgcccctgttgggattcagcacccttaccgttcaccgccccgtggtcgcttcgactatggtaccccaggctgcaagacccgcatagatttagatccatag

SEQ ID NO: 1661 - DNA, 303 bp, Zea mays
  Peptide Sequence Number=SeqID_45036
atggaccgtccggaggaaaagggcggaccgtctgagccctcgcgcggaccgtccggcctcaggcgcggaccgtctggtcgggtcggaccgtccggacctggctcgcggaccgtccgcgctcagcagaatggcccaacggctaggaagtggttggtggctataaatacaaccccaaccacctccattcacaacatccaagcattccaaccttcaacattcaatacaagagctagcaatccattccaagacacattcaaagcctccatctctccaagtttcactattgaggaaagagatcattag

SEQ ID NO: 1662 - DNA, 429 bp, Zea mays
  Peptide Sequence Number=SeqID_45037
atggcacccaagaaagctaactcgaaggctgacgaggctgcgaaggcagcactgcttgccgcaaaaaagggcaaggccctcgccctcacccactccacccaccaagaggctactgaagacgacgctctccgcacctgcggccctgaaggacaatcgcagcctcccccaggcttcgccccaccagagggcgcggacctcaccgaggacggtgaagtcctcggcgtctcagcggaagaacagctacagctgcgcgccctgcgcctcaagaaccgcaatctccagaggcaaaaagagatactggaggccaagcgccagcgcgtgtccgcactagccaaggtgcggcaaatgatacgcgacgaagagcagaaggcccaggacctcgagcgggagatcgcgccgatgcagcgcgaaggccacctcggcctgtag

SEQ ID NO: 1663 - DNA, 450 bp, Zea mays
  Peptide Sequence Number=SeqID_45038
atgggcaagagcaagaaaggtggtggttcttcgcatcattccggtgacaagcgcaagcgcgagccgactcctccctcggaggacttcggcgactcagagtacttggaggaggagttctcctccgagtccgagggctctccggctcctgcctctcccccggcgtcgtctgatgattcagacgactcccaggggatcgccgcggaggtatggacttacatccgggccgtcaagcgcgtcgggctcgagggctcggatgagttagagtactcctcgggcgaggagaactcctccgacccatccgaggaggccagcggcggcgacggcggtgatggcgacgacgacggaggcgacggtgacggcggcggcgatagcggcaagggcggtgacggcaacggcaagggtggcagcggcaacggcagcagcaaaggcagcaacaaggtcaatggctag

SEQ ID NO: 1664 - DNA, 2490 bp, Zea mays
  Peptide Sequence Number=SeqID_45039
atgcaggggttgaagaagtctctacacgagggttggaaatgcattggtataatagagttaggtggaccaagacccattacagtagagattgctcctttagttgaacctaccaggataatcatgtcactggaaaggccgccttatgagtggcatgagttcttcccaaacttgcggcataatttaggtgttgtggttactgtatgggctccaattgtcatggtgtacttcatggacacacaaatatggtatgccattttctccacaatatgtggtggagtctatggtgcattcagccgcttgggtgagatacgaacccttgggatgttgagatcaagatttgaggcaattccaagagcatttggcaaaaaacttgtacctgatcatggcagtcacttgaaaggagatgaggaggacaaaaacccacccttcgataagtttgctgacatatggaatgcatttattaattcattgcgagaagaggacttactaaacaatagggagaaagatctattggttgttccttcatctggtggtcaaacaagtgtttttcagtggcctcctttccttcttgccagtaagattccaattgcacttgacatggcaaagagtgtcaagaaaaaagatgatgaacttatgaagaggataaagcaggatccttatactgagtatgctgtaatagaatgctacgatacattattagatatcctttacagcattattgttgtacaaagtgataagaaagttgttgatagaatacgtgaaagcatcaaagatagcatccaccggaaatcactcgtgaaagaattccgattggatgaacttcctcaactaagtgctaagtttgataagttgctaaatctactgaaggaatatgatgagaacgatcctgtaaatagaaacacacatattgccaatctgttgcaggatataatggaaatcatcacacaggatattatgaaaaatggaaaaggtatcttgaaggacgagggccaaaaacaacaactgtttgcaaaattaaatctggattcattgaagcatgttgcttggagggagaagtgcattaggcttcaattgttgttgacaacaaaggaatctgccatatatgtaccaacgaacttggaagctcggcgtaggatcaccttttttgcaaactcactttttatgagaatgccaagggcaccacctgtccgtagcatgatgtccttcagtgttttaactccatacttcaaagaggaggtgctcttttcaccagaagatcttcataggaaaaatgaggatggtatatcaatactgttctacctacggaaaatatatccagatgaatttaggaacttccttcagcggatagattttgaagtgaaggatgaagaagaacttaaagataagatggatgagatctgtaattgggcgtcttataggggtcaaactctcaccagaacagtaagaggaatgatgtactacagaaaggcacttgaaatccaatgccttcaagatatgacagatcctgctaaagttgaccgagacagatcaataggatcctaccaagagttgcaatatgatattgaaatggcacaagctattgctgatatcaaattcacttatgttgtctcatgtcaagtttatggcatgcaaaagaaatcaaaggatttaaatgaaaaaaggcgctatcagaatatcctcaatctcatgataatgaacccatcactacgagttgctttcattgaggagatcgaaggtctaaccagaaatggagcaactgagaagacatattgttccgttcttgtcaaaggtggtgaaaagtatgatgaggaaatttaccgcataaagcttcctggcaatccaacagatattggagagggaaaacctgaaaaccaaaatcatgccataatcttcaccaggggagaagcacttcaggccattgatatgaatcaggataattatattgaggaggcgtttaaaatgagaaatgtgctggaggagtttgagagtagaaagtatgggaagagcaaacccactatattaggcttacgtgagcacatttttactggaagtgtttcgtcgctggcttggtttatgtccaatcaagagaccagttttgttactattgggcaaagagttctggcaaatcctctcaaggttcggttccattatggccacccagatatttttgatagactcttccatatcaccagaggaggcataagtaaagcttcaaagactataaatctgagtgaagatatattttcaggttttaattcaaccatgagaggaggaaatgttacacatcacgaatacatgcaagttggtaaggggcgtgatgtggggatgaatcagatttctagcttcgaagctaaggtggccaacggtaacggtgaacaaacattaagtcgtgacatttatcggcttggacgcagatttgacttctacagaatgttatctttctattttactacagttgggttctattttagtagcatgaggcttgtttga

SEQ ID NO: 1665 - DNA, 645 bp, Zea mays
  Peptide Sequence Number=SeqID_45040
atggcaccccgaggcaccggggccggtgccgtaggggcgactggtgctacgcgcaaggcaggagccacgcatggctgtgtcaggaagccaggtggagaagccagtgccgcacgtggcgcaggacccgcatgtgggagtgtgggagaagccgtcggtgccgcgcgtggcgcggggacaacggggatcgtggtcgcgcgtggcgcggaggacggcgtgacggacagcgcgccggttggcgaggacggtgcaccacccacacgtgggagtgcgagaaatcctggtggtactggcgacgcaggaagcggctgcacgtcggcatgggggcgtacagcaacagtggtggcgccgggaggacctgcaggagacacagtcggcagccctatgggaaggggcgccgggttagggaattcatctaggaaggtgaagtccgcagcagtgggagggagctcgaccgttctacgaggacgtgtagggacacgacatgcgaaactgaacgccatgtgtgaggaagaaggtgtgcgcgctagagttgtcgaactcccggccgttgtcactctagacagccttgatgcatgcgccgaactgggtagacacataggcgaaaaagttagacagggtggaaaacatgtcagatttaagccgtaa

SEQ ID NO: 1666 - DNA, 246 bp, Zea mays
  Peptide Sequence Number=SeqID_45041
atgccgtacagggcaaagtggggattacggtggctcaccgccttcgatggaaggcggttgaggagaaaggctgagtacaggggaggtctagagatcacaatcaaccagtcctgggtggtcgagatgatgatgccaagtggtggaggtggtggtggagaccgggatgggaggtggggacgcgccggtggaagaaggccagagcatgtagaggggcctgacgctgtcacatcaggcgaggggtcctag

SEQ ID NO: 1667 - DNA, 525 bp, Zea mays
  Peptide Sequence Number=SeqID_45042
atggctgcctgcgcggtggatctggtacccgagagtggaggtgtagaggttgaaggcggcgcggttggatcgacggacgtggagggagacgtactcggcgccaaagacctggtccatggctgcctgcgcggcggacatgagcttggtggcgagcccgagcttgcggtgggagcggagcactgcgagggaggtgatgtggcggtggcggcgcggcccggtcgcggtcgcggtggtggcgcagcccggtcgcggtggcgtggcggcggcgcggccgctcgaggtggcgcggcggcggcgcgggctgccgctgagacgcttttgtgtgcgctacaactaaaacatacatacaaggggggttttctagtagtgtcaggggtaagctttgcctcggtcggaccaataccagaaaggccaccacgcaatgggagtggagagatggcgagagtagcgtgtaccctccgtggcaagaggctggatagtggtgtttctatgctctcggttggcgtgaacccattctggtcttga

SEQ ID NO: 1668 - DNA, 393 bp, Zea mays
  Peptide Sequence Number=SeqID_45043
atggagacactacacagagactctcttctcgtgcaagtcacccgcctggtctcagctttatcatttcaacccaaagtttggtacctgacagagagcaagactaagcataagaaaaacctttttataacacaggtgatcaaggaaagcgtgatcaatggacaatatgaagcgttcccggtgatctaccctggtccagtgaaattggtggggccgatgagcttcaaggacatatcagagcatggaaacaaaggaacagagggtgggaatggacctataacgcgctggccacagtgggagtctttcacggcggcggaaaaccgatttggggaaagtgagcaatttggaggctctagtaaactattggaggcaagtgctggtgctttggatgggtaa

SEQ ID NO: 1669 - DNA, 369 bp, Zea mays
  Peptide Sequence Number=SeqID_45044
atgactccgctccatccgtcgctcgctgtcgatccagtctcattcggcaggagacagcgcccccttgttgaccccaatccgcgctccactaccgtcgctgctgcaacacgagatgggactccaaaccggagaaaaccccagattctccgccgacatgactgcttccccattctccgttgtcgttccacatttctgcggcagaagcctggtccaacccgccgtcaacgggtgccactccagctccagtccgacggtagccctcccccaaccatctacggtggtttcatcatcgacatcccccaaccaaactcctcgaggttcttccgaaccctagcgagccgcattacctgggatcgtcgtcgaccgtga

SEQ ID NO: 1670 - DNA, 375 bp, Zea mays
  Peptide Sequence Number=SeqID_45045
atgaactctgcctcgcccgacctagggctcggactcgggctcgaccccggaagacgacgaactccgcctcgcccgacccagggctcggactcgggctcggccccggaagacgacaaactccgcctcgcccgacccagggctcggactcgggctcggccccggaagacgacaaactccgcctcgcccgacccagggctcggactcgggctcgaccccagaagacgacgaactctgcctcgcccgacccagggctcggactcgacctcgacctcggaagatagacccgacctcgacctcggaggagcctccgcctcgccctacctagggctcggaccgaccacttcacaggaagggccatcattaccctacccctag

SEQ ID NO: 1671 - DNA, 243 bp, Zea mays
  Peptide Sequence Number=SeqID_45046
atggccatggtggttcgccctgatcattaccagaccgaggaggcgctcaactcggtggccatctttgtccatttctgtgagatgttcgtgggagtggcggcttgcacttccctttttcgccagttttttgtgctggtgaggtctgggaagggcaaagatcacctcggggcctactaccagtcaaggacagatccgacagtgacctacatcgcttcccttggtggtgcgaggtgggagaactag

SEQ ID NO: 1672 - DNA, 1029 bp, Zea mays
  Peptide Sequence Number=SeqID_45047
atgccgctgcaggggaggccacgcctgtgttgctggtttaccggcgtcagcgacattggtaggatccagcgcgggcctgggactgatctgacctgggagcagttggaaattttgggcatttcgccgctttgcgacaacccagggttgcggtcagcggtgctggcccgactgccgacccttgatgagagtggtgtggcggtccaccagatcggcggccgggacccccaccgggggatccactttcctggtgcaccggtcggaggctcccagtcagctgacgtgacccccaaggcttctcctgcggtccccaattcctcggacaagggtaaggggcccgcaagcagctcctccactccggacgccgccaggaggtcggaggaaggcctcctcttcttcggcatccgtggacgctccttccccgccggccaccatgcccgccggtgggtctggctcccaacagcatacatctgttgggaacgtcgctggcgatccgtcagcggctaccacagcctcatcggcgtcgacgcgaggcccaccatcggcagcggccaaagagagcgggccgagcttgagcaggagcgtgaggacttcaaggaggacatccggaaggtgtctgaccgagaggaggaggtgacccggaaggagagaagcttggtcaagaagaaggaacacttagaccaaaaggaggaggctgttacagcgctccatgataagctgaaagcttataacacagtactggagaaacagcgggtcaagcaggccgcggcagaggtgaagctgcagaagctgcagcaggaacttgccgacaaagccagcgacattgctcgcatcgaggagagcctcaaggcgagggaagcttccttggcgaaacgggaaactgacctcacctggcaggaggaggacatcgccttcagggaggagatgtgggcaaggcggaacaagctgctggatgagcttgagctcgaggcagaggaaaaagggaagcgtttggaggggaaagagcgggcactaaaggagcaggtccgctag

SEQ ID NO: 1673 - DNA, 552 bp, Zea mays
  Peptide Sequence Number=SeqID_45048
atggcgagctcgtcggcgctcgccgtcccctccatccctctccctcccccggacgcctataaaaggacccgcccgagccccgtcttcaccacaccagctctggccaactcctccgccttcccccgagcaaaacaagctagcgccgccgtgcttcccccgtcgctccgccccatccaaccctcggaaacgagtgagcacgccccagcgaagctccccgagcgaggaatcgaagcctgcttcgccggagaggccagtccacggtcgccggagctctcaaccccgccggagtacatggaccggggcctccccaagccaaccctgcccttcgccggacctatctcgccgccggaggtagccccggatccagctccagagtctgcatcagaggatctgcctgccactgctttggaaggcaagccccggaatcctgttgagatgaatactagttctctggaggacatggttgctggagtgacttggccgtccatcttgccaccgagttggactgttgagtgggaccccgcctcggctgaggaggagcatgaggagtga

SEQ ID NO: 1674 - DNA, 471 bp, Zea mays
  Peptide Sequence Number=SeqID_45049
atgtcgccggtgcggttgtcgggcacaataggaaggggaaaggagtgccctgtgacccagcatggatcaagcagtctcattagctgcgagaagcagacgattcgaatcgagtttttatccttgcaagtgaccgcacttgtacccaccataaccggaatgggagacctcgtctcaggtcgcgtgaggggatatgtctgcgggcaggttcactcaggtactaggcttaccgatttaccatatttcacgtggcatgcagatcctctgatgcagactctggagctggatccggggctacctcctgagcagctccttgctccggcacgaggacgtactctccgtcagcaaggttacagtctatcgaatgcaatgaacataaaaatagaaacaatattgaattataaatgtaccttcggcttggaaggagatgagaatacaagtgtgacgcaaaaagcgaatgccaagtcagcgtga

SEQ ID NO: 1675 - DNA, 228 bp, Zea mays
  Peptide Sequence Number=SeqID_45050
atggcgccttctgttgacgtggcgaacctgtgccctaggttgggcgatgtggaggctcctccgaagtccgaggccgagtctgtctttcatgggtcgaggccgagtctgtgccctctgggtcgggcgaggcggaggtcgtcggcagaggccagggcggagtccgagccctggggtcgggcggagcggagttcgtcgtcttctgtggctgagcccgagtccgagccctag

SEQ ID NO: 1676 - DNA, 582 bp, Zea mays
  Peptide Sequence Number=SeqID_45051
atgggatccacttttagtaagcatttctgcaaaacagagtctttgattattgaaaagccttaccttgactcccttaaccagcatacccttgagagtcttttctttagtcgggtgaggaagcgacaaatttttgttgcttttactccaaggtggttcccaaggaagaaaaacaagagtgaagccgcgggaggacttggtcctccatatagaacttttgtgaaagaacttatagggaggagtttttgcctcccttgtttatgtaatcgcttccgcatttctatatctccgatgttctgtaatgtctgcaagatgggtgaaacgttcctggaaaggagaacagcgcgcaaacacactggaccgattggtgtgccgagtcaccagctggccccaaggcatgataatagtagtagcggaagcaatgatcctataggggatctcgaagctgaagtgagtcggctccaagtggaactccgccgcaggacggctatctgggtcgtagatggtgaccgcaaaaatgagttgagaagagatgtccgccatctacgagatcagctcgcggaccgagatttggcactcaactag

SEQ ID NO: 1677 - DNA, 126 bp, Zea mays
  Peptide Sequence Number=SeqID_45052
atggctagaggcatcaacgtccacacaaagcaaggaaagatacgcaagggcaaagccaacatgacgcacatggtcggctggctggggcacctccattctattccttttgatcaattgatcaaatga

SEQ ID NO: 1678 - DNA, 129 bp, Zea mays
  Peptide Sequence Number=SeqID_45053
atggcgcacgcaccggcgaagcctcgcacggcggtcccgggcacccaacccacagtggatcgacattacgcactgaagaacgagaacctaaaagggaaggaaaggatagaagatgtttttagagcatag

SEQ ID NO: 1679 - DNA, 231 bp, Zea mays
  Peptide Sequence Number=SeqID_45054
atggcggacatctcttctcaactcatttttgcggtcaccatctacgacccagatagccgtcctgcggcggagttccacttggagccgactcacttcagcttcgagatcccctataggatcattgcttccgctactactattatcatgccttggggccagctggaacgtttcacccatcttgcagacattacagaacatcggagatatagaaatgcggaagcgattacataa

SEQ ID NO: 1680 - DNA, 333 bp, Zea mays
  Peptide Sequence Number=SeqID_45055
atgagggtggtatgggatgcccttggccaagtaattagggaagtcttatgttgggtgctggtttttggtcattgggaaacggagacatctgttatggctcctatattctcgctcagggatctaggtacgggcatcgtcccacggcgttttcctgagggcagaggtataggttttgtgacgtcagatggactttatgcaatggtcatttccaacattcgcatagtgaggaccctagggaaaagccacgtagtgagaccctgccagttcaccttgggagtgatcaatggggagtcgcgatcctcgggcagaaagggaatcacggctcatgggtaa

SEQ ID NO: 1681 - DNA, 618 bp, Zea mays
  Peptide Sequence Number=SeqID_45056
atggtgactacagagtggagtttccatatgctcattcaaggagaacgacaacaacaatggggcggtactgttgaactggcttggcagagggatagcataatggtgcccaagtggcttgctaatagagtgatggcatttctaataatatatagatgtggccatatagccagtgatatacatgtgctagttctgttgatagctgatgagctaattcaagagcaaaaccagacgaatcgcaatggagacttgagcagattaatagctctcaattgccctgccgacagtgacaatgcaatggtgcttctgatgtaccatgggtattttaccatcgttttccacgggtgcagtagtggaattactgttgatatcagacgactcggcacctcaggcatccaaggacagctgtctcaattcaaagtctttactgatcggaccaatattatttccgattgcgacagtcttcaaaagcactttttggcaacagctattgagtttgttggacgctcaactaagtctgaattcagcctggtcaggcatgcgccctccatgtcaactggggaagaggctgaagcattgaagacccggtttccacaagcccatgcttggggacaagcataa

SEQ ID NO: 1682 - DNA, 261 bp, Zea mays
  Peptide Sequence Number=SeqID_45057
atgaagcaggcccccaacaccctcgtccttgcctaccatcgactaatctgtgtcctcactggtcttgtcacgactgaggatcgcaaggaagaaggcgtaaaagagctgtatgtgggaccaggccatgactcgccccagcctcgggcgactactctgggccagcaacagcgcctgaccccaccacatgggcgggtccggggccaccacgcctccaagtttggcttggcccaggacctccacgtgtgcgaaccggacccctag

SEQ ID NO: 1683 - DNA, 303 bp, Zea mays
  Peptide Sequence Number=SeqID_45058
atggccatgaacggaggaaataaagcacgacagctcagtagggagaaactgccagcacataatgggaggggagagaaagcaggcatgactcttcactgcaggaggcgaagaggcgacgcggcgcggtgctggacaagcggcatgatgcggtcgacgaccattaatggcgagataatgggcgcggctgagcagtcgagtcgggctgcgcgcttggctcctggcgcggcaggggagaaggcagtgtgcgtggccgcggggcaggggtgcgcctgggcagctcgggtcctcctggaggcgctctag

SEQ ID NO: 1684 - DNA, 174 bp, Zea mays
  Peptide Sequence Number=SeqID_45059
atggagagtcatgatctccgggcagaaagggaatcactgcttgtgggtggcaatgagaatgatggttttggcattgactatggtaatggttgtccgcattgcaaccacttctcaggagaagatgaagccgtggaaggagacttccaggagttccaagattatgacgagttctag

SEQ ID NO: 1685 - DNA, 924 bp, Zea mays
  Peptide Sequence Number=SeqID_45060
atgtactgtagagtgtccggtgtgccagcgcgcgtgtctgacttctgcgcgctctggcgcgcatttaatgcttctgcagagccgctcttccctggggcaccggacactgtccggtgtacaccggacagttcggtgaattatagcggagcgcctctggattttcccgaaggtgacgagtttgacttggagtcccctggtgcaccggacactgtccggtggaagacgaggtgcctgctgattctgcctggcgattctgttgctgatgttgaggatactgcttctgaaactactgatgctaagacctgctggaacatggtaccaacggaagctatctctgaattctttcaggtgatggtgtcggggttggcatgggtggtgagtcggggttgccataagactggtgtccacgccgaggtgagcggtatgggtgctgagtcccgacgggagcgggagagccatcctccagcggctaggttgactgtgctgctcaacctaggattgtcctcaccaacagatctccgcaccctagagactgttctccggacggcgcaccaagcaggtcgcctcccagcggtccggggtgtcgagcgcatcgtggaagtgacacccgcgagcagcatcgcgagtgatgggttgagcaacccatccttctggctcctggtcgatggaaaggtcggtgtcgtggctcgagctgctgtcgtcgccgcctccgtcgtctgggtctcctccagcagctactcaaggtgctggggcgctcagtggtggtgcagggggcgcctccagcggaagcacgggggagtagctcctcacagactttatctcctgctggagagagaaagaagagccctgctgctcctgctcctgtcgtcgacgctcctgctccttgtgcaggcggggtgcagcctctccaagtggctagactga

SEQ ID NO: 1686 - DNA, 378 bp, Zea mays
  Peptide Sequence Number=SeqID_45061
atgaggtcccccctatttgaagatggacagcgcggtgcagccgctttggaccgcgtccaagcggtggctgcgccggagcttgccgaacacagcgacacatgtggccacgtagtactgcttccagaggtcgaactggcagtcgccaagcttgttctcgtcgtcgataagagacgccaacgcaagcgcctcctgccagtggtgtttgttcggggtttccaaatcgagctcgagtttatccctctaactaatttgtgttctaaatggggcataatccctatctctagttgtggtttccggtcaaaggtttatggactagctttatgtggggttaaagtcaagcagttgcttttagttggtcagggtgaagcactagcataa

SEQ ID NO: 1687 - DNA, 597 bp, Zea mays
  Peptide Sequence Number=SeqID_45062
atggcggggaagatgcagggagggaagggcgtcggcaagtgggcttcaacagtggagcggtcggccagggagctggacggcgcggggaagaaagcttctgcgcgcgcacaggaaaacagaggggaggagagggacgagctgcagaggggcgtcgctggggaagggcgccatggctgtggaggtgctcggctgctgcagagatggaactcgcctctgcaggaaggagccgaggggagaagggaggccagccgtgggagggagctcggcgaccagagggaaaagctcctggacatagggtcgctggagcgtcgacttccttccttgagcagggcgtcggccattggggatgctgggaatagcagccgctggctgctggaggttgaagacgacggacaaaactgctcgcagggggaagcaccggctggaaaaatggaggctagggcgagctcggctgctgctcagccatgggagagagggggcgcttgggaaactgcagggggccgtcggccatggaggaggagctgcgcgcccagatgcagccgtgaggaaggagacaggaaaaaaaagaaggtggcggctaggggtgtaggtgaataa

SEQ ID NO: 1688 - DNA, 666 bp, Zea mays
  Peptide Sequence Number=SeqID_45063
atggcggggaagatgcagggaggtgctccacggccggaagggggaacacaggggcttgtgcgtgctcacatgggggaggtcgaatatggagggaagggcgtcggcaagtgggcttcaacagtggagcggtcggcgagggagctagacggcgcggggaagaaagcttctgcgcgcgcacaggaaaacagaggggaggagagggacgagctgcagaggggcgtcgctggggaagggcgccatggctgtggaggtgctcggctgctgcagagatggaactcgcccctgcaggaaggagccgaggggagaagggaggccagccgtgggagggagctcggcgaccagagggaaaagctcctggacatggggtcgctggagcgtcggcttccttccttgagcagggcgtcggccattggggctgctgggaataggagccgctggctgctggaggttgaagacgacggacaaaactgctcgcagggggaagcaccggctggaaaaatggaggctagggcgagctcggctgctgctcagccatgggagagagggggcgcttgggaaactgcagggggccgtcggccatggaggaggagctgcgcacccagatgcagccgtgaggaaggagacaggaaaaaaaagaaggtggcggctaggggtgtaggtgaataa

SEQ ID NO: 1689 - DNA, 387 bp, Zea mays
  Peptide Sequence Number=SeqID_45064
atggcacaccgtggcggcgctcacaatttggcagaaactgcgccgagctccggtcgccgaaaccccaagtcgtggccacgagcaccatcccaggttcatagtgaagcccaggactgcaatcgcatcgcgtatggctatgcaggtgaggctctacgggtggtgcagtacgacggcaaccgcatggcaaagatgcgacggctgctgattcctttcccctccctggctgacctttgctggtattggtggcacgcgcccagttgccggtgcccgcggaaccttcggacatgggatgaagttgtacatgatatgaagagcgtggttcgagagaagcatgaaccagttccgaagccacctgtggaaaagcttcggcttagcggtggaaaatga

SEQ ID NO: 1690 - DNA, 96 bp, Zea mays
  Peptide Sequence Number=SeqID_45065
atggcgctcacgccccagccttttgcctgctcctcgcaccgtgattgccgagttcaccggcaacagcagtctcgtcgtgccgcaaactgttattaa

SEQ ID NO: 1691 - DNA, 804 bp, Zea mays
  Peptide Sequence Number=SeqID_45066
atgtccgaaggttcctatacatatattatacttgggaaagatgttagtcgtgtttttgaagaccttcggaagacgaaggcccccaacaatatacttgtggcatttaaggggactcgagctgtttctcgagtgcctctccgtggtgatgaggatgatggttttggttatgactatggaaatggtaagtggtattctttccgttttgaaaggatggctcgtcttagacacaatgcacggaagtcagtcattcctttcttgccttctcgtctcgcggagcgtccgcttcgccgtccggtggctgaggcgccccctgcaccaccactgggcgtcccggccactggagtagctgttggaggagaccccgatgatggaggtgatgacagcagctcgagccacaacaccaacctttcagaggagcaggagccagagggatgggttgctcgacccatcaatcgtgacgccgctcgcgggtgtcactttcacgatgcgctcgacaccttgctatgccaggcacttgaccagcgtacctggtctatcgagtatcgctgtgttgtcttccagcatagtcgcggggtttacccggactgctgggatgcgagctgcttggtgcgccgtccggagaacagtcttcggggtgcggaggtctactcagagcattactctatttctaagttggactcagctgaggcggccatgcaagatgccacacgacgtgcgctttcgcactactactcagcgctcggtggggtcgctggtggtcttaacctgaagtattacccccgccgtccatctggcagcacatga

SEQ ID NO: 1692 - DNA, 249 bp, Zea mays
  Peptide Sequence Number=SeqID_45067
atggtggatgggggcgtgacaatggtgggcggcgcgggagggcgggtgtgcgggcgggcgtcgtcgacggcggcgcggcgcggcgcgtggagggacgataacggtcagttggtggagtccgaaggagttttaggtgaagaccctgagcagcagctggttggtgaaggcaagtgtcccttgacccatctatgccctactcattcttataattcactccccgcatttacacagtttatacctaaggattga

SEQ ID NO: 1693 - DNA, 174 bp, Zea mays
  Peptide Sequence Number=SeqID_45068
atggagagtcatgatctccgggcagaaagggaatcacggcttgtgggtggctatgagatcgatggttttggttatgactatggtgctggttgtcagcattgcaaccactgctcaggcgaagatgaagctgtggaaggagacttccaggagttccaagactacgacgagttctag

SEQ ID NO: 1694 - DNA, 237 bp, Zea mays
  Peptide Sequence Number=SeqID_45069
atggatacaaacaacactcccctagttgatgttcaaggaatgaaggaaaggaccagcaaggacatggtgaaggacttggaggcgtggaaggccagcaaggacaatcggatcaaggtggaggaccaaaccgatgtccgtaatctgtctcggcaaggattagccctcatggcgaggtcaatcgagcagcgcatggttgataaccagaggagaagtggtgctgcgattgcggggttctag

SEQ ID NO: 1695 - DNA, 90 bp, Zea mays
  Peptide Sequence Number=SeqID_45070
atggccgcagccgccgcccagaggctcctctcccatcacgcctcctcatcctccctctcgatggtccaggagcgtaccgtgaccggctga

SEQ ID NO: 1696 - DNA, 774 bp, Zea mays
  Peptide Sequence Number=SeqID_45071
atggccctggtctctggaggtggttctgcttctaactcctcacctgctatccggttcacgcggttcaatagcaaccgtatgagcctgcggcgtggcgggtccaaggacggatgctacaactgtggtgaccccgaccactttgttgctagctgccccaagaagggcaaatcggagcctggcccgcacgaccatcactctagtcggcacaagggaaagtactcctccggcaagtacaagtccaagggaggattcgacaaggaggcgctcaagaagaagtaccttcagaaggcaaagatcaaggacgacgaggagactgagaggcgagtcgaggacaagctgaacgggctatgcttcatcgccgacaccgcaggaggcttctacaccatgacacttggtgaagacgcggtcggcaccggtgacgacaaatacatcggagacgacactacttctaaggtactacctttcgttgatgatcttgccgatgggatagaagagctgaacactgctttggctagtcaggataagttgcttaggaaggatgctcgtgacaggagagagtttagatccaagtatgagagcacgcttagggaacttgagtctgctagagcttcatttatggtgtctaacgagacagaatgtgatgagtgcgctctacacatgtcgaacatcaccactttgcagaccaagtactccaccttgctagatgagcacgacgagttgagatctatgtctatcctgtttctgcccttgagtcctgcagacacaacaagataa

SEQ ID NO: 1697 - DNA, 573 bp, Zea mays
  Peptide Sequence Number=SeqID_45072
atgagaccacccccacctccgcccgcccgcccgcccgcaaaccccgcgggagttacaggatgccccctccgcatcactaaccccacgcccccaactccaaatcctaaaaacctagccacctctctacccatcctcaccctcggcggtggcgcctctggcggtggccgaccgccatccaagttcaagtctgcgtccgtcgacctcccgacttcagtgattcttgttgcggcagtagatcgaggctccgacgagacggctccaccagatccagaagacggaagtagagaagagaagcgaaccaaagcaagcaagcttcaggaacaaggggagggggaggaggaggccacgggcctaccgtccgacgtgtcgcgcggccacttcgcggtgtatgtgggtgagcggcggtgccggttcgtggtgcccatcgcgctgctggaccgccccgagttccggtacctgttgtggcgcgccaaggaggagttcgggttcgcgggcgccggcggcaccctcgtcctcccctgcgaggaggttgccttccgctccctcacctccgcgctcgcctgcacccggtga

SEQ ID NO: 1698 - DNA, 738 bp, Zea mays
  Peptide Sequence Number=SeqID_45073
atggttaagaagtatggagaagactacgattggcgaggagcgcctaccatcgacgctgaagttgtgcattcacttggaggcaaggtgcatggacgatattctatgtttaccggtgttatcgattcgacggagttgtgttctcgtggtggctcttcgtcgcaggcgggctgtggtagtagcagccgtagtcgccgctctgtatctagcatggaggaagctatgagggagcagcaagaaaagtttcgtgaagagctgcggcaacaacaaatggcatttctccaacagcaatcagagtacatggctgcttacaacgcacaggcgcaacaagcaatgaactcttggtttccacagcaggcacaacagcaaccatttgttttccctcagtttcagccgccgatgcctcagtggggattacatgctccaccacctccacctcagggatccggggtcatgggccacaacacgccaccaccggtcataccggcaccaggaggagcttatgcaggggagagagcttatgcaggagaggatccaaacccgtcacacgacttcgtcaaccagttcttggcttctggagccataagtgtggcagaaccacccgaattattccaacttaagtgcctaagtcccaccttgaaggctagaccacacttaaatcggaataaaatgtcagtccctcggatctggtccgacaaggccactaacaggatcaagtaccacgtactcactcgaaggtga

SEQ ID NO: 1699 - DNA, 315 bp, Zea mays
  Peptide Sequence Number=SeqID_45074
atgaagtacaggcatcttcctctgcgtattcatggagagaaccagaccagcattattccaggtgaagcaaatgaagatcgcctcaacaccctagctggtgtggtggtaggtcttaacaccaacctggatagtgctaccctggacctctctagggtacacttggagctagaggatgcacatgcaaggatcgcagccctggaagctcagcttgatggaaggaatcccctggaagttcaagtccctgctatggtgttatcccctccccgcaagacgattcgctatggagaaccaggatccatcaccaggctgctttag

SEQ ID NO: 1700 - DNA, 561 bp, Zea mays
  Peptide Sequence Number=SeqID_45075
atgacggtggcaggcgggtgggagcagcggtcacgtcatcagccaagctcacgtcccatccgggggcagcaagagaaccccctcgcacggcgtgaagacagcgcgcccgacaggcggcgcttctggcaggagaagcgggcgacgcttcgcctttgccgtaataaccgcgccaaaaaaggctggccccccgaggggttcaacagccgcctcagatcgcgtgggccctacacccactactggtcagaggctggcccccgaagggttcacagccgcctcagacgccgagcgagggatgaccaggggtacgttcgatacataaccaaggctcgggctgcgctcccgagctcaccggagacaccatgttcggcgcccatcgagggtaacatggcgctttcccccctcctccttgcggaaaggcgacgcaggggcaaggacagcgccgcctgcgccactctgactgcagtgccccttgacagagtgagactgacaggcagtcaggccctgccaaaggcaccacaggaagctccgctccgcccgacccagggctcggactcgggctaa

SEQ ID NO: 1701 - DNA, 348 bp, Zea mays
  Peptide Sequence Number=SeqID_45076
atggcgcttcctgttgacgtggctggcctgcgccctaggttgggcgacgtggaggctcctccgaagccgaggtcgagtctgtcttccatggccgaggccgagtccgagcccctggaggccagggcggagtccgagccctggggtcaagcggagcggagttcgtcgtcttctggggctgagcccgagtccgagccctgggtcgggcggagcggagttcgccatcttccggggcttagcccgagtccgagccctgggtcgggcggagcggagttcgccgtcttccgggacttagctcgagtccgagccctgggtcgggcggagcggagttcgccgtcttccgggacttag

SEQ ID NO: 1702 - DNA, 258 bp, Zea mays
  Peptide Sequence Number=SeqID_45077
atggctcatgaaataatgaagaagagcgaaaaagatattcatgactctcgagaagcagtgaaaaaaggtgaaaaagctgcagaactcgagagacggatagctgaattacctcctccaccggagccgttcgaccccctggccgatctagagataaagaaagcaatagaaattatcaacatggccgaatctatcattgacgaagtcgtcaacaaactgcttaacgaagctgcagagaaagttctaaaggaagaacagtag

SEQ ID NO: 1703 - DNA, 159 bp, Zea mays
  Peptide Sequence Number=SeqID_45078
atgtcgttgcgcgtgagcctctccacaagtctatgggaatttttacaaagaaaaacttgtgatggtggatccatcagggccttgatgggttcaacatctgaaaagatgtacctctgccaggttataactttgtgtgctgctgttgatggtgttaagtga

SEQ ID NO: 1704 - DNA, 498 bp, Zea mays
  Peptide Sequence Number=SeqID_45079
atgtcggacgaccttgttgttcctgtccactttgaagtcggccaagaattttgcttttgcctcctggatcatacgctccttgtgctcctcgaattggagctgttcgtcagccggcaagaggaggggggctggaccctttacacgactggattccgagctaattccgcaaatctagccaacaaacatagcacaaaactcggaaccctaaactgctctgcgcatgcgcggaccgtccggcccacaggcgcggactgtctggaccgcggaccgtccggcctcagggccggaccgtccgcctactcaatttggggttcaacagacacgacggccatggatgcgaggaagagcgctggtgagcagggagcgtgggtgccggcagagaggagcacgcgactggaaaaggggctgggcacagggaggactggagggagccatggcgagcacagcaaagaagaagggaagggagagagaaacgcggccatggacggagctcggtag

SEQ ID NO: 1705 - DNA, 603 bp, Zea mays
  Peptide Sequence Number=SeqID_45080
atgaggtgtcttggaggggtgggtactcggatcagactcaaggagggagtcgagatcagtgggtggggagaatccagcaaggggaaacacatcttcgccaaagacgacatgacgagagatgatgatgcgatgggagacagaaaggagattgtgagtgatgtgaggggctacgagaacatcgttgaggtagaacggtccagggagtatcgaggcacctacagaggtgaccagaagagtagaaccatttccaacgacgatcgaggtaggaggagagggtggcaggctcccaacctgcagcgaaatgaggaccatggtgttatggtagacggtcccagccatcaggtggccgtagcgggggttgaggccacgcgggaggttcagcaccaaggtacggtccgccactggctcaccaagatcgctgagggagtctaccaggccttccatctggcggcagtactcctccacggagaggtccccctaggagaactggtggaactgagcgtcgaggtgaagagcctgagcgtaccgattcccgaggaattgttcctcgagagcgagtcacgcctagtggcccgtgtgtgcctagtcgggatgatgtcctag

SEQ ID NO: 1706 - DNA, 303 bp, Zea mays
  Peptide Sequence Number=SeqID_45081
atgcaccgcgccgtgcctataaagcagcccaaggcctcggctatacctccccgcgcgctctcagtcctgcccgagccaaagttcaccggacttcgcctcgagcacgccgcgccaccgcccaccaagccacccgagcctcggccaccgtggctagctcgctccagccacttccaggcctcgccagtcgctcggttagcttcgccagaggcccgtgaagcttcccaagtcctcggacccggcaaagcctcaccggagaccccgaatcaccctagccggacttcggtcacccgccgccgcgcgtga

SEQ ID NO: 1707 - DNA, 435 bp, Zea mays
  Peptide Sequence Number=SeqID_45082
atgacaaagctgcaaaaagtcgttcctaagggagagcagcgtaagttttctgctcaaaagtcattcctaagggaatgcagagccaaaaaaattgacgaagatgcaaaagtcgttcagaaagggaaggtgtttttcgccttcggctcaaaaaatacaagtttcgtccacagcaaagcaacttgtatatggatgaaaagagttaatacaaatgttcctaagctctatacaggcaagcttaaagaaaagcttgagcagcctttggaatgtgcttcgaattatcaatctacggcaccaccatcctgcaaacaaacaaacggtataagccagccttcagaaatgttgcagctgtgccgcgagaagctagcagggcacagaagacaccgtgcccggctatcacttcatcaagcgcctcgacttcgccttcaatgtgattga

SEQ ID NO: 1708 - DNA, 171 bp, Zea mays
  Peptide Sequence Number=SeqID_45083
atgatgctggactcctctgagtctgcctcttccgccgccgccgccgccgcggaggcgggagctggggcggtggcaggccaggcgcagccgcagcgccgcgcggtgggggccgtgccccaggcgcacgatggtggctacgccagcggcggatgggagagcgcaggagactaa

SEQ ID NO: 1709 - DNA, 261 bp, Zea mays
  Peptide Sequence Number=SeqID_45084
atggaggcgcggcagcgcacgacgctcggtggcctgaccgctgaggcggagccagagctggaccagtccatggaggtgtaccccgaggtgctggtgaagttcagggagcagctgacgaggtcgctgcaggaggcaatgaagttcatgcaaaagatggagctgcagcttagctcactttccatctctaaaaggtcgttgcgcaacacccttccgtccgggcactggcagaagaagtgccaccccactgcatcctcatgctga

SEQ ID NO: 1710 - DNA, 1408 bp, Zea mays
  Peptide Sequence Number=SeqID_45085
ctccgggcccgccacatggccagaggagatgatatactccaaggtggcgacagtgggtccggacccccatgggaaagtgccggacccctggatgcacagcccggacttcctggcggggttcaagacctcgacaggcggcgtgcccgtccgctccggtggcaggcagtacgcccgtgttgtggcatacattgtgctcatcatcactcgtacgttgccagtgaagcttccgctgcacgccgatactaccatgatggtgcaaatcgtggagcaccgcgctgagacttcggtggattttctgatggaggaagaagctgcttcttccacgccacaggttcccaaccgcccaatgccgggcattgctgctgcgcacgctgcacagccgcatacaaccacgcagatatcccggactccatcgagggccgctccgggggcgttgtctgcggccagggagttgttgcaccaccccccaagctccacggcctcactaggggccatgaagcagtggcgtgacgacgtcgaccgactgctcggcatggcgcactccgactcgaccaggtcgaggccatggtcatcccggcgccaacatgaggtgacggcgtctgtgcgctcaccttcggtgaggggtgcacagaccaacgacgtccgagcagaactcaaccgcaggcgtgcgggagaggatgctcgagtctctctagagagggcgcgtgagcgccggcaaaacattgagggtcgcaacctcgatcaagattttgctgcggtagcaccacagacccccagcgggcgctcggatcaaggcaggtgtcctgttagctggcgtgggctgtgccacgctcgcggaccatctccgcgcggtgacctggccacccaagttccggccgcactagccggagaagtacgacggtatgtccaacccgtcgaaattcttgcaggtgtacgtcaccgccattacggcaacaagtggagacaccgacgtaatggcaacatattttcatgttgccttgtctgggcctacccggacttggctcatgaaccttaccccaggatcaatctactcctgggaagagctctacacgaggagcctggggaaactctctggactttcatctcccgcttcaccaggggggtgcgtgatgaaaaaatgctggagaagttggccacgcatgacgtggaaactgtcaccacgctttttgctctggccgacaagtgtgccagggctaccgagggccgtgcatggcactcggcaccacagaccagggttgcccagacgagtggctcgggtgctgtctctcaggacggcaaaaagaaaaagaagaagaaccgaggctccgagaggccgtcgtctgctgctccggtcatcgcacctgcgactaggggccgaaacgagcgcaacaagcgcccgcggccgtag

SEQ ID NO: 1711 - DNA, 201 bp, Zea mays
  Peptide Sequence Number=SeqID_45086
atggcgagagtagcgtgtaccctccatggcaagaggctggacggtggtgtatctgtgctctcggttgacgtgaacccggtctgggttgtccaaggttcactccaagacatggttgatggtgtgacttggcctgccaccctgccaccgggttggacggtcgagtgggatgccgccttggcaggagaggaccaggaggagtag

SEQ ID NO: 1712 - DNA, 276 bp, Zea mays
  Peptide Sequence Number=SeqID_45087
atggccttgctagaccctcccgagcgcctccagcccgaggtggcactcaacttggtgcgcaacctgtttggatggggcggccatcatcgcctacctccgcaggatgtccgtgggggtgacgctccttcccgcttcttcttcaagcatttggggggaaggatgttcaccagcctcgtgaaggtggacagcgggctgagctgcggctccatccctcgcgccctcaactccttggggtgggaagcgagccgtgctacggctccatctctttggctttga

SEQ ID NO: 1713 - DNA, 246 bp, Zea mays
  Peptide Sequence Number=SeqID_45088
atggggctcggtgtatgcggctcgctctgccaaggtggttatgagattgatggtttcggttatgactatggtgctgcaacacctgaggttggacgttcttcgctggctcctactgaaccacaaaacactcttgctggagagaacttcactgctgtcgacaacaagcttatcctttcacaagatgatgaaacggatgacatgatcattgagtaccttttgaaggatccatatggagatttggtgtaa

SEQ ID NO: 1714 - DNA, 987 bp, Zea mays
  Peptide Sequence Number=SeqID_45089
atgcaggcggcatgcaactgcaccaaggggacgcaccctttcgacttcgatgcatccagcatggggcctaggcccacacgtcatgtaaccggcgtgccggttactacgtgcgagaaactgcaccgccacttgcgccagtaccgcgccttctcgactgcggaaccggtgccgcgactcgaggcaaccctgcgcatggcccaacagtgccaaccgagcacatcggtcacgggtcagtcagccgcgggggaaggcgcgacggtcgatatggccaaaagtgggccggcagtaatggcggcggcaggcgggcggaagcagcagtcaaatcgtctgcaggctcacgtcccctcctgggacagcgagagagccctctcccatggcgtgaagacgacgcgcccgtgttccgttcctcgaacggctcgcgcatgcacaactactgcccctccaaccactcgtcccatcgcattaactctgcgacagggcaggcgacacctttggcaagcgaagcgggcgacgcttcacctccgctatgatgaccgctccgagaagaagggcaagaacccgacccctccgagattaacctcttgtgccaggaaagcttcgacgaaggcaaagtctaaacctattcgaatagtccgtgtccactggtatggacgagtctgcaacaaaaacacccccacctggaggaaaagactccaggctctgtcaggaggagatcccacagaagatgaccccactatcgtatacatggccggatacctccacaccctcgacaaccactacgacaagctctcctcccactgcacccacctaaactccctagtggaaagcctagagcagcaagtcaaagagcttaagcaagagaaggcatccctccaggagagtctcaacatagcagaaggcgaggaaggcaacacccgtgaggcctatcggaccttgaagatggactgtaacaccccggggtccacaaacacctcggaatgctactga

SEQ ID NO: 1715 - DNA, 492 bp, Zea mays
  Peptide Sequence Number=SeqID_45090
atggcgcaccggacagtgcggtgcacaccggacatgtccgtaactctcgctcggataaacgattctgctaccgacgaacaagtcctgatactcgaaacaaggggaaaagaaacgcagctttacaacacggcgacggttcagacatcaatagggggaggggcagcagcaccctcggcgtcgactccaccctcggcggaatccgacccggcctcggacggcgacacggtcggaggatctccccctcgaaggaagacatcagcaccgcgcctgggccatcgccgccagggtctcctccagaaacccggcccaagcagacggcttgatcagccgccccgtagcctcagccagctgtcccccgaggacatcagcccggctcatggcctcggcaacccgactccggcgttggtcccgccagtggacgacccgaccaggttccagccgtcgctgctacacctcctcggcctgggaagtcacctgctcctgggccgatga

SEQ ID NO: 1716 - DNA, 486 bp, Zea mays
  Peptide Sequence Number=SeqID_45091
atgacaaatgagcaaaggtacatgaagcaaattgaacttggaagaggacatagtgcaaatttatatggaccaagtaaaaaggaaaacaacgccgctcgcccctctccgactgctgtgacacccgcaagggtgaggacgacaacagctaagtccagcctcaggcgcaacaggaagctccgactcgctcgaccttgggcctcggcctcggaaggtggtctccgcctcgcccgaccccagggctcggcctcaatctcgacctcggaaggtggtctccgcctcgcccgaccccagggctcggcctcaatctcgacctcggaaggtggtctccgcctcgcccgaccccagggctcggcctcaacctcgacctcgggaggaatcgcgtcctcgcccgaccccggcctcggcctcaggaggagtctccgcctcgcccgaccttgggcttggaccgaccacgccacaggggacacatcattaccctacccctga

SEQ ID NO: 1717 - DNA, 494 bp, Zea mays
  Peptide Sequence Number=SeqID_45092
atgtacaagtatccatacactcctcatccatatggtgctcctcttgcgttctttcccaccaatggtgttcctcccatatatgtttgtgctagaatctccgttgattataccttgaactgggggctgagggatggttatgtaggagttggtagttttgctggtactgttggtatgggtggtagatatcttgataaggatgatggaattgtggttggaaacatgtacccatggaagttgagcaggaacttctcccgaaagacagcacatgagtcaattgagaacgagggcaatctggtgtaccatgttagggtggggcctatgagggctataatgaatgacttcgtcattgcgtttttgtcgccccccgaagagattacatgttctacaggtgccaaaggttcagcacaaaccaataaaaagattaaagttagggttcaaaagaaaggagcaaaagaaaccgaagagaaccttggtctggcgcaccggactgtccg

SEQ ID NO: 1718 - DNA, 54 bp, Zea mays
  Peptide Sequence Number=SeqID_45093
atggcgggacaaccccacggggacgagcttgtcgataaatcccttattcagcag

SEQ ID NO: 1719 - DNA, 360 bp, Zea mays
  Peptide Sequence Number=SeqID_45094
atgccgccgcgcacaaggcaaacggcgcgcaagtcaactggaccaatcggtgtgcctcgacatcaactggcccctcgccatgaaaacagtagcagcgggagtaatgacccaataggagatcttcaagcccgagtctattgcaatacgttacatgaggaagtccatgtactgtattcgcaattacaccctagtgcacctgcgcaccctgctgaggcggaagccggaccctcccacgttgcgggacacgcgctgggtggggagttagacctttttgaaccccctccttccatgaggctggttgacgtatggactcccacacctgacgatgaggccgccaagagtaatgggaagcaggactaa

SEQ ID NO: 1720 - DNA, 771 bp, Zea mays
  Peptide Sequence Number=SeqID_45095
atggtgggtacaagtgcggtcactgcacggcggcagccggggtcagtggagcattgtaccattcaggaaatggttgatggtgtgacttggcctaccaccctgccaccgggttggacagtcgagtgggatgttgctccgatgaatttgcccacccccgccagtggaggagacactcgttttagttctgacttcctttctcgcgatggctttccttccatcttgtgggaagtgcttaactccgccggctaccctacgcgccctttgtacacggtgcagttgtatgtggagcatcgagtacctcgttgtcgggtctggctgactttggaggctcatccccttcagccgggttggcgttctcttgattctgagacaattggactcaggacggacgacaccgttgaagcagcagccatgaagactctgacgactttgtgtggctaccatcccctggagatggtgatgcaccccttgggactcttccctgctgagaagaaagatgatcccatgtggtgtaaccgcgtgagccatgtgaaggatgtgtgggcaatgtatcctgacttggttgggagggtcaccattcagtgcatgggtgcgctgtaccgctttcaggcccttcagagcgacgctatgacacatcttgctaacatcgctcaaaccaccaagctcactctcgacagtcgagaagattttgtggtcgatttatcctccgagttggtagagaaggatctgcaggtggaaaggctgagccagcgcatgaacgaatcaagctga

SEQ ID NO: 1721 - DNA, 84 bp, Zea mays
  Peptide Sequence Number=SeqID_45096
atggcgtcagggtgggcatgggtggcgaggggatacccacactctggcgggattgccataagactggtgtccacgctgaggtga

SEQ ID NO: 1722 - DNA, 795 bp, Zea mays
  Peptide Sequence Number=SeqID_45097
atggcggaagcgacacacaaggaggacgtccggttgaacaagatgcaggagagtctcgatctgctgtttgcgcagatccgttccatggacacctcgcaacagcagatggcggctcagattgatctcacagcgaaggcgatgaaccagagtacccaggatcaaattctcttgtcccagcaactcaaggctacgggtgacgctgtggtgcgcctcaccatgtggcaaatgaagatggatgcagtttcttctccagtctccaacagatccgatgcggaggaagagaactggttcgcttctgcgcctaccgggcgtccgtgtcatcctcatcaccggctgcgccctgagggtcgtcaccaccatgacgatcaggtataccaacagcaatcctccatccccaaaatgtcgtttccacgtttcgatggtctacatcctaagatctggattgacaagtgtgaggaatactttcgcatatataattatcaggtggccatgctgaaagggaaatgtgcctttgggccagttctaagtattttggtgattaagtgccaacacaagtgcttaaatgtgaatctatgcccatggatgaacaaagtgcaaatcacaagtaaagctcttgttgctgcttgtgtgcgtgttgttgctctgattttgagtcttgtgtgcgttgctagttccctccttactccgtatttctttgtgaatctcaagtgtaagggcgagaggctccaagttgtggagattcctcgcaaacgggatattgagaagaaaagcataacactgtggtattcaagttga

SEQ ID NO: 1723 - DNA, 1281 bp, Zea mays
  Peptide Sequence Number=SeqID_45098
atggtcatccaggatggtgaccaccagttcgatggtggcgagaagcaagccgggttgcggcctctgccctgccctcagcttcaaggatcttcatcatcctcgctgggaaggagggcggggcgagttggggcctacctccgcgtgggccggcgacccgcttcttcctccggcgctcgggggagaggggcatcctccagctctgcggaggaggcatcctccagccatgcggtggaaggcgatctgctgcttcctggacatagtgcaactgtccgtcctccacccgggcgacagccgtgccgcgcgtgggccggctgcgcccaggtcctccctgcgtcgtcggctgcacaacatgtcgtacgccgcgagggcggtactcgtgttctaggacggtcccgttctcgttctcgtggcgagaacgagagtgaggacctgccggtgcgctttggggcggccgccgctcgctggtgcggtgttggtgggcaggtgaccgctgtcgttggtgctgaggtggtggcagccagagaaggtttctccgctgacgagaccgtcggcgccacctgcggtcggacctccggctcttcggccttgacggattgtcctcgcccctcatgtggggacgtgggcgaggaccttcttacagcagcgtttaccctgaggtcatcgctgctgttgtttagccgcccaaggtggaggtcgttgtcgctgctggtgcagtggtcaccggcgagccacctggagtttgttgtcccgcaagccctccggtgtggaggtagttcatacccgcgggagtggaaccggagttccgtttgtaatggcaccctgagtatgggtgtttgttcattgtggctgtcgaggcctgaacatctagctggagccggaggcagcggtgtcggcgtggacagaggcggagtcggctcgagaagaggcttcgtcggcccaggagcaggtggcttcccgggccgaggaggtgcagcagtggcggctggggcttggccaggtcatccgcgagcgggaccaacctcggagtcatgctgccgaggccgtgagccgggccgaggtcctcgggggacagctggctgtggctacaaagcgaccagccgaggtgtctgctggggtcgggaccctggaggagaccctggctacgatggcccaagcgcggtgctggcgtcctcctttgaggtggagatccttccgcccgtgtcgtcgtccgaggccgggccagattccgccgaaggtggaaacgatgccgagggtgctgctgctccctctgtcgatgtctaa

SEQ ID NO: 1724 - DNA, 990 bp, Zea mays
  Peptide Sequence Number=SeqID_45099
atgcaggtgacgtgcaaccgcaccacgggggcgcaccccttcgacttcgtcgcatccagcatggaggcccaggcccacacgtcatgcaaccggcgcgccgccgccccagagcactcgggcttcaagctcattactgatcaggggttcgaaggctggcccctcggaaggcttcgacagccgccccagagcactcgagctccgtgcccactactgatcaggggttcgaaggctggcccctcggaagggttcgacagccgccccagagcacgcagagcgagggatgactctgggtacgtctgttacatggccgaggctcgggctacgctcccgaggtcgcatgagggaacaaccaggccagccaaggcatcacaaaaggcattaagacctcagaggagtcaaaccactcctccgaggcctcgagggctacacccggcgggggtacccccaacactcctatacacggctggtaaccaccatcagcacaagctgcagagactgatgggcacgattaaggtcaaagcttcgtctacccaagggaagcgatctcgcctcgcccgaacccagcctcgggcaggagctgaagtcccggatgaagttacgtctcgcccgagggccttcttaggcagtgggcacaccctcggcacgcccgaggcccagcttgggcaggcttcgtcgagaagcaaccttggccaaatcgcctcaccaaccgaccccttaggcgcaacaggaagcttcgcctcgcccgaccttgggcctcagcctcaggaggaggtctccgcctcgcccgaccccagggctcagcctcaacctcggcctcggaaggcggtctctgcctcacccgaccccagggctcggcctcaacctcggcctcggaaggtggtctccgcctcgcccgaccccagggctcgacccccacctcgggcctcgggaggaatcgcatcctcgcccgaccccggtctcggcctcaggaggagtctctgcctcgcctaa

SEQ ID NO: 1725 - DNA, 954 bp, Zea mays
  Peptide Sequence Number=SeqID_45100
atggtcatggtctacaccgcgagtcgctgtgctggctgcgtcgtattcagcctgcagcacggcagtggcggcgagtttttgggattcatatattgtgaagagctgtcatttctgagaggccgagtagaaaggctagaaaactcactgcgtgaagctaaccaactaaaggtgtccagtgcaaaagacattgctagtaaaactaagactatcatggacttggttgcaaaactttccttggaaagagaacgtcttcatgttgaggttgttacgctggcgaaaaagaacgggcgttggctcaaaagtgcaaagaaaatgttagcgagcgcacattgctgtgcaagaatgttaccacaggcgaaggtgtacttaggcccgttcaattttttgacaagtttaatattcgacataatattgctgagcttctggagtatttatgggatgtccccagtcattgaaacgcatggagacaacatctatcttcttgatgagagcttgaacaaaattttggaactgaaagaaatagaggctgaaatgactaacattgttgagtgggagcgcagacctgctcaagaaagagaggagcggctccgtgtatttcatcaatgggaaaatattgttcgatttgacatgaggctagccaatgaggatgttgggatgcttgcatttacctcggaacaaattccagcacctttccttctccctgaaatggtggaaagggtcgtgagcatgcttaattacttcctcttgcaactttctggtccccagaggaaatctttgaccgtaaaggatccagagaagtatgagttcaagccgaagcagctgttgaaacagattgccaccatctatgtccatatctcaaggggtgacaaggaatctgtcttcccagctgcaatctcgaaagatggcagagcatacaacgatcagagttctccaacagagaaccggctgctctag

SEQ ID NO: 1726 - DNA, 561 bp, Zea mays
  Peptide Sequence Number=SeqID_45101
atgggatctccggccacggcggtttccacgcctggggaggggccaggctcacctacgcgccaccaagggcctcctggccgcgccctaggggctcgccgatggggtgtgctcggctgctgggcacactgggagcagcagccaggggacgacgctggcaggggcgagacggccattggtgcgatcgcgcggagtgcctggaggcagggcgtcggcattacgggcgtgcaggaggacgggtggagtagcgacgttgctcgaccagggagcagggggcaccggggctgggcaggctgggagccgcacgcgcagaaccatgtcgaccgcgccgcgcaaaggagaagacgagggggcaaggggtccgtcgccaggggaggtagagggaggggcgtcgggcagggcagtggggctcctcaccggggttgtgtgcgggcgctctgctgcctgcggctaggggcgagctcgggtggttgcgcgagccggtggccgcactggctgtgctccatggcctcctggccgcgctgccgcgccgcgcgtagggaggagcacatgggcaagggatga

SEQ ID NO: 1727 - DNA, 507 bp, Zea mays
  Peptide Sequence Number=SeqID_45102
atggtggagggcaagagcgggtgggtgaggatcgacgtgacgctgataccaggttgtcaagcgcctcgacgcccaacgtcgctggaccgcggctacgcagttcgtagtcgcgctctagaccttcaccgttgctgcacaagctgtgcagtccgaataaaatcaggacagataaggcagcctgaagcacttgggatatctgcagaactaaaagataaggtatattggctccaattcgggagatactttgcacgagggccagtggttgcccccttcccgcctttccttgttcggttgtcacttattagcctggtcccggaggtgctgcgcgagtcctttaatgtcgtgtattgcagcgacgcggtgatgaagaaggtgtccgggatgcaatcggctgattccaccgaggcgattgctgtcatgcacatgcctaaccatttccgcgacctcaggagccatgaggatgggatgctcttgatgggttgttcagttgtccaaagaggattctag

SEQ ID NO: 1728 - DNA, 366 bp, Zea mays
  Peptide Sequence Number=SeqID_45103
atgggtacgggttttttaatgggcatagatatttttcacgggtacgggtttgggacggtaaaacccagcgggtttgtaaccgttgccatctctagtcctgtccactcgcgccgggctggacgaagacccggtggcctgctggccttcccagccacgtacgcgtctcatcctcatctgccacagccccctccgcaccagctgcacggcgtccgcgcgtccctctccggttcagcgcgggtgccgggtgctcaggcggcgacggaggaccctggggactgcatctgctgccattcctctccggaccatggcgattcagcagtgacgatgcgctcatgtcaacaactgcctgcagaggacgcacagtga

SEQ ID NO: 1729 - DNA, 459 bp, Zea mays
  Peptide Sequence Number=SeqID_45104
atgacctgccccgccgccaccgccaccgccaccacggctcgcatcggggcgcggagaggaccgtgcctgtggaggagcgagaggagggccagcttcctcgtccgttccacgtccctgctcccggaccgcccggcccgggacacgagggcgcgcgccgcctcggagctgcagcaagcgcctcgaccagcctccgctaccgtccccgctcacaaggtcaccgtccacgaccgccagcgcggggtcatccacgaattcgtcgtgcccgaggaccagtacattctgcacacggcggaggcgcaggacatcaggctgccgttcgcgtgccgccacgtaaccatgaaaatatatgttaaagtaagtgtcaagcgcctcgacgcccaacgtcgctggaccgcggctacgcagttcgtagtcgcgctccagaccttcaccgtgagggattcctcaccggtggcttga

SEQ ID NO: 1730 - DNA, 246 bp, Zea mays
  Peptide Sequence Number=SeqID_45105
atgggtatgggtacgggggtaaatccatacccgccagtatatatgggtgacccggtggggttatttttgtgtcgtgggtatgggtatggggtagtaatacccgatgggtatttacccattgccatctctagttcggtgtccgccgcttttgtgtactgcgggcctgcggccgagtgggataggctagacaaggttgcgttgatcgcccggccccggccccggcccggcctcggcccggcccaatag

SEQ ID NO: 1731 - DNA, 864 bp, Zea mays
  Peptide Sequence Number=SeqID_45106
atgtcttcgctctcccttcatgcatcgcatccttccaccttccgagcccccggatggggagcactcgtatcgctttcgtcttactgtcgttggaggaacgcaacttcgcggaagttgggcggaggccggactgagccgaagctctacctcccgcgcgggttcgtgggtcaccttctccctcagcattcaggggagaggaagctcaccggcctagcgggagggtcggacttcgacaacgcggggctggtcggcggcgagcgtcgtcagcttcagcgcgttgggctcgttggctcagctggctctggctcggttcccggtgccccctcccgccgtgagagcggttgtcgcgccgcgcgcaccggaggaccacccaagacgtcgcgcgctgctagggcggtgttcgtgttcttgggtcgtcctgcctttgctccggtacggcgcctctgcgtggaggtcggtgctgcccgttcgggaggatccgagtggggatctgtcggtgggcagatggcttccgtcgtcggcgcggaggtggtggcggctgaagaagtcctcgtcgccgacgggatcaccgccaccatctgggctccaggcctccggctctttggctttgatagcttgtcctcgcccctcgagtggggacgtgggcgaggggctcgttgcagcagcgtccgccctgaggccatcgctgctgctgtttggccacctggagcggaggtcgttgtcgctgctgccagagcgggcggcggtgagccacctagagtctcgtcaccccgcaggccctccaatgtgggggttgttcgtacctgcgggggtggaaccggagttcctaaaagggaattaggcttacacctatttcctaaatga

SEQ ID NO: 1732 - DNA, 492 bp, Zea mays
  Peptide Sequence Number=SeqID_45107
atggcttcgctgcagagccagagcctgctcggcattggcagcagcagcatcgtcttggcacgagcgagggtgcagcagtgtctggcagcggcgtctcgctcacacgcgcccctcctgcaggccaatggaggcaggacgggcctcccctcctcctcgatccttaacgctggcaatgcgatcagcttcagccggcggagaaggaaggacctgcgcgtcgtcgcggaggcggccgcggcggggccgaccaaggtcacgccggcctcgtctggcggcgtcagcatcagcgacgtgctctggccttccgccggagcattcttggccatggcggtacttgggaaaatggaccaggtggtggcgttcaagggagtatccttgacgattccgcccctgggagcagtctgctgcgtgcttttcagcgctccagactcgcctgcagccaagaattatttggatcatgatccattaccacctctaagtgtaacaaaaaactaa

SEQ ID NO: 1733 - DNA, 348 bp, Zea mays
  Peptide Sequence Number=SeqID_45108
atggcgcttcctgttgacgtggctggcttgcgccctaggctgggcgacgtggaggctcctccgaagccgaggtcgagtctgtcttccatggccgaggccgagtccgagcccccggaggccagggcggagtccgagccctggggtcgggcgaagcggagttcgtcgtcttctggggctgagcccgagtccgagccctgggtcgggcggagcggagttcgtcgtcttctgggacttagcccgagtccgagccctgggtcgggcggagcggagttcgccgtcttccgggacctagcccgagtccgagccctgggtcgggcggagcagagttcgtcgtcttccgggacttag

SEQ ID NO: 1734 - DNA, 597 bp, Zea mays
  Peptide Sequence Number=SeqID_45109
atggcccgactcccaaaggcaggaaatgaggccaacgaaaaaccaaaagaagatttcttagagggacaaaataattccaagtgcccgtgcaccttacagaaaagacagcggaaggccgacgggcccagcagcccaacaggccccgagaccgaacagagcgccaatggaggttgcgaagccgagaccgttagggccaccatgattccaaaggttgaagaaggctctgaattccttacgatcaatgcatctggaattgtaaatatggaaacacatagccatcgaagaaaccgaaaatcgaaaaacccggtcagcaagctgaagcacctcaaagccagacgtgaacccgccaagggccgcctggaggaggtgaccaacagaatccgggttcaacttgaggatgcatctgccaaaagaaaccaccagccagaaagacgaccgaagacgggggcgagcaggacaaaccgaagaagccaaattgagcctgagggaatcctcgaaggccaaccctggccaaaagtccaggagagcgaggtccatgccagaagaaacgagaagaccaggggcagggagcgcgaggagcgaagggacctgagctag

SEQ ID NO: 1735 - DNA, 348 bp, Zea mays
  Peptide Sequence Number=SeqID_45110
atggcgcttcctgttgacgtggctggcttgcgccctaggctgggcgacgtggaggctcctccgaagccgaggtcgagtctatcttccatggccgaggccgagtccgagcccccggaggccagggcggagtccgagccctggggtcgggcgaagcggagttcgtcgtcttctggggctgagcccgagtccgagccctgggtcgggcggagcggagttcgtcgtcttctgggacttagcccgagtccgagccctgggtcgggcggagcggagttcgccgtcttccgggacctagcccgagtccgagccctgggtcgggcggagcggagttcgccgtcttccgggacttag

SEQ ID NO: 1736 - DNA, 885 bp, Zea mays
  Peptide Sequence Number=SeqID_45111
atgggggatacccgccgtcttttcgcctcatcgttggaggaacgcaactccgtgggagttggtacctttcagccatcgttcggcttcaaggattttcatcatgcagcccggctgcacccctccaccggcgtcacccaagatggtgacctccagcttgatggtgggggaaagcgagccaggctgcggcctctgcccctccctcagcctcaaggattttcatcaccagggctggggaggggaggaagggcggtcatcgtccatggcaccggcagctgcaccgtgcctggctctcggacgcgagtggcttcggagccgctcgcggcgccggcgtctgccacggcagctggaagaggttcttccgccggcgagatagccaaggctggccacgggccgacctccaactctacggccttctgcccgtccttgcctcacgagtttgggcatgggcgggggcctcctggcagcagcatccgccctgaggtcagtgctgccgctgttcgcccccccggagcagaagtcgtcgtcgtcgccgctgctagagcaggtgacggcgtgccgttcgtcggtcttctgttgctctgcaggccctcccccatggagtggggctactcgcctgttgattatctgaaccgcttcaccaagcatgagtcgccccgtgtcaaggtgacgagtgagagcctggccgggttgtccgttagcgggaccgacgccggagttgaccagccgaggcctcgggtcgagctggcgcctttggaagatggtcttcggaccgcgtcgccgtccgaggctaggtcggacctcgccgaagttgtcgtcgatgccgagggtgctgctgcccccttccagcgtcaagacccgagcctgcaggatcagattgtcttgtag

SEQ ID NO: 1737 - DNA, 1263 bp, Zea mays
  Peptide Sequence Number=SeqID_45112
atgcaggcgtcatgcaaccgcgccaagtggacgcgcttctccgactcccaacgcgcccagcctcaaggcccaggcccacgcgtcatgcaaccggcgcgccggatgctgcgtgcaagcaactgcatcgccacttgcgccaccaccgcgcctcttcggttgcggaaccaataccacgactcgaggcgacccagcacacgacccagcagcgccagcctggcgcagcggtcaatgcgaccgaaacaagagaaccccctctcacggcgtgaagacaacgcgcccgtgatccgttcctcgaacggctcgcgcacgcgcggcgaccgcccagccaaccactcgccccgtcgcattaactccgcggcgggacaggcggcgcttctgggaccgggaaagggggataccccgaaaaggatccttccccgtgaaggaaccgggctccgagcctccctactgatcagaggttcgaaggctggccccccgaggggttcaacagccgcctcagatcgcgtgggccctacacccactactggtcagaggctggcccccgaagggttcacagccgcctcagacgccgagcgagggatgatcaggggggaccgggtccggcagatcacccgcaggtacttttgggcgtgcctctgggcccctagccgacccctaacgaacggggcacggacgtccactcggattacccgcttgcagctcaccggagacaccatgttcggcgccatcgagggtaacatggcgctttcccccctcctccttgcggaaaggcgacgcaggggcgtatgtaaaaaagccgagtctgtccctgatcgccctctcgccctgtgcggaggctcgggggctgctctcgcaaaacccggctccggccgaaccgttgacagcgtcaacataccagcccgagaacttgggccccgaccgtacacccgggctacggccagttcgcatgagggaacaaccagaccgtccgaagcattacgcaaggcattaagacctcggaggagtgaaaccactcctccgaggcctcgggggctacacccggcgggtgcgctcgcgcgcacccaccggaacaaaatgcaaccgagaaaggctggtccccttgcaaaaaagtgcgacgaaagcctccaagcgagtgctaacactcccttcgaggctcgggggctactgtcggggaccataattaggggtaccctcaagactcctaattctcagctggtaacccccatcagcataaagctgcaaaggcctgatgggtgcgattaa

SEQ ID NO: 1738 - DNA, 96 bp, Zea mays
  Peptide Sequence Number=SeqID_45113
atggcgcgctacatcaacaccaaggatcagcttgctgacctgctcaccaagccccttgggaggatcaagttctttaagttttgttccagtgtgtag

SEQ ID NO: 1739 - DNA, 480 bp, Zea mays
  Peptide Sequence Number=SeqID_45114
atggcgcctgacgcagccgccctgctcgacgccgctgttgtcgctgccagagcgcgcacaaccggcctcctccacaccaccgtcgcggccagcccccacgcacccgacgtagccacggtcgaggctaccactgccgccagcgcgcgcggccagcctcctcccttcccgcctccatcccgagcaccgcctacccacggcgcgcccggctacagtggccttggcctccccggctatccgacacacacgggcaacatcgctgccaacctagagtctgatgctctcccccagcccgtctacccctatagccgcagcgctcctgtcagtcgcctgtcgacttccccacctctcgcccgccagtcgccgactccacgttggtcgttgccatcaccaccatccagaccgtcgtggccgcctcgcaggagcgtgagcgtgccacatccctcgccctggagcaagaacgtgccatgggcgtcgcgctga

SEQ ID NO: 1740 - DNA, 768 bp, Zea mays
  Peptide Sequence Number=SeqID_45115
atgcgcacgctatggcactctaatcggccgttgaaccatggcagaagcgatcttccacgtgttcgacgcaagctggcatccgggggcgcgctcagagcacgcccgtgcgggaacccccgcgcacccgcggccgcccgttaccacgcccgtgccacggctataaagcccgccccagtgcttggctgccttccccgttacctcctccgtacctcgccggactcgcccgagccagccattaactccggcgacctccccgcgacccgccagtgccgcccgagagcaaccaccgtggccagcccctctcccgtcctcctccattcgatccaagccctcagagagcttcctgggacccgcgtcaccggaatagcccaatcgtgctcaccggagttcaagaacccgccggcgcgcgtggaccgggagccgccgacgacccccgccgcctgtgctcgtggccagggtagctccgaccacctccgacaccgacccgcacatcggcgtgaccgtcgcgacctcccggacgtcactgaccaccccgccggagctctactgccgccgcagattgccctcctcacgcgacctgagacgaggtctcccattccggttatggtgggtacaagtgcggtcattgcacgacggccagtcggggtcagtgaggcattgtacgccaaggcggagatggttgctggggtaacttggccgtccaccttgccaccaggttgggctgttgagtgggaccctgcctcggctgaggaggagcatgaggagtga

SEQ ID NO: 1741 - DNA, 1884 bp, Zea mays
  Peptide Sequence Number=SeqID_45116
atggctgccatccaagggggttgccccctttttaaaggcgactctccccacttgcgtcctcagccgtcgcggactgagtcttcaaccaacacgctccaaggtcctccccatatgacacgggggctgggtcccacgcgtcatgcaagctggcccaggacagaaggagccaaaccgccgcgcgcggagcgtgtaactgcccagcggttacaagcactcctccactttcacccagaccagcgggtgaaagggcggaccgccatgcaggcggcatgcaaccgcaccaagggggtgcatcctttcgacttcgacgcgtccagcatggaggcccaggcccacatgtcttggaccgggaaaggggatactccgaaaggaatccttctccgcgaaggaagtgggccccgagccctcctactgatcagaggttcgaaggctggcccctcggaagggatcgacagccgcctcagagcactcgagctctgcgcccactactggtcagaggttcgaaggctggcccctcggaagggttcgatagccgcctcaggccactcgggctccacgcccactactgatcaggggttcgtaggctggcccccgaagggttcgacagccgcctcagagcacgcagagcaagggatgactctgggtacgtccgatacatggccgaggctcgggctacgctcccgaggtaccctaggacatttccgagaccagcaggagcgattctgtaacggaatcccatcagagggaggcatcgagccctcggaccctatcaaatgggaccggctggtaaccgccatcagcataaagctgcaaaggcctgatgggcgcgattccggtcaaggctccgtccactcaagggacacgatctcgcctcgcccgagcccagcctcgggcaggaacagtagaccaaggcagattcacgcctcgcccgagggtctcctcaagcaacgggcgcactttcgactcgcccgaggcccagctcgggcaggcttcgcggagaagcaaccttggccagatcgccatgccaaccgaccgtatcgcaggagcattcaatgcaaggatcgcctgacaccttatcctgacgcacgctcctcagtcgacaaggccgaagaagctccgcctcgcccgaccccagggctcaacccccgtctcggcctcggaagacggtcttcgcctcgcccgaccctagggctcggactcaacctcgaccgcggaagatggtctctgcctcgcccgaccccagggctcggactcaacctcgacctcggaagatggtctccgcctcgcccgaccctagggtccagactcaaccttgacctcggaagacggtctccgcctcgcctgaccccagggctcagactcaacctcgacctcggaagacggtctccgcctcgctcgaccctagggctcggactcaacctcgacctcgaaagacggtctccacctcgcccgaccccagggctcggactcaacctcgacctcggaagatggtctctgcctcgcccgaccctagggctcggactcaacctcgacctcggaagacggtctccgcctcgcccgaccccagggctcggactcaacctcgacctcggacgacgaactccgcctcgcccgaccccagggctcggactccacctcgacctcggaagatggtctcctcctcgcccgaccccagggctcggactcagcctcgacctcggaagacggactccacctcgcctgaccctagggctcggactcaacctcgactccagaagatggtctccacctcgctcgaccccagggctcggactcagcctagacctcggaggagtcactgccttgcctgacctcgggctcggaccgaccacgtcacaggggggcccatcagtaccctacccctag

SEQ ID NO: 1742 - DNA, 795 bp, Zea mays
  Peptide Sequence Number=SeqID_45117
atgaccctgtttaatagtttattttccaaaaactgtatggcttggtcgccagggtcgatcttcggagtcttctccaccactttccacatcataactgtcgctatcaccagtatcttcagacaagccttccaaaatctccctgacatcttcgaaaatgctgagaaagtgctctcgaaaccgaagcttaaaaatttaaaacccaagcagtgcgttgaaaactggagggtcccgcttgtcaatgactattgctattctagcaaagggaagcatttgagaacaagacctcaacagcgccaatgccgcgccttctcaactgcagaaccagtgcagcgattcgaggtagccccacgcatgaaccaacagtgccaattaagtgcgacgatcacgggtcagtcagccgcagggataggcgcgacagtgatatggcccataagcggagctggcagtaattgcagcaacagacgtgcggaagcggtgggtccaatcacctacagggctcgcatcctctcccgaagcggcagggggagccctctcccacggcataaagatgacgcacccgtgttccgttcctcgaacgactcgtgcacgcgcaacagacgccccccgcgaatcgcccatcccatcgcattaactccctggcagggcaagcgacacctccggcaggcaaagcgggcgccgtttcgcctccgtcatgatgaccgcgtcaaaaaagggaccgggaaaggggatatttcgaaaaggatccttctcagggaaggaaacgggccccgagccctcctactgatcaggggttag

SEQ ID NO: 1743 - DNA, 648 bp, Zea mays
  Peptide Sequence Number=SeqID_45118
atggttgtgaagcagtatgaattagcggacacatttgctgagatgatcgatgatgcccatcgcgcggagtctgttgatacagacaatgaagcggaagcgcctcaaccagcaaaaccatcagatacatctcatcatctatcatcagacccggacccaggcagcggcttcgaccccatcgaggagtggttcgtggactttgactcggccatgtcgaatcaccttcttgtgtctgggatcggcgatttggccgtgagagaggatattctagaggaagcagttgctatgaagatggctgccacaccgcttgcatctgctgatactgagatgaatgccacggtatccgttgaagtggaatcggaaggtggcaaagaagggcaggaggcactggccgcacctgctgatgatgagatgatgaataccatggtgtccgtggaagtggaagctcaaggtggcaaggaagaccaggagagcagcgatgaagagtcggaatcagagagtagcgaggatgatgacgagttgtcatccagcgaggacgagaaagagcagggggtcaacaaggatgaggaatcaagtgaagcctcaagcagcaaagaggaagggcgggaacttaggaggcatggtggtaaggctgataaccctccgacgtga

SEQ ID NO: 1744 - DNA, 933 bp, Zea mays
  Peptide Sequence Number=SeqID_45119
atggagagtggcagcaagaaggtcgcagccggtgtgttggtgctgctgcttctccagctgatggtagctccgacgacggcgacagcccgcctcctgcaggcggatacctcccccgtgtttggcctggacttcatcgcgagggagtttggccatccagatggagccatctcctgtgcaccagtttcaactgtcatcctgcgtcatctttttttaaaaagtccctacgtttcttccaaatcaacccgcttccccgtcgctcgcgtcctcgaaaccctaaacctgcttccccaccatccgcgcgtcacgtgcgcgccgtccctggaacccaccgccgaacccgccgccgcacaagcagctcgacctcgagcactgggcgcggcacaatccgtctccctgcatctgccaccatccgcgcatccccgcatctaccgccatccgcgcatcaccgcatcagccgccatccgcacaaccatactgctttcgaacgatgtctcccacgtgctacggatctccgctccccatcccgtgtgcccaccatcctcaataccgccgcccagcttattcctgatgtggtacccctcctctgtcgtcgacgtgctgcctaggtcgcatagagtcatcgaggcgaacctcttccacctcccctccgtcaacgccgacgacgggggcgtggggatgcaggaggaggcaccaaatcccttgccggtggaggtttcaatcggggaggagcgacccaggtgtgttgtatctaccaacctctccgatgatctcctcctcgagaatagggcccacgttgtggcggggtgggtttccctcgcggcggccaacttcacgcttggcggtgacccattggaccagaccagtggtgatagtgcttggttgtataattcaaaggatgtagttgatggaactggcaggaaggcaaagcagtaa

SEQ ID NO: 1745 - DNA, 291 bp, Zea mays
  Peptide Sequence Number=SeqID_45120
atggcgaagatgttccagtacatacagagccttggtgccgcacagggttttgctccaccaccttcgttgttccctacagttgaccctgctgagttccatactcctggaatagaaaaaacaaataaaaaggggtatactggtcactttgtcgagtgtaacactcggcaaagaggtgctttgccgagtgttaaggccatagcactcggcaaagaaggaacacctggtcactgggaaagcttctttgccgagtgctacggccctggcactcggcaaagaagcaagctttgctga

SEQ ID NO: 1746 - DNA, 591 bp, Zea mays
  Peptide Sequence Number=SeqID_45121
atggggtgcacctgtgttgccctcttcttgctgctgttggagggccgcaacctcgtgggggttggcgctcttcagtcatcgctcggcttcaaggatttttatcatgcagcccggctgcagtccccgccggcggtcacccaggatgatgactgtaggcctcgtggtggggaagagcgagccgggccgtggcctcccccctgccctcagcttcaaggatgttcatcatccgagctggggaggagggcgcgccgagttgggtcccgcctctgcttgggcagcggccctctccttccctcaatgttcgggggagaagggcgttcgccgtctgtggcgctgtcagctgtcgcgtgtctggctccccggcctgagcggctctggtgctgcttccggtgccgcctcctaccactggggcggagcgtggctgcccgtctgccgcacaggtgtcggttgcgccgtgtgcgggccggccagatctggcgcaccggacagtccggtgcacaccggacagtccggtgcttccttccgaccgttggccagaccacgtgtcgcgcgcagattccgcggccgaccgttggctcggccgaccgttga

SEQ ID NO: 1747 - DNA, 321 bp, Zea mays
  Peptide Sequence Number=SeqID_45122
atggaagtagatattgaaatggttgttgatgaggaggatgatgatgtgcaaaatcagaatgacttagtaatatttgaaggcaatgacattaatgatgaacttgcgccttcggatggtgttgactatcaaatggttgatagtgatgatgagagttatggttgttggaaaaagatggtgggccgttggccgaggacaaggagggggaggaggagcacccgtaggacggtcttggatgcttggatggttgtggagaatgctgggggtcacggccgcaaccccaatggcatcctcgacctactgtgcagggaacatttccattag

SEQ ID NO: 1748 - DNA, 75 bp, Zea mays
  Peptide Sequence Number=SeqID_45123
atgaagcatttgagaacaagtccccaacagggcccatgcaaggacgttggtgctatccaatcgagagatgtctaa

SEQ ID NO: 1749 - DNA, 559 bp, Zea mays
  Peptide Sequence Number=SeqID_45124
atggaaggcccctgggttattaggacatcctactgctcagaagaggaaggctttcctcaccttctacgaagttgcgcgcttcgcatggggattcgcaagaagcccgaatatcaacaaaaatacccccacctggaggaaaaggctccaggctctgtcaggaggagaccccacagaagatgaccccaccatcgtctacatggctggatacctccacaccctcgacaaccactacgatgatctctcctcccactgcacccacctaaactcccgggtggaaagcctagagcagcaagtcaaagagcttaagcaagagaaggcatctctccaggagtgtctcgacatagtagaaggcgaggaggccaacacccgtgaggcctatcgaaccttaaagatggactatgacaagaagctaaagaagcttgctcccaagaagaaaatccagaagaagaccaccaatcgagggtgccaaacggagaagaagaagaagacccctccagccccaccttcccccaggatagatgattggtccgacgccgaggatatatccacgaatctctag

SEQ ID NO: 1750 - DNA, 924 bp, Zea mays
  Peptide Sequence Number=SeqID_45125
atgacgttgacttctccgtcgacgcgcgggaatgctccgtctcctccccctcctgctgttggggttgtcgaggttctccaggtcctcctcgtggtgggggaggtggcagagcatacgttcgcctccgcgaggtcctcctcgggcgtgagaggtgggtggtccggcggcgtggacttcttcacgaggcctcttctcccaacgtttgtcgggttgttggttcgtgtcgcgtcgcaatgccgcgggtgcaggctttgctcctccgatgaggtcctgagctcgttcgtcggcggtgatgtagaggtcggcttcctagaacagctgctcggaggtagtcgacgccttctgcagtatggctcggacgaaggccgagtcattagatccccggtagaagtcctcgatcactgtcgcttctgcgacctcagggatacgatttctcatggtctgaaatctcttgaggtgtcgcagctattgcagtgcatcctgcccgaggacgataggcaagtatgcggtcatcacatcttcggttgccccagcagctcgggcggcggtggtgtagacggccaaccagcctcccggatcctgcttaggctcgtacttgtcgacgttggagactttgaagttagggggccattgaatggccctgaggtgtggagtgagcgccgatactccacacgtgtcctcctgtcgtcgatgatgatgtctgtcccagggaggggagttgttgtcgtggtgcctcgattgtccccgggtcgtggcaccaatcgaagctgttgccgactcggttctggtggcctgactccgcgcagggattccgtggtcccggtcatattcttctcggcgccgaatctcattctcgtgtcgtcgttcgcgcgaggcgttgatggagctccgtgcgtctcgccgactgttgatggcgtgtcgtag

SEQ ID NO: 1751 - DNA, 468 bp, Zea mays
  Peptide Sequence Number=SeqID_45126
atgggcaagaacaagaagggtggaagttcgtcgcaccactccgacgacaagcggaagcacgagccaagtcccccctcggaggactttggtgactccgagtactcggaggaggagttttcctccgagtccgagggggcgccgatctacgcctctccccctgggatcaccgccgaggtgtggacgtacatccgggccatcgagcgcttcaggctcgagggctcggatgagtcggaggtctcctcggatgaggagaactcctccgactggtctgaggaggagagcgacggtgacggcgacgacaagggcaacggcggcgatggtggtgacggcggtgatgactgtgacgacgacggcaagggcgacagaggcaacagcggcaagggcgttggcaatgacggcaagggcgacggcaacggtaggggtggcggcagcagcagcaaggccagtggcaaagcgtcactggtttaa

SEQ ID NO: 1752 - DNA, 366 bp, Zea mays
  Peptide Sequence Number=SeqID_45127
atggctaggttggctgtattaactgggttagagacgaaggttggttctgagacaaccgatcaagccaaggatggaggcaagaagagcttcgaggtactgaatgcacgggagaaggtcaaggaggccaggaacccaaagccatgggtgaagaagaagacttgcaaagtcaaggttgatcgagttaagaagagttatgagacaaccgatcaagccaaggatggaggcaagaagagcttcgaggtgctgagtgcacgggagaaggtcaaggagaccaggaacccaaagccaggggtgaagaagaagacttgcaaagtcaaggttgatcaagttaagaagagttatggtgcatcaaggatcactacataa

SEQ ID NO: 1753 - DNA, 477 bp, Zea mays
  Peptide Sequence Number=SeqID_45128
atggatgcattgaacttcgaatacctagattatgagaggtttgatgaaggggcagggggtgtgaaaagtaaaagggttgtcagcatcctaagcaggcaagctgcccggtccataaaagaagacgaaaaggccctgaagaaagtaaaaactgcgccagagccaaaggcaacaatttctatgaagcggaagcttgaccagataccctatactgaaccgaaggtagacgaagaagcagagaaaacccctccgtcgccgtctgctgctgaagtggtcgaaattttgaagagcatgttattaagcaaggccttgaaaatgcagcaggatactaaggatataagaaacaaagttataattaaaggcttagaggataaaatcaaacttgaagcttctttaaaggaaaaagacatcatgctgcaatcagccaaaggctccctggtagaagcacgatctcagaataataagttgagcgaggactag

SEQ ID NO: 1754 - DNA, 345 bp, Zea mays
  Peptide Sequence Number=SeqID_45129
atggacggtggagcaatggctccggggagcctgtactggccggataacgcaacgaccggtgctcaggcggccaacttcggcgaggctatctggaccggtcgtgaggcaagtgggtacagcggccagcacctggtatcatccacggtgaagatcttttcaccccgaggcgttatccgggcaccaacgggcacgaatcgcatctccgacgcgaatccaagcgcgggggtcgccggcggcaagggcaaaatccttgtagaattagagatatacagctccaaagttgacttcaaaacattgaatttcagaactcaaccacctagtgttcatgggttattttgcaattaa

SEQ ID NO: 1755 - DNA, 258 bp, Zea mays
  Peptide Sequence Number=SeqID_45130
atgtcctgcttccgccttgaactggtgctgcttgactgttctgctggtttgctggggcagggagacgaggtgcctgctgattctgcctctggaactgacctcctcctcactgattgttctggcgattctactggtggtgctaaggatactgcctttggaattgctgatgctgagggggcgctggttctgcctaaactgctaaggtgctggaatgtggggaaggtgatggcgtcggggttggcatgggtggcgaggtag

SEQ ID NO: 1756 - DNA, 104 bp, Zea mays
  Peptide Sequence Number=SeqID_45131
atggcggagctccggctgcgcaagaatcactctggtgagcggggcctgctgaaccaaggagggaacgggcacaccgaagggtgtcccgagaagctgacggcaag

SEQ ID NO: 1757 - DNA, 480 bp, Zea mays
  Peptide Sequence Number=SeqID_45132
atggacaggagcagaggaaggaagggggaagattgcagggcgccatgggaggaagaggtggacgagctgctgctcgccgtggagcaggggaggggcgctgctgctgggcggccatggagcaggaaggtggaggtcggccagaggtggaagaaggacgccgagcacaggggctttggacgccctggttgctggccgagcagggaagaacatgggaaggcgccatgggagaaactcgagctcgctgccatgggggaaagcttctgcgcgccgaggaagatggagcgtcctgctgcagggatgccgagcgcagggagtagagggccggccaggggagagagaccagcgccctgggaggagatcgacggcatgggagcttggagctcggctccctgcctgctgccgtgccatgagcagagaggaggacggcgtgggggagaagaatgctggtggcggctagggaaaaatgaggggtgggagtga

SEQ ID NO: 1758 - DNA, 3105 bp, Zea mays
  Peptide Sequence Number=SeqID_45133
atgccgtcctcttcctcttctgctaccgatacaccgccggccggcgcgtcgtccgaggagacgctgagcaatgtggcggaggaggagttgtgcacctgcgacacagtggaattcggcgtggcgcggatgtccttggtccatgtgcaagacatgcaacaacttgggtattttggcggcggagtggcccgtgtcccgggggcagaggaggtccccgagccggaaggcgagttggtcgtcttcgaggcttttttcgccgctggccttcgtctgcctgcgcatcgatttgtgggagaagttctgcgtaaattcgaagtccagaaaaggaaaatcggaaataagattgctcaatttggatcttgcacatttacgccgaagaccggcaagacttcgatggaagtcgttgagttggttccctgcgcccgcaataaatggggcaactggtgggaattttggttctacgttgccgacggcacagtcgaagaccatcctgggctccctgtggccatcatgtgttcgcattattactcagcgtacccgcagtttgaggtagcggaggaggatggagacgaaggggcctttcggtgcgcgacccgcatgagtagcggacgcgatctggttgaggagtttgtcgggtatggggtatggcccttggcgcgtggctgggcactgggcgaagtatgccctcaccagatgccttcccgtggcgggaagctggtgcggagtcccgccttcacactggatttgcatggccgagatcccgccgcattcgtgcgtgaggcagaggatggggcggtgcgaattgttggtcgttacgtgccaaggatggaggcccagcggagttgggatatacgtggatccaacgaccgcatgaatagggtcttcgagttgaattgtttgccgtatggcggttatcccgggcaagacgttgtcgaccaccgcgggaaaaaaccggtggttgagactgaagacgaccccgcgccgaaggccgccccatccactaagaagaggaagctaggtactgcgatgggagaactgggggtctccgatagttttgctatgaaattgatggggacatgtgcggcccctgggggaaggatgtctttgcccgagctccgggagtcttcgacgctgatgctggaggttaccgggggtcgatggcctaagaacgttcctatcccccgcgcggccggcgaagacttctttatgtctcgcatggttcgtgacttgagagtgtttccttatggacagaatattgctgctgttgtgtcagcagtgatgaacaaggatcgccaggaagctgcgcagaagtgccgggcggtcatcaggctccccgaagctaggccgaagagggcgcgggggactgcgaaggctaccgtcctcggcggtagccagcctatgctgccggcgaagtcggccgcccctgggtccggcaaggtgccggagagcgtgaaggcggccggcgccggcgaaaccaagtctaccccggacggggctgcgaaggtccaggaattgccttcgccggggaaacgcgttcccgactacggcacaaatattagcgtggatgactatctcgttggatcgggcgaggggcaacttgctgttgtttcgcctgtggtggcgaccatggcggccgacttcgcagaccgcgtggcgtcgggggcccttactgcagatgtgtctgccgaagtcgagagacttcgggcacagcatgctgacgccgtccgggaaaagtcggccgcggacagcaagtgccgcaagctggcggagaaggtggccgccctagagggcgagaggatggacctccggcgccagctggcggaggagaggagggaggctaaccaggccatcgccaaggcgcaggcggcgcaagcggaggccaacttggcgcgggtggagggtagtctcgccaaccagcacgccgaggaatgggaggcgaggtacaacgctctgcaggcccgcatggagagggtcgaggcctctacgtgctcggaagttgagcggacgcgcaaacagctcgtggactcataccgcgagctgggcgcgcggactgctgacttcgaagtgcccgaccaggaggcgggccttcgcttcctcgagtggctgcaagaggaactgttggcgctcccgaccattgtggagggacttatgtcctttgcgtccctcgtcacctgcgaaggggcgatgaacgcgctgtcccgcgaggggtgcagtcactatgaggtcttcgaccgatctgatgaagattttgggcgcgagattttcaaggtcgaagaccctgtggtgaaggactccgcgggtgccctctttgaccggatgtggggccctcacggtcgggaggtggtgagggagcggtccgaccgggcgagggatcaggcggcgcgtgccgaggacgtggaggacttcggacccctgaacagcgtgcggcccgaagcggaggccaacccggtggtggccgaggctgaggtcgacccggcaccgcccccggaaaccggtgaaggctcccttgctgcccctgcggctactgtgtccggtggtggctcgtcgccaaccgctgtgccgagggtggaggatcccccgaaggcggcgacggagccggtagcggaggatcccatggcggcggctgggtcttcgcaggttcaggattttgggcctgcgcacgcaaccactactgctaattttgtggcggcttcgaccgtggatgctgggaatgaatcggatgagtctgcgtctaagttttatgatttcggtgactctaggagttcgattgagtggacggaagagtcttcggatgaggacttggattactttgcggccttggatgtggatgcggcagaggcttccccgcgtgttgcggatgctgaagttgtgcctggtccgagtgctgggcgtaggcggcgaagggcggtggcgaagcgtagagtgggtgaagtggacggcggtcggcttcgtgtgggcagggctggcaagcaggaattgttgtcctcgccggctggggcgagtgtaggtgagggggagttgcgaagtctttttgagggtgaggagcttaggataatgctatttaactatagggagatgggaatcattccgaaagttgaaccaatgtaa

SEQ ID NO: 1759 - DNA, 591 bp, Zea mays
  Peptide Sequence Number=SeqID_45134
atggcccaaggtcgggcgaggcggagactcctcctgaggccgaggccggggtcgggcgaggacgcgattcctcccgaggtcgaggttgaggccgagccctggggtcgggcgaggcggagaccaccttccgaggtcgaggttgaggccgagccctggggtcaggcgaggcggagaccaccttccgaggccgaggcgggggccgagccctggggtagggcgaggcagagacctcctcctgaggccgaggcccaaggtcgggcgaggcggagaccacctaccgaggtcgaggttaaggctgagccctggggtcgggcgaggcggagaccaccttccgaggctgaggcgggggccgagccctggggtcgggcaaggccgagacctcctcctgaggccgaggcccaaggtcgggcgaggcggagcttcctgttgcgcctgaggcgggactcagccgttgtcagcctcaccctggcgggtggcacagcagtcggagaggggcgagcggcgctgttttcctgtcaggtcgatcagtggaagggcgaagagactgcggtcacttcgaccttgccgactgaggcgcgtgtgtcaggataa

SEQ ID NO: 1760 - DNA, 2037 bp, Zea mays
  Peptide Sequence Number=SeqID_45135
atgacgactcaaggaggtttgcagccgacaagcaatgaagctaatatgtgcaccaacgacaatggtagccaacttggtacacggattgtggacgagattatggccgggaagaacgtcttctttgatcttcctgacaagttgactggtgagatatggaccttgaaattccattgcattggagcacaacctggaaaagaaattgtcacagtaaatattgataaagcttatgttgccttttacaacgtggtgtacataaaatcgaaacttggatattctgggagggacttcttgttttacaagaaacgatgtggcattgatcgatccaggctattggcacttgattacatccaccaagaagaggccatgctgtctgataacatggatgagagaaaaataagttttgtgctcacaaaagatccacccagtgatctagaggtaagcataactcccatcaagcgtccaagacagcgaacaaatgttgatgaagaaactatagaagtgtcgattgatgcatataaggagtggcttgcaatactacaacatgataatccagaaacggtattgtatgaacgacaaagcaatgatgacctaatattatcagatgaagaaattcatggcagcagcaaacctactactaattggccatctcatgctagacgtcataggaaaagagatcctgatgttattggtatatatgtagataacgatggagtctttaaaaaggaggggcgtggtacccttaagggtatagcagcagccaccaagcggatcaagaacggtgatcacaaacttaagattgaattttcatctaagcttggaggtcctgtaggaccaaacgctcgcacttttgtggatgaaatcgtattgtttacaaagaaaaaggcaccactcattggagtgaaaaagtggaaagatatagagctcaatgttagatcttctatagcctctgacgtactgcgaaggtgggagtttctaaccaatgaggacgcgcatgaaaagatctggtctattgctaaggagagatacaaaggatggcgatcaacgttaagctcaacatacaaggcatacaatagttatgctgaaaggatgaaaaacaagcctgaagatgtagacatcgtcgagtggcattacatggtgttgtattttggatctgagaaattccagaaaataagcagccggaactcggaaaaccgtcagaaacaaagaacgaagcatataatgggttctagaactttttcccaaataagctttcaacagagagatccagaaactggtatagaaccaaccgatctatccctttggatgattactcattgtaaaaatgatgaatggtcggaagaggcttcacgtggcatttatgagaacgcagctgagaaaattgctgagaaaatatatcaaacagaaaaattttatctaacaagagaagaggaaaatgctattttccaaacaacattcaaggaaacaacaggatgtaaggcaaacagacttcatggtcatgggtacctatcaagatatccaacaagaagtcaagtgatggaatcaaagttcctcgaacaagctcgtgccacggttgcaaccaaccaaaaaaacattgaactcgaaagtcaggtccagttgttaaatgaaaaacttgcgtgtgaggttgcagaacgagaaagaatactccaggaaaaaatgcaagcactgcaagaagaagaagaaaaaaaaagacaagtgcttagagaagaaatgaggcaagaaatggttgctgcccttgctgttgtagcacaacagagcaaccgtgaaagcaccactccaatcgatccttcttccgttgtccctactaaacctcctgaattcatcccagctgattctcctgcacctgcaccaagtagtgcaaacaacgttcgtacaccagacacaaacaataagaaagacaatatgccagcaaactatattagctcttacactctaaggaatgctgtgacaagacgtgtgcaggcaaggggcaacaaaagaagcgaatgtgtatggaatgcaaatgttcttgtattatga

SEQ ID NO: 1761 - DNA, 468 bp, Zea mays
  Peptide Sequence Number=SeqID_45136
atgcagagactcctcctgaggccgaggccggggtcgggcgaggacacgattcctcccgaggtcgaggttgaggccgagccctggggtcgggtcaggcggagaccaccttccgaggtcgaggttgaggccgagccctggggtcgggcgaggcggagaccaccttccgaggccgaggcaggggccgagccctggggtcgggcgaggcgtagacctcctcctgaggccgaggcccaaggtcgggcgaggcggagaccaccttccgaggtcgaggtggaggccgagccctggggtcgggcgaggcagagaccaccttccgaggtcgaggtcgaggccgagccctggggtcgggcgaggcggagaccaccttccgaggccgaggcgggggccgagccctggggtcgggcgaggcggagcttcctgttgcgcctgaggcgggactcagccgttgaaaaattaatacgaacgtaa

SEQ ID NO: 1762 - DNA, 180 bp, Zea mays
  Peptide Sequence Number=SeqID_45137
atggccgcgttccggcacacgtcgcccctcctctcatctccgggcaagcccctgtccctcagagtcagtcgcatggctgcttgtgtgttggtgatcgtgacacgcaaaccgatgccccaagtatcctatgcagccgatcagattccaacagcgccaacgaagtcggtcataacttgctag

SEQ ID NO: 1763 - DNA, 777 bp, Zea mays
  Peptide Sequence Number=SeqID_45138
atgaagattccaggtccccagggtgtaataaccatatatggagaccagcaggtcgcccacaataacgagagatactttgtccctggacagtgcaacgtgcattgcctcaccaccgacaacgaagatccaataagctgtgacggaacctcccaaggtattaggcctacctacagatgtccttgccctaaggacctcagacagtcatgcagaaacaacagaactcagccgtttcatcacctacaacaacatgggttcggaaaccctgagtacggagtgtactttcgcaagtcttacccgtcaaaggaaaaaagactctcaaggatatgctggcttttagggatcaaggtcgggcgaggcggtggctcctccgaggtcggggtcgagtctgtcttccgaggtcgaggtcgagtccgaaccccgggtagggcgaggcggagaccgtcgtctggggtcgaggccgagtccgagccctggggtcgggcgaggcggagttcgtcgtcttccggggccgaggccgagtccgagccttggggtcgggcgaggcggagttcgtcgtcttccggggccgaggccgagtccgagccctggggtcgggtgaggcggagcttcctatggcgcccgaggccggacttggttgctgtcagcctcactctgtcgagcggcacaacagtcggagcgatgcaggcggcggtgtcctcttgtcaggccggtcagtggagcgacgaagtgactgcggtcacttcggctctttcgactggagggcgcgcgtcaggataa

SEQ ID NO: 1764 - DNA, 939 bp, Zea mays
  Peptide Sequence Number=SeqID_45139
atgcaggcggcatgcaaccgcaccaaggggcgcaccctttcgacttcgacgcgtccagcatggaggcccaggcccacacgtcatgtaaccggcgcgccggttactacgtgcaagaaattgcaccgccactcgcgccactaccgtgcctcctcgactgcggaaccagtaccgcgactcgaggcaaccctgcgcatgacccaacggtgccaaccgagcacatcggccacgggccagtcagccgcgggagaaggcgcgacggccgatacggccagaaatgggccagcagtaatggcggtggcaggcgggcaagtcgacaggcggcacctttggcgggcgaagcaggcgacgcttcacctccgccataatgaccgcgtcaaaaaagggaccgggaaaggggataccccgaaagggatccttctccgcgaaggaagcgggccccgagcccccctactgatcagaggttcaaaggctggcccctcggaagggttcaacagccgtctcagagcactcgggctccgcgcccactactggtcagaggttcgaaggccagcccctcgaaagggttcaacggccgcctcaggccactcgggctccgcgcccactactgatcaggggttcgtaggctggcccccgaagggttcgacagccgcctcagacgcagagcgagggatgaccctggcacaaagctgcaaaggcctgatgggtgcgattaagtcaaggctcggtccactcaagggacacgatctcgcctcgcccgagcccagcctcgggcaagggcagccgaccccggaggattcacgtctcgcccgagggccccctcaagcaacggacacacctttcggctcgcccgaggcccagtcttcgccaagaagcaaccttggccagatcgccacaccgactgaccgtatcgcagaagcatttaatgcaaggatggcctga

SEQ ID NO: 1765 - DNA, 810 bp, Zea mays
  Peptide Sequence Number=SeqID_45140
atgccgtcagtcaaggaaaaatcatgtccaaatttcgagacagtgagtcatcgctttcctttgcatgtccaagtgcagatgttgttcagtgaggtaggacaaactttgatggtctgtacgaataacaaatgcatggcgttgaagaaattgctgcttgcgaagaagattgggtctttgcatcttcctcggcgggtgcgaagggtaaggaagctagtcgagccaactagggtccgtgtaggcagttggaacgtaggttccttaacaggtaagttacgagaaatagttgacgttgcggtgaggagacgggtaaatattttatgcgttcaagagaccaagtggaagggacagaaggcgaaggaagtggaaggtacaggtttcaagttgtggtacacggggactgcaacaaacaagaatggagtaggcgtcttgatcgacaagagcctcaaagatggggtagtagatgttaagagggtaggagatagaatcatcctagtcaagctggtcattggagacttggttctcaatgttatcagcgcgtatgctcctcaagtaggccttaatgagaactcaaagagagagttctgggaaggcctggaggacatggttagtagtgtgccagttggcgagaagctcttcataggaggagacctcaatggccatgtgggtacatctagcaccagtttcgagggtgtacatggaggcttcggctttgggactaggaatcaagaaggagaggaaatcctgaactttgccctagcctatgacatgtttatagcaaacactttctttaagaagaggcaatcccacctg

SEQ ID NO: 1766 - DNA, 846 bp, Zea mays
  Peptide Sequence Number=SeqID_45141
atgttgccgccgaagcagctgctgaccatcgtcatcatcatcttctccacgctctccttcatcaagctccttctcctcaccagctcgtcgtcctcgtcagcgggcttcacctcccgcagcagcccggcgtgggacgcagacggcggcggtaacgggacggctaggagcgcgctcgcctccaaggagctcgctctgctccgctccgtcatcgccgcgcgggcgccgtgcaggctgctggtgttcggcctgtccccgcagctcctcgccctcgccaagctcaacttcggagctggcgcgggggccgccaccgccttcgtcacagacagcgccgacgacgcggacgccgcgcgccgcgcgctcctctccgaccgcggggctgggtccaccgccgcggcggccgttcaccagaccaggtaccgcgacgcggcggcggaggcgtggccgctgctgcggcgcgcgcgggggagcccggcgtgccggcggcccacggggacggtgcgcaagtccgggtgcccgttggcgctcacatcgctgccgcgggaggtgctcgacgcgcggtgggacgtggtcgtcgtcgacggacccagcggggcggcgcccgaggagcccggccggatggggactatctacaccgccgcggcgctggcgcgcgccatggctggcggcgaggcagtggacgtggcggtgcacgatgtggaccggacggtggagcggtggtatgcgtgggagtacctctgcgaggacaacctcgtcgccgcaaagggccgcctctggcacttccggatcgccgccggtgcggggccgacggacgcgttctgctccatcggccccgtccacatcttgtag

SEQ ID NO: 1767 - DNA, 603 bp, Zea mays
  Peptide Sequence Number=SeqID_45142
atgaccccaacgattgtgatcggaaagattacggcgtttgagatatcgtggaaaatgggtcaagaagaggggccaacttcttcaaagccatatgctttggcatgtgatgagcacaaaaggttgaaagccaagaagaaggctttaagctcaagttcctcaattgaagaagaggaagaagaagatgaaaatgatgaagaagaaaatgatcaagcttcaacatcatcctctaaggacaaaaaaacagttcgacgtgtcgaaaagaaaggccacttcagggacaactatccaaatatggtcgaacccacaaaaaggaggagcaaaggcaagacactcacaagtgtcaagacttgggatgattcttcaagtgaagatgatcctctaaggactcacagccaccgctcttcatcacgctcttcacggtcatctctcagatggcttgtggcaagaggtaatacaagtatcccatcctctagtgatgatagtgataatgagtgtgatggtgagggaaagccctccgtagatgaacttgtgcatgttgttaagttttttgaggatgtttgcaggaaacaagaggatctcaaaatggttatagatgttttctag

SEQ ID NO: 1768 - DNA, 105 bp, Zea mays
  Peptide Sequence Number=SeqID_45143
atggcgagagtagcttgtaccctctatggcaagagactggaaggttataattttgttctgttgtggatggtgctaagtgccggtgggctcggccttcttatataa

SEQ ID NO: 1769 - DNA, 1275 bp, Zea mays
  Peptide Sequence Number=SeqID_45144
atggcgtcgctgttcggcaacggcggctacatctactcctcggggtcggagggggaggacgaggacgagggcacggaggggtaccggaaaggcgggtaccacgccgctcgccccggggatcgcttcgccggtgggcggttcgtcgcgcagcggaagatcggctggggcaacttctccaccgtctggctagcctacgacaccctccacagcagatttgtcgccctgaagatccagaagagcgcaagggattacgcgcacgcggctctccacgaaatcgagctactgtcggctgtggccaaaggagacccgacgaattcaaagtgcgtgcttcggttgttggaccatttcaagcacgctggccccaacgggcagcacgtttgcctggtcaccgagttcctcggtgatagcctgctccggctgatacggtacaatcggaacaagggcattgggctgagcagagtgaaggaaatctgccgatcagtcatggtcggccttgattacctgcacagcgagctcggcatcatccacacggatttgaaaccagagaacgttcttctggaatcaacaattaacccggccaaggacccagtgcgctctgggttcacaccgatcctcgaccggcctgtggggaaccagtacggtggcacagtgatcagtttcagtgagaagatgctcaagatgagagcaaggcgtgcagtggctaagatttcgcagagacgggtttcccttggtggggttggggcagaactggagaaagagaggtgcctggatgggatcagtttgaagtgtaagattgtcgattttgggaatgcctgctgggccgatcagcagcacgctggtgaaatacagacaaggcagtacagagctcctgaggttatcattggttctgggtactcatattccgctgacatctggtcgtttgcttgcattgcctttgagcttgccaccggtgacttgttgtttgctcccatgaatcgccagggatgcagcgaagatgaggaccacttggctttgatgatggaaactcttgggaagatgcctcggaagattgctagctcaggaactcgttccaaggattactttgatcggtatggagatttgaaaagggtcaggagactgaagttctggcccctagaccgtgtgctcgtagaaaggtacagtttcagcgaacccgacgccaaagggttcgctgactttcttcggccaatgttagatttcgctccggaggacaggccatctgccgcgcagtgcttgaaacactcttggcttaattga

SEQ ID NO: 1770 - DNA, 964 bp, Zea mays
  Peptide Sequence Number=SeqID_45145
gctacagttatcccctatctcccgcagcggcgagcgctacactctccccttcctcgtcgcactcttctctctcacgccacatgcaggggatgactgtagccgccccctcgcctccttcgcgcggacggagccgaccgcggaagacaacggaaacttcccgctccacctcgcttcgcctcgaatcgtccgcggaagagagattttgcgcggcgacgcggcggcggatctcccgtcgggctgtggagtcggccccggccccgctcagttgcgcagaagacgaactcgacttcgtctccacgcagttccgttcgcgaccgaagacaaagcggggtcaaatccgcttcgcacgagcccatttgtgatggcatcctcccaagaagataagatgaaggctttgatgaaagtccttgtcgactgtacagaggatgccacaaaatccctggggggtttagttgatcatgcattagaccacatgcatgacgaagaaatcctagctaggacattgtttgctatcaaagataaactagagttgcttcagcaggatgccttagaggcaaaagtccaagcgtttccaaaactagctaagtacgactgggatgacatcagtgttgatcctccctctccgtcaccccctccaacagttactgatccttctgttgacgaagaggagttctactgccccgactttccgtcaggcaccgtgactgaatgtgcggcgggggtgccggatgcgccgcgcgtggtgacggcgtctgccaggtggcgctacgggaagggcccggccgtgctgcagaacctcggggtgtcgtcatgtcaacgctccggttggcgtaggggccgcgtgatccatcggcgccgcgaacgagatcggagatggcgcggcggcgctgagctggccgccggattcgcgtgggctggacggaaccggacggcgtgtcgccgtgtcattagggtccgtgcttaa

SEQ ID NO: 1771 - DNA, 369 bp, Zea mays
  Peptide Sequence Number=SeqID_45146
atggcgatgatcaatcggctgcaggaagagatggcggcgatgcaaatgaaaacactgcagtaccagcagatggaggagcagtcagagtacaaccaggaggtgaaggtgcatcactacgaggacaaggagaggaggaggatagcgagcttcaaggccaatggggtaagccccagtggcagtggcactttcgtgtcctctagcggcgaggacagcgatgggcactccgacgactactacgagcttagcgattctcctgatggcggcaacgttcggagctcatcggatgctgctcttagctccatgagggaccaggacgacacgaagcacctagaggctcttcacactggaagacgattgagagtcgcctag

SEQ ID NO: 1772 - DNA, 846 bp, Zea mays
  Peptide Sequence Number=SeqID_45147
atggcggcagcgatgtcatcgagtactccgccggcaacggcggaggacgcggggggcgcgcctagctccatcccaccgcccattctggaggagctagaggttattcttgagcggcagctccagaccagcgccgggctagaggcggcaccgactcccctccctcgggtgctgtctcgcgctcatcaggctctctgggagaccgaggcggcgatcctacgggagtgggaggcgcttgagaatgagcaccagcgcctctgtgattggcgcacccagctggaggagcgtaccaaggccgcgtcctgccaatttgcctcggagcggtccaagcttgatcaggagcgcgaggacctcaaggaggacctggggaaggtatttgaccaggagcgggaggtgacccgaaaggagaagggtctggtcaagaaagcagagcacttggaccagagggaggcggtcatcacggaattccatgagaagctgaaagcctataatgcgatgctggagaagcagcgggatgagcagaccgcgactgaggcagctctgcaaaagctgcggcaggagctcgatgacagggctagcaacattttgctcgctgaggagaacctcaaggcgaaggatgcctccctggaggagcgggcgacggatctcgtctggcaggagaaggacctcgcctggagggaggaaatgcgggaaaggcgggaaaagttgctggccgaacacgagctcgaggtggaagagaaggagaagaaactggaggagaaggagcgggcactggaggagcgggtccaccggttccaggcgacgcaggcagcgcaggcggctccgggctcccaggagatggaggactag

SEQ ID NO: 1773 - DNA, 564 bp, Zea mays
  Peptide Sequence Number=SeqID_45148
atggcgccccgcatactctgtgacgacggcggctctcagcccccttacggaagcaagaggacgtcagcaaggacccaaccgctccgacagctgtccctccgccaggctccatcgctcctccgacggccacgacatcacaccagctgggtgccaaaatctctccggctaccacatcggcatggccctcttagagagggttggccgcgcggggacgaggatgagacaggcgctctcttggggccgctcgcttccctctcccgcgtggacgcttgtaaccccctactgcaagcgcacccgacctgggcacgggacgaacacgaaggccgcgggattcccacctctctcacgctggtctccggcctcctcgcttctccccccttcacgctcgccctctcgctcgacccatctgggctggggcacacggcgacactcactcgtcggcccaagggaccccccggttctctggaggacatggttgctggagtgacttggtcgtccatcttgccaccgggttggacagtcgagtgggaccctacctcagcagaggaggagcatgaggagtga

SEQ ID NO: 1774 - DNA, 372 bp, Zea mays
  Peptide Sequence Number=SeqID_45149
atgcaggcggcatgcaactgcaccacggggatgcaccctttcgacttcgacacatccagcgtggaggcccaggcccacacgtcatgtaaccggcgcgccggttactacgtgcgaaaaactgtaccaccacttacgccaatgccgcgccttctcgactgcagaaccggtgccgcgattcaaggcaaccctgcgcgtggcccaacagtgccaaccaagcacatcggtcacagggcaggcgacacctttggcaggcgaagcgggcgacgcttcacctccgccataatgaccgcgtcaaaaaagggactaggaaaggggataccccgaaagggatccttctctgcgaaggaagcgggccccgagccctcctactga

SEQ ID NO: 1775 - DNA, 537 bp, Zea mays
  Peptide Sequence Number=SeqID_45150
atggggtcggggctaccatcggctttagaggcgcggttggagagggctctacttaggtggaggtggcagaaggggcgtgagagcgtgtccaggaggagacacatggagcaagatgatggagtggcggcatggggattgagagggcgacggtgcatgggtccggaagcagcggcaagacgtgagcctggcaacgaggtcatgagtaggaggcaggcggggcggaatccggtggggccgtgggggcgtcagccgtcaggtcggactctggtggatgcagggacgcagtccggtggctggcaggcggagctcggcgcgtcgcgcgggataacgggttggcaggcggagctcgacgcgtgctaccggctgccggcgcgtgttgctggctgccgccgcggctggaacctggaagcggagctcggcgcgtgctgccggctgacgccacggcccacggcgtgtgctgccggctgccgccgcggctggaactggaagcggaaggcctcggcgggcggaagaggaaggcagcggttgagcgagtga

SEQ ID NO: 1776 - DNA, 1161 bp, Zea mays
  Peptide Sequence Number=SeqID_45151
atgggtgatcacgaggcgcgcggtgatgacttcgagaagaaggcggagaagaagctctcgggctggggcctcttcggctccaagtacgaggacgccgccgacctcttcgacaaggctgcgaactccttcaagctcgccaagaactggagcagagctgcatcagtttacatcaagattgctaactgtcatttgaagggagatagcaagcatgaggctgcctcagcgtacgtcgaggcagcaaattgctacaaaaagttttcacctcaggaagctgcgcaagcgctaaaccagtctgttaatcttttcttggaaattggtaggttgaacatggctgcaagatacagcaaggacattggtgagatatatcagcaagaacaagatttagagaaggctacagattacctggaaagggcagctgacctttttgacagtgagggacagtcgtctcaatcaaacaccatcaaacagaaagttgcagaaattgctgctcagttggaacaaggaattcttcttaatgctggcatctgtcaactatgtagaggtgatcctattgccatcacaaattcattggagcgataccaggaaattgacccgactttctctgggacacgtgaatacaagcttttagctgatcttgctgcatctatggatgaaggggatgttgccaaattcactgatgcaatcaaagaatttgatagcatgacacgtctggaaggcccccagtcgacgttcctgtccatcgataccccttcaattcctcaccgatctagcgaccataacatctggtattcggagccaattttttcccatcgccctttcaccgcgtatgttcctgcgctgttcgcccgcaacacgcagccaccaccacatctccgtcgtgtgtccgccacatctatgtcgtcgctcaccaccacacctcaaccagcacgcgtacagccgacccgccagcgccgacgcccgacccctcgcgcacagcccggcgacccactcagtgcccctcgccaggccacttccacgccagaggtctcgtcgctctgggtccaccgccgcctccacctccacaccagcaggttgcgtcaccctccgcgctgttgggacgccttcgccccgcgccgctgggacgccacctccgcaccacgctgtggggtgcgagttgcctag

SEQ ID NO: 1777 - DNA, 579 bp, Zea mays
  Peptide Sequence Number=SeqID_45152
atggcccgcgcccgcgcttataaaaccctcccagacttagattgtacccttccgcgcaccctcaaacctcaccggagtcgagctcgtcgccgtttgcccgtgcgcagcgagtccgcggccgcccactccctctgtcaccatagaccggccactagagccattcccaaccccgtccagcccttggagaagactgtgcacacctccgtgaggctccccgagcaaggaatcggagagtacttcgccggagaagccagtccacgctcgccggagctctcaaccccgccggagtacgtggaccgggtaaaccactccaccatccttcgattccttgcgcacacggtcgctacgataccccgtgaagctcaccttgccctcggattgaaccagttcgccgtggtttggccggtatactcgccgccgacgaggacacccgcctactgtaatcttgctgacggagagtacatcctcgtgtcggagcaaggagctgctcaggaggtagccccagatccagcacccgagcctgcaccagaggacctgcctgccactgctttggaaggcaagccccggttttatgcataa

SEQ ID NO: 1778 - DNA, 258 bp, Zea mays
  Peptide Sequence Number=SeqID_45153
atggcgcctttggcaaggtctgactgcctgtcagactcactctgtcgagtggcactgcggttggagtggcgcaggcggcgctgtccttctgtcagaccgctttatgctgatgggggttaccagctgagaattaggcgtcttgagggtacccctaattatggtccccgacaagtgccgggatactgttcacctatttataggcacaggatgcaacctgcgcaaaattacatttatgtcctttacaatcgactacaataa

SEQ ID NO: 1779 - DNA, 477 bp, Zea mays
  Peptide Sequence Number=SeqID_45154
atggcgattgcggcggcggaaagtagaagggcgcgagtgcaaagaggcgcagagggctcagagacgaaagggcacagcagttggaaagaatgcggaagcgtgactgctgaccgcggggtgaatcccttttcaaggaaggctctcccgctcgtgccccaagaaatcccgtccgatgcacacctagcgcccgcagcgactcagtccccgacatgcgggcccgggcggcgaccaggccgtcccacaggcggcgtgcctatccattccgttggcaggcagtacgcccatgctgcggagtacactgtgctcatcatcacttgtacgttgctggggaagcttccgctgcacgccaatactacgcagactgcggatatcagggcgcaaggagattgcactggcattagttgctccaagtattacatccgttatgttcctaggcccgcatgtcggggctcagcactcttgtacgtgcccccttga

SEQ ID NO: 1780 - DNA, 774 bp, Zea mays
  Peptide Sequence Number=SeqID_45155
atgctggaggagcagcgggaccagcaggccacagctgtggagaacctacgaaaggtgcagcaagggcttgatgatagggccagcagccttgccctagccgaagagaacctgaaggagaaggatgcctccctggataagcgggcggcggatctcgcctggcgggagaaggacctcgcctttaaggaggaaatgcttgagaggccagataagctactagccgattatgagctcgaggcagaggagaagaagcggacgctggaggagaaggagcagacgctaggggagcgggtctgcctgttcgaggcggcgcaggcagcccaggcggcgcagccggcgtccatctccgacgcgctcctggtgctggattccaccgccgatcgcctccgacgcctggaccagatccttggcgcccgcctggaggctgagggcagcagactctgccggtcggtagtagagtacgtcctgacgtgcttccggagccacgacccggccatctccttagtgccagtgatcgcagcttcttccctggtacttggccccctgggatgtgggctcgacgtgtcgaggctggatgccagtattcttaagaaggaattggtgacatggcccccaggaggcttagggtgcggaaccaagctaagcggctacacagctccggaccacccaggagacgagtacccattctctagaactggcccccaggctgctggacctggctactcaatgcggatgtcactataccagcaagggagggaaaccgtatgggtgggttag

SEQ ID NO: 1781 - DNA, 198 bp, Zea mays
  Peptide Sequence Number=SeqID_45156
atggcgggcggaattgagctcgccggagctaaggagaggtggttggccggtgaaggattcgagttagggatcaaggtgaacatccttgatctttggctcaagatgtctagggaagataggaagcataccgcttttgtaacagtggacgggctttactgctatgttgttatgccttacggtctgaaaacgccttgctga

SEQ ID NO: 1782 - DNA, 675 bp, Zea mays
  Peptide Sequence Number=SeqID_45157
atgggtccggaccccaatgggaaagtgccggacccctgcatatacgggccggacctccgggcagggtccaggacctccgcggatacagaccggacccctaggacgggtcctagacctctctgcgtggggtccgggtcactcctagcagggtcccgtgattctgggacaaagaatacccaggccttaatcaaggccaagtggaggcccggagccgacacgtgtccggcccataccatgtacgcttctactccccgcccaggcggagacccggtgctgccacatggcctactgcccgtgacgcggcgaccaggccgtcccgcaggcggcgtgcctgtccatttcgttggcaggcagtacacccgtgctgcggagtacggtgtgctcatcatcacttctacgttgccggggaagcttccactgcacgccaatactacacagactacggatattagggcgcaaggagattgcactggcattaattgctccaagtattacatctgttatgttcctgggcccgcatgtcggggctcagcactcttgtacgtgccccccttgagctataaaaggggaggcacacgacgttacaagacccaagctcacttagactcagacacacttagacccagctcaggctcacaagttcatataagctctcaagctcaatacatcacatag

SEQ ID NO: 1783 - DNA, 555 bp, Zea mays
  Peptide Sequence Number=SeqID_45158
atggccttgctagaccctctcgagcgcctccagcccgaggtggcactcaacttggtgcgcaacctgctcgggtggggtgtgccggcgttcaccggaaggatccgtgtcggcgcctttcctcacggcaatctcgccgccggtgagtttgtgctcttcgtctccaacctctcctgtgggttggcgctgccgatctcgtctttcttcgtgctgctgctggaggagcttggcctccaacctcagcacttcacaccctgcttcatccttcaggcgtccatcattgcctacctctgcaaagatgtccgtgggggcaacactccttgcttcttcctccagcattcggaggaaaggatcttcaccagccctgtgaaggcggaaagcgagctgagctgcggctccatctttcgcgcctccatctctttggctttgatggcttcggtgccgcctccaatggtgactgctggcctggctactaaagacgccgcccgggaggtcatacaagatgtcgcggagatggcggtcgtgcgcttccaacgcgaccctactgatgacgagtag

SEQ ID NO: 1784 - DNA, 2073 bp, Zea mays
  Peptide Sequence Number=SeqID_45159
atgccgcgcacgaagaatgtgtcggcatcagggggtggcgacgatgaggaccctcggcgccccttcaggcaggtgaagggcaagactgtgtatctggagcagcaggaaggccgcaagaagcggcgttcagacagagaggctcgtgcagcagcagcagctgcagcagccgctgcacaggcagcacttggagatcagccggatgttccatcagatcagattgctttccgtgctcgtcgtctcgcctcccggtctcgctcctccactcgcacctccgcttccactccgccacccactctgcctgctccagtcactcctattgctccatccacctccaccgccatacccactaccagcaccacgccagcttccactgcttcccctgcccccgctcccgcttcagctccacctgtccctccacctcgcttccgggagcgtgatgagactgaggttcgtcctctggcttcggatcctcgtttgtttgatcttcagcgtgctactgcagcccgggtacgtcgtttcaggtacgtacccgtggagtcttggctgccagctcagagagacccagcagcaggagttcttttcagcactcggattcaggagtcattcttcagggctcagatgtctactcagattgcgcttcgagttcaccgcctattggatcttccagccttcttgctagcagccggtgctgagtctgaagcgcatctcacctatttgccaggccttctgtcctttctgactatcagcggcagatatgttgaggagtgggtccgcgtcttctatgcctctgtttggattgacccggatcatcattggatgaggttccgctttgagcgcgaggatgtcacgatcactgccaggacagctcacgtcgcagctctgttccgcccgcctttcacagatgggtcgcgacgttctcccgcagatttcaccacagcagcaaagtacttatatgagctcgtcagacggacactcctgcctaggatgggatacagggaggctaccactcatattcagctttggctccttggtgccctggtatcccactctgagtttgatgttgttgactttctgatctgtgagattgaggacaccgttctggatgggattcgtgctcgacggcagctaccgtatgctcactacttgtgccacatctttgcgcagctgatccagccacctcgttttcagagtacccttgaggcctcacgccttgtatttggatcttaccgtcctgctcctgagattccagtgccagcttctgcttctgtgtttgactctcaggccgaggatgcagctctacgtcagtttgactctcagggtacagcagctgatgatgatgatgatgatgattttggggttcctcttccgcctccgcctcctatgcctccacgctcacatgatcatgaggctgggagttcccgtgctgcccctgctcctcctccagctttggaccctgcccttgcttcgattcttcagactctcacccagcagcagcagactctcactcagcagcagcagactctcacccagcagcaggctcttctggcagccgagcaggcccgtttatccgacaggatgctctcgatgtttcagagcatgcaggacaggcaggatgcacttcagcagcagcttattcaggatagggcagagagtagggcattcatggctctcatgcttcagcattctggtatctcagcccctccggttcagtctgctccgccctcttcgcttcacgctccagtggtgccttcgatcttgtctgcaccccctgctgttacctctccgctccggccggtcaccttggcgttcacttctccggtcctcagctctgtctgcccacatccgctagtgccaccagcatctgctgttaccactaccgctgtggcagtatctgtgactgcttctgttccggtagctcctgcagcgctgcctgcgtccgagtcagtaccagctccagcttctaccacagatcctggatccgagactgactctgaccctccgtcggcgtttgctctgctacctcgacctcgaccggatgcgcccccgccgcctcctcctggttcagatgtttag

SEQ ID NO: 1785 - DNA, 353 bp, Zea mays
  Peptide Sequence Number=SeqID_45160
aaggattgtcccctcacataaggaccggtttgtcatccttcactacctgtactcatgataagtacaaccactcgagactgtatgggcagtcactcaatctgaactcgtacgattcaaaccccagggttatgaaggctggggagcaccgggaggataaggagggggaatgttttgtcaggtttggacatggcggtggcttgactccttccgatataaccgttaagaaaaaggagatcgaagagctcggctgcccatttggctattctggtagatgcttcgggatttctgaaaaggtctcccagacctcgatctatggtgacccttactttgtgtgcctcgaaatagtaccttag

SEQ ID NO: 1786 - DNA, 321 bp, Zea mays
  Peptide Sequence Number=SeqID_45161
atggcgtccctctccccagcaacatcttccccgtggacgccccctactccgagctcctcccatggcgccctgctccatgtcgctgaggacgagcagccgcattacaacgagcagtccgaggttcttgagtgtgttgttggagacctccctgagcaacaacctgagggccgtcaatgggggtcggggcgtagtgctcgctctgccaaggttggggtgcagaggttctttcgatttggttttgttagtcacccaccttggggaggaggtgatgctggcaacatggatgacttcgaggagttccaggaatacgacgagttttag

SEQ ID NO: 1787 - DNA, 162 bp, Zea mays
  Peptide Sequence Number=SeqID_45162
atgcatcccacgggtgctaagacaactgatcaagccaaggaaggatgcaagaagagcttcgaggtaccgagtgcacgggagaaggtcaaagaggccaaggaacccaaagccaagggtgaagatgaagatgtaatgcccaaaattggtataagagaaagataa

SEQ ID NO: 1788 - DNA, 747 bp, Zea mays
  Peptide Sequence Number=SeqID_45163
atgcctcgcgtccttccaccttccgagcccccggatgggggcgcccgcggttcttccgtcttgtcgtcgttggaggaacgcaacttcgcggaatttgcttcaaggatcttcatcatccttgctggggcggagggtgggctgagccggagctctacctcccgcatggtcggctggccgcctcttcttccagcttctgggggtggaaaccatcctccagctctacggaggaggcgccctccagccatgccggggaaggcaaactgctgctgcccagtcagggtgcaacattccatcctctgtcctcgctttcgtggcgaggacgagagtgaggacctgccggtgcgctttggggcggccggcgctcgctggtgtggtgttggtggacaggtggacgccgccgtcggtgctgaggtggtggcagctggagaaagcttctccgccgtcgagaccgtcagcgccacctacggaccgacctccggctctttggctttaatatttggttctcgtcccttgagtggggacgcgaacgagagccaattggcggcagcgtccgtcctgggaccatcgctgctgctgcagaggtcgctggtgagtcaccaggagtttgtcgtcccacaggctctccgatgtggaggttgttcatacccgcgggagtggaactggagttccgtttgtaatggcaccttgagtgccggtgtttgttcattatggctgtcggggcctgaacatttatgtattttggcgtaa

SEQ ID NO: 1789 - DNA, 1077 bp, Zea mays
  Peptide Sequence Number=SeqID_45164
atgcaggcggcatgcaaccgcaccaagggggcgcaccctttcgactccgacgcgcccaacacgggggcccaggcccacacgtcatgtaaccggcgcgccggttactacgtgcgagaagatgcaccgccacttgcgccagtaccgcaccttctcgactgcggaaccagtgccgcgactcgaggcgaccctacgcatggcccaacagtgccaaccgagcacatcgatcacgggtcagtcagccgcgggagaaggcgcgacggtcaatatggccaaaagtgggccggcagtaatggcggcgacaggcgggcggaagcagcggtcaagtcgtctgcaggctcacgtcccctcctgggacagcgagagagccctctcccatggagcgaagacgacgcacccgtgttccgttccacgaatggctcgtgcacgcacaatggctgccccgcgaaccacacgtcctgtcgcattaactctgcggcagggcaggcggcacctttggcaggcgaagcagggaccggaaaaggggatactccgaaagggatccttctccgcgaaggaagcgggccccgagcccccctactgatcggaggttcgaaggctggcccctcggaagggttcgacagccgcctcagagcactcgggccccgagccctcctactgatcagaggttcgaaggctggcccctcggaagggttcgacagccgcctcagagcactcgagctccgcgcccaccactggtcagaggttcgaaggctggcccctcggatgggttcgacagccgcctcaggccactcgggctccgcgcccactactgatcaggggttcgtaggctggcccccgaagggttcgacagccgcctcagagcatgcagagcgagggatgactctgggtacgttcgatacacagccaatgctcgggctacgctcccgaggtaccctaggacatttccgagaccagcgggagcgactttgtaatggaatcccatcagagggaggcatcgagcccttgaaccctatcaaacgggaccgggtccggcaaatcacctacaagtacttttggagcgcgcctctgggccactag

SEQ ID NO: 1790 - DNA, 1671 bp, Zea mays
  Peptide Sequence Number=SeqID_45165
atggacccggacttctcgcccgggggcggggggcccagctttgaattcgccttcaacgaggtcaacttctccgaccgggaattgcgtatcgaggtcgtcgccggggatgactacgctccggggtccagcggcgccggtgccggaggaggtggcctcgccgactgggcgcgccaccgcaagcgccgccgtgaggagctcctcaaggagaaagttgagaagctacggggtaacgagaggggtgcaactcagaaaccatttgcagaatctacaactcacatgtcagaccaaacaaattgcaatgaagttgaagcagaagagtgtgatgcgtatgaagaaaatcaagaggaacctgtagcaatggtagaagaatctccacccgatgttggccaagatggtgatgatgggcaaggtattgattcgtcttggactgtggttggtacaccagttttacgagtcaagacaatttatatcagttcagcgattcttgctgcgaagagtcctttctttttcaagcttttctctaacggcatgaaagaatcggatcagagacatgcaacccttagaattactgactcagaggaaactgccctcatggagcttttaagctttatgtatagtggaaagttggcaactactgagcccactcttctgctggatatcttgatggctgccgacaaatttgaggttgtttcatgcatgaggtactgcagccagttgctcacaagcttgccgatgaccacagaatctgcacttctctacctagatctcccttgctcaatttcaatggcagcagcagttcaacctctgacagatgcagctaaggatttccttgctgtaaaatacaaggatttgactaagttccaagatgaagtgatgaacattcctcttgctggaattgaagccatcttgtcaagtaatgacctccaggtggcatctgaagataccatctatgacttcttgctcagatgggcccgtgcacaatacccgaaatcagaagagagacgtgagatccttagttctcggctgctccctcttgtgcgattcagtcacatgacatgtaggaagctgcggaaggtcctaacatgcacagatatagaccacgagcaggcaaccaagtgtgtcaccgaggctcttctgtacaaagctgatgcaccacaccggcaacgagctcttgcagcggacacaacaacctgtcggaaattcgctgagcgggcttacaagtacagaccactcaaggtcgttgagtttgatcggccctatccacagtgcatagcatacttggatctcaagcgcgaggagtgctctcgactctttcctgcaggccggatatactcgcaagcgttccacctcgcagggcagggcttcttcctctcagctcactgtaacatggagcagcaaagcaccttctactgctttggcctgttcctggggatgcaagagaagggctcaacgagcgtgaccgtggactatgagtttgctgcaaggacgagaccatccggcgagtttgtgagcaagtataagggtaactacacatttaccggtgggaaggcagttgggtacaggaatctctttggaatcccgtggcaggcgttcatggccgatgacagcctcttcttcatcgacgggatgctgcatctgagagctgagcttacgataaagcaacctacgtag

SEQ ID NO: 1791 - DNA, 577 bp, Zea mays
  Peptide Sequence Number=SeqID_45166
atggaggggctgtaccacaaagtcagctctggtgtcacggagcacgatgcggccattggcactattgagctttttcaactgcagttgaacttcaacttcaactggggtgtaggcaagttcaaccggggtccaggcagattcaaccggggtccaggcaggttcaactggggtccagagaggttcaacagggatgttgatcctagggcaatagatcttgccatgagaatcactgaaaggatgttcctcaaaatgaaggaagatgaggcgaagaacaagattgaagaagaaaatgatcgatggagaccaaacgatgaatccacctcttcacaaggttcgtctttcaaatccacttctcatatgtgctttgtcgctaatgggagtgatagtgaaagcgaaagtgaggatgaggaggagcatgaaagtggtagtaaagatgaggacgatcttcaacaattcttcgctcaactaagcaagaaaaattggatgagcttgctcaaactcgataatcatgataacatggtgaagaagattgagaaggggacaaccgcagcatgcacaaaaccccttcaaaagaatg

SEQ ID NO: 1792 - DNA, 2030 bp, Zea mays
  Peptide Sequence Number=SeqID_45167
atggggggactgggggtctccgatagctttgctatggagttgattgggacatgcgcggcccccgggggaaggatgtcttcgcccgagctccgggagtcttcggcacggatgctgaaggttaccgggggttggtggcctaagaacgttccgatcccccgcgcggccggcgaagactcttttacatctcgcatggctcgcgacttgagagtgtttccttatggccgaaatattgctactgttgtgtcggcagtgatggacaaggatcgtcagggagctgcgcagaagcgccaggcggtcatcaggctgcctgaggctaggccgaagaggtcgcggggggcgacgaaggctgctgccgccggcggcagccagccgacgctggcggcaaagtcggccgcccctgggtccagcaaggtgccggaggccgtgaaggcggccgatgctggcagaaccaagactgccccggccgaatccgcgaaggcccgagaattgcctccaccgggcaagcgcgttgccgacttcgccaccgatattagcgtggacgattatctcgttgggtcggacgaggggcaacttgttgttgttccgcctgcggtggcgaccgctgcggctgccgtggtgcctagggcgaagggtagtgctctcagtgctggtgccgagattccggcgctcactgccgtcagggatgaggtgggcgctgtgtcctgccggctgaaggaggcattaagtcaggcggttgacttcgcagaccgcgtggcgtcgggggaccttacggcagttgtgtctgccaaagtcgagagacttcggacgcaacatgctgacaccgtccgggaaaagtcggccgccgtcagtaagtgtcgcaagttgtcggataaggtggccgcgctggagggcgagaggactgacctccggcgccaactagcggacgagagaagggaggctactgaggccctcgccaaggcgcagtctgcgcaggcggaggccaatttggctctggcggaggaccgagagcccagacttcgctgcctcgagtggctgcaggaggagctgctggcgctccccgccattgtggaggggtttatgtcctatgcctccctggtcacctacgaaggggcgatgaacgcgctgtcccgcgaagggtgccggcactatgaggtcttcgaccaaggtgatgaggatttcgagcgcgagatctacaaggttgaggaccctgtggtgaaggaatccgcgggagccctcttcgaccggatgtggggcccccacggtagggaggtggtccgggagcggtccgagatggcgaggggtcaggcggcgcgtaacgagaaggtggaggacttcggggctttgaacagcgtgcggcctgaggcggagtcggacccggtggtggctgggcccgaggtcgcttcggcgccgcccccagaaactgtcgaaggctccctcgctgcccccgcggccactgcggacggtggtggcacgtcgccaaccgctcggccgagggctgaggatcccccgaagacggtgacgaagctggcagcggaggatccttcggcggctgggtcttcgcaggttcaagattttgggcctacgcacgcaaccgctacgactaattttttggcggcttcgaccgtggatgatgggaatgaatgggatgaatctgcgtctaagttttctgattttggtgactctgggagttcggttgagtggactgaagagtcgtcggatgaggacttggattactttgcggccttggatgtggcggcagcggaggcttcgccgcgtgctgtggatgctgaagttgtgcctggtccaagtgctgggcgtaggcggcgaagggcggttgcgaagcgtagagtgagtgaggcggacggcggtcggcttcgtgtgggcggggctggcaggcaggagctgttgtccttgccggccgttgcgagtgtaggtgagggggagctgcgaagtctttttgagggtgaggagctgaggatgatgctgtttaattatagggagatgggaatcattccgaaggctgaaccgat

SEQ ID NO: 1793 - DNA, 318 bp, Zea mays
  Peptide Sequence Number=SeqID_45168
atgacgacataccgacttgacgctctcaacagatcgacaacgacattccaatggcagtgcccgtgcatagggatgatccaaaggctacaccccagggggttcaaattgatcgaaagcgtagagttggctcctctcaaggagctgatcgatcccctgacaggtcgtccgaccccatccggcaacggcaacattggctcctcctattctgtgttctacgacttgtatggcaacagcaacggcaacggcaattcactcccgtggtcgtgcccgctgtctccaccagttcgtcgctgccggggcctgcctgctagcccctag

SEQ ID NO: 1794 - DNA, 444 bp, Zea mays
  Peptide Sequence Number=SeqID_45169
atgggtgtgggcaagggacggcttggcaagaacaacaagcgcaagcgtgagccaactcctccatcggaggagtttggtgactcggagtacttagaggaggagttctcctctgagtctgaggggtctccagctcccatccccctgcgtgaagacgactcccaggggctcgcggcggaggtctatacgtacatccgggccgtcgagcgctccgggctcgaaggctcggatgagtcggagtactcctcggatgaggaggactcggacggcggtggcgaggacgaggacgacgacgacgacgacgtcggcggtggcgacggtgacggcagtggcaagggcggcggcggcggcagcaaggacggtgacggtggcggcagcaggggcagcaaccggggcggcagcagtaggggcagcaccaggggcggcagcatgcagcggcagcaatag

SEQ ID NO: 1795 - DNA, 474 bp, Zea mays
  Peptide Sequence Number=SeqID_45170
atgacgctcatcatcaagagctttcgccaaatcctcaagcaaaggagggggaaagactacaagtcccgctccaagaagcgtggtcggtccgagcccgaggtcgggcgaggcggtgactcctccgaggtcgaggctgagtccgagacctggggtcgggcgaggcggagaccgtcttccggaatcgaggtcgagtccgagccctggggtcgggcgaggcggagatcgtcgtccgaggtcgaggttgagtccgagccctggggttgggcgaggcggagttcgtcgtcccaggtcgaggtcgagttcgagccctggggtcgggcgaggcggagtccgtcgtctgaggtcgaggtcgagtccgagccctggggtcgggcgaggcggagtccgtcgtccgaggtcaaggttcagtccgagccctggggtcgggcgaggcggagaccgtcttccgaggtcgagactagggctgagccctag

SEQ ID NO: 1796 - DNA, 528 bp, Zea mays
  Peptide Sequence Number=SeqID_45171
atgaccgcgtcaaaaaaggtgtgccacgtcgttcaatttcgtatccttttcctcttcccctttctctctcttgttaccgggaccgggaaaggggatactccgaaagggatccttctccgcgaaggaagcgggccccgagccctcctactgatcagaggtttgaaggctggcccctcggaagggttcgacaaccgcctcagagcactcgagctccgcgcccactactggtcagagcaactcactggagacaccatgttcggcgccctccaagggcaacatggcactttcccccctcctccttgtggaaaggcgacgaaggggcgtatgataaaagccgagtcagtccttgaccgtcctctcgctctgtgcggaggctcaggggctgctctcgcaaacccagctccggccaaaccgttgacagcgtcaacataccagcccgagaacttggaacctgactatgcacccgggcaacgaccagttcgcatgagggaacaaccagaccggccgaggcatcacgaaaggcattaa

SEQ ID NO: 1797 - DNA, 243 bp, Zea mays
  Peptide Sequence Number=SeqID_45172
atggacaagatttacaggttcgggccgcttagaagcccacgaaagaatgaccttacgaattattgggcccttgggcctttcgtgaggccttttacttctttagtggacccaggggatatctatcccccacaagcccccgatctttgggttgatttagagaggtcggtattttggattgtaagattctggacttcattgggtgcaccggaggtgcacccaatgggtgtagcccccgacctttga

SEQ ID NO: 1798 - DNA, 375 bp, Zea mays
  Peptide Sequence Number=SeqID_45173
atgagcacaactcgcttcaccgaccccgccctcgtctaccaccgccatgaacacaccactccctcgccacccactgacccgggcctgtcgacgagcgtggctcgcttcgtcgaccccactgtcatctatcaccgcagcgatctagccatgcccgcggctcccaacgtccccgcggcccatttcgagccgcttgtgtacacccgatcgtcatccacggcgacctcgggcacgtccacccgattccaagagtcatcggtactcaccatgtcgcgcgcgttcgacgactactatatcaaggattgtggcgtcatctcggcgccggaggtgacgctgaagaggatcgacaacaatgaccactcgccatcgtcggggtag

SEQ ID NO: 1799 - DNA, 585 bp, Zea mays
  Peptide Sequence Number=SeqID_45174
atgggtggagccgctacccccacggccgcccttgcgggggcgacgatctccatcatcggtggaagccagacgaggagtcgtaggtaccacgagaggagggctggcagggccccggtcgacggaggacgaggggcctacccccccgggtgcctggccgccgagaagagcgctgtagagggtcggggccgaagcggatgcctcagtcaccatggtgagctcctcgaggagaagatcattccgcacgacatggaaggtggggaagggcacgatcctcttgatgatagccttcaggtggccgtagcgggggctaggtccatgcagaaggttcaacaccaaagtacggtcgatgaccgtctcgccgaggtcacgaagggagttcgccatgcccttcatatggcgacagtattccccaatacagagatccccctaagagaactagtggaactaggtgtcgaggtggagggctcgagcatctcggttcctgaggaactgttcctcgagggcgagccatgcctatcggcccatgtccgcctgatcgcgaatgatgtcttgtacctcgacggtgatggtgtcatggagccatga

SEQ ID NO: 1800 - DNA, 675 bp, Zea mays
  Peptide Sequence Number=SeqID_45175
atgggtcggcgcgagacggaacacaagggggaaacaagcgtgacatttaagcgttgcacgggcgagcgagcgaacgagcgagttgctagccgcacgctacgccgtgctggggactttggccgtgaaccgcgctgcgcgctacgggcagccacgccgggcagggagccgcggcacacagggccaccgcgagcggcaacgcacgcgtgctacgagcaggccgtgcagggtcgccgcgagcagccatgctgtgagcagccgcgctgcgcactgcgagccgcgccggggcagcgggcgggcatgccacgccacgcgaggggtggggctgcgctgcgtgcaagccagcaggggcgtgccgggggcaggggaccgcgccgcgggtgcgaggaaactgcgcacgcaggccgagccgggcacgccgaaagtagggcgcacgagcagccgcgggcgggctgccgagccgatcgcgccgggcagccgcgagcgggctacgccaggcgtccgcgcgagggcgtccgcgagcagccggccgcgccatgccgcgaacgtgaaaaagatgcgcacgtagggagccgtgcgccgtgccgggacgggaacgccagggatcgcgcgctaaagacgctaagggagggaaggagaaaggaggatggggggctttacctcgacggtcgctggtga

SEQ ID NO: 1801 - DNA, 726 bp, Zea mays
  Peptide Sequence Number=SeqID_45176
atgcgccatatacccgaaccccctagcccacacacgcccgtgaaacctcgagagtcggctctgataccacttgtaacaccccgtccaatccctggaccggcggtacttactcctggcagctctctaggatcatatattgtccctaaagaccaacacaagtcttttgtgcgcactttgtcctcactcatgcgcacccgagaaaacttcccggtcggtcacccatcccaaattgctccaagccaagcacgcttaacttggaggttctttcgagataggcttccgaaaaagaagatgcaccttgttgccttgggccaggacatcccatcccaggggtcaggatatcacactgcacggcgtgcgctttcgcactactgctcagtgctcggtggggtagctgacagtctcaacctgaagtattaccctcgccgtccatctggcagcacaggaggcgtgattgtctcacctgttggtgaggacaatcctaggttgagcagcacagtcaatctagccactgtgctaaacacagagctggaccatgcattagacgagctgagtagggctcgtgctgaaatcgcccagctgcgggctgaccgcgcggagcgtcgtcacctggatgatggttcccccgctcccgtcgggactcagcacccgtaccgctcacctcggcatggacaccagtcttatggcaatcccgactgcaagaccaagatagatttagagccatag

SEQ ID NO: 1802 - DNA, 1902 bp, Zea mays
  Peptide Sequence Number=SeqID_45177
atgtcgtcctcttcttctgctgccgctacgacgccggctgacgcgtcgtctgaggggatgctgagcaatgtggcggtggaggagttgcgcgccggcgacacggtggatttcagcgcatcacggatgtcctcggttcacgtgcaagacatgcagcagcttggttattttggcggcggagtggcacgtgtcccggggggcggaagaggtccccgagccagaaggcgagttggttgtcttcgaggcgttcttcgccgctggtcttcgtctgcccgcacatcgattcatgggagaagtcctgcgcagattcaacgtcaaggtccaccagctgacgccgaatgccgtggtggccctgtcaaaatatgtatgggcaacgacttcgtacggcgggcagccatcgtcaaagtcttcgtgaagtattattgtctgcattggcagaaaaggatgatcggaaataagattgctcaatttgggtcctgtacatttacgctgaagaccggcaagacttcgatggaggtcgttgagttggttccttgcgcccgcaataaatggggcaactggtatgagttttggttctacgttgccgagggcacggtcgaagaccatccggggctccccgtggccgagatgtgctcgcattattactcagcatacccacagtttgaagtggcggaggaggatgcagacaaaggggccctacggtgcgcagccggcctgagtagcgggcgcgatttggttgaggagtttgtcgcgtatggggtgtggcccttggcgcgtggctgggcgctgggcgaagtatgtcctcgccagatgccttcccgtggtgggatgctggtgcgaagtcccgccttcgcactggatttgcatagccgcgatcccgccgcattcgtgcgtgaggcggaggatggggcggtgtggattgttggtcggtacgtgccgaagacggagggccagcgtagttgggatatacgcgggtccaacgatcgcttgaacagggtcttcgagttgaaccgtctgccatatggcggttatcccgggcaagacgatgtcgaccatcgcgggaagaaaccgacggtagagactagagacgaccccgcgccggcggccgccccatcctctaagaagaggaagctaggtactgctacgggaggactgggagtctccgatagttttgctatggagttgatggggacgtgcgcggcccccgggggaaggatgtcttcgcccgagctccgggagtcttcggcgcggatgctgaaggttaccgggggttggtggcctaagaacgttcctatcccccgcgcggccggcgaagacttttttacatctcgcatggttcgtgacttgagagtgtttccttatggacggaatattgctgctgttgtgtcggcactgatggataaggatcgtcaggaagctgcgcaaaagcgccgggcggtcatcaggctgcccgaggctaggccgaagagggcacgggggaccgcgaaggctgccgccctcggcggatcgggcgaggggcaacttgttgttgttccgcctgcggtggcgacaacagtgtctgccacagtgccgggggcgaagggtggcgctctcagcgctggtggtgagattaaggcgctcgctgccgtcaaggacgaggcgggcgctgtgtcctgccggccgaaggaggcttcgcagcggctaagtcaggcggctgacttcgctgactgcgtggcgtcgggggcccttacggcagttgtgtctgccgaagtcgagagactttgggcgcagcatgctgaggccatccgggaaaagtcggccgccgatagcaagtgccgcaaactagcggataaggtggccgcgctggagggcgagaggactgagctccggcgccagctggcggaggagaggagagaagctaattag

SEQ ID NO: 1803 - DNA, 708 bp, Zea mays
  Peptide Sequence Number=SeqID_45178
atggagcgctcggaggagccagagccgaaggggtggatcgctagacccatcactcatgacgctgccctcgggtgtcacttccacaatgctttcgataccttgttgcgtcaggccttcgaccgacacacttggtctatcgagtatcgttgtgtagtctaccagcgtcgtcgtgggttatacccagaccagtgggaggctacttgcttggtgcgttgtccgattgatgatctccggggcgcagaggccttctcagagcactattctatcactgagagggacactgccaaggcagtcatgcaagatgtagcacgacgggcactttctcagtattgcttgttgttcaccggggtagctgacagccttgacctgaagtactaccctcgccatttgaccgacagcgctggaggtgtgattgtctcgcttgttggtgagggcaatcccaggctgagcagcatggtcaacctggccgccgtgctcaacacagagttggaccacgcccttgacgagttgggcaaggttcgagcggaggttgcggaattgcgtgctgagtgcgctgcacgccactatcttgatggtggttctcccgcccctgtcaggattcagcaccattaccgttcatcgccccatggtcgcttcgactatggtacccccatactgcaggacccgaatagatttagatccatagatcgatggagtcagagtctgtaa

SEQ ID NO: 1804 - DNA, 108 bp, Zea mays
  Peptide Sequence Number=SeqID_45179
atggggaggctagaaccccgggcagaatgggaatcacggcttgtgggtaaaagtgaagctggcaacatggaggactttgaggagttccaagactacgacgagttctag

SEQ ID NO: 1805 - DNA, 405 bp, Zea mays
  Peptide Sequence Number=SeqID_45180
atggactacgctgcaccaacaagagtcgcgctggaagctggctccgggctacctcaccagcggcggcgaccacctctgcatcgacggatcgccggcgatagcgaccacctctgcatcagcagcgacaacgaccttcgctccgggcggtacgccagcagcagtgaccacctcagggtgagcgccgttgtgaaaggtcctcgccctcgtcctcctacggggggcgacaacgaggccattaaagccaaagagtcagggactcagcggcaggtggccctgatggtcccggcagcagaggcaacaacctctgcaaagggcagactcaccagtggcagccaccacctcagcaccgacgaccacgaccacctccgcacaagaggtcctcgctcccgtcctcccacggagtga

SEQ ID NO: 1806 - DNA, 81 bp, Zea mays
  Peptide Sequence Number=SeqID_45181
atggtgcccctaggagatcccattgacccaggatcatcctatattttctccttcgacgcgatgcaggagttccacaactag

SEQ ID NO: 1807 - DNA, 594 bp, Zea mays
  Peptide Sequence Number=SeqID_45182
atgcggtggggtctggcgccgtcctccgcgtggcctggggacgttgcacgggtgcagcgtctttatgctgtagaagaggttgctgccggcccacctatggtcacgccgacggccatgcccgttttcacggttgaccacctcgtgactctcgtcagtcagcctgacacgtggggcctggcccccgtgtcatatggtaggaaccttggaatggggtgcgccggtgttttctggagaggtccgcgtcagggccacccctccggcgacctcgccgccggagagcccacgccggtggcggtgccggcggtcttgccttcttcttgctgctgtttagaggagcgcaacctcgaggagaaggatgactaccagccttgtggtggggagaagcaagccgggctgcggcctccctcctgccatcagcttcaaggatgttcatcatcctcgctggagcggaaggcgcgtcaagccagggttctacctcccacatgggccagcggcccgcttctccctccagcatttgggggaggtgaggggttcaccagccacgcgaaggaggcgaacttcggctacgcgaggccagccaggtgcaggcgctga

SEQ ID NO: 1808 - DNA, 801 bp, Zea mays
  Peptide Sequence Number=SeqID_45183
atgccgtcttcttcttcatccgctgcgaatacgccaccgggcaaatcgtcgtctgaggaaaccatgagcgatttggcggcagagctggacccgggccacatggtggagttcggcgtttcgtggatctcctcggttcgcgtgcaggacatgcaacagctagggtattttgggaacagagttggacgagttccgggggcggaggagattccggagtcggaggtgttggagaaggatcgtcaagacgctgcccagaagcgccaggcgatcgtcaggatcagggatcctttccgcgaggcaaagaaggcgcgggcagccgcgaagtctgccgcctcgggcagtagtaagccattgctggctgcgaagccggccgcccccgggcccagcaaggcatcgactggtgcaaaggctgctgcttctggcgcgggcaatccaccctcaggcgggctcgcgaagggacgaaggctgccttcgccggcgcgaacagacagggaaacaacgcgtgttgccgacttcgacacggacatttgtgtcggggattattttcttgggttgaatggggggcagctggctgttgtcccgcctccggtggcggccacttcgccaacggcggtggttggggcgaagggtgccacgcgggactcgtgggccaccttctgcgcgaggggcgagattctgtcggccgctgccactagggacgtggtgggctccatgtcccagcaactgaggcaagcgtcgcagcagctgtcgcagcagctgaagcaggtatcatgggtttatgtatcaggcggccgacttcgttga

SEQ ID NO: 1809 - DNA, 549 bp, Zea mays
  Peptide Sequence Number=SeqID_45184
atgacagatgggccagagtggtcagcggcctggggtgagggcaggctgatcggtgggacccagggacaagggcgcgcgctcaaaccggcgacgcgtctaactatctcggagtgcgtgcgcgggcgggtcagtggcggttgcggggaggacagagctgacaagcagggcccacggcgtagaggaacgggcgcctgcggggggaaacagttcagcgctgacgagccaggcccactgtgcaaacagatagcgaagcacgcgcgcgagagcaagcggcgccgacaggttgggcccgcctggcaaagggagagagagggcggggtcttggtacatcttctcgctgccatggtgtatggaataagctgtttcatgggcttccttgagaatcagctcccgaatcaacttgatgttgggaacacacaacctatctttgaaccatactacgccttccgcgtcttcccgaaagtctttgccttttttgtgcagaatcagctgtcaaatctcattgatcttctcatcatttttctgcccatccttgatatctcgttctag

SEQ ID NO: 1810 - DNA, 2952 bp, Zea mays
  Peptide Sequence Number=SeqID_45185
atggtctgcgagggtggcgcaacccatgccggccagggggacacccgtttgggaccgggcgcccactggtgtctgcggtgcctccgcggcgaaatctcggtcgagattgcgaccctcaatattctaacggcgctcacgcgccctttccaaagagactcgggcgtcttctcccacagcgccgtcggtgctgccctcgacggagtccgggacgcctgcgctgatctgcgcgtccttcggcgtgctgggaagcttcttgtagaagggataacacagtgcgctgcctggcacgggcgcactgttcgccagcagacccagcaggcgcgtcgcctgctggatgaccttgacaccgcctgccagcgggtgggacgggacacattaaatgctgagagggcacgtcgcccgtcagcacagtggcaggcggcgcgtcctctcctcaataaatgcaggggctgcacggctttacgtcaggctcggcctgatggcttatgtcgtgggccacaagcagcgggtctccgcctgaggagaagtgaagggcaaggcctggacacaggtccggtgtccttctgtgaaggtccagatcccacgatacatactgggatgtgttgtctttccttgccacgtgcgccctttggtctgctcatgcggtggggtctggcgccgtcctccgcgtggcctggggacgttgcacgggtgcggcgtctttatgctatagaagagggtacccctgatttaggtgagaccgagagcgcagcgcagatgggggatgcttcaagttttctcctcttggagaggccgcggccggccgggcggctcggccaactggaccccgctcgtcgctgtccgacccacatcagcaactcgccgaacgcaggcacaagaggttccatccatgaggcaaccatgctcgtgctcatcaacagatatttcaggagcaggaacagcccggcaggaggcggggacgagatggcgccggcggaccgcgaccacctgtgcctgcctggctgcgtgcccgtgcgcgccaagcgggccgcctccacggcggcggccacggtcaccaccacagcgagggcgtcgcggcacaacttcgtcaaggccgcggcgtcgggcctgctcgcgggggcgcactttaccaaccacgagtcgctgccgccgctgccggacgcctacgccgagttcgtcgcggcgttcccgcagtacgcccatggcgcgcttgcgcgggccgacgccatccggggcgaggagtaccagcacctggaccgccacgtgtgcctggactacaccggcatcaacctcttctcgcacgcccagatgaactcctccctgccatccacctcctccgcgccgccgccctcgtccgcctggcagccgcccttcttcgacatcgcgtacaagtccacgagcctgcgcacgcaggtgcaatgcggggacgccgcggcgggcggcatcggcgccgccgtcaccaggcgcatcatggcgtcgctcaagatccccgaggaggagtacgccatggtgtgcaccgccaacaggaccaccgcgtttcggctcctcgcggagtcctactcgttccagcccggcaagcagctgctccccgtgtacgactacgagagcgaggccgtgggcgccatggccgacagcgcgcgccgccggggcgccgaggtcacgtccgcgagcttcgcctggccgagcatgaggatccacggaaccgacctccgcaagaggctggccaggggctgccgccgtggcgcgggccgcgggctcttcgtcttcccgctcgcctcccgcatgacgggcgcccggtacccgtacctgtggatgagcgcggcgcacgagcagggctggcacgtcgcgctggacgcctgcgcgctcggcaccaaggacctcgacaccttcggactctccctcatccgccccgacttcatcgtctgcaacttcttcaaggtgttcggcgagaacccttccggcttcgcggggctcttcatcaagaagtccagcctcgccgcgctcgagcgctccgtgatcgcgcgcagcatcggcatcgtcagcatcgtgcccgcccgccgctggtcgctgcacgacggctactccaccgagctggagcactcgcggagcttccccaagctcgccgacccagccctggacgacggcgacgtcgagaccacgagctccttctccggcccgctcagctccaccgccgtcacccgcagcaggaccctgcagtctgacgcagcggagaacggcgacgccgatgccccggagatccgcgaggtcgacatcacgccagagaacggcttctacacgggggaacccagagcagagaacggacacgagacagagcagctggccaaggaggaggaagacaggcaggggggagagagcgtgatggaggtggagtgccggggactggaccacgctgacgcgctggggctcatcgccatcggcaaccggctccggtgcatcaccaactggctgctggtggccctgcagaagctgcggcacccgcacgccgacaacgggcaccaactggtgaagctgtacggcccgcgcgtcaaattcgaccggggcccgtcgctggcgttcaacgtgttcgactggaagggtgagcgggtgtcgccaatgctggtgcagaagctcgccgaccgtcacaacatctccctcacctgcggcttcctgtgcaacatctggttctcagacaagtacgaggccgagagaggcaccgtcctggagcacaggatcgccggcaattccgtttctgtgggcgccagagggaagaagagaaaggacgccggcggcgacgtggggattctcgtggtgaatgcgtcactgggtttcctcagcaacttcgaggacgcctacaggctgtgggcgtttgtggccaagttcctggacgccgactttgtggagaaggagaggtggaggtacaccgcgctgaaccagaagacggtcgaggtgtag

SEQ ID NO: 1811 - DNA, 480 bp, Zea mays
  Peptide Sequence Number=SeqID_45186
atggagccagatacagctaatgaggcgccacccttggtgctcatgaactactttggcccagttgagagctcccatcttctccaagctgcacaaatattggaacttaagcagaacatcgggatgtcgaagagcactgaaatcgcagataaagcaatcatcttgatgcaggatcatgccaagcatatctatcatatatgcaatgagaagctaatattgggtaaagggttgacttcatttgaggttaaagaacttcgtgaagcacttgaattcgccgccgaaggattggaccaggactcccttttttgccaagaggaattggatgcaactgttaaagaggaacaattggagcatgacgagaaggtggctttacagaggattgaaagcccactaccttctcctgattcggactgcttcctatcccttgaagagcacattgagaagttttggggcgttgattatcaactcagaccagatgcctag

SEQ ID NO: 1812 - DNA, 954 bp, Zea mays
  Peptide Sequence Number=SeqID_45187
atggagttccccaaggagttgacacagcaggcggtggtgtggcataaacaggccaaggcacaacaagaggccgagaagcagacattgtctcaacactcagcagtagtcggtggtgaccagtcatgtattgatatcctgcgctgcttccttggtaacgcgcgagccatgatgagtacagtgtacgccacagcacagcgccgcgcggcccagaggccttatgtcaggctccgcccgctggctcacgtcacgggcagtaggccacgtggcagcatcgggtctccgcctgggcagggagcagaagcgtacatggaaccagtgcccaaggaggatggctcgtgggcccgagcccccgtgtcagagactgagccgttggttttggcggaggtgaagaggcgcactaccgcaggcggcggccctctcctcacgcggcggttcgccttcttcgtacccggagaccgacgcccaaggaatgaagaggcgcggcggtgcgctcctcgcgtggcggttcgccttcttggcacacggaggccgacgcccaaggagtatgactcgtggacccgggcccccgtgtcagaggctgggtcgctgctttcggcggagatgaagaggcgcggcgaggctgggtcgctgctttcggcggagatgaagaagcgcggcggttcgctcctcgcgtggcggttcgccttcttcgcacacggaggccgatgcccaaggactgccatggccttgctagacccttccgagtgcttccagtccgaggtggcactcaacttggtgcgcaacctgctcggatggggtgcgccagcgttcgccggaaggatccgtgtccgtgcctctcccgtcggcgatctcgtcgccggggagttcgtgctcttcgtctccaacttcccctgcgggttggcgttgtcgatttcgtccttctttgtgctgctgctggaggagctcggcctctag

SEQ ID NO: 1813 - DNA, 870 bp, Zea mays
  Peptide Sequence Number=SeqID_45188
atggggcggctgcagcccgcgtgctacggatggggcggagggcggtgtggggaacacgggcagaggttggcgagggccggtggtgagcgcgtgtcgaggcgagggcgcgagaatggcggatcaacacgatctcggggatcggcgggcgcggcggacgagattgatgaaggagcacgggggagaggtcgatcaacagtggagtgtggatttcgggaatcgggtggatcgcacagaccggctttcatggagatcgtgggcgagtcggggagcaaggaatactcactgatcctcgtccaaaccttcagatctcctgcccccaacgaacagaacgggatcaaaagaagcagaaatgcgggtattgtacctggcggggccaatggtggcggagtcggaggcacgggggaagaggccggcggggtagagaaacgcgcacaggcagccgagtgcgacgccgaccagtactgccgcggcgatgcaggacccccgagacagcgggcgtggacatgtgggggggagggcgagggcggagccatcgatgccgcggcgagattagcggggatgggggggcgaagacggggccgcgtgcgcggtgtgagacaaatgacggcttggtggcgttgggagctcggtgatcaccgtgaagatcttgttggtgacccgactcaagtttgtaagcggtctcgagggatccaccgcgccggagtggcaaaggatcatctcgtagtgagcacttggttcttgcgaggaccaagggggagcgatacccttgcgcgggtgctccaacgaggactagtggagagtgccgactcttcgatacctcgagaaaaattggaggagtcttctaaaccttactttacattccgcacttaa

SEQ ID NO: 1814 - DNA, 1077 bp, Zea mays
  Peptide Sequence Number=SeqID_45189
atgtactaccacaccaggccagaggatagatttgatgcacatgcagccatcggcgatgatgaagcacgtgccttgatgatagtaacagctcttagatcctgtcagggaaccatttctgagcttgtacgtcattctaaggagttgatcaaccttgcagccgtggagttggaaaaaacaaagtctctacgagaacagatgatggagatcattgctatagctggttatataactgatgcgaagatgcatattgctcgagactatctagaaaagaatacaagacaggcttgtggcattaaggctgatcagttagataacttgaggtggaggccaagaaagaggagtagaagatctggctcaagaaagcagtcagatacaagcagtggaagcagcagcggggacatggacttgtccagccctggccctagtgggttttgtcaacttaatttagtgcccgacgaggagacatgcaagagcagtggagagcagccttttatgggcgtgcctgtgcagtctcgtagcagtgtcatgacgtacataaagttatcctctactgatcttcaattaaaatgtcagttgcagcagtacgtgaagtgtcccaataggccagtgcacttgctttttgtttctggttccacgttattacgattgcgcacggttgctcaagtccaacacaatgaaggtggagtgcttgtcgggcagtccaccgatgggcaccagttgtgtgtcaaaagtgccatggacgtccccgtatcacattttatggaggtttatgaaattgctgaaaacagcgagaccatccgtgctgaagtttgcacagattttggtcccaactttggtgagattgcaaatgcctttggtgtttgcctcggccctttgattgcaatagtgtccattgtcgaatcaaatcatattcttaatgaagtgagtaccgacatccttccttcccacaattatgtcaccccaataattacaatagctggtggaagtgttgccaacacaatccgtgggctctcagctggttttggaatatcaactggggactattgtttgtcaacaatacgagctttagtggtgtag

SEQ ID NO: 1815 - DNA, 738 bp, Zea mays
  Peptide Sequence Number=SeqID_45190
atgcatgaggggagcgcaaagacatggttgcctttcaagggggtcaccctccttttaaaaggcaactctccccacttgcatcctcagccatcacggactgagtcttctccaacacgctccaaggtcctccccctacgacacgggggctgggtcccacgcgtcatgcaagctggcccagggcagaaaaaagccaaaccgcctcgcgcgatgcgcgcaactgcccagcggttacgagcatttctccactttcgcccagaccagcgggtgaaagggtggaccgccatgcaggcggcatgcaactgcaccaagggggcgcacccttttgacatcgacgcgtccagcatggaggcccaggcccacacgtcatgtaaccggcgcgccggttgctacgtgcaagaaactgcaccgccacttgcgccagtaccgcgccctctcgactgcggaaccgatactgcgactcgaggcgaccctgcgcatgacccgacagtgccaaccgagcacatcggtcatggggaccaggaaaggggataccccgaaagggatccttctccgcgaaggaaacgggccctgagcccccctactgatcagaggttcgaaggctggcccctcggaagggttcaacagccgcctcagagcactcgggctccgtgcccactactggtcagaggttcgaaggctggccccttggaagggttcaacggccgcctcaggccactcgggctccgcgcccactactga

SEQ ID NO: 1816 - DNA, 786 bp, Zea mays
  Peptide Sequence Number=SeqID_45191
atggcagccagagagccctgggtcgggcgaggcggtggctcctccgaggtcgaggtcgagtctgtcttccaaagtcgaggtcgagtccgagccccgggtcgggcgaggcggagaccatcgtctgaggacaagctgagtctgagccccgggggtcgggcgaggcagagttcgtcgtctttcggagccgaggctgagttcgagccctggggtcgagcgaggcggagtttgttgtcttccggaaccgaggctgagttcgagccctggggtcgggcgaggcggagttcgtcgtcttccggagccgaggctgagtccgagccctggggtcgggcgaggcggagttcgtcgtctttcggagccgaggccgagtccgggggccgagccctagggtcgggcgaggcggagcttcctatggcgcccgaagccgaacttggctgctgtcagcctcactctgtcgagtggcacaacagtcggagcggcgcaggcggcgctgtcctcttgtcaggccggtcagtggagcggcaaagtgactgcggtcacttcggctttgtcgactggagggcgcgcgtcaggataaggtgtcaggccatccttgcattaaatgcttctgcgatacggtcggttggtgtggcgatctggccaaggttgcttcttggcgaagactgggcctcgggcgagccgaaggtgtgtccgttgcttgagggggccctcgggcgagacgtgaatcgtccggggtcggctgcccttgcccgaggctgggctcgggagaggcgagatcgtgtcccttga

SEQ ID NO: 1817 - DNA, 273 bp, Zea mays
  Peptide Sequence Number=SeqID_45192
atggccagggcacagcggctgcgggtggatgactacggggcccacttgccaatgactcagcacgagcacggaacgaactggctgtgtgaggccggggcgtgggcccaacggcgtagtggcagtgacagcgcgcccaaagcgggaagaggttgcacactttacccacaagtcgtgatccctttatgcctcgagtcgatcaaaccctcaaacactaccaaggtccttacggagaggtactcaggaaaatggcctgagccccctagagtatcataa

SEQ ID NO: 1818 - DNA, 546 bp, Zea mays
  Peptide Sequence Number=SeqID_45193
atggaccaggggagtatttgtaaaggctacgtagtgaaaccttaccgactcaccttggtagtgtttgagggtttgatcgacccgaggcataaagggatcatgacttgtagagcgtccactgcgtcacacggtgccaagtcagtccagtcacctggagagactgcatcgtcgcctgcacaaggagcaggagcactgacgccaggagcaggaccaggagcagcaggactcttcccctcgcctcagcaggaggtggagtctgggaggccaccttcccctgcacctcagccagagatgccccctgcaccaccacagggcatcccggctgctggaggagaccctgacggagacggcgacgacgacgccggtggcagttcgagccacgacacggagctctcggaggagccggagccaaaggggtggatctctagacccatcactcgcgacgccgctcgcgggtgtcacttccacgacgctctcgacaccttgcggtgtcgggccttcaaccgacacacttggtccatcgagtacctttgtgtagtctactag

SEQ ID NO: 1819 - DNA, 198 bp, Zea mays
  Peptide Sequence Number=SeqID_45194
atgtcgcgtgcgttcgacgactactatatcgaggattgtggcgtcatcttggcgctggaggtgacacagaggaggatcgacaacagtgaccagttcgtcaccctcgccaccgtcaggctatttcaccactacattgcaaccatcactaacatgaaaggctcgtgggtttctatatatcacataagtagatcttgttaa

SEQ ID NO: 1820 - DNA, 198 bp, Zea mays
  Peptide Sequence Number=SeqID_45195
atgtccttctgtcagactggccagtggagcggtggagtgacggcggtcacttcggctctgccgggggcgcgtgtcaggatgaaggtgtcaggccacctttgcgttaaatgcccccgcaatttgctttatgctgatgggggttaccagctgagaattaggcgtcttgagagtacccctaattatggtccccgacaataa

SEQ ID NO: 1821 - DNA, 605 bp, Zea mays
  Peptide Sequence Number=SeqID_45196
atggcccgacgccatgcgcgttgttgggattccgcgcccgcctccagcaatttcaggtcggatgcctccacagacggcatcgtggccatcaccggcgaatccatggagttgcccagacgcgcctgcgatgtggcctcgcccagcagcgccgttacctcgactcgccgcgccgacggatccaacaggcgcgccatgtccaaatgcgggtgcgagcgcgctgtggcctcgcccgtctgtgccgttgcgtcgactcgccgcgccgatggaagcgcccagggatccttcaggcgcgccatggccgagtgcgggtgcgggcgcgctttggcctcgcccggctgcgccgtggccgccagttgctgcgccggctactacgggcgcgatttggcctcgcccgtctgtgccgttgcgtcgactcgccgcgccgatggatgcgcccagggctccttcaggcgagccatggccgagtgcggatgcgggcgcgctttggcctcgcccggctgcgccgtggccgccagttgctgcgccggctcctacgggcgcgatttggcctcgcctggccgcgccatggtctctgtcgtccgcgccggcgatcccttgccggggtc

SEQ ID NO: 1822 - DNA, 123 bp, Zea mays
  Peptide Sequence Number=SeqID_45197
atgttttggattacaggtggtgacgaggatgatgtttatgactatggtaatggtaaagaaagagaagaaggcgtcaaggtggatctccaggagttccaggacgtcgatgcgttcgaggattag

SEQ ID NO: 1823 - DNA, 309 bp, Zea mays
  Peptide Sequence Number=SeqID_45198
atgtcgagtgtcggtgctttgggtccgaccgcacacccggggttgcccctcaaggtctggacttatatccgggccgtcgagcgctccgggctcgagggctcggatgagtcggagtactcctcgggcgaggaggactcttcggactcgttcgaggagggcggtggcggcgatggcggagatgacgacgacgacgacgacgaaggcgacggtgacgatgatggcggtgacggcggcagcaagggcggcaacggcggcagcagaggcggcaacggcggcagcagcaagggtagcaacagggccattggctag

SEQ ID NO: 1824 - DNA, 477 bp, Zea mays
  Peptide Sequence Number=SeqID_45199
atgactccggggttggtcccgctagcggacgacgtggccaagctccagccgccgccgctgcacctcgtcggcctgggaagccactgctcccaggccgacgaagccccctttcgagccaactccgcctctatccacgccgacaccgctgcctccggctccagctcatcgcagagcggacaaaggaaaacagcgccgctcacccgctccgactgccgtgccagccacccgggcaaggctgacaacagcaagttcagcctcgggcgcgacaggaagctccgcctcgcccgaccttgggcctcggcctcgggaggaggtattcgcctcgcccgaccccaagactcggcctcagcctcggcctcgggaggaatcacgtcctcgcccgaccccggcctcgacctcaggagaagtctccgcctctcccgaccttgggctcggaccgactgtgccacaggggatacatcattaccctacccctag

SEQ ID NO: 1825 - DNA, 78 bp, Zea mays
  Peptide Sequence Number=SeqID_45200
ggggcatcccacggccgcagcgatgccctctacaacgccccctacgcgtcggcctccttctctctcccccagatctag

SEQ ID NO: 1826 - DNA, 996 bp, Zea mays
  Peptide Sequence Number=SeqID_45201
atggctcgtcttagacacactgcacgtaagtcggtgattcctttcctgccgtctcgacttgcggagcgtcctctgcaccgcaccgtgtccggacagtcgagtcacctggagaggctgcaccaccgcctgcgtgaggagcaggaacgccagcgtcagcacggagagcagcagggctcttcctcctcaccccagcaggaggtggagaccgtgaggccccgttcctctgttgcccagctggaggcgccccttgttccaccgcgggacgtcccggctgttggaggagaccccgacgacgacgactcagaccacagcacggagtcctctgagccgcaggaggcggaaggatgggtcgcccgacccatcacccgtgacgccgctcgcggttgtcacttccacgacgcactcgacaccttgctgcgccaggctttcgaccggcacacctggtcgatcgagtatcgttgcgtagtctaccagcacagtcgcgggaggtacccggaccgctgggaggctacctgcctagttcgccgtccggaggatgacctccggggtgcggaggccgtttcggagcactattccatctccgagagggacactgcagaggcggctatgcaggatgcagcacgacgtgcactctctcagtactgttctttgttcggtggcgtggccgacggtcttaaccttcggtactacccccgccgccctactggcagcacagagagtgtggttgtttcacctgttggtgaggctaaccctaggttgagcagcacagtcaacctagtcgcagtgcttaacacggagctggatcactctctggacgagctaagcagggctcgaacggagattgcggagttgcgtgctgagctggcagagcgccatcaccaggagggtggttctcccgcacctgttgggactcagcacccataccgctcaccgccacgtggtcgccacacttatggttcccctgtctgtaagaccaggatagatttggatccttag

SEQ ID NO: 1827 - DNA, 618 bp, Zea mays
  Peptide Sequence Number=SeqID_45202
atggcgctcgtcgtcgtcctcgccgccctcctctgctccatctcggtcgccgctgcagccagcggcggcctttcttcgtacgtggtgtacctcggccagcacgcgcacggcgcggcgctgggcacgcacggcgccgaggagctgcaggcgctggagcgcgacgccgccgaggcgcactgcgacctcctcgccggcgtcttgggcggagacaagcagaaggcgcgggaggcgatcttctactcgtacacgaagcacatcaacggcttcgcagccaacctggacgccgccaccgccgccgagattgcggggaaacccggcgtgatctctgtgttccccaaccagggccgcaagctgcacacgacccggtcatggcagttcgtcggcctggccgggcccggcggcgtcccccacggcggggcgtggcggaaggccaagttcggcgccgacaccatcatcggcaacttcgacactggtgagctatcgtaccctgcgccgccattggctgttccctcctcgccgaggcggcagcaatcgttttcgaggcagcagttgggcgataagatgctgtgccctgcccgctatggccttgttcggtcttatgtcatattaattgattga

SEQ ID NO: 1828 - DNA, 423 bp, Zea mays
  Peptide Sequence Number=SeqID_45203
atggggctcggtgtatgcggctcgctctgccaaggtggtgatgaggaggatgattatgattatgcttatggtaatgctagtccacttcagccaaacgggacatttgctgagtacgttgatgtgtactcacccttgctttcacaaaaacaccaggttgcctttggtgcaatctatgctcagaagccgacctcatcagctctttcgagaggacctgcaaccattgcatccggtggaaggggttctcgtcccaggggcgctcttgatgaggttgacctctcgttacctttggaagagcgcactagggcgttacgtcaagaagtcaactacatggtggcacatttactccatcatcactctgagagcctgatgaatgcactcgaacgtgtggccgttcgcattgtccaaagagatcatgaagcataa

SEQ ID NO: 1829 - DNA, 378 bp, Zea mays
  Peptide Sequence Number=SeqID_45204
atggggacaagctggggtttgatgtttttaagtaagggtgagtacacatcaacaggttgcacactttacccacgagtcgtgatcccttcccagcctgggtttgcaaggccctatcttcactaccaaggtgccaaaggttcaacacaaaccagcaaaaagaacaagttaggcttcaaaagaaaggagcaaaaaggaaaccgaagtgttccctggtctggcgcaccggacagtgtccggtgcaccagggtgaatcaactcaaactcctcagcttcgggtttcccaggcgtagctccgctataattcaccggactgtccggtgcaccggcggagcaatggctatctgcgcgcaacggttgactctgatggaagaacagtga

SEQ ID NO: 1830 - DNA, 384 bp, Zea mays
  Peptide Sequence Number=SeqID_45205
atgaagggagcgtctctatgtgaaggtgaagtgattttattgtcaaagagcttaaagcttaaccttgtaacgagaataagctacctttgttccaaaggtggaggttccttaagtctctttgaaatccttaagggtgccaaaggttcaacacaaaccagcaaaaagaacaagttaggcttcaaaagaaaggagcaaaaaggaaaccgaagtgttccatggtctggcgcaccggacagtgtccggtgcaccagggtgaatcaactcaaactcctcagcttcgggtttcccaggcgtagctccgctataattcactggactgtccggtgcaccagcggagcaatggctatctgcgcgcaacggttgactctgatggatgaacagtga

SEQ ID NO: 1831 - DNA, 273 bp, Zea mays
  Peptide Sequence Number=SeqID_45206
atggcgtgcaaggtgaaagggatcttcaagggcctcaaggccttctcccagatcttttcggtgaaggagcacgagatggagatcggttgtccgactgacgtgaagcacgtcgtgcacattggctgggacagcgcggcgggcgatgaacgacatcatggcgtcctcagacttgtcgtccctgggcaacttcgcagcgctcactggtacctcctgggtttctcaaggtacagtgaccatttcctcatgctctccggttcaaaagttttgctatag

SEQ ID NO: 1832 - DNA, 1113 bp, Zea mays
  Peptide Sequence Number=SeqID_45207
atggcccttgcgtgcccttgctcggccccctccccggcggtgcccgccctgccaccggcgcgactgcgtggccctggcgcggctcgcgcggcacccggcacacgcagcgcgttcccgcacgcgcagccccacgcgcgtgatgacggtcagttggtggagtccgaaggagttgcaggtggtgatgaggatgatggttttgattatgactatggtaatggtacatggttcgcattcggtatgccttctaaaaccgggtgtgacataggtggtatcaaagtcgtgctgactgaggtagagtctgtgaggagctgctctccagtgcccccgctggaggctccccctgcactaacactgggtgtcccggccgttggagtagctgttggaggagacctcgacggcggaggtgacgatagcagctcgagccacagcaccgacctttcagaggagcaggagccggagggatgggttgctcgacccatcactcgtgacgtcgctcgtgggtgtcacttccacgatgcgctcgacaccttgctacgtcaggcacttgaccaacgtacttggtctatcgagtatcactatgttgtcttccagcacagtcgcggggtttacccggaccactgggaggcgacttgcttggtgcgccctctggagaacagtctccggggtgcggaggtctgctcagagcattactctatttctgagtgggactcagctgaggcggccatgcaagatgcctcacggtgtgcgctttcgcactactgctcaatgctcggtggggtggccgatggtcttaacctgaggtattacccccgccatccatctggcagcacaggaggcgtggttgtctcacctgtcgatgaggacaatcttaggttgagcagcacaatcaacctagccgccatgctaaacacggagctggaccatgctttagatgagctgagtagggctcgtgctgagatcgcccagttgtggactgagcacgcggagcgccgacacctagaggatggttcccccacccccgtcgggactcagcacccataccactcacctcagcgtgggcaccatgcttacagcaaccccgactgcaggaccaggataaatttagaaccatag

SEQ ID NO: 1833 - DNA, 702 bp, Zea mays
  Peptide Sequence Number=SeqID_45208
atgtccggtgcaccagaggactctaactccgaactgctcaccttcgggaatttccagaggcgactccgctataattcaccggactgtccggtgtacaccggacatgtccggtgctccaaggaagagccgcctccagaactcgccagcctcgggttttcactccagccgctccactataattcaccggactgtccggtgtactgtccggtgcaacagcggggcaacggctatttcggcgccaacggctacctacgatgcattaaatgcgcgcgctgcgcgcgcagaggtcaggcacgcccatgctggcgcaccggacaatctacagtgcatgtcccggtgcgccaccggacatccaggcgggccaagaagacagagctccaacggtcgaccccaacggcttttggtgacgtggctgtcgcaccggacatgtccggtgtgcaccggactgtccggcgactttcaagttgccctatgcggaaggtgacgagtgaggtatccgtatcccggaggcgtaggagtccctcggctcggtcggccttgccactcaaggcttctcttgctcagttaaagaaaaccctcggtcgctctgcgatgagccggagccggaggcagcggtgtcagcatggacagaggcggagttggctcgaaaagggggcttcgtcggcccaggagcaggtgacttcccaggccgaggaggtgtag

SEQ ID NO: 1834 - DNA, 1341 bp, Zea mays
  Peptide Sequence Number=SeqID_45209
atgggggccctcaggcgggtttgtgttcctcgtccttggacttctccgacggtcttcgctttcaggattggatttctaacaagtttaaccgcccgatcaacctcatcccggtttatcggttacgttcctattcctgctccgtattcaaggcctatctgcacctttggaattctggcggccctaattggttcattgagtggcagcgttattcaatggaagaatctaaatcctggaaactggtttctcatcgccgttcttccccggctccgttcgctaatatggctcatttccttcccccttcgcactgtcagtgatcatggagctgttgttcgtccgcattttcaaaattattcaaatcgcagaatcggccgcaaggattctatccccagccttaatggctcttctgtcccagcggcgtcgggacaccagcattttagggatctttccctctcaggaaataattcacaattatttggtctctcggggcagaaagttgatcctgcaccgttcctcccccatggcttcgtggcgcaacaggtcgatcatcgcgagataatggaagtgccacagttcatagccttctcggtggctgaaggttttcagggtgtctcttggactgttcaatgtgacattgtgcaacaattcatgcttggtgcccaacctcaagatgaggaccccgtgcctccctaccctcatgatggagtcaatgctgaggaagatgttgcgataaatgctgatgaaggttgggacccttggcctgttaagcaggctcaaccccctgagccagtggtcattgcaaataatgcaaacgttgcgatcaatgaagaagaacagttcagctatcagttatcagttctcgccttgcctgcttttcctcctgaaaacatgaatttggagggaaacaatgtcgagggacaggacgacatgcaaattgaggaaaacatcaatgtgggcctcatgttgcacttggatcagaccaaccctgatcctgcttttgaagacttcatggccagaaagtgttcctcctcttgggctgatttgttccctggcaacgatggctcagtttttgttccaaaggtcggggctgctttcttcatgggccttttaatgaggccggactcttttgattgggccagaaaatttctattgtcgggagctatctctgcatttgtcacacccagcatggacaccatttcaatcagaattccctccaattgtcttcctccccccagtcaggacacccctgctgagccacagtcccctccccagtcaaaggcaactttcagaaaaaaggcagcctatctcagtcgacacgacagtcagaaggagtgccaggcttag

SEQ ID NO: 1835 - DNA, 435 bp, Zea mays
  Peptide Sequence Number=SeqID_45210
atggggggagcagcggcaccctcggcatcgtctccaccttcggcggaatctgacccggcctcggacagcgacacgggcgaaggatctccacctcaaaggaagatgtcagcactgcgtctgagccatcgccgccaggatctcctccaggaacccggcccgagtagacggcttgtccggccgctccgtagcctcagccagctgtcccctgaggacatcagcctggcgcatggcctcggcagcccgactctggggttggtcccgccagtggatgacccggcccggcaccagccgccactgctacacctcctcggcctgggaagtcacctgctcctgggccgacgaagcccccttttcgagccaactccgcctctgtccatgctgacaccgctgcctccggctccggctcatcgcagagcgaccgagggttttctttaa

SEQ ID NO: 1836 - DNA, 1170 bp, Zea mays
  Peptide Sequence Number=SeqID_45211
atggggagtgcccgcgttgctttcgtcttgctgatgttggaggagcgcaacttcgcggaggttggcacctttcagccattgctcggcttcaaggattttcatcaggcagcccggctgcatcccctcaccaatgcttcaaggatcttcatcatccttgctggggaggagggcgaggcgagccggggcctgccttcgcgtgggctggtgtctcgcttcttcctccggcatctgggggtgcaaaccatcctccagctctgcagaggaggcgtcctccagccatgccggggaaggcgaactgctgctgcccagccagggtgtagcattccgtcctctgtccgggcgacggtggccagccgcatcaaggggtctcacaacacgtcgtacgccgcgagggaggtggacgccaccgtcggtgctgaggtggtggcagctggagaaagcttctctgccgatgagaccgtcagcgccactcgcggaccgacctccggctctttggctttaatatctggttctcgtcctccgcgaggggacacgaacgagagccttccagcggtagcgtccgccccgagaccatcgctgctactgcagaggtcgccggcgagtcacccggagcttgtcgtcccgcaggccctccgatgtggaggttgttcatacccgtgggagtggaaccggagttccatttgtaatggcaccttgagtgccggtgccaaaggttcacacttagccaataaaaagaccaagtattgggttcaaacaaaggagcaagggacaaccgaaggcacctctggtctggcgcaccggactgtccgaggcgactccgctataattcaccggactgtccggtgtacaccggacatgtccggtgctccaaggaagagccgcctccggaactcgccagcctcgggttttcactccagccgctccactataattcaccggactgtccggtgtacaccggactatccggtgcaacagcggggcaacggctatttcggcgccaacggctacctgcgatgcattaaatgcgcacgctgcgcgcgcagaggtcaggcacgcccatgctggcgcaccgaacaatctgcagtgcatgtccggaactttgtgttccaagtgattgagaagagaaagctcactcggtccgagggaccgtttgagagagggaagggttga

SEQ ID NO: 1837 - DNA, 387 bp, Zea mays
  Peptide Sequence Number=SeqID_45212
atggcgcctgaggatggactcggctgctgtcagcctcaccctggcgggtggcacagcagtcggagcagggcaggcggtgctgttttcctgtcagggcagtcagtggaggggcgaagtgactgcggtcacttcggccctgtcaactatggaacgcgcgtcaggataaggtgtcaggcgatccttgcattgaatgctcctgcgatctggtcggttggcgaggcgatctggccaaggttgcttctccgcgaagcctgcccgagctgggcctcgggcgagtcgaaggtgtgcccgttgcttgaggaggccctcgggcgaggcgtgaatccacctgggtctactgttcctgcccgaggctgggctcgggcgaggcgagatcgtgtcccttga

SEQ ID NO: 1838 - DNA, 453 bp, Zea mays
  Peptide Sequence Number=SeqID_45213
atgaccgttgcatctccggggcagctggcgcaccggtcagtccggtgcctcctgccgaccgttggtgcgggccacacgtcgcccgcggattgcgtggccgaccattgcgctggcggccgttggctcaccggacagtccggtgcaccaccggacagtccgatgaattatagccgtacaccgccaaattttcccgagagtgtcctgttcaccggagtccagcctggcgcaccggacagtctgacaaacggcaaagtcgttggtccacccaaggcatatcacctaactatggaagaacggaagtctgctttactgtacatgttcacgaatatgcctgaggtggagaaatactttgtggtgccgctaaagtcaaagaagtcagtgaaggggctgttcaaggacctgggcctttttaggacagttcttcgagcagcagcagacgtcgagagctgttga

SEQ ID NO: 1839 - DNA, 930 bp, Zea mays
  Peptide Sequence Number=SeqID_45214
atggggagtgcccacgttgctttcgtcttgttgctattggaggagcgcaacctcgcggtggagggtgaccaccggtttgatggtggggagaagcaagccgggttgcggcctctgccccgccctcagcttcaaggatcttcatcatccttgctggggcggggggcgagccggggcctgccttcgcgtgggctggcgtcccgcttcttcctccggcatctgggggtggaaaccatcctccagctctgtggaggaggcgtcctccagccatgcggggggaaggcgaactgctgctgcccggccagggtgcagcattccgtcctctgcccgggcgactgtggccggccgcaccggagggtctcacaacacgtcgtacaccgcgagggcggaactcatgttctgggacggtcccgttctcgttttcgtggcgaggacgggggtgaggacctgccggtgcgctttggggcggccggcgctcgctggtgcggtgttggtgggcaggtggacgccgccatcggtgctgaggtggtggcagtcggagaaggtttctccgccgacgagatcgtcggcgccatctgcgctccaggcctccggctctttgcctttaatatctggttctcgtcctccgcgaggggacgtgaacgagagccttccagcggtagcgttcgccctgggaccatcactgctgctgcagaggtcggcgatcctccgcccgtgtcgccgtccgaggccgggccagattccgctgaaggtggagtcgacgccgagggtgctggtgctccccctgttgatgacttgtttgtcggtagcagaatcgctcatccgagcgagagttacttatcgcggaaggtgatgagtgaggagtccctcggctcgatcggccttgccgcttacatgtacaccgtcattttcaggatcccgctatcgaagtag

SEQ ID NO: 1840 - DNA, 1989 bp, Zea mays
  Peptide Sequence Number=SeqID_45215
atgaaattttcttcatcatggtgtcaaagggtgcttccagctgctaaggagatatacctgaaaggtttgcctgccttttaccccacaagaatgcatgaagtgcagctacagaaggcattgcggtcctttggctcaatggttaaaggaccagcagtcagggtattctcaaagaagctagaagatgagtgccgggcaatatgggaatctggaaggcagcaatgtgacgctgttagcctaactggcagaccatgtaagcaccgcaggcatggcgatttcttttcatcagatgcaatggagcaacattctagtggatatgtcttcctccatgcatgttcctgtggccggtcacgccgccttagagatgatccttttgactttcagacagccaacgtgtcttttaattgtttccaaaattgcgatgacctattacctacccttgcgcttccaagaggcagcaatgatggttcattttcagtatcctcttggtgcttggtgcgtcttggaggagcaaggtactacaagccaacaaaaggactccttcaaagtggatttagctccaaggagaggtatcttctaaggtggattgtatctgttcataaggggcaagtgagaaatgacattcgttctaatactattacttcatccgcaagatctggtatgaacccgcagactcccccaatagtcactggtgaagtaaaatctgccataacccaagtcacagcacaaattaaatatgcaaagcttgaaaattctggaaaacaagctgaagttgaaccagtgagcaacttaggcattaattttggtaaaggtctgccaaattttactatgaaaaagcccttttctgaagttgttgctggcaccacatcaaaagataccgagtttcctgctcttcagcagacaaggccaccaaaacctggtggtcgaaaagatgagcagcgtcaaatgaatatagtagaccagactaatggccgaggtcatgtggctgtcagccaagggtctgtagctgaaactgaatcggcaaaagcaagcagaaacaagagtagtgaaaatgctgatgggaagccctttttacagatagggagcaatatagtaccagtgattgctggaaatgagactagagaaactagtcagccagtacaacagtttgttgtgtatattggatttgagcatgagtgtccctatggtcatcgcttcttactgtcagagaaacatatgaaggagatcgagtcttcctgtttgcagtatcaaagacctcatctaaacaaagaagcagaagtcaagcatgcacaaaagttgctccaaaatgcatctggtttaatagcatctgcagtggacataaacagtgcacggaaaaacagtaagccattggaatcatcagggagaaacagccagcagcaatcactgcagctgaggattgatgcagagacctcacagccttctcctcggctttcagatccacagaatgccaaaaggtgggagcattattttcgaagcgttacaattgatgatggtggagaagcattttcactgatgaacagaaacttgccaatatatatgcgctgtccacattgcaaggtctcagaaaggaaggaacatcaagatgtaaagtttgctggtgttgtgtctcaacttcagcggattttcattgggtcatgtttgccatcaaatgtctctgatcatgatcgagaaggatcattcagtattgggtgccgagttatcctcccacctgagagctttcttactatgaggcttccctttgtctatggtgttgagacaaaggagggaagtaaatttcccctcaaatactttgagcgacaaccagaactcacagcatggcttgttgcaggcacagccctgcaaatcgtgtcggcaatcacgccgttcttgtctttgtacatgaaaggtgccaggaggttaagtttagctggttatgtaaagtacaggtatttccccgcagtctttggagaagaagatggatttgtgaagtga

SEQ ID NO: 1841 - DNA, 696 bp, Zea mays
  Peptide Sequence Number=SeqID_45216
atggcctccacagtctgtggaagctcaatgagttctccaaccaaggaccaaggattagggcccgaccacatggacaagagtgttgctcaagaagaatccagcagtgaaggatatgaaacgcctagcgacccttttcctaccactaggatagatagggccgctgcgcgtgagttgcaacgtgaccctacttatgatccacaagaccatgaggaggtcttgtttcaatttcgtgcgatgctcgaaaaagctgcgacacgataccaagacgcaccgaaaccgacccaagacgcaccagaaccgacccaaggcgcaccggaaccgacccaaggcgcaccggaatcgaccgagacaaccaccgagaggtcaaggaaaaggaagcagagcgatcggaacaaaggtgacagggggctaaacaagtttcctgacaagacatataaaatcgcagacgtgagcccgaatggtcagcccctaactccagaagaggcactgcctaagttccggaatgcacttgggttcttagttagagataatcttgacatcacaatccgacagtggagagatgtatcagatgatgtcaagaatcaaatgtggaataagctaataacgaggtctgggatgaatacaaagtttgcaaagaaagacctagacccgacgaaaaatataaaatctcagcaggtcagtgggcagcatttctag

SEQ ID NO: 1842 - DNA, 483 bp, Zea mays
  Peptide Sequence Number=SeqID_45217
atggctctggctctagcttttaaacagctccttaataggagccaatcaaactgcttgccgtttgggagtgctcttgggcggctccggcgagccctcccaaacgcggctgtaatggtcagaattcggctcacggtggaactgacgttgcacgtatctcggtgccgtaaatcttggcgccgagaagcattttttattatcatattatcgatttgtaggatgtctaggcgcgataaatctgctaaacaaaggaagggtcctttgaccggaactgccttcgacccgctgcctttgccaactggtgttccagtgcctatgtgtttttgtggtgatccttgcaaggttgataagtctgaggatcatgacacctatcgacagagggaggagaaggagaagaagcttgagcgtgcacgtcgtgcaaaggacgcaatggaggggaactctgatgcatttcgcaatggcaaatggccccgttgcactcagtag

SEQ ID NO: 1843 - DNA, 288 bp, Zea mays
  Peptide Sequence Number=SeqID_45218
atggcacagcaggcccggcccggtttttggccgggcttcaccgggcccgggccgggccgggccgggcggcccgtttggccatctctaagtataagtaacctagccagcaatgccatccataatgatctttatcaagttataaaagcgaaaacaagagattctctccccttcttctgcctctgcatgcacgagcacgagccagcctctctctctccactagactccatccagagagacggccaaacagggccggagaggcaagaggacgaccgagtggcaggggcgtga

SEQ ID NO: 1844 - DNA, 462 bp, Zea mays
  Peptide Sequence Number=SeqID_45219
atgggttatccgaagcttgaacttgggctatccttaatgctgaaggaccatctaacagacaacttagcatacaatagtttgaagggcaaagtccaagcattcgacgaagttctctctggcaggggggctttttgtgcctgcgtaggtgctcagggagctgtatctttccatgaaaaagctggctatgaccatgcaaaggctgtaattcagccagacttctcagtttctgtgactgacatcaaggagccattagccgaagctaatgcccttagtgggaaattctattctgaagtgtggatgaatgctgaactgtctcctcatctagagccatacaactctaacgacgattcagccctgaagggtaccctcgatgaaatcagaatagcgaatgcagcaattgatgaagctataaatagacttctaaacgaagctactaagagggtcctaaaggaggatgattag

SEQ ID NO: 1845 - DNA, 651 bp, Zea mays
  Peptide Sequence Number=SeqID_45220
atggatctccgaaacgggaaacaagaaaacctatcttatccgaagagcgacggagaaaaggatacccgcaaggctggctcgggggaagagattggtgctattgagatattaggcccttatggtatctcgtacacattccgacgattggccgagcgtcggtcatcacatgttactggttggatgacgatcggaaaactcttagtaggctcgaatcagcagagctttgtcaccacattttcagttcgtcgaacggatctgtggttcatcggcaatctgcgaaaaaaccaatatgtccagcaacaacgcgagatcaaagtgcttgattggaaggaaggccctggacctcccttttatagatgcaaggagagggtccagatgtacaatggggggtatagctatgcgctaacgtgtctggtagagaagtgcctgagccctgtgtacatgccaacgtggctgtcggagaagtgcttgagccctgtgtacgcgataatgtggccgtcggagaagtgcctgagccctgtagaagcacagctggcgtcttaccccggtgggtggcacaacagtcggagcggggcgagcggcgctgttttcctgtcaggtcggtcagtgaaagggcgaagtgactgcggtcacttcgaccttgtcgactga

SEQ ID NO: 1846 - DNA, 636 bp, Zea mays
  Peptide Sequence Number=SeqID_45221
atggaggcccaggcccacatgtcatgtaaccgacgcaacggttactgcgtgcgaggaaaccgcaccgccacttgcgccaatgtcgcgccttctcgactgcggaaccagtaccgcgactcgagggcaagcgacacctttggcaggcgaagtgggcatcgtttcacctccgccatgatgaccgcgtcaaaaaggctggcccctcggaagggttcgacagccgccccagagcactcgggctccaagcccattactgatcaggggttcgaaggctggcccctcgaaagggttcgacagtcgccccagagcactcgggctccgcgcccattactgattaggggttcgaaggctggcccctcggaagggtttgacagccgccccagagcatgcagagtgagggatgaccctaggtacgtccgttacatggccgaggctcgagctacgctcctgaggtaccctaggacatttccgagactagcaggaacgatttttgtaacggaatcccaccggagggaggcatcgagccctcggaccctatcgaatgggtccgggtccggcaaatcacctgcagaggctcgggggctgctctcgcaacccggctacggccaaactgttgacagcgtcaacaaaccagcctaa

SEQ ID NO: 1847 - DNA, 435 bp, Zea mays
  Peptide Sequence Number=SeqID_45222
atgaagaagatttcagcaccatcccttgaagtcaaggaagaagctgcaagcaccccgccagcaccaccgccctctaaggagctacaagagccagtcccgcttgaagaagagttcaaccccgtgttgccatctcagtcaccgtcagaagaagtcatcaacatcagctccctgttgacccatccaggagatgtctcagatcgaagttgtgtgccagccttatcagaagagaagctgcctggtctgaaaaaggttttctctaaaaacatagatcacaaattagatctaatcctcaccttatgcttccattctcatcttaacccatctcaagagaaaagtgccttacccaagaagataccggaaagcttacccttgaagcctgcaataagctacagaagaaacttgtccagccgctcagtcaaaaaggaccgaccgtga

SEQ ID NO: 1848 - DNA, 1191 bp, Zea mays
  Peptide Sequence Number=SeqID_45223
atggctgcgacaggcgggcggaagcagtggtcaagtcgtctgcaggctcacgtcccctcctgggacagtgagagagccctcacccacggagtgaagacgacgcgcctggcaggcgacacctttggcaggcgaagcaggcgacgcttcagctccgccatgatgaccgcgtcaaaaagggaccgggaaaggggatactccgaaagggatccttctctgcgaatgaagcgggccccgagccctcctactgatcagaggttcaaaggctggcccctcggaagggttcggcagccgcctcagagcactcaggctccgcgcctactactgatcagaggttcgaaggctgccccctcggaagggttcgacagccgcctcagagcactctggctccgcgcccactactggctggcccccgaagagttcgacagccgcctcatagcacgcagagcgagggatgactctgggtacgttcgatacacaaccaaggctcgggctacgctcccgaggaaacagcgctgcctgccccgctccgactgtgtgccactcgacagagtgaggctgacagcagctaagtccagcttcgggcgccatgggaagctccgcctcgcccgacccagggctcggactcagcctcgaccccggaagacgaattccgcctcgcccgaccccagggctcggactcagctcggcctcggaagacggtttccgcctcacccgacccagggctcggactcagcctcgaccccggaagacggactctgcctcgcccgaccccagggctcggactcagcctcggcctcggaagacggtctccgcctcgcccgacccagggcctggaaagcagatatgggtccgatcgccgcggtggaaaaatctcaccgccgacgacctatccgcgccacgattggtgccggagtcgagatgttcgggcggcgagcatcttcccccgaagatctttttcctccggataggaccgccgcggtggaaggcactaactccggctgccacgcggtcattcctccttccggccgtgtccgatcaccgacgccgctctcctctgttcggccacgccatcatggatttgacggtcttccggccatggttgaacgtggcaagctctgggggaatgccgtgttcggtgccatcgctgatcgccagctcgggctggcaatagttatcaccgtgaccgcgatt

SEQ ID NO: 1849 - DNA, 174 bp, Zea mays
  Peptide Sequence Number=SeqID_45224
atggagagtcatgatctccgggcagaatgggaatcacggcttgtgggtggttatgagattgatggttttggtcatgactatgatgctggttgtcagcattgcaacccctgctcaggcgaagatgaagctgtggaaggagacttccaggagttccaagactacgacgagttctag

SEQ ID NO: 1850 - DNA, 612 bp, Zea mays
  Peptide Sequence Number=SeqID_45225
atggtccacatcgtcgagcaccatgatttcatgcccgaggacttcatggtggaggaggcgactgcctcttccacaccgcgggccaccaacctccctgcgtctggtgcagccgctgctgtgcactctgcgcggcagcacactcccgcgcagacatccagggcgtctagggctgcacctggggcgctgtctgcggccagagaattgctgcgccaccctcctagctccacggcctcgccgggggccatgaagcagtggcgtgacgacgtcgaccgcctgctcggcatggcgcactctggctcagccaggcccatgccacggtcgtcccggcgtcaacatgaggcgtcggcatcagtgcgctccccctcggtgagggctgcatcgactaaggacctgcgggcggagctcaaccgccggcgtgcgggagaggacgctccagtctctctggagaggtctaatgacctgcgagcagaactcaaccgcaggcgtgcgggcgaggatgtccgcgtctctctggagagggcgcgtgagcaccgacagaacgtcgagggtcgcaacctcgactacggcttcactgtggttgcaccgcagactccaacgggcgcccggatctag

SEQ ID NO: 1851 - DNA, 588 bp, Zea mays
  Peptide Sequence Number=SeqID_45226
atgatggtgtatcaattcgactactgtgttgtctatgttgcgtccggatctgacgaactagcaattcgcaagacgacgagccactccaatgagaggcctccgagagtgcgctatccgcgctactcctccactagccgccgcgaggaaacttccgcctcctcctaccccgcgctggagactgcatctcccggggccgagccctcgatccggcgtgcttcgccgccggcatcgaggcaggtgggcgagaagcgggcgtgcagtggcgggtctggcggcgtagagctcgcaccacttcgaaccgaggacgcgcgacccaccgcaactgaagatccaagcgagtttcccccagctcgtcgctggagagtcgccatcggcaaatggcttcatcgtccgccgacttcgtccaaggctgccggcgaaaggaagagaagctcgtcgccgctgtcgtcttcctcttcgattcggtccaccgaggcagatccgcgaagaccgagatctggagcattcaaaataatgcgcttcaatttcatccatgaatgtcttattgctgtgtccggattctttaatttagaccggatttggggctag

SEQ ID NO: 1852 - DNA, 570 bp, Zea mays
  Peptide Sequence Number=SeqID_45227
atggcgcagttgaccgttgacagcctgagagccgttggcgcaccggacatgtccggtgcacaccggacagtctggtgccctcttctagccgttggctcggccacgtgtcccgcgcagatcgcgcggccgaccgttggctcaccggacagtccggtgcacaccggacagtccgccatggaatcggagaacgaaaagctccgtaaagcactggctactctgctcagagttgttcaaaagcgtagttgtgacatcgttgatgtcgtcaaatcagccttccagcctttcaactcacctttggtggacgaattgaaccgagcactagttgagattgacgacctcgccaaggatcttgaagacgtagcagtgcaaactcagtgggaggtagaaaatatggctaactgtgaagtaaacgaacatccacgacaagaggaagcagtagaggaggttctgatagaagatggttcagaagacgagctactgatagacgaagagtcaccaattaactatgaagaccttgtgggctacgacgatggtcgtgactgctcaaccgacgacacatatccctactag

SEQ ID NO: 1853 - DNA, 231 bp, Zea mays
  Peptide Sequence Number=SeqID_45228
atgtccgcccgcctggccgcctgctcggccgcacgcctggccgcccgcttggccgcccgctcggccgcccgcctggccgcgcccccggccgcccgcccggccgcccgactggccgcgcccccggcagcccgcctggcccttggccgcgccccctggccgctcggccggctcagccgccccggctcggccgcccctgcgcgccctgcccccggccggttcaaccgcccctag

SEQ ID NO: 1854 - DNA, 132 bp, Zea mays
  Peptide Sequence Number=SeqID_45229
atggcgcccaagaggaagaccgcgaactcatctgccgcagtgatccccgccatcgaccccaacagtcagttacccttcgcagtggtgccgcttccaggggttgatgcgaccttggatgtctcgaaaccttag

SEQ ID NO: 1855 - DNA, 474 bp, Zea mays
  Peptide Sequence Number=SeqID_45230
atgggcaaggacaacaagcgcaagcgtgagccgactcctccatcggaggagtttggtgattcagagtactcggaggaggagttctcctccgagcccgaggggtctccggctcccgtctctcccccggcgtcgtccgatgactcggacgactcccaggggatagccgcggaggtctggacatacatccgggccgtcgagcgcgccgggctcgaaggctcggatgagtcggagtactcctcggatgaggaggactcggacggcggcgacgagggtgaagacgacgacgacgacgacgacgatgacgacgacggcggcagcagtggcaggggcggcggcgacggcaggggcagcaccaagggcagcagcaggtgcagcaccaagggcagcagcggcggcagcggggacaacaccaggggtagcagcaggggcagcaccaagggcggcggcggcggcaggggcagggccagtggctag

SEQ ID NO: 1856 - DNA, 573 bp, Zea mays
  Peptide Sequence Number=SeqID_45231
atgaccataagcaccttccgcgacttcccactgcaagatgagcctgaaatgtctgatgtgccaacggtgtcgaatgtgcgtcaggatctgagcgaatggcaggccaggcacgccacacttgtcctctcggcagtcaaggaaatatcgaagttcagatatgagctatgcccaagatacatgaaagagcgcaaattctggcgggtatattttttgctagtaaacagctatatagccccgttcgagaagaaatccttggaggagctgaaagtgaaagcagaggaagagaaaagggattcccagaagcaagcatcccaggcatctacaactttcgaacccaaagacacaaaagcgccaatcaagacctcttcaacaaatccagaacatgatctggatgtatttcttctgggagatctgggtagcgacgatgagggacctgttgatgatgatgatgacctagatgaggacttcgataagattgatgtgaccacgcagtgccgctcacttctacagggattggaaagtgatgacgatgacaaaaaaatagcaacagggaaagcagaagatgcgaagtag

SEQ ID NO: 1857 - DNA, 255 bp, Zea mays
  Peptide Sequence Number=SeqID_45232
atgtccggtgcacaccggacagtccggtgcccccttctagccattgactcggccacgtgtcccgcgcagatcgcgcggccgaccgttggcctggccgaccgttggctcaccggacagtccgggatagttgtcctcgtcacgttcctgctcagggacaagctcagctacatcttcaccggcgacaaggtcgtctcgtgcacggtcactgacctgtgtccgctgctcgttgggaccatcgtgctcttcgggatctag

SEQ ID NO: 1858 - DNA, 312 bp, Zea mays
  Peptide Sequence Number=SeqID_45233
atggctaaaaagaaaacaaaagaggcacctgcaacgaaagaagctgcaaccactgatgccgtcgcgtccttacctcctctaacagaagcagtcatgcctcagatttcgtctggtgaaatcatagtgcagttccgagggaagctgaaggagaaaggtcgccgagtcacgccaagagtcggccagctccagccgagttatgtcatgagtcggccagctctcgccgagtcacgccataagtcggcagctgaaggagaaaggtcactcggctggctgacgaagagacagggtcactcggctgacttacgcggttag

SEQ ID NO: 1859 - DNA, 1728 bp, Zea mays
  Peptide Sequence Number=SeqID_45234
atggtcatttcagccaagccttcgtttgcttccatggacgcccaagtggtgtttgcagaaatgccacaaaggtacatcatcactttcttctcagattcagcgggtgaaatgcttccatgtttggacaccaatgtatatgatgctaagagggggtttgtggcgaagattgatgagtactcagtagtgttgtggccaccgttcactgattacttgaattggatgttgtcaaggcaaccatggcctccacctatattattggctaagctggatgtacctgagatccttctggcaatgatttgttgttcgggtataggtgacaggaaggcaaagctacaggcacaatttacacaaatgcgtcctgttgtacgagtggcacaagatgcccaggatcttcttgtagaatgttgcgtatggttcatcaatctcctttcgtctgaatccaatgaagtgcacagctacaaacaatcattgctgaattacatccttcttgacatcattgatgtggaagttcattacatcgttgtgtcggcttatcagtacacgtccttaaccagtgtgatgctgcggaattgctggtcggttccatgtgtcattgtgtgcagttggatcttcctgaaggcaaagtatgggctgaggaatttattgggtgtgggagtttgcgtggctaggctaattttggtcttattttcggatgtacatgctttcggtcgagaaaaaggactcaactttctaacaggtgatttgcttgtcattggaggctccatgcttcatgccttcagcagggttaccaaggagtactttgtccacgaaagcaccagagttgaggtgatggcaatgctaggtgtttttagagcaattataaatggtatacagataagcatattcaaacaaaaagagctcagatcgactcactggactgctgatatgtgggctgttctaatgcgtacaatcgcttaccaagagaaggttgatgtgatgtacttcatttcttttgttggcacagcaactggctttgtgatatactcatacaggggctcaaggcagaatactagagagacagcacgagttacacatgccatggatgaggaggctgcagcggcaaacaacacagcacaagttcctgttacttttggtcagtgcttgcaattttcctgggatcctggtggaagtaatgctacacatcggcttgagggcaagccgaattttaagaagaggggaatgttaggaaagatgaatgagtctctggacaggaaggggatgccggtttttccagagcatccaacaataaaggtgtatgaagaaggaggaagcaatcagacacttgaagataatgtggtcgtaatcttcatctgcctgacagagccaaggtcacacacgacgctgtgggtggcggacttccccgtttttcttgatgagaacctgaaggacatcttccactggcaggaactggcctttcttgcatgggaaccatgggtcgaggcaagtaggcaaccgtggaggagatttccagagcttgaggtggagaggatctcggcgatccaggatctccatcggtcagggaagcctctctctgccatggtccttcagagagcttcccaattcacggtgtcgaagccttggcaaagtctgaacaagttcaaaagtgtagatgaagctctctgtgatcgatctgcctcgaatgaacccgatttggtcagtgtcgatgatcctgtcaatctgtcgttgtaa

SEQ ID NO: 1860 - DNA, 807 bp, Zea mays
  Peptide Sequence Number=SeqID_45235
atggaggttcactgccaaaccaacttttgccagaatgaagatggtttccccaagttgttgagagcatgcacagttcgccttggaatcaggagccagccagagtatgatggtcgtgaattcgtcgagcatggcacagagaagtgtgtcgtgactgtatacattggatccagtccgcaccatgtggaatggagtgtcactgctgtggggcacagattcagagacacctgccaagtcatcgctcgtaaggcattgagggccctgtgtcaaatctatgaagaagtggccgacacctcgctcagattctttccaccctttcagagagaccgtccagtttggatggccaggatgtgtgcattggaagggcagcagctgcttgaggatgaccccacagtcgtgtatctcactgcatacctactcaccctggaagcacagtatgatttcttggctcggcaccaccgtcagatgattgcccgaacagaaaatgtagagaagcacaaccgtcagcttcatgtggatctcacctcacctcaagctcgtgtagctgcctttgaaagtcgtgaagtcattgctgttgaagccctgaagcaagccaaggatgagcatgtccagaagttgatggaggcctacttggatgtggataagcaagagcaccctgaatcctcccaagatcccccgccagagttgtttgagcccctcaccatgaagaagattctagcaccatcccttgagatcaaggaagaagctgtaagcaccccaccagctccaccgccctctgaggagctacaagagccagtcccgcttgaataa

SEQ ID NO: 1861 - DNA, 189 bp, Zea mays
  Peptide Sequence Number=SeqID_45236
atggcagtcggggttagtgaggcattgtacgccaaggcggtgagccctgatctgctgacggggaatcgatggggacggttgatgtacctccttgatttggttgatggtgtgacttggccttcgtccctgccaccgggacagatggtcgagtgggttactgcttccgcaggagaggaccaggaggagtag

SEQ ID NO: 1862 - DNA, 855 bp, Zea mays
  Peptide Sequence Number=SeqID_45237
atgacctcccatgggtcctccgatgacggaaatgcactgacccacacggacggacttgcacgagagggttttccccgcattttgtgggaggtgcttcagggggctggatacacgacaccccctcagtacgcggtgcagcagttcgagaagcaccgagtgccccgctgtagggtgaggatgaccttggagcctcatcccctgcagccaggctggcgctccttggactccgagtccttcggataccgagcggaggacacgatcgaggcgatcgcgctgtatggactgactaccttctgtggattccatcccttggagctggctacccatcccattggcttgttccccgctgaaaaggaggacgacccaatgtggaaggatcgggtggaacatgccaaggacatctgggccatctacccagggcagactgcgcacttgacagtgcggtgcatgaatgctctgtaccgtctgcaggtgatgcgcggtgaggccatgtcccacctgatggcactgctggaggccaccaagatcacattggataaccgagaggagcttgtggtcgacttgtcgcaagaaatggtcgagaaagatttacaagtggagcagctgtctggtgagattcatgagttggaggagctagtgggcacccgggagaacaccattgaggtcctagaggatcagctcctcaacactcagcagcagcttgctgaagcaaatgagcacctggacatgcaccaccaggaggatgacgaggacgtcgacattgagggaggagatgagcctgcctccagtatggacactgctggctcgggaagaccaccttcccccgagtccagtgttgcttcgttcgctcactag

SEQ ID NO: 1863 - DNA, 141 bp, Zea mays
  Peptide Sequence Number=SeqID_45238
atgtctagagtagagagtagactcctcacaccgggttctctggaggagatggttgctgggatcacttggccgaccaccctgccaccgggttggactgtcgagtgggaccctgcctcggctgaggaggagcatgaggagtga

SEQ ID NO: 1864 - DNA, 1986 bp, Zea mays
  Peptide Sequence Number=SeqID_45239
atggagcctggcggagggacagctgtcggagcggttgagtccttgctgacgtcctcctgcttccgtaagggggctgagagccgccgtcgtcacagagtatgcggggcgccatcattgcctatctggcggagcgagccagatgggacaccggtcttgttgggtgatgtggaagctcctccgaagccgaggtcgagtctgtcttccgtggccgaggtcgagtccgagcccctgggtcgggcgaggcggaggccgtcggctgaggccagggcggagtccgagccctggggtcgggcgaagcgaagttcgtcgtcttctggggctgagcctgagtccgagccctgggtcgggcggagcagagttcaccgtcttccgggacttagcccgagtccgaggcctgggtcgggcggagcagagttcgccgtcttccgggacttagcccgagtccgagccctgggtcgggcggagcggagttcgccgtcttctggggctgagcccgagtctgagccctgggtcgggcggagcggagttcgccgtcttccgggacttagcccgagtccgagccctgggtcgggcggagcggagttcgccgtcttccgggacttagcccgagtccgagccctgggtcgggcggagcggagcggcgctgtccttctgtcaggtcggtcagtggagcggcgaagtgacgacggtcacttcggctctgccggctggggggcgtgcgtcaggataaagggcctcgggcgagccggaaatacgttcgccgttggaggggggcctcgggcgagacggaaatcctccgggctttatgctgatgggggttaccagctgagaattaggagccttgagggtacccctaattatggtccccgacaaatagctcaaccaagctccaaggagacacccaccagtcgctaccctggaaaagggggccgccacgtggccaggggagacaataccctccaaggtatcaacggtgggtccggacccccatgggaaggtgtcggaccccagcatatccggaccggacctctaggcagggtccaggatctccgcgggtatagaccggacccccgggacgggtcccggacctctctgtgtagggtttgggccacccttagcagggtcccgggattctggggcagagaatacccaggccttaatcaaggccaggcgggggtccggagccgacacgtgtccaggccataccatgtacactttcgctccccgctcatgcggaggcccgatgctgccacgtggcatatcgcccgtgacgtaagccagcgggcggagcctgacgtaaggcctctgggctgcgcagtctctgcatttattgcggagaagacgcgccacctgactatcccgctgacagagaggcttcccctgcacgccaaagctacgcagatcgtggatatcagggcgcaaggagactactccagcaacgaacatcaatttgctccaaggcgggtgcattccgccacccagccggagaatttcctctccgacatttggcgtgccagcatgatggtgcaaatcgttgagcaccgtgccgagacttcggtggatttcctggtggaggaagaagctgcttcctccacgccgcaggttcccaaccacccattgtcgggcactgctgctgtgcacgctgcacggcagcatacagccgcacagacatcccggactccgtcacgggcggctccgggggcactgtcggcggcccaggagttgctgcgtcaccccccgagctccacggcctcatcaggggccataaagcagtggcgagacgacgtcgaccgactgctcggcatggcacattctacctcgaccaggtcgaggccacggtcatcccggcaccaacatgaggcgtcggcgtctgtgcgctcaccctcagtgaggggtgcacagaccaacgaccttccgtgcgggggaggatgcccggatctctctggagagggcgcgagagcgccgacaaaacttcgagggtcatga

SEQ ID NO: 1865 - DNA, 75 bp, Zea mays
  Peptide Sequence Number=SeqID_45240
atggcgaactccggcgatgacggtggtggctctaacggcgaggagagattttcctttaagaagaattgctattaa

SEQ ID NO: 1866 - DNA, 1083 bp, Zea mays
  Peptide Sequence Number=SeqID_45241
atgcaggcggcatgcgaccgcaccaagggggcgcaccctttagactttgacgcgtccagtatggaggcccaggcccacacgccatgcaaccagttcgtcgattgctacgtgcaagaaactgcaccgccactcgcgccactaccgtgcctcctcgactgcggaaccagtaccgcgactcgaggcaaccctgcgcatgacccaacagtgccaaccaggcacatcggtcacgggtcagtcagccgcgggagaaggcgcgacggtcgatatggccagaaatgggccgacagtaatggcggtggcaggcgtgcggaagcagcggtcaaagtcgtcaaccaagctcacgtcccctcctgggacagcgagagaaccctctcccacgggaccgggaaaggggataccccgaaagggatccttctccgcgaaggaaacgggccccgagcccccctactgatcagaggttcgaaggctggcccctcggaggggttcaacagccgcctcagagcactcgggctccgcgcccactactggtcagaggttcgaaggccgacccctcggaagggttcaacggccacctcaggccactcgggctccgcgcccactactgatcagaggctggccttcgaagggttcgacagccgcctcagacgcagagcgagggatgaccctgggtacgttcgatacataaccaaggctcgggctacgctcccgagctcactggagacaccatgttcggcgccctccaagggcaacatggcgctttccccccctcctccttgcggaaaggcgacgcaggggcccaagtccggcctcgagcgccataggaagctccgcctcgcccgaccccagggctcggactcggcctcggccccggaagacgacgaactccgcctcgcccgaccccagggctcggactcggccctggcctcagccgacgatctccgcctcgcccgacccaggggctcggactcgacctcgacctcggaagacagactcgacctcgacctcggaggagcctccgcctcgcccgacccagggctcggaccgaccacgtcacaggaggggccatcatttccctacccctag

SEQ ID NO: 1867 - DNA, 75 bp, Zea mays
  Peptide Sequence Number=SeqID_45242
atggacgcggtgcaagccaacggtgacaggtctaatttcgccatcaacggcgttgaggtgtatacgatatcgtaa

SEQ ID NO: 1868 - DNA, 645 bp, Zea mays
  Peptide Sequence Number=SeqID_45243
atgacgacgcgacgggggggagcagaggaaccttcacgacggagcagcggcgccggtgtgggtgcagcaaccctagcgacagtaaagggtcaaggaacgaccacgacggcggtggtcaatgagagggtccggatagaggagatagcccgtacctgcgaagacgaagacggggggagaggttccttcgcgacggggccgaggcgccgacggatcggtccattcgagggacccgaccacgcctcgcccgagcccagcctcgggcaagggcagacccggaggatctccgtctcgcccgaggcccccctccagcgacaagcatacttctggctcgcccgaggcccagtcttcgccaagaagcaaccctggccaagtcgccacgccaaccgaccaaatcgcagggaaggacagcgccgcctgcaccgctccgactgctgcgccactcgacagagtgaggctgacaggcagtcaggcccggcctcagacaccataggaaactccgctccgcccgacccagggctcggactcgggctcagccccggaagacggcgaactccgctccgcccgacccagggctcgaactcgggctcagcccctgaagacgacgaactccgctccgcccgaccccagggctcggactcgggctaa

SEQ ID NO: 1869 - DNA, 327 bp, Zea mays
  Peptide Sequence Number=SeqID_45244
atgtgctctagccatggtaacacctggggtgttacaacgacctcccccaagttcagcctcgggcgcaacagggagctccgcctcgcccggcctcaggcctcagcctcgggagaaggtctccgcttcgcccgaccccaggcctcagcctcagcctcggcctcgggagaaggtctccgcctcgcccgacctcgggcctcggcctcggcctcgggaagagtcacatcctcgcccgacctcaaccttagcttcaggagaagtctccgcctcgcccgacctcggcctcggaccgactacgccactggggatacatcattaccctacccctag

SEQ ID NO: 1870 - DNA, 534 bp, Zea mays
  Peptide Sequence Number=SeqID_45245
atgaccctgggtacgtccgttacatggccgaggctcgggctactcccccgaggtaccctaggacatttccgagaccagcgggaacgatttgtaatggaatcccaccggagggaagcaccgagccctcggaccctatcaaatgggtccgggtccagcaaatcacctgcaggaaaacagcactgttcaccccgttccgactactgtgccaaccaccagggtaaaactaacgacaataagtcacgacctcccccaagttcagcttcgagtgcaacagggagctccgcctcgcccgacctcaggcctcggcctcagcttcggcctcgggagaaggtctccgcctcgcccgaccccaggcctcagcctcggcctcgggagaaggtctccgcctcgcccgacctcgggcctcggcctctagaggagtcacatcctcgcccgacctcaacctcggcttcaggagaagtctccgcctcgcccgacctcggcctcggaccgactacgccactggggatacatcattaccctacccctagctag

SEQ ID NO: 1871 - DNA, 819 bp, Zea mays
  Peptide Sequence Number=SeqID_45246
atggcttcgctcgatcaccccgactgcttccagtctgaggcgacgctcaacctggtgcgcgacctacttgggtggagcgcgccagcgtacgctgcaaggatccgcgtcggcgccgctcccctcggcgatctcgccttcggtgagtttgttcttgtcggcgtttcgagaccggggggtccctcaggccgacgagtgagtgccgcgtgccccagcccagatgggtcgagcgcgtgggcgagcgcgaaggggggaaaggagcgaggtggccggataccagcacgagagaggtgggaatcccacggccttcatgttcgtcccgtgcccaggtcgggtgcgcttgcagtagcggattacaagcgtccacgcgggcgtaaggagaggatccaggtgtacaatggggatgtagcagagtgctacgtgtctagcggagggagagctagcgccctaagtacatgccaatgtggcagccggagagatcttggcaccctgctactgagagccgccgtcgtcacaaggcttgtggggcgccatcattgcctatctggcggagctagccagacgggacaccggtcttgttctctgcggctcgagtcggctcggggtagggtgatgatggcgcttcctgttgacgtggctggcctgtgccctaggttgggcgacgtggaggctcctccgaagccgaggtcgagtctgtcttccatggccgaggccgagtccgagcccctgggtcgggcgaggcggaggtcgtcggcagaggccagggcggtgtccgagccctggggtcgggcgaagcggagttcgtcgtcttctgggtcttag

SEQ ID NO: 1872 - DNA, 2202 bp, Zea mays
  Peptide Sequence Number=SeqID_45247
tctgcgaacgacggcgccggcgacacgaagatgagggcgatcgtcgtcgtagaggaaggggagatgagcgcgccggcggcgacgccgaagcagggcaagtgctgcgagtacacgctggacggctccgtcgacatgaagggccggccggcggtcaaggggaaatcaggagggtggcttgccgtgaaccagggcctggcgacgctggctttcttcggcgtgaacgtgaacctggtgctgttcctgacccgggtgctggggcagagcaatggcgacgccgccaacaacgtcagcaagtggacgggcaccgtgtacatgttctccctcatcggcgccttcctcagcgactcctactggggacgctacaagacctgcgccatcttccaggccatctttgtcctcggcctcgcgctgctgtcggtgtcgtcgcacctctacctaatcaggccggacgggtgcggcatggagcacgcgccctgcggcccgcactccggcaaggagctggggatcttctacatcgcgctgtacatgatcgccttcggcaacggcgggtaccagcccaacatcgccaccctgggcgccgaccagttcgacgaggaggaccccgccgaggcgcactccaaggtctccttcttcagctacttctacctcgccctcaacctcggctcgctcttctccaacaccttcctcagctacctcgaggacaagggcagctgggcgctcggcttctgggcctccaccgccgccgccgccacagcgctcctgcttttcctcagcggcacgctccggtaccgctatttccagcccggagggaacccgatcggaaggattggccaggtcgccatcgccgcgtgcaggaactggaaggcgggcgtgtcgaccgaagtggtaagcctgtacgagggcgacgagaaggcggatgccggtggcaggaagcttctgcacacgcaagggttcagtttcttggaccgcgcggcgcacgcggacactgactccaagctcggcgcgcgcgatccctggaagctgtgctcggtgacgcaggtggaggaggtcaagagcatcctgaggctcctccccatctggctctgcaccatcctctactccgttgtcttcacccagatggcctcgctctttgtcgtgcagggcgccgcgatgcgccgcaccaccccgttctccggcttctccgtcccgccctccagcatgtcggccttcgacattctcacagtcgccgccacgattttcctgtaccgccgcactatctgcccgttcctagcgcggctcagcggccgcccggctggccccaccgagctgcagaggatgggcctcggcctggtcgtgggtgccctggccatgaccacggccgggacggtcgagcacttccggaaggccagggccaccgcagcgatgagcagcgacctgcatatcatgtggcaggtgccgcagtatgcgctgatcggcgtgtcggaggtgatgatgtacgtcgggcagctcgagttcttcaacggccagatgcccgacgggctcaaaagcttcgggagcgcgctgtgcatgatgtccatgtcgctcggcaactacttcagtgacatcatcgtgagcgcggtgaccaggctcaccacgacgcgagggcggtccgggtggatcccggctgacctcaacgaggggcacctcgacaagttctacttcctgctcgccgtgctggccgtcgcggacttcgcggtgtacctcgtatgcgcgagccgctacgggagcggcaaagtggacgggaggagcagcgacgacgaggaggagggagcggccggtcaggcttcattcgcgccgtcgtcggcaacggctccggcttcccatgccgccgtccaacctccccctgactctcctccccacaccgccgccgctcccaccgcccgcaaaaacaccacgcacacgggcgcgggcgcggagaccgaccaccacggcaccacctcctcctccggttgcctctggcctcgccatccctctatgctcgacttccctccgtcctcccggtctccagcctcccggtccggaagctccacgtggcgcgacagctcgtctctgtcgtctatggcggcggcgcagaagcagcgggagaaggcggcgtcgcaggtgtggcgggcggtggtggggtggattggcttccttgttcaggttctgcttcagatccttcggggcacgccgtcctgcgcctag

SEQ ID NO: 1873 - DNA, 303 bp, Zea mays
  Peptide Sequence Number=SeqID_45248
atgtgcagcggcggcggtgcccccctccctctccagcgcgcccgtaaacctacccaaccctacctctctctgatctcccctataaaccctccaaggggtttaggtgcggaagcaggacgtagaggcggagggaaggacgcgctgttcgtcgagctgtggaaggcatgcgcggggccgctgtcctgcgtgccgccgctcggggagaaggtatactacctcccgcagggccacatcgagcaggaacaaatagttgaagaagatgcagtgaaatttgtttgccgagaagctaagcagatgcactga

SEQ ID NO: 1874 - DNA, 909 bp, Zea mays
  Peptide Sequence Number=SeqID_45249
atgcgcgggctgcctcgagtcgctgcactggttctaaaacttatctttttagtcttctgtgacagccccgagaagacgtggcattggtgcgagtggcggtgcgatttttccgcactcggtaaccggctcgccagttgtatgacatgtgggcctgggcccccatgttggaccgccggttgccgcgaagctgagggggcgcataaccgcgaggcagttgtatgcttcctgtgtgttggttctccttttcgaccgctggtttcggtgaagatgagggagcgcttaaccgcggggcggttgcatgctcctcgtgcgtcggggcacataactacggggcagttgcatgcccttgtgcggtggttcaccttcttcgtgcttcagcccggctgcagtcccccgccagtggtcgtccagaaggatgaccaccagcctcgtggtggggagaagcaagtcgggctgcggcctccctcctgccctcagcttcaaggatgttcatcatccttgctggggtggaaggcgagccgagtcgaggtcctgccttccgcatgggccggtgacccgcttctttctccagcattgggggaggaggcgttcaccagccttgaggaggaggcgaacttcggctatgcggggccggccggctataagcgtcgtcagctgccgcgtgcctggctccccggctcggatggctctggcgccgcctccgacgctgcctcctgccgtttggtcggggcgcggctgtccgtccaccgcacgggcgacggtcgtgccgaggacgggggcgaggacctttttgcagtggcgctcaccctgaggtggtcgctgctgctggcaagccacccggagcgaaggtcgttgtcgctgctggtgcaaaggtggtcgctgttgaaagttccctttgcccaggaatag

SEQ ID NO: 1875 - DNA, 477 bp, Zea mays
  Peptide Sequence Number=SeqID_45250
atgggcacgacatcccatcgaggtttggtggcacgggagagtcccggctcaaaggagaactccgcggcgcgcagcgccattgtgcggagacgatgcttgggatcgaaggctagctcttcagtttcgccacctgtttgctccaaggtggccacaatttcaccacctattttctccaaggtggtctcggtttcaccacctgtttgctccgaggtggcaacagaatcaacaagagtgatctggcaccatgcatcaagcgaggggggcgaggattttggggagggtcttgcggtgccacccctgggcggatgtgcgggcgggcagatggcgttgagggaggaatgcgctggggcggatgtcgaggatggcatctgccgcaatccaccgatgtccggatgcggcagcagcgacctgtggaggcggggcgggctcggcatccgcgacatcggcctaggaggacgccatggcggcggggtctag

SEQ ID NO: 1876 - DNA, 246 bp, Zea mays
  Peptide Sequence Number=SeqID_45251
atgggttggcgcgagacggaacacgaagggggggaccgcggcttcgtgttatcctgcgccagactggaagaacacctccacgtgttcgacgcgctctacgcgcgccagagcacgcccgcgcccgaccccgcgcgccccgcgccacgccaagccgcgcccgcgtcgcctgctcgtgcccgcgcctataaatcaccctcaggcatcgaccgtactcctccgcgcacgctcgacctcaccggagcctga

SEQ ID NO: 1877 - DNA, 486 bp, Zea mays
  Peptide Sequence Number=SeqID_45252
atggaccggttaatttgtagtcccaacgatgaaattgatttgggggaagtgttcggcactctaaatgtggagggctccggtagtgcgctattcgcgctcttcgtccaccagccgccgccaggaaacttccgcgcattcgtaccccgcgctggcgactgcgtcttccggggccgagccctcgatccggcgcgcttcgccgccggcatcgagccaggagggcgagaagcggccgtgcagagggggatctatcggcgtagagctcgcaacccttggaaccgaggcggcgcgacccaccgcaaccgaagatccaagccagcttccccctgttcgtcgccggagagtcgccatcggcaaaaggcttcgtcgtccgccgacttcgtcgaaggcagccgccaaaaggaagagaagctcctcgccgccgtcgtcttcgtcttcgattcggtccaccgagccagatccgcgaagagcgagggtttacgatcttga

SEQ ID NO: 1878 - DNA, 174 bp, Zea mays
  Peptide Sequence Number=SeqID_45253
atggcgcaccagacagtccggtgcgccaccggtgcgccaacggtgcgccaccgagaaaacactgccgcggaccagcctggccccacctggcagatggtgcaccggacagtccggtgcacaccggacagtccggtgcccctaagccagaaaccctacctcttgtttttcagctga

SEQ ID NO: 1879 - DNA, 510 bp, Zea mays
  Peptide Sequence Number=SeqID_45254
atggcgcgcacgctgaggtggtcgccactgctggggaggctgcccgacgtagaggtggtcgccgccgctggcccacggtacggaaccaggctgagcggctacacgggctccagaccaccccaggagacaagctttcgggtacgggaccaggctaagcggccacagaggctccgaaccaccccatggaacgggctcccgttctttggaatcagcccccaggctatcggtccctcctgctttcacagagaggtcctaaactgcaagcctggccgttcaattcggatgtcattatgtctgatggaaagggaactgtttggagatgctccagtggtcaggaagaggtactccttcagtcatagcaagatagtcacctccgggtcagcgtattcccgtcaccttgaagggtccttctcagctgggggagagttgcggagcccttcttggtttggaacctggacccgtggggagtccagaagggtttccgggggaaggcaggcttcggccccgtag

SEQ ID NO: 1880 - DNA, 93 bp, Zea mays
  Peptide Sequence Number=SeqID_45255
atgacgaaggtgatgcttgccgaaggtgttcagagctcaagaaatggaagaaagcaggggtacaagcgtgatgtcaatgccaagtcagcgtga

SEQ ID NO: 1881 - DNA, 960 bp, Zea mays
  Peptide Sequence Number=SeqID_45256
atgggaaacggaaggtacgaggttaacgcccagcaagtccttcgcgagcgtgctggcatcgtccgtctgcttggaattggcgtgttgcggggaaacgatgctcgtcttcgtctcagacgcgaggtcgacgctcgacgtgtcccctgttggggcgccgacgccgtcgactcgctcgacagccgacgaggtgccgcctcctgcttggccatgcctgccccgcctcctcctccgtcggtggggaaggtgacgggacagacccggatgttgctcttccgccacgtggggaagacgtcgttgattccgccgccggcgggcgggctgacggccgccattgtcgttgtcgcgcggcggaggaaggagtatcatgtcgtagctgccgtcgacggacatgaactcaagactcccaaaacggagcaccgtcccgggttgaagtggttgctggagactgtccatctggagcttgacgggaagctgtttgtcaacacgcagcaggcccctacctggcgcgccaactgtcggcgtttcgaccccggggggtccctggaccgacgacccggggttgggcgaggcggtgactcctccgaggtcgaggctgagtccgggcccgggtgtcgggcgaggcgaagatcgttgtccgaggtcgaggatgagtccgagccctggggttgggcgaggcggagtccgtcgtccgaggtcgaggttgagtccgagccctggggtcgggcgatgcggagtccgtcgtccgacgtcgaggttgagcctgagctctggggtcgggcgaggcggagcttcctatggcgcccgaggctggacttagctgctgtcagcctcactctgtcgagtggcacagcagtcggagcagggcagtcgacgctattttcctgtcaggtcagtcagtggagtggtgaagtgactgcggtcacttcggccctgtcgactgaggagcgcgcgtcaggataa

SEQ ID NO: 1882 - DNA, 405 bp, Zea mays
  Peptide Sequence Number=SeqID_45257
atggtgctggcggtcgtggtgctgctgggcgccgtggccgtccttgtggtggtgctgctgctgctgccccgcgtgccgtacgtggcggtgcgagcgggctggcggtgctccgcacctacccgttccgcgtgcccgccaggggcgtcctcccgctggcgtacgtggcgcgcgcacagggcgccccgctgggcgacgccggcagcgccgccatggaggccgcgctccgcgacggcgtggtgccgttccgggtggatggggaggcccagacgcgatggaaggtcgcggggatcgtcggcgtcgaccagtggacgcgcctggcgtgccagctccgcttcttctggccccaacgagcaccgtgctccccttcagaatgcatctcccaagtccaagttcttgttcttctga

SEQ ID NO: 1883 - DNA, 630 bp, Zea mays
  Peptide Sequence Number=SeqID_45258
atggcgacgacgaccgcgacgagctcgggggagccgtcgccgcggtcgtccgggaagcacgcattctaccgaggcatacggtgccggagcggcaagtgggtgtcggagatccgggagccccgcaaggcgcggcgcatatggctcggcacgtacccgatggcggagatggccgcggccgcctacgacgtggcggcccgcgcgctccgcggcgccgacgccgtgctcaacttccccggcgcgatcgcctcgcgcgcggccccagcgtccgcgtcccccgaggacatacgcgccgcggcggccgcggccgcggccgccgcgcagctcgagtactcgcatcagggtcgtaccgccaatcctcctcctcctcctgcttctcctccttctcctgctgctgctgctgcacaggactggcatcaacagcacgacgcggcggcgagctacacgccgcagcaggaggccggcactgacgagttcatggacgaagaggccatcttcgagatgccgcagctcctgcggaacatggcggcggggatgatgatgagcccgccgaggctcagccccgacacctccgacgagtcgcccgacccgtccgaggccggggagagcctctggagctaccgtgacccgtag

SEQ ID NO: 1884 - DNA, 342 bp, Zea mays
  Peptide Sequence Number=SeqID_45259
atgggtggcggacagttgatcgtgttcccaaagattggtggcggtataattcaattgggtgggccggctggccgcggtgaggatgttcgtgcggtggcgcaaacccgatttggggagaacttggaattggagctcacggtggcaggactgggggtgatactggacgatgggttacaagggctcaaagttgtgctcacaacactgatttcagacttaggccatatagaggtcaagtggtactttttgcaaataaacccaaaacttagggttttgctttcaagtccacatatttgtgaaccaaaggacttaagacacttatttggcttggtttttgcactttag

SEQ ID NO: 1885 - DNA, 1575 bp, Zea mays
  Peptide Sequence Number=SeqID_45260
atggcggcgcaggtggtcgcagcggcgggcaccccggtggccaggccgctgggcggtggatctggggccgacgcgctccggcccgcggcgaggatgccaagggagagaaggaccggtgctgtggccgcgagaggacgccgcgagtctcaggtggtatccgtcataagccgcgccccacgccccgatgccggggtgctgccggtgtcgcccgacgacgacgcggccgtaaaggaagaagcaaacttccagcaccttaaggctatccagcaacttgcaactgcagcaaatggcgtgtggtctaaaccaaatgtaaggcgcaagacaaagattgtgtgtacaatcggtccttcaaccaacacaagggacatgatatggaaactcgctgagactggcatgaatgtggctcggcttaatatgtcacatggagaccatgcatcacaccagaaagttattgatctggtaaaggagtacaatgcatcacatgctgacaatgtgattgctatcatgcttgacacaaagggaccagaagttcgaagtggagatttgcctcaaccgatatttctggaaagcggacaagaatttacttttacaatcaaaaggggagttgggactgatacgtgtgttagcgttaactatgacgactttgttaatgatgttgaagtgggcgacatgctccttgtagatggaggaatgatgtcattcttggtcaaatcaaaaactgaagattctgtgaaatgtgaagttattgacggtggtgaattgaaatctaggcgccatctgaatgttcgtggaaagagtgcaaccttgccatcaataactgacaaggactgggacgacattaagtttggtgtggataatcaagttgattactatgctgtttcctttgtgaaagatgctcaagttgtccacgaactcaaggattatctaaaaagttgcaatgctgacatacatgttatcgtaaaaatagaaagtgcagactccatccccaacttacattcaatcatcacagcatctgatgggtttaagggcaggcacataaatttcaccactgtcaattattgcttgtttgacattttgggggctatggttgccaggggtgaccttggagccgagctgcccattgaggaggtgccgctgttgcaggaagaaattattagaatgtgcaggagcatggggaaggctgttattgttgctacaaatatgctcgaaagtatgattgttcatccaactccaacccgagcagaagtttcagacattgctatagctgtccgagagggtgctgatgcagttatgctttcaggagaaactgcacatgggaaatttcccttgaaagctgttaaggtcatgcacactgttgccctgagaaccgaggcaactattcctggtggggaaacacctgcagaccttggtcaggctttcaagaaccacatgagcgaaatgttcgcataccatgcaacaatgatgtcaaatacccttcgaacatcaatagtggttttcactaggacgggatttatggctatactgcttagtcactaccgtccatctggcactatttttgcctttacagatgagtaa

SEQ ID NO: 1886 - DNA, 291 bp, Zea mays
  Peptide Sequence Number=SeqID_45261
atgcacgagagaatttcttccgtgggtatgggaaacccgttgggtacccgaaacccgcatgggtatgggcttgggcaaaattttatacccgttatgggtatggattttttagcgggcgtattttttcttcgcgggtatgagtttgggcaagtaatacccaacgggtttttacccattgccatctctaaacgtggcagagtctgcttccagacgccgccactggctggaggaggagcgggaggagcaacaaggcattgtgaatttgtgatcgtcacattcctagagacctag

SEQ ID NO: 1887 - DNA, 432 bp, Zea mays
  Peptide Sequence Number=SeqID_45262
atgtgtggcggtgtgaagggcctctgcccaggcacggaccgggcgccgaaactgggtggatacccaggcgaagaagtgagtgagggtggtaaacgtgtcggacttcagccgaagggggaaagtccaaaggaaatgggagtagtcgtccagaatgaccaggtagtatttgtagccggagaggctaaggacaggagacgtccaaaggtcacagtggacaagatcaaaggtctgaacagccctggacgtggaagtggaaaaaggaagacgggagtgacggccaagctgacaagcatgacagaggcgctcagaagagccccgagtataggatatgacagagtggccagcaagctgggacatgacgtcaggtccagggtgcccgaggcgacggtgccaaatggcggagggggtggtggtagtagcaagagcatgtga

SEQ ID NO: 1888 - DNA, 450 bp, Zea mays
  Peptide Sequence Number=SeqID_45263
atggagcacgaccttgcaggacttccagctacacctggcttaaaattctcagaacctcaggtttaccctcttaatttgtcctttggcattccatttgtattgaggtttaagttctcacttcaaaagatggtcatttcagatgctaaagaaccatgcattttaacaaatgaacatcaaacggatgttaaggctattgagtggagaccaattagtgggaagatgattgcatttgcttgcaaggttgggaactcctatacggcgtggattaagcaatatatcattagtgcgatggtcacccggtgtagattacctttgctgtcacttatacaggtggaacagttgcacaaaatttttaagctctgcggttcaccatcagaggagttttgggctaatttgaagttatcccgagctaccatattcaagcctcacatccgtaccgctgatgtgtga

SEQ ID NO: 1889 - DNA, 1332 bp, Zea mays
  Peptide Sequence Number=SeqID_45264
atggattctttagacgagacaaatgaagtacccgttgatgatagccaattggacaagcattcaacagttgataatgaatcacctctcgatggaaaaatagatgagcataccagacttcctatacatcctattgaagaagatatatttggaacacagataaattatctagcgccaatagatgaatgcaaatttgcattgcatcataataaaccaaaaaaggacatggcgactgtaattgttcaagaagattatatgtgtaatcaaggagatatgacccttatcgaatcaattaaaaacattccttatgcgacaatggatgttgaacttgtatgcattggctctcaagtaatttccaagaaatttatggaatgtctatttcaaccggattcttatttgagggatgagatcataaattcttacatatacttattgatagcacaagaacatatgaagcagcgtcctggtggtacagtccacatagagattacatttgtgttcataactataaacattcgtgaacttcactggtatcttgttgtgcttaacgccaaaagacgagagatacaaatactcgattcactgggttcttcattgggtcataaatatctcgattgtgttctaaagggtttacaaaagcaaatagatggtgtgtcgcattacatgaaacttaaagaccataattggctagaccttcaagttgtctattggccttggaaacttatagagtttaaagatgccaagcagacagatatgccaaaattgaccgctattttattgtcttcggatttgaacaagagaaagggatgtctgttatataaaaataagacaaataaaagtacagaagacaatgagactaactccagtggtgttgagattttagaaccctccccaaatcctaacaagaggaaacgaagccctccgattagccccgaagatgatcatatatcattatattttgaagaaatatgtgccaaagaagagaatgatgtcatccctaatccaaccttcgttaatgagtgtggccaggactctttaattagtggtctttccacgaaggatatgccagtaagaaaagcagatatgatagagtttctatgcgattatatcatgacaattcaagatgccacaattttagatgttaatactggtcattttgctctgcacattatggagtggtgggaaagtgggttaaaagcgcaatttagtatggatggtgcgactctgcataggaacttacttattgatctgttgacatacgaggggaacacatatcgatttaacattcctgtaaatatacgagagtaccttgatcgtattatggaaaaagattag

SEQ ID NO: 1890 - DNA, 165 bp, Zea mays
  Peptide Sequence Number=SeqID_45265
atgagtcaaggaatcataagaatcaagcccaaaggaaaagccggccttcagaaatgcagcagcggtaccccgagaagctacccaggcacagaagtcgccgtgcccggctataacttcgtcaagctcttcgatttcagcttcaatatgatcgaaggcctggggtaa

SEQ ID NO: 1891 - DNA, 969 bp, Zea mays
  Peptide Sequence Number=SeqID_45266
atgaagcgtgccgtattctgggcggcttctggccgccagaagcagaagccacggccaaacgcccagattctgggcagcttctcacggccgcgcttcgcacagaagccgcgcgcgtcacatgaaaccaaaagccgggcgaagcaggcttcctctggaagccgcggtctcgcgatagggtttccaccgcgcccgcgcctcagaggtctctcccctcgcaaggaccgccgccgccgcctccgccgcagcggctcgggggccacgaccacactcccatttgctcatccgccgcattcctcctcaggtacgcggttcatttgcattccgtttcgtatccgctcgtcctcctcccccggctgcctcgtttcgaaaagggccgtgaccattgccgcggtcgttgatggctccgtcacccttcactgcgctagggttttgaccgaggagccgcaactccgtcgtcaactcccactgccatcgtcaaccttggactcctcccctctttcgcatctcggcgtcttcgcagataccatcttcgtctcccccatctcattctcaagccgaacgaaacaggagtacccttcagatttccgcatcaactctggttattcgtctgaggttccaagatccacttcagccaaggagatttcggacaagatattttccgtagcgagggaaacaatccgtcctggacgcgggttgacctcatttgatgctaccaaacttcgtgtagctttggaggagatagcttgcatgctggagcaagactctctggtgttgcaagagcatttggacatcgtgaacaactttaacatcccggttgacagcagctatgaaccttctaccttgtcgtcaccacccccatctgacgacgacctgactccacattgggactttgcggagcatttccaaaacttctggggagttgaatatgactccgatcagatgtcttcgtttaatgacaatgatgtttaa

SEQ ID NO: 1892 - DNA, 183 bp, Zea mays
  Peptide Sequence Number=SeqID_45267
atggcgcaatctcagctcactgcaatcttcacctcccaggctcgagcaattctcctacctcagcctcccaatgcatctgaagagcgccagagaaaaaatggaaacttgcttggcagtgatgctcctgaactttgggaagattctccagggagggacagcggaaaaggggaggagaggctctag

SEQ ID NO: 1893 - DNA, 1908 bp, Zea mays
  Peptide Sequence Number=SeqID_45268
atggccaggccagcacgcaaagccctgataggcgcgccctccgccgcgcgctcgcgcggcctacggaggcacgcgtttccaagatctgctgtcgctctcttcctcgccctcctcgtcgcgctgtccttggcggtgctataccgtgccgccgtctcgcgctcgctggggacgtcctggtcctgggggtgggactcgctggcgctgccctcgttcgccacatcccaggaggaggagggcgcggaaggcgacgatctggacagtgaagatctcaaacttgagcgagtcctaaagaaggcttcaatgcgagacaatacagttatcttgactacacttaatgctgcatgggcttctcctgggtcattgatagaccttttcatcgatagcttccgttctggtgttagaacaaatttgctgttgaaacaccttgtaattgtagcatttgattggaaagcatatgaggaatgtgttaaaatccatccctattgctttgctctgggaaccgatggtgtggatttctctgaagagaagaggttcctgacttctggatatctcgagatgatgtggagaaggctagatttcctgcggctggttcttgagaaaggttacaacttcatattctcggatgcagacattatgtggtttcgcaatccattcccacatttctatcccgatgtagactttcagattgcatgtgatcactatgtcaggaatgcaaccgacttgagaaatattgctaatggaggcttcagctatgtgaaatcaaatgagcgtagcatagagttttacagtttctggtattcgtcaagattgaggtatcctggctaccatgatcaggatgtattcaatgctataaagcatgatccttacattgtacacattggattgacatttaagtttctgagtacaaagtactttggagggttctgtgaaccaagcagagatctgaacgaagtctgcactatgcatgctaactgttgcattgggctgcaaagcaagattcatgatctgaagattatgatggaggattggaggagttatttgtccttgcctccaaatttgaaaagattgcaaatatctacttggcgggtaccacaaaattgcagaaacgctcaaaactggcgtatccacacagccaccctcacaggagcctgcgcgctcctgtgcagaaccctggaaaaggggtaccccttactacagtataaagacacggtacctgcggctatctctagtcgcgtggtaaagaagctgtgcgtgggaccagaccacggctcgccccagcctcaggcgactactctgcgccagcagcagcacccgaccccaccacgtggacggctccggggccgccacgtggccagaaaagataatatatcccaaagtatcaacagcgagtccggacccccatgggaaagcgtcggacccctgtatatacagatcgaacctcagggtaaggtccagggcctccacgtgcgcgaaccggaccccttagatgggttccggacccctctttgtggggtccgggccactcacagcagggtcccgggattctgggacaaagaatacccacaccttaatcaaggccagacgggggtccggagccaacacgtgtccggaccatactgtatacgcttccgctccccgctcagggccttacgtggcatgatgcacgtgacgcgatgtgccgcctcggcatttaatgagccctgtccattcctctggcggacggcgaccagaccatcccgcatgcggcgtgcctgtccaatccgttggcaggcgacgtgtccacactgccacatgcgctacactcatgatgactcgcgcgttaccgagaaagcagccgcgagatatcaatactatatggactacatacattatggcgctcgaagatcgcccatgcgttacaggcattag

SEQ ID NO: 1894 - DNA, 102 bp, Zea mays
  Peptide Sequence Number=SeqID_45269
atgggtgggcccgttcggacggtgactctggtgcgcgcctgcgtccgctggttgacactggcagcgagacccggtcgtcaggatttttattttaatgcctag

SEQ ID NO: 1895 - DNA, 645 bp, Zea mays
  Peptide Sequence Number=SeqID_45270
atggggacagacacggcagttgacgtgaccgaagccggactgacgatgagtgcgtcagtaggcacactgaagcggcgcgccagtcaccaaaccggacctccaggtaaggtccagggcctccacgtgctcgaatcggaccccttagatgggttccggacccctctgtgtgggagccgacacgtgtccggaccatattgtatacgcttctgctccccgctcaagcggagccccgatgctgccacgtggcatggtgcacgtgacgtaagccaacgggtggagcctgacgtaaggcctctgggccacgtggccgctgcatttaatgcggcgaaggcacaccgcctgtctattccgttggcaggtgatgtgccgcctcagcatttaatgagccctgtccattctactggcaggcgatgtgccgcctcggcatttaatgagccctgtccattcctctggcggacgacgaccagaccatcccgcaggcggcgtgcctgtctaatcggttggcaggcggcgtgtccacactgccacatgcgctacactcatgatgactcgcgcattaccgatgaagcagccgcgagatatcaatactatatggactacggacattatgacgctcggagatcgcccaggcattacatgcattag

SEQ ID NO: 1896 - DNA, 3211 bp, Zea mays
  Peptide Sequence Number=SeqID_45271
atgctggacgaagccgcacggtgggatgacctcgttgtaggtcttcgcccgatgtcgaatggagcgaaggatgtcctcgcccgttgtcttgtctccgttggaccggcgaccacggcgaaggcctcgagcgaagggtgcgactgggttactttggcagcggagtcgctcgtgtcccgggggacggaggaagtccccatgccgaaaggtgagttggttgtgttcgaggcgttcttcgctgccggtctccgcctgcctgcgcaccgatttgttggggagccatcagtcgaagtcttcgcgaagtactattgcctgcactggcagaagaggatgattggggatgaagttgcccagtttgggtcctgtacatttacgccgaagaccgacaagaccacgatggaggtagtggagttagttccctgcgcccgcaacaagtggggcaattggcaagatttttggttctacgtcgcggagggtaccgtcgaagaccatccggggctccccgtgtccgagatgtgctcacatttctacttagcatacccgccttttgaagtggcagaggaggatgcggacgaaggggcccttcggtgcgccgccggcctgagcagcgggcgcgatttggttgaggaatttattgcgtacggggtatggcctttggcgcatggctgggcgttgggcgaagtgtgccctcgccggatgccttcccatggtgggaagctggtgcgaagtcctgtcttcgcgctggatctgcatagccgtgatccggctgcctttgtgcgtgaggcggaggatggggcggtgcggatcgttggtcaatacgtgccgaggacagagggccagcgcagctgggatatccgcgggtcgaatgaccgtttgaacagggtttttgaaatgaatcgactgccgtatggtggttatcccggccaggatgatgtggatcgtcgtgggaagaaaccggcggtagagtctggagacgaccccgcgccggcggccgccccgtcctcgaagaagaggaaactaggtactgctgtgggaggacttggggtttccgatggttttgctagagaattgatgaggacatgcgcggccccggggggaaggatgtcttcgcccgagctccgggagtcttcgacgcggatgctgagggttaccaggggttggtggcctaggaatgttcctatcccccgcgcggccggcgaagacttttttacatctcgcatggttcgtgagtggaaagtgtttccttacgggcggaatattgctgttgttgtgtcggcagtgatggacaaggatcgccaaggagctgcacagaagcgccaggcggtcgtcaggcttcatgaagccaggctgaagaggcagcggggggctgcgaaggctactgcccccggcggaggcctaccgccgctggcggcgaagtcggccatccctgcatccagcagggcgccggaggctgcggctgccgccggtggttccaagactgcgaaggctgcaccggcgtccggcagggtgccggaggccatgaaggcggcccgagggttgccgccgccgggcaagcgcgtcgccgacttcgccaccgacattagtgtggaagactatcttgttgggttggacgaaggccaacttgtcgttgatccgcctgccgcggcgaccacggcagttgccgtagtgccaaaggcgaagggtggtgctcttagtgctggcggcgagatgccggcacttgctgctgtcagggacgaggcgggcgctgtgtcccgcgggctgaaggaggtgaaggaggcactaagtcaggcggctgacttcgcagaccgcgcggcgtcgggggccttcacggcggttgtgtctgccgaagtcgagagacttcggatgcaacatgccgacgccgtccgggaaaaattggccgccgacagtaagtgccgcaagctggcggacaaggtggccgcgctggtgggggagaagactgacctccggcgccagctggcggaggagaggagggaggccaatgaggccctcgccaaggcgcaggctgcgcaggcggaggccaatttggcgcgggtggagggcggtcttgccagggagcgcgccgagcagttggaggagcggctccgtgccctgcagagccgtgtggagagggccgaagccgcgacgcgcacggaggttgagcggactcgcaaacagcttatggattcataccatgagctgggcgcgtggaccgctgagttcgaagtgccggaccgagagcccggacttcgctgcctggagtgggtgcaggaggagttgcaggcgctccccaccatcgtggaggggtttatgtcttatgcttccctggtcacctgcgagggggcgatgaacgcgctctctcgcgaagggtaccggcattatgaagtcttcgaccaagctgatgaagatttcgagcgtgatatctacaaggtcgaggactctatagtgaaggaatccgccggagccctctacgaccggatgtggggcccctacggtcgagaggtggtcagggaacgggccgagacggcgaggggtcaggcggcgcgtggtgagagggtggatgactttagggctttgaacagcacgctgcctgacccggagtcgaacccggcggaggccgccctggagccgctcccggagaccgccgaaggcgcccctgatgcccccgcagccgctgcggccggcgaaggcccacccccggagaccgccgaaggcgttcctgatgcccccgcagccgctgcagccggcgaaggcccgccgccaactgctgcgccgagggttgaagatcctgcgacggtggcggcggaggcgacggcggaggctcccgcgacggctgggtcttcgcaggttcaagattttgggcctgcgcacgcaaccgccactactaattttttggcggcttcgatcgtggatgatggtaataaattggatgggtctatatctaagttttctgattttggcgactctgggagcttggttgagtggactgaggagtcgtcggatgaggacttggactattttgcggccttggatgtggcagcggcggaggcttcaccgcgcactgcggatgcagaagatgtgcctggtcccagtactgggtgtaggcggcgaagggcggttgcgaagcgtagagtgagtggggcggacagcagtcggcttcgtgtgagtagggccggccggcaggaactgttgtccttgccggccaccgtgagtacag

SEQ ID NO: 1897 - DNA, 1263 bp, Zea mays
  Peptide Sequence Number=SeqID_45272
atgtcaaagcgagaacatatcgtgcatgagaaagaaattgctatttctgatattcaacaaactgttgaatctgttcagcttgacatcaagcaccttcttgaggcagcagcagcaaaagtggcagaagttcagctagaggtgaatcaactttatggttttgctgaaactctgaattcacttaacatcatccaagagcatgatattgttttcaaggatatgcttcattcagagctgactggactaaccaataccatcggggagagctacaggattcaagatgaatgcaagctcccaatgcacatatcgcctgacgtgaacctcgatcggcatcaggaggccaacggaggatcagagcaggaaggcgtggagcttgagctgcagcgagagcttgggccggaaaaactcagggagaagctgaggcaggagtgcctgtggaaggggacggaactggcacatggggtggctgacgccctcttcgctgtatcacccaccgaggacctcgacggccctattgtacacctcccaccgcccgctgttcgactcccgcgcgagaagcatgtgtccgaggaggccggaaatcatctctttgtggaatcctgcattcctctgcacgacttcacgtacattattatttcacatgacaatgctacagttacactcttatctaattcacacgtatcatttttgcagcttggtgctgggacctcactgccaggattagtagctgcaaagatacttgtgttgccaccttatcagggtgaaggctatggtcttggtcttcttgaagcaatcaattatattgcacagtctaagaacatttacgatgttacaatagaaagcccttctgattccttgcagtatgtgagatcatccattgactgcctctgtttgctcatgtttgatccgatcaaacctgcactcggtgctattgtctcgtctctgaaggagaccaacctgtcaaaaagggcccaaagtttgagaatggttccaccagctgacctgatggagactatatgtcagaagctgaagataaagaagaaacagttccttcgtttcaataaggaggcatcttttgctgtgtattggacacatgagattggggatgaggatgaacaaactgttgagcagcagccagaggatctgaggacgcaggagcaacagctcaatgagctcgtggacatccaaatcgaggatattgctggggtcgccaagaacgtcacttcacgtggcaaggataagatggcagagctggcggttcaatga

SEQ ID NO: 1898 - DNA, 747 bp, Zea mays
  Peptide Sequence Number=SeqID_45273
atggttgctatccaagggggccgccttccttttaaaggcgactctccccacttgcgtcctcagccgtcgcggactgagtcttcaccaacacgctccaaggtcttccccctacgacacaggggctgggtcccacgcgtcatgcaagctggcccagggcagaagaagccaaaccgccgcgcgcagagcgccaggacaagcggtacctttggcaggcgaagcaggcgacgcttcacctccgccatgatgaccgcgtcaaaaagggaccgggaaaggggatactccgaaagggatccttcttcgcgaaggaaacgggccccgagcccccctactgatcagaggctggcccccgaagggttcgacagccgcctcagagcacgcagagcgagggatgactctgggtacgtccgatacatggccgaggctcgggctacgctcccgaggtcaaggctccgtccgctcaagggacacgatctcgcctcgcccgagcccagcctcgggcaaaggcagccgacccaggaggattcacgtctcgcccgaggggctcggactcaacctcgacctcggaaggcggtctctgtctcgcccgaccccagggctcggactcagcctcgaccttggaagacggtctccgcctcgcccgacccccgggcccagactcgacctcgacctcggaggagcctccgcctcgcccgacctcgggctcggaccgaccacgtcacaggtgggccatcattaccctactcctag

SEQ ID NO: 1899 - DNA, 561 bp, Zea mays
  Peptide Sequence Number=SeqID_45274
atgcaagcctcgctccggatggttgagcacgggttgctgcaaatcaaggcagcagtgcaacatgagcagcaacaaccggtgttgtccgcacggctccagatgtcagcggctgtgggcatacaggctgctgctcgtggcttccttacacgacgtagagtgcgagagatgtgccggcagatgctcgaggtagccttggtgacggttgacctcggcacatggggtcgcgacctcgccctgtcgaccggccatcagcagcggcaccagaccactatctccaagtgcgagcatggtacgtgtcccgcgggcgacaaacttcaactctacgacagcgacggtagggaaggcactcccctcatcatcgacaagagcgcgctgtttagcgccaccatatttcgctaccggccgccacgagggcgcctccgctggttattgttgcgacatattccaggtgctcgtccatgtgctcctctttcgtccagatggcatccatgggatccaggtggttgcacacgtgcaagtctaatgcgcggagggtgtccgccttatcatatgaggtcataa

SEQ ID NO: 1900 - DNA, 1740 bp, Zea mays
  Peptide Sequence Number=SeqID_45275
atgaaaatccttgaagccgaacgatggctgaaaggtaccaactcccacggagttgcgttcctccaacgacaaggaggaaggactgtgggcgtcccccatccgggggctcggaagccgtcgtgggctgagtcttctccaacgcgctccaaggtcctccccctacagcacgggggctgggtcccacacgtcatgcaagctggcccagagcagaagaagccaaaccgcgcgcggtgcatgcaaccgcccagcggttacaagcagttctccacttttgcccagaccagcgggcgaaagggcgggcagccatacagacggcatgcaaccgcgccaagtgggcgcgcctctccgacttccaacgcgcccagcatggaagcccacgcccacgcgtcatgcaaccggcgcgccggtcgctacgtgcaagcaactgcacctccactcgcaccactgtcacgcctcctcgactacggaaccagtaccgcgactcgaggcaaccctgcgtacgacccagcagtgccagccaggcgcgacggtcaatgcggccaaaaatgggccggcagtgatggcggtggcaggcgggcgggagcagcggtcgcgtcgtcagccaagcttacgtcccatcctggggcagtgagagagccctctctcacgggaccgggaaagggggataccccgaaaaggacccttctccgtgaaggaaacaggctccgagcctccctactgatcagaggttcgaaggctggcccctcggaggggttcaacagccgccttagagcacgtgggctccacccccactactggtcagaggctggccctcgaagggttcacagccgcctcagacacagagcgagggatgaccatgggtacgttcgatacataaccaaggctcgggctacgctcccgaggtacttttgggcgcgcctctgggcctctagccgacccctaacaaatggggcacggacgtccgctcggattacccaccagcagctcaccggagacaccatgttcggcgcccaccgaggaggctcgggggctgctctcgcaaacccggctccggccaaaccgttgacagcgtcaacataccagcccgagaacttggaacccgaccccgaccccggaggatctccatctcgcccgaggcccccctccggcgacgaacatacttccggctcgcccgaggccctgtcttcgccaagaagcaaccctgaccaaatcgccgcgccaaccgaccagatcgcaggagcatttaatgaaaagaaggacagcgccgcctgcgccgctccgattgctgtgccgttcgacagagtgaggggacaggcagtcagccccggcctctggcaccataggaagctccgcttcgcccgaccgagggctcggactcgggctcagccccggaagacggcgaactccgctccgcccgacccagggctcggacttgggctcagccccagaagacgacgaactccgctccgcccgacccagggctcggacttgggctcagtcccagaagacgacgaactccgcttcgcccgaccccagggcttggactcagccctggcttcagccgacggtctccgcctcgcccgacccaggggctcggactcaacctcggccacggaagacagactcgacctcgacctcggaggagcctccacatcgcccaacctagggtgcgggccgaccacgtcaacaggaggcgccatcattaccctaccccaagctggctcaggctacgggaaataa

SEQ ID NO: 1901 - DNA, 942 bp, Zea mays
  Peptide Sequence Number=SeqID_45276
atgcagtccggctgcacccctccgccggtggtcacccaagacggtgacctccagtttgatggcgggggaaagcaagccgggctgcggcctctgcccctccctcagcctcaaggattttcatcatcagtgctggggaggggagtgtgccgagttggggtcagcccctgcgtgggtggtggcctgctccttccctcagtgatcgagggaagggcgttcgccgtgcgtggcgccggcggctgccgtgtgcccggctctcggacccgagtggcttcggagccgctcccggcgccgcctcccgccacggcagctggaagaggttcttccgccgacgagatagccggggccgcccacggaccgacctccaactctacggccttctgcccgtccttgcctcacgagtttgggcacgagcgggggcctcctggcagcagcatccgccctgaggtcatcgctgctgctgttcggccccccggagcagaagtcgtcgtcgtcgtcgctgctggagcgggtgacgttaaaggaacccctcggccgctcttcgatgagccgaggccaggggtagcggtgtcagcacggacagaggcagagttggctcgaaaagaagacttggttggccggagcctggccgggtcgtccgttagcaggaccgacaccggagtcgatctgccgaggcctcgggccgggctgatgtcttcgggggacagctggccgaggcctcggggtgaccagccgagccgcctgctcgagccggattcttggaggagacccaggcggcgatggcccgggcgtgatgatgaagtcatccttcagagtggagatcctcgaaccacgtcgccgtcggaggccaggtcggacctcgccgaaggtgtagtcaacgccgagggtgctgctgctcccttcagccgtcaagatctgagcctacaggatcggattatcttgtag

SEQ ID NO: 1902 - DNA, 63 bp, Zea mays
  Peptide Sequence Number=SeqID_45277
atgacggtcaagaacatgtaccgcaggatgaggcacatggaggatgctatgatgagttcgtga

SEQ ID NO: 1903 - DNA, 1200 bp, Zea mays
  Peptide Sequence Number=SeqID_45278
atgcaggcagcatgcaaccgcaccaagggggcacaccctttcgacttcgatgcatccagcatggaggcccaggcccacacgtcatgtaaccagcgcgccggttgctacgtgcaagaaactgcaccgccactcgcgccactaccgtgcctcctcgactgcggaaccagtaccgcgactcgaggcaaccctgcgcatgacccaacagtgccaaccaggcacatcggtcatgggccagtcagccgcgggagaaggcgcgacggtcgatacggccagaaatgggccgacagtaatggcggtggcaggcgggctgaagcagcggtcaagtcagaccgggaaaggggataccccgaaagggatccttctccgcgaaggaaacgggccccgagccccctactgatcagaggttcgaaggctggcccctcggaggggttcaacagccgcctcagagcgctcgggctccgcgcccgctactggttggaggttcgaaggccgacccctcggaagggttcaacagccgcctcaggccactcgggctccgcgcccactactgatcaggggttcgtaggctggccctcgaaagggttcaacaaccgcctcagacgcagagcgagggatgaccctgggtacgttcgatgcataaccaaggctcgggctacgctcccgaggtaccctaggacatttccgagaccaacgggaacgatttttgtaacggaatcccatcagagggaggcatcgagccctcggaccccgtcaaaaggggaccgggtccggcaaatcacctgcagagtgaggctgacagcggtcaagtccggcctctggtgccataggaagctccgcctcgcccgacccagggctcggactcgggcttggccccggaagacgacgaactccgcctcgcccgacccagggctcggactcgggctcggccccggaagacgacgaactccgcctcgcccgacccagggctcggactcgagctcggccccggaagacgacgaactccgcctcgcccgaccccagggctcagactcggcctcggcctcagccgatggtctccgtctcgcccgacccaagggctcggactcgacctcgacctcggaagacagactcgacctcgacctcggaggagcctccgcctcgccctactcagggctcggaccgaccacgtcacagaaggggccatcattaccctacccctag

SEQ ID NO: 1904 - DNA, 192 bp, Zea mays
  Peptide Sequence Number=SeqID_45279
atggctgatgtcatccctattgctccatcactcgatgacatgtggggaccttttgctagaactcctgttcttgtgcttcatctcgccatgcccaggagacggagccatcgcgatcccaacggaaacaataaactcgcaggtgccaaaggttcatctataactatacgaaatcaactgtccggaataccgtag

SEQ ID NO: 1905 - DNA, 2232 bp, Zea mays
  Peptide Sequence Number=SeqID_45280
atggatgagggtataactaagacacgagctattcgatgctcacctgggaaatttataaagcttgtgaattctctatctgatgaattgaaaagtgaagtggttgctaaggggtttggcggcttgctgagattcaagccgcacttattgtcgagaaagttgctcagctggctgatgcggaagcttaacccagaaacgatgaaattagagattggtggtggaaaagagattcaaatcaccgaacacagtgtttggtgtgttttgcagttaccaaacgttggcaatgatccgccccccatgtctgatgcagatgctcgtgccttgcgggacgagctgggggagcaaatttgtggcaaatcttatagacgcatatctggtatcaatatatctgttatcactgatagattgcagaagaggactctcaatggggagctgggcctgagagcctttttcatggcagcatttcagtgtctgctattctccaatactgacactcgcatcaggattgatgatgtgaagtacactcaggacatccagaacatgggcaacaagaactggtgcaaagctgtagtagacaggctgagcatagctgctcgtctttatagaaaggattttgcggagaaaggcattaatgcacccatcagtggatgcgggatctttgtagctatgctttatgtcgacaacctgcaacatggattagacacaagtcctttttcaatccctcgatgtgctttcttggactccaagatgattgatgctatagcaaatatggatctcaggggagatgttcctcctgggaccactgagtttggacacctcaggttgagaagtatcactgacacgtgctacagcgtccccattggtgctctagcaatattacatgctccagtaccagcacctgccccagtagcagtccctaatccaacagcagcacctaactcagtagcagcagcatctgtcccagtagcaacagcagcacctactgggacatctgctgatgtgcttggcacatcccatgatcccgtcggtcatgcttccttcaatatccaacccccagtcttttaccagtaccctagctttagatcttcttttggtcagagtattactgatttagttggaaggagtagcaagtcagatgcgctgaacatcttgaaggcgtttgatgaaagcactagtgaagcccagtcgtacgcacagaaggctgtgaagtattcaacaatatcccgcgaccttatggcaaaagctcaccacgagtgctacactggcattcagaagcttatcgctgacgctatcgttgagaagcgagctgccaaagagcgcaggaggaaggagcaggaactagttcaattgcaccggaggaccaatctagaggaggtgatggtgaagaaattatacggagtcccgttgcaattgacactagagcaggagcaggatcaggaactacttcaaatgtaccggaagaccaatctagaggagtcccctcccaatagccagccgactcgtgcaccacgaattactgttcgcaagaggaaggcttcctcaaaccccgctggcaatgatcaacggcctgtggtaagatcatctgatacccatgtgaaagcagtccatagttgcaatcgggccccacctattgtagtaatcatagcttataccaacttgcaattaatcatatattatgaacaaggagcacctgagacagaagaggagcctctaagcagggacactgggatgcagcatcctactgcccaggatcatataacttactcaaggaggagcgataggtccattcaagttgccaacacacagaagacagaggctgagaagaaggctgagattgagatgaagaatgctgaagctgaggaggctgagaagagaaaggctgaagccgaacaagctgataagaagaaggcagaagaagctgagaataagagaaaggctgaggccgaagtagctgagatcaagagaaaggctgtagctgagatcaagagaaaggctgtagctgaagaagctgagaagaagaaggaagaagaagctgaggataagagaaaggctgaggccgaagaagctgagattaagagaaaggctgaggccgaagaagctgagattaagagaaaggctgaggctgaagaagctgagattaagagaatggctgcagctgaagaagttgtgaagaagaaggctgatgccgagaagaaggttgaagcggaggagaaaaggatacaggttgcaatctag

SEQ ID NO: 1906 - DNA, 513 bp, Zea mays
  Peptide Sequence Number=SeqID_45281
atggcgccccgaatcctcatcttcaagccgcgaacaaacaaatcccgctccgatcgcgatccccacgccgttctccccgtcaactaccacctccttaactctcacgccatggattgcagcgatatacccgccctctgtgccgtcaaagagctcatctccatcccatcccgacgtcgtccccatccgtctcgccccgccccgcaaccaaaatccccgtgcgatcgtgagccccttgcagctgcgcggaagatcttgttcaatcatcgccgccaggtccccatactagcagcggcgcggaagatcgtgagccaccagccgacgggatatcggtcgcgagctccgcgtagcagaagcagtgccgatttgctgtcgtggaagcccaacgacctcgccatcgctgccagctgcacggaagatcttgttcaatcatcgccgccaggtccccatactagcagcggcgcggaagattgtgagccaccagccgacgggatatcggtcgcgagctccgcgtag

SEQ ID NO: 1907 - DNA, 513 bp, Zea mays
  Peptide Sequence Number=SeqID_45282
atgccgtgggggcacatcacctgtcagaagggcggacaggcggcgtgtactttccgcaataaatgcggaggccgcgcggctcagagcccttatgtcatgctctgtccactggcctacgtcatgggcaataagccatgtggccgcattagaccctcggtcgagcggggagcggaggcgctccggatagagcctggacacgcgtcaataccggacccatgcctaggttacggcactccctctcccgggaccttgttatgggtggtccggagctcaattgatggggtccgaaccccatccaatggctccgggctgctttacttcgggggtccgggttgtgcgcataggggccctgcgccttctaggcccgatggcgttgtctccgagaacgccaccttaactgctcacgagatacccctgggactgttctccgcgcggctaagggtagccgcgcaggcatcgtgccttcataccgtagtaaggggtacccctaatctagggtaccgacagacataa

SEQ ID NO: 1908 - DNA, 678 bp, Zea mays
  Peptide Sequence Number=SeqID_45283
atgccaccgccgagccggccactccctgatccaaaccacgaccccgcccagatccagatccacccagctcagcgcagccgcgactaccggatctcacagcagaatattggtctccaagggtgcggcgccgtcgctagagtccgactcttgcattctccgggagtccggctcgtgcattcagccggcggcggagggtcggttgcgcgagaggacctcacgacaatgatcccaaggagggccctgttcccgctcgcgtgccacaaccgttcgaacgcgccgccgcccacacgtaccctagcctccatccccgcggccgaggcggaacgagaatgcggggcacaagacgccagagtatcacatgatgacaccgctgcgctggtggaggaaccgacgtcgctcgctgagctgccgcggtggagattgcgcagcatgtgggagctcacctccgccctcaacttcctccacataaggtggtcttttattctctatggggcttttaggatacatcttctcgagaagcaccataagtcttgtcttgggcattgcaccagggctagccactctgctacttggcactctcagtctgaagttcttgaggagcggcagatccagcttcctgcttatcttggctcaggcagacaaatagactccttccttggggcttctacgcctcactga

SEQ ID NO: 1909 - DNA, 591 bp, Zea mays
  Peptide Sequence Number=SeqID_45284
atggaaaagtttggctggcctttgctcaatttcaggatgtttctggtgttcagcctgtccatcaacaacagccaggtgaagactttaagcttgtttgaacatctggactcccatatccagagtttgatttcagtcattttccaattttgcctcacaactagaagcacccagatggctaacagtggtggtgccagaataggggaagatggggctcttagatggtctgagtggttagcaaaagacgaggagagtagacaaaaattgtctacgcaagaaaattcacaagagactgaaacaggaggctggagtggttggtttgatccttctctgggtaatactgacgcaaatgatttgtcaaagaaatcactggaaccatcattgagcgacggaaaaggtgcggaagaccttgatgctgagaactcacctgcacaagatgatgttgaatccttgctgaaaaagcctggtatcgctgtagatgcagaatcctatagtgaagctaaagatgcagaaacctggaatagatgggccttgatggagttgtcacgggacaatgagccatggatgcctcttcatgaaaaatatagcaattag

SEQ ID NO: 1910 - DNA, 1350 bp, Zea mays
  Peptide Sequence Number=SeqID_45285
atggatcattgtccaggaaagaaagatagatcgacgatcgaggaaggatctgtcagagctggagatacggaaggaatgtattgctgctcagtgcttcactaccaacaacattgggtctctggcaacgacatagtactccgtggaaaggcaccagtgcaggcaatccagaacgccgggagtggccttgacgttgtaccgcgaaatatgcccttcgtccctcagccgcgagagggcagtgaggtccaggagcctaaccctggtgcccctcacggcacccttggcgtcggcgtcctccgaacggtcgaggtggacgccgctccctccctggctggtgttgtcgcagctgcctctggtgtcccagtccccattgaagaagtgtcggggcgatatcgacctgtagaacgccttcatcttggggcggcgggggagctgcgcgtccacccacctaacgacgctgtggacggtgaagttcttggccttccagatgacggcagtgttcctgtcgttgttgggcgctccgccgagatacatctcccacctgttcgccctcagcttccccgggttctagtggtgggtggtgttgaggaccaggacgtggagcctgtggaggtcactcttcagaaaagcaggcgggcggtccaggaccaactctctgaaagccactgcttacaaccaaaccctgagtatagtggtctacgattgttagaaacccacttcccattcctggcggaggcgctcctttccttcttggccagcgacaacatggactgggcagcggcttccgggtctctgtcgtggggtgcggcggcgacggaccccggcccgaccatgctgtccttcgcaggcccgtcctcctccgtcgccgacgtcgagcataatcctacagttactcagatccatgaaactgcacacattgcaaatcggtgttctcagaagttgcaggagctcagtagcaagaaagccaatgtgaaaaagaaacaaaatatgcagaatggtaagaaaagcagcacaaaaggagtgagacaaacaaggcgaagccggccggatcgagcactgcacccttttctagcttttgcacacaccacctgctgccgcatcaccgcgcgcgcgaggtctcagtcgccactcgccagcgtgatttgcgacccccgccgaccacatcctggtgatttcgcgggatggcggccgttgcgggcgaccggcgatttcgcggtggctggtgggggcgcgtggacgcgcggcggatgcggccgtggcgtgcgggcggcggtttcgcggtggctggtgggggcgcgtggacgcgcggcggatgcggccgtggcgtgcgggcggcggtttcgtggcggatag

SEQ ID NO: 1911 - DNA, 549 bp, Zea mays
  Peptide Sequence Number=SeqID_45286
atggtcgggccggggtccgtcgccgccgcaccccacgacagagacccggaagccgctgcccagtccatgttgtcgctggccaagaaggaaaggagcgcctccgccctgctcccaaacaagaaagaatgcgagtacaggaatgggaagtgggtttctaacaatcgtagaccactatactcagggtttggttgtaagcagtggctttcagagagttggtcctgcaaactaacccagcgaaaagatttctcgtatgaaaaattcagatggttgcctgaagcttgtgagatgctagagtttgaggtctcccagttcttgagaagaatgcaggataaaatcatcgcttacatgggcgattctcaagggaggcagatgtttcagtcgatgatgtgtatggtcactggtggaaaggagaggttggatgtagaagatgttggtgcagattatggctttgtgttagcaccgggtgcaaaaaagtctagatggctgggcctaccggttcccgagcaccaacacaacaattatataccactggtcatcaacgctctgtga

SEQ ID NO: 1912 - DNA, 642 bp, Zea mays
  Peptide Sequence Number=SeqID_45287
atgcctttacaaactaggcccgtaacacaaaggcggccacgcggggcccgttgcaatgggccagatcacacgtgggcctcagagcaggacgaggccgtgctacggggagacgtcaccgcaggccttcgtctggtgctgaatgaagcgaagggtgtccctgcccgttttgtctttgtcaaaccagcgactgcagcgagagacgacgagcgaagggtggcgtctttgccttcgccccaacaaacggctcagagccgcaaggcatcccgtgaccctctgtacgcctttcaagtccttgatgggccccatgctggtgatggccacgatcttctccgggttggcctcgatgccccgctcggagacgatgaaccccaagagcatgcctcgggggaccccgaagacacacttcttgggattgagttttacgcctttcgccttgagacatcagaatgtcgctccaaggtcggaaaggaggtcggaggctttcctcgtcttgactacgatgtcatcgacgtaggcctcgaccgttcggccaatgtgttcgccgaacacgtggttcatgcacctttgcagtggaatccacgatttgatcgatgcgaggcagatggtagggaactttcggacatgctttgtgaaagcatctag

SEQ ID NO: 1913 - DNA, 1848 bp, Zea mays
  Peptide Sequence Number=SeqID_45288
atgccgtgcacgaagaatgcgtcggcgccagggggtggcgatgatgaggaccctcgttgccccttcaggcaggtcaagggcaagactgtctatttggagcagcaagaaggccgcaagaagcggcgtacggacagagaagcccgtgcagcggcagcagctgcagcagccgctgcgcaggccgctcttggagatcagccgcagactccatccgatcagattgcattccgtgctcgtcgtctcacctcccggcctcgctcctcctctcacacctccgcttccactccgccacccactctgcctgctcctgtcactcctattgctccatccacctccacagccatacccactacctccactacgccagcttccactgcttcccctgctcccgctcccgcttcagctcctcttgtccctccacctcgcttccgggagcgtgatgagactgaggtccgtcctctggtttcggatcctcgtctgtttgatcttcagcgtgctactgcggcacgggtacgtcggttcaggtacgtacccgtggagtcttggctaccagctcagagagacccaacagcaggtgatcttttcagcacacggattcaggagtcattcttcagagctcagatgtctgctcagatagctctgcgagtgcaccgccttttggatcttccagcttttctgcttgcagccggtgctgactctgaggcgcatctcacctatctgcctggccttcagacccttctgactatcagcggcagatatgttgaggagtgggtccgagtcttctacgcctctgtttggattgacccggatcatcactgcatgaggttccgctttgagcgagaggatgtcacgatcactgccagtcagatccgtcagctctttggattcccagagtcgacgactcgccttcacagcctctgctacggcacttctgaccctcctcgtcgccctcacggcggggtggctccggggacagctcacgtcgcggctctgttccgcccgcctttcacagatgggtcgcgacgttcaccggcagactttactacagcagcaaagtacttatatgagctcatcagacggactcttctgccgaggatgggatacagggaggctaccactcatattcagctttggctccttggtgccctggtctcccactctgagtttgacgttgtggacttcctgatttgtgagatcgaggacatcgttttggatgggattcgtgctcgtcggcagttgccctatgctcactacttgtgccacatctttgcgcagctgattcagccccctcgatttcagagcacccttgaggcctcacgcctcgtttttggatcctatcgtcctgcgcctgagattcctgtgcccgcttctgctcatgtttttgactctcaggccgaggatgcagctcttcgtcagtttgacactcagggtacagcagctgatgatgatgatgatgatgatgactttggggttcctcctccgcctccgcctcctatgcctccacgctctcatgatcatgaggctgggagttctcgtgctgcccctgctactcctcaggctatggaccctgctcttgcttcgattctccagactctcactcagcagcaggctcacctggcagccgagcaggcccggttatccgagaggatgctctcgatgtttcagaacatgcaggacagccaggatcagcttcagcagcagttacttcaggatcgggaggagagtagggcattcatggctctcatgctacagcagtcggggtctcagttcctccggttccgtacctccaatcctccccccaatgctccccggcaccagggatacgtcaggactatcgtgacgaatctctag

SEQ ID NO: 1914 - DNA, 765 bp, Zea mays
  Peptide Sequence Number=SeqID_45289
atgaaggattgtccctctcacctaaggaccggtttgtcatcactccttgcctatactcttatcaagtacaaccactcgagactgtatgagcagtcgcttgatctgaacttgcacggtctgaaccccaggattatgacggctggggagcaccgggaggataaggaaggggaatgttttgtctggtttggacatggtggtggccttgttccttccggtataatcgctaaggcaaccgggtggcgatccacctctgacctcggcacaccatcatgtttactccagcaacgaacttggttgccattgggatactccgtcacctaccatggcgagttgagtaggtttcgtcgccaattagttattccttcactgcgtttcgtcaccggtgggtttccccttccagatatttggacctttttcattgaagatctcagttgcattgcgggattcagagttgttcactgccattatcatacctgttttaaaggtgacatatatttcaaagattgtttatatcattcatgcaaagttacccttatcctcactgtattcaacataaagtatatcgaccatcctcctttcaatccaaagaaaataaccatcgaatcaagccaggaagtcttcactgttgagatccctcggtttgggaataatgccaaaaacccaagtgaggcccctgctccagctgatgatgacccaaaacaaatgaagcaaacttatgttaggcataatacaaagcgggctacaggtcgtggaaaaggatactga

SEQ ID NO: 1915 - DNA, 387 bp, Zea mays
  Peptide Sequence Number=SeqID_45290
atgaaagtcattttattcatcgatgagatacacctcatgttgggcgtaaggaggacagaggattccatgcacacgaccaacctgttcgacccaatgctggtgaggggacagctccggtgcaccgacaccaccacgctggtggagtaccgcaagacttttgtcctaatgcggatagaactatacaagtcaatgcttgaaaaggagggtgcagagggtgaagaagaagctaagagagcatacattgctgctagagagaaatcaggttgtcgtgttgatgctgctgcagaagaaaaggtcttatcagcacttactgaaaaggttgatgctatgctccaagaattagaaaaggagattgatgatgcagatgcacaaattggaaatcgttga

SEQ ID NO: 1916 - DNA, 1150 bp, Zea mays
  Peptide Sequence Number=SeqID_45291
atgacagtacgcccaggtgctggtaaagaactcaagatcacaaaagagacggttcgcctcatattgggtttgccaagcactggaggtggcagggatttcattgattggtatggaagaacacaacaaaacataactgcaacagtttatggatgttcactcattattcttatatattaccttgaccatttacaccaccctgcatcacctcagaacaagtatgatactccccgtatcaagtattttgataatgagaaaataagagatttggctaggggtgacagacgtggcccccaccaaactggagaaccatttggtcatgcagagcatcgccccatgttcgaatcactatttgatgcacatgacaaggaggttgataagtaccgtgcttctcttcagcagagccatcagatgcttgtgtccaagcagattgaactatctgaggcatttggagaaatgatagacgaggttctaagggctgccacgcagtgtgatacacagcaagaagatggagataaactaccaactacctcatcgcccccgataaatgactctgtatccacgcctcctgttcgaacccctgataatcagcatcacgatcgcccaacccaggttccaactgatgataataaaatatccgaacaggtatccagtttaaacgttgatataaaagattcggtcatggatgttccaatacttgacaaaactctaacatcaaatgaaggacaaaatcctgttgtacaggatcctcccacatctggtgccccaaagtttgacaaaacccctctgacagaaggattcattgactgtattcgtgatgatgatcaattatacaatccagataccataatcaacacactcatactaaatgtcaatgttgggagcaggctgcagcgccgctgtctgcccgtcttccccaagaccccgacggtgccctcggccctcgccctgtctgcccgtcttccccgagaccccgacagcgccgtcgtctgcctgtctgccctgttcggcggctgttcggcgtccactcgcccatcgccggtcggcggctcgcctccatggaagcccaagaaccggatgggcacgaagggagaaggtgatgatggtgacatcgagtccgtggaatttccaaagtgtgtagttgcaagtaatt

SEQ ID NO: 1917 - DNA, 822 bp, Zea mays
  Peptide Sequence Number=SeqID_45292
atgcaggtggcgtgcaaccacaccgcgggggcgcaacccttcggcttcgtcacatccagcatgggggcccaggcccacacgtcatggaccaggaaaggggatatttcgaaagggatccttctccgcgaaggaagcgggccccgagccctcctactgatcaggggttcgaaggctggcccctcggaagggggttcgaaggttggcccctcggaagggttcgacagctgccccagatcacgcagagtgagggatgactctaggtacgtcggttacatggccgaggctcggtctacgctcccgaggtccggcaaatcacctgcaggtcgaagtgaccgcagtcacttcgccctttcactgaccgacctgacaggaaaacagcgccgctcgccctgctctgactgttgtgccacccgccagggtgaggctgacaacagccaagttcagcctcaggcgcaacaggaagctccgcctcgcctaaccttaggcctcagcctcgggaggaggtctccgcctcgcccgaccccagggctcgccctcaacctcggcctcagaaggtggtcgccgcctcgcccgaccccagggctcggcctcaacctcggcctcgggaggaatcgtgtcctcgcccaaccccggcctcggcctcaggaggagtctccgcctcgcccgaccttgggctcggaccgaccgcgccacgggggatacatcattaccctacccctcgctagctcaggctacgggggaacaagaccggcgtcccatctggctcgccccgggctcaggcactcctccgacggccacgttaccgcgtacacagggctctag

SEQ ID NO: 1918 - DNA, 1347 bp, Zea mays
  Peptide Sequence Number=SeqID_45293
atgaccaccagcttcgtggtggggagaagcaagccgggctgcggcctctgccccgccctcagcttcaaggatgttcatcatccgggctggggaggggggcgcaccgagttgggccctgcctccacgtgggctggagacccgcttcttcctccgtcattcaagggagaagggcatactccagctctacggaggaggcgtcctctagccatgcggggaaaggcgaactgctgcttcctggacagggtgcaactgtccgtcctccacccgggcaacggccgtgccgcgcgcgggccggctacgtccaggtcctccctgcgccgtcggctacacaacacgtcgtacgccgcgagggcggttctcgtattctgggacggccccgttctcgttctcgtggtgagaacgggagtgaggacctgccggtgcgctttggggcggccgccgctcgctggtgcggtgttggtgggcaggtggccgctgtcgtcggtgctgaggtggtggacgccagaggaggttgcttctgctgaagcggttgcccctgctgacgagactgtcagtgccacctgcgctctgggcctccggctctttggctttaatggctggttctcgtcccccatgaggggacgtgaacgagggccttccagcggtagcaaccttcggctgctctgcgacgagctagagccggaggcagcggtgtcggcgtggacagaggcagagtcggctcgaaaagaggcttcgtcggcccaggagcaggtggcttcccaggccgaggaggtgcatcaacggcggctggagcttggccaggtcatccgcgagtgggaccaaccccggagtcacgctgccgaggccgtgagccgagctgaggtcctcgggggacagctggctgaggctacggagcggccaaccgagggccctagcggagacccggcctgcgatggcccaagcgcggtgctgacgtcccccttcgaggtggagatccttctgcctgtgtcgtcgtccgaggccgggccagattccgtcaaaggtggaaacgacgccgagggtgctgctactccctctgccgatgacttgttcgtcggtagcagaatcgcttatccgagcgagagttacttttcgcggaaggtgatgagtgaggattctgttatcgatatagtcgagaaggcacgaaaatcgttctggcttcaaaatcttggcgatgatgaacgacccttaccagggaggagtaagcttgtggcgtcctcgggcgtcctgccgcagccgaagtaccaagtctcccacctggaagcctcggggccagacccctcgggcgtggtagcgtcgcagagactgctgataccgcgccgagtgtag

SEQ ID NO: 1919 - DNA, 579 bp, Zea mays
  Peptide Sequence Number=SeqID_45294
atgggcgcgattcaggtcaaggctccgtccactcaagggacacgatctcgcctcacccgagcccagcctcgggcaaaggcagccgacccaggaggattcacgtctcgcccgaggatcccctcaagcaacggacgcaccttcgattcgcccgaggcccaactcgggcaggcttcgcggagaagcaaccttggccagatcgccacgccaaccgaccgtatcgcaggagcattcaatgaagctccgcctcgcccgacccctgagctcggactcagccttgactccggaaggcggtctccgcctcgcccgaccccagggctcggactccacctcgacctcggaagacagactccgcctcgcccgaccctagggctcggactcaacctcgactctgaaaggcggtctccgcctcgcccgacccccgggctcggactcaacctcgaccccggacgacggtctccgcctcgcccgacccccggacccggactcagcctcgacctcggaggagcctccgccttcgcccgacctcaggctcggaccgaccacatcacaggggggggcatcattacccttaccccctag

SEQ ID NO: 1920 - DNA, 1389 bp, Zea mays
  Peptide Sequence Number=SeqID_45295
atgggcgtgcctgacctgtgcgcgcgctggcgcgcaataaatgcgctgcaagtagcagttggcaccggaagtagccgttgccccgctgttgcaccggacagtccggtgtacaccggtcatgtctgcgcgctggctctggattttcccgagggcgacgagtttgagttgaagtcctctggtgcaccggacactgtccggtggcacaccggacagtccggtgtaagcctaattccctttcatccaacacactccaaggtcctcccctacggcgcgggggctgggtcccacacgtcatgcaagccggctcagagcagaagaagccaaaccgccgtgcgcggtgcgtacaaccgcccagcggttacaagcgaccctccacttttgcccagaccagcgggcgaaaggggcgggcaaccatgcaggcggcatgcaaccgcgccaagtgggcgcgcttctccaactcccaacacgcccagcatggaggcccaggcccacgcgtcatgcaaccggtgcgccgaatgcttcgtgcatgcaacagcaccgccactcgcgccaccaccgtgcctcctcgactgcggagccaataccgcgactcgaggcgacccagcgcacgacccagcagcgccatcctggcgcggcggtcaatgcggccaaaaatgggccggcagtaatggcggtggcaggcgggcaggagcagcgaccacgtcgtcagccaagctcacgtcccgtccggggggcagcgagagaaccctctctcacggcgtgaagacaacgcgcccgtgctccgttcctcgaacggctcgcgcacgcgcaacggccgccccaccaaccactcgccctgtcgtattaactccgcggcgggacagacagcgcctctggcaggagaagcgggcgacacttcaccttcgccataatgaccgcgtcaaaaaagggaccgggaaagggggataccccgaaaaggatccttccccgagaaggaaccgggctccgagcccccctactaatcagaggccggcccctcgaaagggttccacggccgcctcaggctactcgggctccgcgcccattactgatcaggggttcgaaggctggcccccgaagggctcagccccagaagacgacgaactccgctccgcccgaccccagggctcggactacgccccgacctcagccgacggtctccgcctcgcccgacccagaggctcggacccgaccacggccacggaagacagactcgacctcggcttcggaggagcttccacatcgcccaacctagggcacagaccagccacgtcaacaggaggcgccatcatcatcctaccccgagatgactcgggccgcagggaacaagaccggcgtcccatctggctcactccgccagatgggcaatga

SEQ ID NO: 1921 - DNA, 483 bp, Zea mays
  Peptide Sequence Number=SeqID_45296
atgggcaagggtactaagcgcaagcgcgagccgactcctccgtcggaggatttcggtgactcggaatactcggaggaggagttctcctccgagtccgagggatccccggctcccgtctctcccccggcgtcgtctgatgattcagacgactcccaggggattgccgcggaggtctggatgtacatccgggctgtcgagcgctccgggctcgagggctcggatgagtccgagttctcctcggacgaggaggactcggacggcggcgaggacgaagatgacgacgacgacgacgacggaggcgatggcgacggtgacggcagcaacggcggcgggggcaacggcggcaagggcaacaccagaggcggcagcagcacggggagcaccagaggcggcagcagcaagggcagcaccaggggcggcggcggcaagggcagcaccaggggcggcggcggcaagggcagcagtagcaaggccagtggctaa

SEQ ID NO: 1922 - DNA, 1008 bp, Zea mays
  Peptide Sequence Number=SeqID_45297
atgccgggctgcgatcttggtcccgccctcagcttcaaggatgttcatcatccttgctggggcggagagcgaggtgagccggggctctacctcccgcacgggtcggctggccacctcctcttccagcttctggtggatgcaacattccgtcctcctcctcgctttcgtggcaaggacgggagcgaggacctgccggtgcgctttggagcggcccgtgttcgccggtgcggcattggtggagaggcagacgccgccgtcggtgctgacgtggtggcagctggaggaagcttccccaccgtcgaggccgtcagtgccgcctacggaccgacctccggctctttggctttaatgtctggtttgcgtcccttgagtggggacgcgaacgagagccttccggtggctgcgtctgtcctgggaccatggctgctgctgcagaggtcgctggcgagccgcccggagcttgtcgccgcgggctccccggagtccctcggctcggtcggccttgccgcccgaggcttctcttgcttagttaaaggaaatcatcggctgctcttcgatgagccgaaaccggaggcaacagtgtcagcatggacagaggcagagttggctcgaaaagaagacttcgtcggccggagcctggctgggctgtccactggcaggaccgacgcaggagtcgagttgccgaggccacgagccgggctgatgtcctcgggggacagctggctgaggcctcggggtggccggccgaaccgtctgctcgggccggattcctggagaagaccctggcggcgacggcccgggcgtggtgctgatgtcgtccttcggagtggagatcctccgaccgtgtcgccgtccgaggctcggtcggacttcgccgaaggtgtagttgacgccgagggtgctgctgctccccctccgacaaggacggtgtcaacgactgtagcaaaatggttcgtgcctgattgcacgagggacagtggacaagatttgcaggttcgggccgcttag

SEQ ID NO: 1923 - DNA, 591 bp, Zea mays
  Peptide Sequence Number=SeqID_45298
atgtcttcgcgctcccttatgcatcgtgtctttccaccttccaagcccccggatgaaggatacccgccgtctttccgcctcatcgttggaggaacgcaactccgtgggagttgcccggctgcacccctccgccggcggtcacccaagacggtgaccaccagcccctgggtggggagaagcaagccgggctgcgatcttggtcccaccctcagcttcaaggatgttcatcatcctcgctggggtggaggccgggctgagccggagctctacctcccgcgcgggttcgtgggtcaccctctcctgcggcgttcgagggggagggcgctcactggccccgcgggcgggtcggacttcgacaacgcggggctagtcgacggcgggcgtcgccagcctcagcgtgtcgagctcgtcggcttggcccccggtgccccctcctgccggaaggcagctgccgcgccgtgtgcacgggagggccgcccaagatgtcgcgcgctgctagggcggcgttcgtgttctggggcggccctgcctttgcaccggtatggcgtctccgcgcggaggtcggtgccccactcgtccgggaggatctga

SEQ ID NO: 1924 - DNA, 1005 bp, Zea mays
  Peptide Sequence Number=SeqID_45299
atggggggctcggagcccggttccttcgcggagaaggatccctttcgggcaactggcgcgccggttgctcgacgcgtgggcctgggttccaggctggcgtgtcagaagtcggagaagcgcgtccatctggcgcggttgcatgccgcctgcatggctgcccgccccttctgcccgttggtctgggcgaaaatggggggtcgcctgaacgcaactccatgggagttggtacctctcagccatcgttcggcttcaaggattttcatcacgcagcccggtcgcaccccttcaccggcggtcacccgagatggcgacctccagcttgatggtgggggaaagcgagccgggctgcgtcctctgccccttcctcagcctcaaggattttcatcaccaaggctggggaggggagagtaccgagttggggtcggcccctgcgtgggcggtggcccgctccttcactcagcgatggggggagaagcgggcattgcccgtggcgtccggcagctgcagcgtgcctggtctccagccgcgagtggcttcggggccacttgcggcgtcggcgtctgccacggcagccggaagaggttcttctgccggcgcggcggtcgggaccggccacgggctgacctccaacttctacggccttctgcccgtccttgcctcacgagttttggcacgagcgggggcctcctggcagcggcatccaccctgaggtcagcgttgccgctgttcggccccccggagcagaagtcgccgtcgtcgccactgctggggcaggtgacggcgcgccgttcgtcggccttccgttgctccgcaggccttccccctcggagtggggttgttcgtacctgcggagggggaaccggagttccgtttgtaatggcacttcgaatgccagaatccctcggcccgttcggccttgttgtctggggctcctctagcttagttgaagagacccctcggccgcccttcggtggaccgaggccaggggtagcggtatcagtatga

SEQ ID NO: 1925 - DNA, 471 bp, Zea mays
  Peptide Sequence Number=SeqID_45300
atggagcctggtggagggacagctatcggagcggttgagtccttgctgacgtcctcttgcttccgtaaggggcctgagagccaccgtcgtcacagagtacgcggggcgcccctcattgcctatctggcagagctagccagatgggacgccggtcttgttccctgcggcccgagtcagctcgaggtagggttgggcgatgtggaagctcctccgaagccgaggtcgagtctgtcttccgtggtcgaggtcgagtccgagcccctgggtcgggcgaggcggagttcgtcgtcttctagggctgagcccgagtccgagccctgggtcgggcggagcggagttcgccgtcttccgggacttagcccgagtccgagccctgggtcgggcggagcggagttcgccgtcttccgggacttagcccgagtccgagccctgggtcgggtggagcggagttcgccgtcttccgggacttag

SEQ ID NO: 1926 - DNA, 471 bp, Zea mays
  Peptide Sequence Number=SeqID_45301
atgggcaagagtaacaaatgcaagcgcgagccgactcctccgtcggaggacttcggcgactcggaatactcggaggaggagttctcctccgagtccgaggggtctccagctcccgtctctcccccggcgtcgtctgatgattcagacgattcccaggggattgccacggaagtctggacgtacatccgggccgtcgagcgctccgggctcgagggctcggatgagtcggagtactcctcggatgaggaggactcggacggcgacgaggacgaggatgacgacgacggtgacgacgacgacggtggcgacggcgacggtgacggcagcggcagcggcgggggcagcggcggcggcgacgggagcaagggcagcaccagaggcggcagcagcaagggcagcaccaggggcggcagcagcaagggcagcactaggggcggcggtggtggcagcagcagcaaggccagtggctaa

SEQ ID NO: 1927 - DNA, 690 bp, Zea mays
  Peptide Sequence Number=SeqID_45302
atgaacaaaacaccggcattcaaggtgccattacaaacggaactccggttccgtctccgcaggtacgaacaaccccacacgataggggggcctgcggagcaacagaaggccgacggatggctcgccatcgcccgctccaacagcaacgacgacgacgacttctgctccggggggccgaacagcagcagcgatgacctcagggcggatgctgctgccatgaggccctcacccatgccctcactcgagaggcaaggacgggcagaaagccgtagagttggaggtcagtccgtgggcggcaccgactatctcgtcggcggagaaacctcttccggctgccgtggcggaaggcggcgccgggagcggctccgaagccactcgggtcagagagccaggcacgcagcagctgccagcgccacgaacgatgaacgcccttccccccgatcactaagggaaggagcgggccgccgcccgcgcagggaccgaccccaactcggcgcactcccctccccagcactgatgatgaaaatccttgaagctgagggaggggcagaggccacagcccggcttgcttttccccgccatcgaactggagaccggcgggtgaaagggcggacagccatgcagtcggcatgcaaccgcgccaagtgggcgcaccccttcgactccaacgcacccagcatggaggcctag

SEQ ID NO: 1928 - DNA, 237 bp, Zea mays
  Peptide Sequence Number=SeqID_45303
atgaagacaagaagaatattgtcggggaccataattaggggtaccctcaaggctcctaattctcagctgggctcggactcgggctcagccccggaagacggcgaactccgctccgcccgacccagggctcggactcgggctaagtcccggaagacggcgaactccgctccacccgacccagagctcggactcgagctaagtcccggaagacggcgaactccgctccgcccgacctag

SEQ ID NO: 1929 - DNA, 315 bp, Zea mays
  Peptide Sequence Number=SeqID_45304
atgaataccgaagctataaccgaagaacaacagcttaggcttaaagtggtgacgaagatcaagcatgatgctgagccgaaaatcctgaaggctagtagagagataaacggtggagacattaacacaaaacacaagggtggctttggattatggtcggtgaagattgtctttttggaagatcatgagaccaatttccctccaagaaagatacaaaaactatatatggatcgcctgatgtcaaggcaaccaacccagtcagcatctatgtattctatcaagtcagtacttgttgtgcgtgatatggcgaggccatga

SEQ ID NO: 1930 - DNA, 930 bp, Zea mays
  Peptide Sequence Number=SeqID_45305
atgggaatcggttggtacgagggtgacgcccaacaagtccttcacgagcgtgctggcatcgtccgtttacttggggttggcgtgttgcggggagacggcgctcgtcttcgtctcaggcgcgaggtcgatgcccgacgtgccccccgttggggcgccggcgctgtcgactcgctcgacagccgacgaggtgccgcctcctgcttggccttggttgccccgcctcctcgtccatcggcgggggaggggacggggcgagctcgaatgttgttcttccactacgcggggaaggcgtcgtcgattccgccgccggcgggcgggttgtcggccgccattgtcgctgtcgcacggcgggggaaggagtatcatgtcgtagctgccgtcgagggacatgaactcaagactcccgaaacggagcaccgtcccgggctggaaaggttgctggagactgcccatctggagcttgacgggaagctgttcgtcaacacgcagcaggcccctacctggcgcgccaactgtcggcgtttcgaacccggggggtccctggaccgacgacccgagtccgagccctggggtcaggcgaagcggagttcgtcgtcttccggggctgagcccgagtccgagccctggggtcgggcgaagcggagttcgtcgtcttccggggctgagcccgagtccgagccctggggtcggccgaagcggagttcgtcgtcttccggggctaagcccgagtccgagccctggggtcgggcgaagcggagtttcccatggcgcctagggccggacatggctgctgtcagcctcactctgtcgagtggcacaacagtcagagcggcgcaggcggcgctgtcctcttgtcaggccggtcagtggagcggcgaagtgactacggtcacttcggctctgtcaactggagggcgcgcgtcaggataa

SEQ ID NO: 1931 - DNA, 1101 bp, Zea mays
  Peptide Sequence Number=SeqID_45306
atggggctcggtgtatgcggctcgctctgccaaggtggttatgagatcgatggttctggttatgactatggttctggtaagcggtattctttccgtttggaaagggttgtcagcattgcaaccactgctcaggagaagatgaagccgtggaaggagacttccaggagttccaagactacgacgagttctaggcgtgggttagcggcaacccccagtcggctgcctgtgaaggccgcggagcaggagcagcagggctcttccttctcgctccaccaggagatagagtctgtgaggagctgctcccctgtgcttcccctggaggcgcccccttcaccaccacagggcgtcccagcttctggagtagctgctggaggagacccagacgacggagatggcgacgacagctcaagccacgacaccgacttctctgctaaccctgagccggaaggatgggttgctcgacccatcactcgcgacgctgctcgcgggtgtcacttccacgatgcactcgacaccctgctacgtcgggcatttgaccggcatacttggtccgtcgagtatcgctgtgtggtctaccagcatagtcgcggggtctacccggaccgctgggaggcgacttgcttggtgcgctgcccggagaacagtctccagggtgcagaggcctgttcagagcactattctatctctgaacgggactcagctgaggtagccatgcaagatgctgcacggcgtgcgctttcgcactactgctcggttttcggtggggcagctgacggtcttgacctgaagtattacccccgccgtccatctggcagcacaggaggcgtgattgtctcacctgtcggtgagggcaatcctaggttgagcagcacagtcaacctagccgccgtgctaaacacggagctggaccatgcactagacgagctgagtagggctcgtgctgagatcgccctgctacgggctgagcgcgcggaacgtcgttatttggatggtggttcccccgctcccgttgggactcagcacccgtaccgctcacctcagcgtggacaccagtcttatggcaatcccgactgcaagaccaagataactctagagccatag

SEQ ID NO: 1932 - DNA, 912 bp, Zea mays
  Peptide Sequence Number=SeqID_45307
ggaccgggaaagggggataccccgaaaaggatccttccccgtgaaggaaccaggctccgagcctccctactgatcagaggttcgaaagctggccccccagaagggttcgacagccgcctcagatcgcgtgggccctacacccactactggtcagaggttcgaaggtcggcccctcggaagggttccacggccgcctcaggctactcgggctccgcgcccattactgatcagggcgggaacgatcttgtaatggaatcccatcggagggaggcatcgagccctcggaccccgtcgctaggggaccgggtccggcagatcacccgcagctcaccggagacatcatgttcggcgcccatcgagggcaacatggcgcttccccctccctcctccttgcggaaaggcgacgcaggggcgtatgtaaaaaagtcgagtctgtcccctgatcgccctctcgaccctgtgcagaggctcgggggctgctcttgcaaacccggctccggccgaactgttgacagcgtcaacataccagcccgagaacttgggacccgaccgtacacccgggctacggccagctcgcatgagggaacaaccagaccagccgaagcattacgcaaggcattaagacctcgaaggagtgaaaccactccttcgaggcctcgggggctacacccggcgggtgcgctcgcgcgcacccacccggaaacaaaacgcaaccgagaaaggctgggctcggactcgggctcagccccagaagacggcgaactccgctccgcccgacgcagggctcggactcgggctaagtcccggaagacggcgaactccgctccgcccgacccagggctcggactcgagctaagtcccggaagacggcgaactccgctccgcccgacccagggctcggactcgggctaa

SEQ ID NO: 1933 - DNA, 483 bp, Zea mays
  Peptide Sequence Number=SeqID_45308
atgggccgtatctgccccggcgtctcacagttgagtgacagccctaggtgccaggaagaggtctgcgccggacttttgcaaagattcacacgtttgcgacctctggcgacatttgaacactggaagaaacaaaccgccacgtgttcgacgccgtctgccgcgccagagcacgcccgcgcgcgtgcccgcgccgcgcccaagccaagccagtgccctgccattcccaaccccgtccagccctcggagaagactgtgcacgtctccgtgaagctccctgagcgaggaatcgggctctgcttcaccggagaggccggcccaaggtcaccggacttcaaccgaccgctggcaaccgtggaccgagagtacatcctcgtgccggagcaaggagctgctcaggaggtagccccagatccagcaccagagccagcaccagaggacctgcctgccactgctttggaaggcaagccccggttttatgcataa

SEQ ID NO: 1934 - DNA, 2046 bp, Zea mays
  Peptide Sequence Number=SeqID_45309
atgggggaactgggggtctccgatagttttgctatggagttgatgaggacatgcgcggaccccgggggaaggatgtcttcgcccgagctccgggactcttcggcgcggatgctagaggttaccgggggtcgatggcctaagaacgttcctatcccccgcgcggccggcgaagactttttaacatctcgcatggttcgtgacttgagagtgtttccttatggacggaatattgctgttgttgtgtcggcagtgatggacaaggatcgtcaggaagctgcgcagaagcgtcgggcggtcatcaggctgcccgaggctaggccgaagagggcgcgggggactgcgaaggctgccgcccccggcggtagccagccgacgctggcgacaaagtcggccgcccctgggtccagcaaggtgtcggaggtcgcgaaggcggccagcgccgacggaaccaaatctgcatcggccggagccgcgaaggcccgagaattgccttcgccggggaaacgcgttgccgatttcggcaccaatattagtgtggacgattatctcgttggatcgggcgaggggcaacttgttgttgttccgcctgcggtggcgaccatggtgtctgccgcggtgcctggggtgaagggtagcgctctcagcgctggcggtgagatttcggcgctcaccgccgtcaaggacgaagcaggcactgtgtcccgccggctgagggaggcgtcgcagcggctgagtcaggcggccgacttcgctgactgcgtggcatcgggggcccttacggcagttgtgtctgccgaagtcgagagacttcaggcgcagcatgctgacgtcgtccgggaaaagtcggccgctaatagcaagtgccgcaagctagaggagaaggtggccgccctggagggcgagaggactgacctccggtgccagctggtggaggagaggagggaggctaatcaggccctcgccaaggcgcagtcggcgcaggcagaggccaatttggcgcgggtggagggtagtctcgccagccagcacgccgaggaatgggaggcgcggttcaacgctctgcaggcccgcatggagagggccgaggcttctacacgctcggaagttgagcggacgcgcaaacagctcatggactcgtaccgcgagctgggcgcgcggaccgctgacttcgaagtgcccgaccgagagtcaggccttcgctgcctcgagtggctgcaagaggaattgttggcgctcccgaccattgtggagggatttatgtcctttgcctccctcgtcacctgcgaaggggcgatgaacgcgctgtcccgcgaagggtgcagtcactatgaggtattcgaccgatctgatgaagattttgagcgcgagatttacaaggtcgaggaccctgtggtgaaggactcaacgggagccctctttgaccggatgtggggcccccacggtcgggaggtggttagggagcggtccgaccgggcgagggatcaggcggcgcgtgccgagaacgtggaggacttcggacctttgaacagcgcgcggcccgaagcggaggcgaacccggtggcggccgaggccgaggttcaagattttgggcctgcgcacgcaaccgctactgctaattttgtggcggcttcgaccgtggatgctgggaatgaatcggataagtctgcttctaagttttctgattttagcgactctgggagttcggttgagtggacggaagagtcttcggatggggacttggattactttgcggctttggatgtggctacggcggaggcatctccgcgtgttacggatgctaaagttttgcctggttcgagtgctgggcgcaggcggcgaagggcggtggcgaagcgtagggtgagtgaggtggatggcgatcagcttcgtgtgggcagggctggcaagcgggaattgctgtcctcgccggttggggcgagtgtaggtgagggggagttgcgaagtctttttgagggtgaggagcttaggataatgctattcaactatagggagatgggaatcattccgaaggttgaaccaatgtaa

SEQ ID NO: 1935 - DNA, 165 bp, Zea mays
  Peptide Sequence Number=SeqID_45310
atggagcttctgctggtgaccctggagctcctgcgctggctgctgttgccgtgggaggactcctgcgcgagttttacatctacaacttctttactagttattttcaaccacttaatcggcattgatcgaattaaacctctaactcgacaatttggggcaccataa

SEQ ID NO: 1936 - DNA, 1113 bp, Zea mays
  Peptide Sequence Number=SeqID_45311
atggggaggctagaaccccgggcagaatgggaatcacggtttatgggtaaagtgtgcaacctctacagagtgttagaaactggtatatcagccgtgctcacgatggcccgtatcaggtgcactgcatgtaagtctgtgatcccctttttgccttctcgcctggcgaagaatcccctgcgtcgcacggtgttaggtcagtctagtcacctagagagactgcatcgtcgcctgcacgaggagcaggagtgccgatgccaggagcaggagcaggagcagcaggactcttccccctcgcctcagcgggaggtggagtctgttaggcctctttcccctgcacctcagccagagatgccccctgcaccaccacagggcatcccggctgctggaggagaccccgatggagacagggacgatgacgacgctggtggcagttcgagctacggcacggagcgcttggaggagccagagccagaggggtggatcgcgagacccatcactcgtgacgctgctcacgggtgtcacttccacgacgctctcgataccctgttgcgtcgggccttcaaccgacacacttggtctatcgagtaccgttgtgtagtctaccagcatcgtcgcgggttatactcggaccagtgggaggctacttgcttgctgcaccatccggacgatgatctctggggtgcagaggccttctcagagcactattctatcactaagagggacacaaccgaggcagccatgcacgatgcagcacgacgggcactttctcagtattgctcattgttcagcggggtagctgacggccttgacctgaagtactaccctcgccgttcgactggcagtgctggaggtgtgattgtcttgccagttggtgagggaattcacaggttgagcagcatggtcaacctggcctcgtgctcaacacagagttggaccacgcccttgatgagttgggcaacgttcgggcagaggttgcgaaattgcgtgttgaatgcgcggcacgccactatcttgatggtggttctcccgcccctgtcgggattcagcacccttaccgttcaccgccccgtggtcgcttcgactatggtcccccagactgcaggacccggatag

SEQ ID NO: 1937 - DNA, 432 bp, Zea mays
  Peptide Sequence Number=SeqID_45312
atggagcaccgtcccgggctggaaaggttgctggagactgcccatctggagcttgacgggaagctattcgtcaacacgcagcaggcccctacctggcgcgccaactgtcggcgtttcgaacccgcggggtccctggaccgacgaggtaatgatggcgcctcctgtgacgtggtcggtccgagccatgggttgggcgaggtggaggctcctccgaggtcgaggtcgagtctgtcttccaaggccgaggtcgagtccgagcccctgggtcgggcgaggcgaagaccgtcggctgaggccagggctgagtctgagccctggggtcgagcaaagcggagttcgtcgtcttccggggctgagcccgagtccgagccctggggtcgggcgaagcggagttcgtcgtcttctagggctgagcccaagtccgagctctag

SEQ ID NO: 1938 - DNA, 453 bp, Zea mays
  Peptide Sequence Number=SeqID_45313
atggggatccctaaccacacgacatatgtagcacttaacccttgcatatgtcaaccgttcccacagatcctccacaacgtgaaccgatacgagctacccgggagcacagtactcctccgtctagcctctagccaggagggcttaccagaccatgtggctagttgccaagtctctcctcatcaggcctacatcgaatggtccttaagcgactcagatggagacactacaccgagactcccttctcgtgcaagtcacccgcccagtctcgtctttattatttcaaacccaaagtttggtacctggcagagagcaaggctaagcatcataaaaattcttttcataaaagggtatcaaggaagggttggtccgactgacgacatcatcttgcggagatgtccaatctctgcattatcaaagggtcgacttgggtcgtcttccgcatcacgtgactaa

SEQ ID NO: 1939 - DNA, 414 bp, Zea mays
  Peptide Sequence Number=SeqID_45314
atggagaggagggtcgagctgctgcaatccatggaagaagaaggggcgctggggagggaatggagctgttgctcggccatagggaagaaaggggaggggcgccatggttgggagctcggctgctcgagcttcaccggcaccatggatccagggagaatgacattgctctgctctgcgcgcacaggagcatggggaggcgacgtccatggatgcttctgccactgcgcaagggaagccagggggaagggggcgcgcctatgggggccctgctcccgcgctggcgtgctgctgcattccagggagccgagtggaggacgccaggaggtgcttcggcacgttggggaagaaaggcgtcctgcaggggcagcacgccggctgaaaggagaagagagggagaaatgtggtggcggctag

SEQ ID NO: 1940 - DNA, 495 bp, Zea mays
  Peptide Sequence Number=SeqID_45315
atgggcaagaacaacaagcgcaagcgtgagccaactcctccatcggaggagtttggtgactcggagtattcagaggaggagttctcctctgagtctgaggggtctccagctcccgtccccctgcgtgagtcgtctgacgactcagacgactcccaggggcttgcggcggaggtctggacgtacatccgggccatcgagtgctccgggctcgagggctcggatgagtcggagtactcctcggatgaggaggactcggacggcggcggcgaggacgaggaagacgacgatgacgacggcgacgatgacgacgatggcgacggtgacggtgacggcagcagcagcggcaggggcagcggcggcgacagcaaggttggtgacggcggcggcagcaggggcagcaaccagggcggcagcagccggggcagcaaccagggcggcagcagcaggggcagcaccaggggcggcggcggcggcagcaacagggccagtggctag

SEQ ID NO: 1941 - DNA, 522 bp, Zea mays
  Peptide Sequence Number=SeqID_45316
atggcggctagtgcgtccccggtgccccagcgcgagtccgaccgccggaatcaacggtcaagcttcggctaccaagagatcaaactcttcgagttctacgaggctgaagatcctgaacatctgtttggtgaaggcaaagatgtatggtttacagatgatgatgaggatggttatgatcatgcttatggtaatggtaaagaaggtgtcgaggcagatctccaggagttccaggacttcgacgaaggcgtgattgtctcacctgttggtgaggacaatcctaggttgagcagtagagtcaacctagccgccgtgctaaacacggagctggaccatgcactagatgagctgagtagggctcgtgctgagatcgcccagctgcgggctgagcacgcggagcgtcgtcacctggatgatggctccctcgctcccgtcgagactcagcacccgtaccgctcacctcggcgtggacaccagtcttatggcaaccccgactgcaagaccaagataaatttagaaccatag

SEQ ID NO: 1942 - DNA, 1483 bp, Zea mays
  Peptide Sequence Number=SeqID_45317
ccacttggagagactacaccaccgcctgcacgaggagcaggagcatcgacgacaggagcaggagcagcagggctcctctttctcgctccagcaggagatagagtctatgaggagcagccctgtgctcccgctggaggcgcctcctgcaccaccactgagcgccccagcccttagagtagctgctggaggagacccagacgacggaggtggcggcaatagctcgagccacgacaccgacttttctgctgaccaggagccggaaggatgggttgctcgacccatcactcgcgatgctgctcacggcatagtcgtggggtctacccggaccgctgggaggcaacctgcttggtgcgccgtctggagaacagtctctagggtgctgaggtctgctcagagcactattccatctctgagcgggactcagctgagccagccggtcggctccctccccgcggcccagctggcgcgcagcgtggcccagctcggcggcccagctcccccaccccacgtggcccacctggcccaccccgcgcgtagcagccccacccccaaaaccctaggccacgccctcccccagctgccgccgccgccaccccctggtggggcccgctcgtcagccccaccccccttccccctacctccttctctctccccgatcccgcgcacgtccctctctctccctcgacgtcgctcgccctcgccccgcgcggtaagcccctccctcatccccttcccccgcccctccctctccccggcccccctgcagcggtgtcgctgcggcccggcgcggcttgccagcgcgcagcggccaggcgtggccagcagcgtcgcggcggccggcgcgcgaccccggtacgggcgcgggcgcgcggcctcggcggcccggcgcggtcccggctcggcggcacgagcgcgtggcctcggcgtgacctgccagcgcgcggtggcccgtggtcagccggtgcgggcacggcccccggcacgctgcgcggtggcccccctagcggccaggcgtggccagcctgcccggcgcggcagctcaccggcctgccagcgcagcggcgcgcggccagccctccccggccgactggcgcggctgagctggtgcggagcgtggccccgacatggcacgatcctcggcacagtggccaaggaacggtcggctcggcccgcggcatggctgtctgagccctgcgcggtctcgcagctggccagtgtggcacgcgcagcccagcacggctcggccatcgcggctagtgcggccccggtgccccagaatcaacagtcaagcttcggcgaccaagagatcaaactcttcgagttctacgaggctgaagatcctgaacatctgtttggtgaaggcaaagatgtatggtttacagatgatgatgaggatggttatgatcatgcttatggtaatggtaaagaaggcgtcgaggcagatctccaggagttccaggacttcgacgagttcgaggattag

SEQ ID NO: 1943 - DNA, 399 bp, Zea mays
  Peptide Sequence Number=SeqID_45318
atgaactccagcgagcacggtttcgctattccggtgacgcgggtcctcggttcaagcttgtgcaagcttgacgacctcacaaggaagctatctgaaggcttggatcgaacggaggaggacgggaaaggggctggccacgatggttgctctcgggcggctctggcgggtcgcggggaggtcgccggagctaagcgcgggctcggggaagttaggcgtggtacggaggaggcaacagggaaggcagccgagcactgggacgggctttatagccgtggcgcgggcgtggtcacaggcggccgtggggtgaacatgtgggatctttgttcaaaggttatgaagtttactacaacttttatatttggcccaagccatgatcataaggtttacatgaccttttga

SEQ ID NO: 1944 - DNA, 2241 bp, Zea mays
  Peptide Sequence Number=SeqID_45319
atggcgtgcgggtcactggacactgggtcagctgggctggaaaggcaaaacaaacagaatcatcagtgttacgtaataatccttggattttgcgctgtttaccatggtgttcccaaaaggcccctggcctttcttatagcccaagctacccccttcttcctcctctcatctctctcgggactttccccaatccactccactccaatccacttccctcctctgtcaaccctagccgcgccgccggcagtctgctcgggtggcgcatacatgacccacccttcctcgccgtcgtcctctgcgccgccaccgccgcccgccgcggcggcggcggcggcggcggccgaggccacctccctcgcgccgggtttccgcttccaccccaccgacgaggagctcgtgtcgtactacctcaagcgcaaggttctcggccgcccgctcaaggtcgacgccatcgccgaggtcgacctgtacaagctcgagccctgggacctgcccccgcgctcccgcctccgctcccgcgactcccagtggtacttcttcagccgcctcgaccgcaagcacgccaaccgcgctcgcaccaaccgcgccacgtcgggagggtactggaagaccaccggcaaggacagggaggtgcgccatgggcccagggtcgtcgggatgaagaagacgctcgtattccacgccgggcgcgcccccaagggcgagcgcaccaactgggtcatgcacgagtaccgcctcgagggcgacgccgccgtggagataccgcaggactcgtttgtggtgtgccggatattccagaaagctggcccaggtcctcagaatggggcacagtatggagcgccgttcgttgaggaggaatgggaggaggacgatgcagatgtcggtttgcttccagtggagggtgatgctgctgtcgaccctgaggttccccctggccctgtggagatccctggtgctttggagagaggctatcttcaaatgagtgatctcattcagggtttgggtgatcgaaatggaaatggtacacctagtttaccagtttctgatacttcacataacagcaaccattctgaagatgtagatggaaattctggggacattttaagtgacccaaaccttggctctaattttattcagtgtgttgaacctggggagcaaaatagcttaatgcttaatggaaatatcatatctaatgcaaatgctggagatttttttaataattccagccccagtgatgggttcctagagctgaaggattttgcagatgctgcagatctggatttccctttgggcaatggatcaaccatatggccttcagatggttgggcatggaaaacacctgactcagcggaagctgtaaatggagctaacgatgagattcctccactccctgatgaccagattttccagccagatgaactggaacaactgttgcagtcaatacaagaagattcccatttgggctcaactatcattgaccccatgcattcttccatgacaaattcagttctgcctgaggacgattatttgatgttctatgatgcacccttcgattccactatgtgtgatgggtatggacagaatggaattcttggctccgcagcagccaatctatctggcattggcatgatggaggatggtatggcatactttgatgcaatggatgataattcatttaatgatactctgggctccatacagcagtcagctggtagcagttcccatgcttttaatggcccagtccttacccaagaggtcaacaatactatgtgtacatatagtccaactcaaaaggttttagaacctaattttctagttggtgccccgtcatctgctaggttacctgaagctggtagtcagttaaattgtgttgttttaccagatggtcaggctaagagtagtactattggaaagggatttgtaaagattttggactcaatctccgctcccccagcttttgctggagaattcccagctatccaccgcaaatctttggctcatatttctggggggcgccccaacacactccatgtttctgctgaagtgatccgcgtaggaagtttagctgttccttctggcgcagataagtgggcgctgcataaagatcaagacatggagctggtcttttctgcagattttgagcctgatacccgtcttcactgtgctgcaatagccattaccgcgatgctgcgaggtgaattcaggccttttcttagtttcggcaacaatgctcaaagtgag

SEQ ID NO: 1945 - DNA, 369 bp, Zea mays
  Peptide Sequence Number=SeqID_45320
atgaagcgatccgagccatcaggaaggaaaacacctaagactaacaacgttatgaaattgtatgaaaacagcgccgctcgctccgctccgactgccgtgtcagccaccccggcaacgactgacaacaagtcacgatcaaccaccgagtttagcctcgggcgcaacaggaagctccgcctcgcccgacctcatgcttcggcttcgggaggaggtctccgcctcgcccgacctcaggctccggcctcgggaggaggtctccgcctcgcccgacccccggactcggcctcgaccccggtctcaggaggaatcgcgtcctcgcccgaccccggcctcggcctcaagagaagtctccgcctcgaccgaccctag

SEQ ID NO: 1946 - DNA, 918 bp, Zea mays
  Peptide Sequence Number=SeqID_45321
atggggtgctacagcgccgccttgctcttgttgtcgttggaggagcgcgacctcgtggagatcggcacctttcagccattgctcggcttcaaggatttttgtcgtgcagcccgactgcattcccccaccaatgggcagtttggtggggagaagcaagtcgggctgtggcctccgccctgccctcagcttcaaggatcttcgtcatccgggctgaggcggaggagcgcactgagtggggggttgcctccgcatgggccgataacccttttcttcccccagcgtttgggggagaaaggcatcctccagccctgtggaggcttcctccagccatgcgggggaaggcgaactgctgctccctggacaaggtgcagctttccgtccttcgtccgggcggcggtcgtgccgcacgcgggccggccacgtccaggtcctcctcgcaccgtcagccgcgccggggggttgcccggcacatcgtacgccgcgagggcggtgcttgtgttctggggcggcctcggcgaggacaggagtgaggacctgccggtgcgctttggggcgaccactgttcgccggcgcggtgtcggtgggttcgaacccacggtcggcgccctccgactcttcggccttagcggcttgtcctcgcccctcgtgtggggacaggtcgccggcaagccgcttggagttcatcatcccgcggccccctggtgtggaggttgttcatacccgtgggagcggaaccggagtcccgtttgtaaggagatataccgggtttttgccggagcaaaacgtaaccgcctcaatttttggaaccctcggctgctctgcgatgagccggagccggaggcagcggtgttagcgcggatagacgcggagtcggctcggaaagagacttcgtcggcccgggagatggcggcttcctag

SEQ ID NO: 1947 - DNA, 120 bp, Zea mays
  Peptide Sequence Number=SeqID_45322
atggaacccgtgcggaccgtgcaccgaagccacgacggcgcgattcacgggccacagatctttgatcatgcggccaggggcagatcttggcgccgtggtatcagggccgttgatccctga

SEQ ID NO: 1948 - DNA, 240 bp, Zea mays
  Peptide Sequence Number=SeqID_45323
atggctaggcaacacgggagagcaggttggcaggacccacttgtcggtgtggctagtcgctcgtgcgagcgcgtgggtgtgccaccgacaatggaggtgctccttggctcagagacaactgatcaagccaaggacggaggcaagaaaagcttcgaggtaccaagtgcacgggagaaggtcaaggaggctgaggaacccaaagccaagggtgaagaagaaggcttgcaaagtcaagggtga

SEQ ID NO: 1949 - DNA, 396 bp, Zea mays
  Peptide Sequence Number=SeqID_45324
atgtcgatcggacagcttctgctacctattgttctcctgagaaccatgcccccccccccccccgagtatgaagttgacttgcctgcttctgctctcgtcatggaggtggcgtctgtcattctgttggtcaacgaggtcacatgctcgctcgcctgtgatgatgtaccggtcagcgtagcagaagagctgctccgagtgacgacgaaggtgacgaagccactagagggcatcctagcccagcacaatggggaggtacaatatcatgacatcttcagtcaccctagtagctcgggcagcgatagagtagacaaccagtcaacttcttggatcttgcttagtttcatatttgtcgacgttggagaccttgaagttcagcagtcattacgtcacacgtag

SEQ ID NO: 1950 - DNA, 450 bp, Zea mays
  Peptide Sequence Number=SeqID_45325
atgccaatgctcatgatgccatgctcaagttttagttatagtaacaccaggggtgttacactcgggcctataaatccatggccgtgccaccttgaacccaaaccagatcaccatggtgagcatcgaagaactgaggatgtgccgctgccgtcatgctccaggctgtggggtgctcggcattctctagggagggctgagtgcttcgctacgccttcctggggtgtttcctgggacacacggtcgggggcgcttgtgcgaggaacaggcgcgctggccatggttgccgccgcgccggtattgtatgcggtcggggccaagcgccaggtggttgggaagaagaacgtcagtcgtctgattacggatgggtggctcagatcggatctagccataggactgaccagcgccgttcgattcagatccgacgggaatgagttgagctgggtattttaa

SEQ ID NO: 1951 - DNA, 429 bp, Zea mays
  Peptide Sequence Number=SeqID_45326
atggtcaatcgtgaggatgttcctaaatctaagatcaatgctgaatggttagaaagagatatggtttccaccggcgtggctaaggttgtaagagacttgctttactttatgcgccgtgaagttcttcatcaacaagggctattctacaataatgttttgccattatatatatatcatgagaggttctttggagacagtggcgaagacacaggaggccagggtgggcctggcaccccccaagtccccaacagcccaactaagcgcacgatccgacgccgcattgtcttctacttctccttctctcgttctctggcagcacctgggctgagcggctctgccgtctgcggctgggctggcagcacgccgcactctgcgcggtctggccgagcggccagcgggcagcgaggacaggacagcgtccagccgtga

SEQ ID NO: 1952 - DNA, 267 bp, Zea mays
  Peptide Sequence Number=SeqID_45327
atgcaggcggcatgcaactgcaccataggggcgcaccctttcgacttcgacgcgtccagcatggaggcccaggcccacacgtcatgtaaccgacgcgccgggaccgggaaaggggatactccgaaagggatccttctcggaaggaagcgggccccgagccctcctactgatcagaggttcgaaggctggcccctcggaagggttcgacagccgcctcagagcactcgggctccgacccctcctactgatcagaggttcgaaggctag

SEQ ID NO: 1953 - DNA, 462 bp, Zea mays
  Peptide Sequence Number=SeqID_45328
atgcggcctccgccccgccctcagcttcaaggatcttcatcatccttgctggggcaggggcgagctgagccagagctctacctcccgtatgggccggcgggccgcctcctccttcagcaatcagaggagagggcgctcaccggcctagcggagggggcggacttcgacaacgtggggccgatcggccgcaagcgtcgccagctccagcgtgcctgcttccggtgccacctcccaccgctgggcggagcgtggctatctgcctgttgtacgggcgactgttgcgccgcgcgcaccgggggaccatccaagacgtcgcgcgctgttagggcggcgttcgtgttcttgggctgtcccgccctcgctccggcacgacgcctccgcgcggaggtcgatgctcgcccgtccgggaggactcgagtggggatctaccggtgggcaggtggctacggccgttggtgctga

SEQ ID NO: 1954 - DNA, 1017 bp, Zea mays
  Peptide Sequence Number=SeqID_45329
atggacagtgcggtgcagtcgctctggaccgtgtccaagcggcggctacgctggagcttgccgtacacagcggcacatgggccattggtagtagaggaagttctagtggacctccctcgcattcgagtggagcatggagtcatcctggaagacagcttggaggaacttctgccgacgcccaccccatcggcagagtcactggccttcgcagttaggtcatcgacctcagcaccgcctgcaccagccgttcaagctcctgcacccggagacgacgacccagaagactctggggatgacaatgatgaggatgacgatgacaacgaggatgaagaggaacaagtcaacgaggaaaccaactacgcccagcaggactacttcatggggtttggtcctgtcaccaaacattacacatcgatgttcgagatgggacacttccccaacctgttgcaagacgtgctgcacgcgttgggaacctacgtccgacccttgtacgagacaaggcgagtgagcgagcctccccgggcttgctactacatcactcgcattcacgtcatggtgatggatgcaggggataggggattcaggactctgtctgctcatgagtccctaacaccgctatccagctacgctgcttcggtcggcgatgctgccagacggactctatggtctctcagccacacctaccggcagcagttgcatgacacgaggttcaggcatctccctttgtgtctgagtggaggaaaccagaccaacatcgttctaggtgaagctggtgaggatcgcctcaacactctagctggtgtggtggtcggcctcaacactgaccttgacagtgccaccctggatctctctagggtgcatttggaactagaggatgcccacgccaggattgcagccctggaagccctacttcaaggacgggatccgcctgaagcccaggcccccgccatggcgttgtcccctccccgcaagaggcttcactatggggagcccggatccatcaccaggctgctctag

SEQ ID NO: 1955 - DNA, 360 bp, Zea mays
  Peptide Sequence Number=SeqID_45330
atggcgagggtgtgttttggcctcggtggccgcagaaaacacgcgctacaagatgatccaatcctgcaggctcggatcttgacgcttgaagggaggagcagcaccctcggcgtcgactacaccttcggcgaggaatccggctcgagcaggcggctcggctggccaccccgaggcctcggtcggctgtcccccgaagacatcagcccggcccgaggcctcggcagatcaactccggcgtcagtcccgctaacggacgacccggctaggctccggccgaccaagtcttcttttcgagccaactctgcctctgaccgtgctgacaccgctacccctggcttcggctcatcgaagagcggctga

SEQ ID NO: 1956 - DNA, 588 bp, Zea mays
  Peptide Sequence Number=SeqID_45331
atgaggatcaagctcaagacaatgaagaagaagatcaagacaataagccacctcaagaggaggacaataatcaagggggagatgacaatgatcaagacaaggaagatgatcaagaagaacagggtcaaagaccgcctcacccaagagtccaccaagcgatacaaagatatcaccccatgttcaggcctcgacagccacaatgaacatacgccggcactcaaggtgccattacaaacggaacttcggttccactcccgcgggtatgaacaacctccacatcggagggcctgcgggacgacaaactctaggtggctcatcgccgaccactgcagcagcagcgacaatgacctccgcctcgggcggctaaacagcagcagcgatgaactcaggacaaatgctgctaccggaaggccctcgcccatgtccccacacgaggggcgaggacaagtcgtcaaagccaaagagccggaggtctgtctgcgggtggcgccgacggtctcgtcggtggagaaaccttctctggcgaccaccacctccagcaccgacgacagcgaccacctgcgcgccggcgctacgccaacgaaatga

SEQ ID NO: 1957 - DNA, 642 bp, Zea mays
  Peptide Sequence Number=SeqID_45332
atgcaggtggcatgcaaccgcaccacggggacgcaccccttcgactttgacgcatccagcatggaggcccaggcccacacgtcatgtaaccggcgcgctggttactacgtgcgagaaactgcactgccacttgcgccaatgtcgtgccttctcgactgcggaaccagtgccgcgactcgaggcaaccctgcgcatggcccaacagtgctaatcgagcacatcggtcatgggtcagtcagctgcgggaggaggcgcgacggtcgatatggccaaaagtgggcctgctgtaatggaggcagcgggcgagcggaagcggcagtcaaatcgtctgcaggctcacgtcccctcctggagcagcaggggagccctctcccacggcgtgaagacgatgcgctcgtgttccgtccctcgaacggctcaagcaacgactgccccgcgaaccactcgtcccgtcgcattaactccgcggcagggcaagcgacacctttggcagggaccgggaaaggggttacttcgaaagggatccttctccgcgaaggaagcgggccccgagccctcctactgatcaggggttcgaaggctggcccctcgggagggttcgacagccgccccagagcactcgggcttcaggctcattactga

SEQ ID NO: 1958 - DNA, 198 bp, Zea mays
  Peptide Sequence Number=SeqID_45333
atggtggtggtacccggctatggcgccgccgcacggtgtgctcacgccgccgtcctgggatgccaggggtggccgcaagtcgtgcatccgagggctgggagtgggcactggcgtggttggatctcaggcgttggcttcggatccagcgggtatggcgacataccggttcgtgatgtaatcttggccactggttcttga

SEQ ID NO: 1959 - DNA, 645 bp, Zea mays
  Peptide Sequence Number=SeqID_45334
atgcactgcctggtgtcaaaaaagccggtgtttcggtgggttcatggccttctcaaggacatgaacaccaagatcctatgcctccgcttcggggccgtgcacgtcgtggtagtcgcctgcccggagatagcccgcgaggttttcaggacgaacgacgccgccctggcgtctcgtccggagacggacgcctgcgagctgttcagcctcgggtacaagggcgccagcctgtcgccctacggggagcagtggaggaagatgcggcgggtcctcacctccgagatcctgtccgcgtcgatggagcagcggcagcagcggcggcgagcgcaggaggccgactacctcgtccgttccctgtacagccagtgctgcagcagcgccagcgcagccgcatcgtcggctagctccgccgtcgtcgacatacgccatgtagcccgccacttctccagcaacatgatccggagcctcgtgttcggcaagcggcacttcggcggcggcgccggcccgggtgctgaggaggtccaccccaccattcattgcatccaagttttccacttctcaactactacaagagctctagcattcaattctagacacaccaaagagatcaaatcctctccaaactccacacaacgccatagtgactag

SEQ ID NO: 1960 - DNA, 804 bp, Zea mays
  Peptide Sequence Number=SeqID_45335
atgagcgactcctactgccccgactgcaagaagcagacggaggtggcgttcgaccactcggcgggggacacggtgtgcaccgagtgcggcctcgtcctcgaggcgcactccgtcgacgagacctccgagtggcgtaccttcaccaacgagtccaacgacaacgaccccgtccgcgttggtggcccctccaacccgctcctcaccgacggcggcctctccaccgtcatcgccaagcccaacggcgcccagggcgacttcctctcctcctccctcggcaggtggcagaaccgcggctccaaccccgaccgatccctcatcctcgccttccgcaccatcgccaacatggctgacagtttgtgttgtccaaaggatggtcagtggaacatgataaaaaagcaagtagtagatggtgcaagggtgggcaactgggcctgcgttaacttttgtcaaaagttgcgtgcagatagtgttggtaaattttgctctgatctgattaagtggtctcgcactactggagtggacatggataacttgagacttccaatatacaccgctcgtcctgaacaagctgaaactgatcttcgtaggctctatcaggatgctcggaacaagctaagatggcaaaagtttgatcttttgcttgctatactaccagagaaaaatggcggcttatatggtaatttcaaaaggatctgcgagacagagattggtatcatgtcgcagtgttgcttggataaaaatgttagaagagcaggccctgcatattttgctaatgttgctattaagatcaatgccaagggatag

SEQ ID NO: 1961 - DNA, 423 bp, Zea mays
  Peptide Sequence Number=SeqID_45336
atggcgcatgaggtattagagggcgatgaccttgccgaccaggaacgtggcgcggccgtcgcagcagcctcctcgtcgtcgggggtgctcgaggcggtgagcgcgatgaccttgtcgaccatgaacgtggcgcagctgtcgcagcagcctcctcattgtcgggggtcctcgtgtatacgggtcgaggctagggttttgggaatcctaggcaagggagcagggttctctccgtctaccgcgatggggaggcagtggtggcacgacggggacacgcgcgtcgcggctgtgggactcggggaggtggcgaggggtggcgcggcggctcggagccgggacggagcggtggcgcggcctcgtgcgacgacattcgcagccgggtcagggaggtgtgtgcgtgtgctgggcaagcgggaatgggaatag

SEQ ID NO: 1962 - DNA, 552 bp, Zea mays
  Peptide Sequence Number=SeqID_45337
atggaggggcactctacgccgctttcctcccccgcagccgcttccttcacccacacgcccgcgggtgcggaatactccgaggacgctattggaggcgaacccagttcgccatttccgccgccggaaaagacaaggagaaactgcctgaggataggattcaagatgagtagccatgatgccaaactgctgcaaaacttggtcctgaatcttgcatcctcagtggaaactggcgcattgaatattagaagctttctagaagaggctttcatgcatttgggtgacgagcattaccttctcaatgctctccttgcaattcgaaaggaggtagacctcatggagcaggatgcactagagagcaaagcaaggtcagacccagagaaggagaggatggaggaagaaattaaagttttggagcatgtcaacccacttccccaaaatcctttcacccccccccttcctcaccagaattgtatgaggccagtgacaatgactcgtatgactccgacagatccactaggtatagcatttggaacctgtaaatgtggtacctag

SEQ ID NO: 1963 - DNA, 153 bp, Zea mays
  Peptide Sequence Number=SeqID_45338
atgccgcttgaactactccacatggatctattcggcctgatcgcttacataagcatcggcgggagaaaaatcacaaacccaagagaccttaaagggattcttgagacgggctcaaaacgagttcggattaaggatcaagaagataagaagtga

SEQ ID NO: 1964 - DNA, 573 bp, Zea mays
  Peptide Sequence Number=SeqID_45339
atggcggtgacatatacttgcaggaactctgatgagtttgttgtcccatcgtatttttctggcaggtgtggccggaacttgggtggccatgacgccgtgcgaagatggtctgcgagggcggtgcaacccacgctggccaaggggacacctgtttgggaccgggcgcccacgggtgtctgcggtgcctccgcagcgaaatctcggtcgaggggctgcacgacttcggcccggtggcttatgtcatgggccacaagcagtgggtctccacctgagcgggaagtggagggcaaggcccgcacacgtgtcagtaccagacccctgcacacaccagggtcctcctcgtttcggggccctattggagttcggacctacccggaggctccggacttatatgtatataggggtccggtgtccttctttgggggtccgaacttactgagatgtggtgcctctccttgccacatggcacccttcggaccgcctcacccggtggggtcaggcgtcgtcctccgcgtggctaggagacgtcgcatgggtgcggtgtcttcatgctctaggagagggtacccctga

SEQ ID NO: 1965 - DNA, 81 bp, Zea mays
  Peptide Sequence Number=SeqID_45340
atgcggcttcatacccttagagatgatgtggttttatactctcagaggtgcttgatgctcatcaaggggagtgggaagtag

SEQ ID NO: 1966 - DNA, 180 bp, Zea mays
  Peptide Sequence Number=SeqID_45341
atggggctcggtgtatgcggctcgctctgccaagtttgggttcgccccttggggaggagtgcgagacattgtggtacaggtggctatgagattgatggttctggttatgactatggtattggcgaagatgaagctgtggaagaagacttccaggagttccaagattacgacgagttctag

SEQ ID NO: 1967 - DNA, 960 bp, Zea mays
  Peptide Sequence Number=SeqID_45342
atgcatcgcgtccttccaccttccgagcccccggatggggagcacccatgttgctttcgtcttgctgtcgttggaggaacgcaacttcgcggaagttggtacctttcagccatcgctcggcttcaaggattttcattaggcagcccggctgcatccccttgccgatggtcacccaagacggtgaccaccagtttgatggtggggagaagcaagccgggctgcggcctctgccccgccctcagcttcaaggatcttcatcatccttgctggggcggaggccgggctgagccggggcctgtcttcgcgtgggccggcgtcccgcttcttcctccagattttgggggtggaaaccatcctccagctctgcggaggaggcgccctccagccatgccggggaaggcgaactgctgctgcccagccagggtgcaacattccgtcctttgtccgggcgacggtggccagccacactggggggtctccctacacgtcgtacgccgcgagggcggtactcgtgttctgggatggtcccattctcgttttcgtggcgaggacgggagtgaggacctgccggtgtgctttggggcggccggcgcccgctggtgcggtgttggtgggcaggtggacgtcaccgtcggtgctgaggtggtggcggctggagaagtcctcgtcgccaacgagatcgccgctgccgtccgtgctccgggcctcggctctttggctttgatagcttgtcctcgcccctcgagtggggacgtgggcgagggccttatcgcagcagcgtctgccctgaggtcatcgctgctgctgtttggccacccggagcggaggtcgttgtcgctgctgccggagtggggggcggcgagccacctgggattttgtcatcccgcaggccctccaatgtgggggattgttcgtacctacgggggtggaaccgaagttccgtttgtaatggcaccttga

SEQ ID NO: 1968 - DNA, 435 bp, Zea mays
  Peptide Sequence Number=SeqID_45343
atggacgagctattcagtaagctcaagtccactgagattgaccaccagatccggtccaagattaagaaccctggtgcacccaccattgccctagtctctggagggggttcttcgtctaacccctcacctgctatgttttctttgtcttctttgttgaccatcacagaggagcaggtggagagcctcgaggatgatgagctagggcttatggctagtcggttcacgcggttccacaacaatcgccagaaccagcgtcgggtggtgggtccaaggatggatgctttaactgcgacaaccccgaccacttcattgctagttgccccaagaagggcaagcaggaggcctcccctcacaaccaccactctggtcgacgcaagggcaagcgggagcacacctctagcaaacacaagtctagtgggaggttgtaagatctag

SEQ ID NO: 1969 - DNA, 585 bp, Zea mays
  Peptide Sequence Number=SeqID_45344
atcaaaaaaatccgccgccgctacagtactgtgcagcctagcggcgtcgggctccggaagttagggttcctgcgctggaaccgagccttttatactacatacacatcacaggcgtctgggacaaaaacaaagcaagctgctactggtttggtaaaaccaggacttgttaactacaaggacaatcctgtcccgccacactatgctgtggtcgaagttctagaaatcacagacaatggttgtgaagattgggagatagattttccagttgaggggatcataactttgcatgaggcaattaacgagttggtcctttggcatcgacgcgacatcaagtttggtgatgagccgagttcaacaccaatgcaacaaaaagctagttcgatcattccacaccccatggtgcaggaagatatgacaccgacctccaaaaaaatcgttgaaacaatcatatcgcctcttgcgaaggaactcgacgaggggggcgtagacaaaattgttcctcagaatgtcgacgtcaacataaaaaaggaaccaaaggttggcaccaatgttgaaagggccaactatttcaaagaagattcataa

SEQ ID NO: 1970 - DNA, 183 bp, Zea mays
  Peptide Sequence Number=SeqID_45345
atggcgccgccatgtcttggccgtcgttgctacggtagccgatgggtagatcattatgttaattggaacatggagcgaccacccgggaaaacagtgctaccacaagggtggtatgggatgcccttggctgaattaggaaagctagtggaggactaccttacccgaaaggggcaagggcagtag

SEQ ID NO: 1971 - DNA, 555 bp, Zea mays
  Peptide Sequence Number=SeqID_45346
atgggtatgggtaggaggggcaggggcttgcctcaccgcttcgatggcaagcgcaagcgtgccccaagtcctccttcgaaggattttggtgacttggagtactcggaggaggcttcctccgagtatgatcgatcgcttgctcccgcctccccggtggcgtcgtccgaggactcggatgactccatggggctgtccgccgtggcccgagcatactggcgctccatcgagcatgctgggctcggtggatcggatgactcggaggaggtctcctcggaagaggtggactcctccgactcttctgaggagtggagcggcggtgaaggtgacggcggcgaggacgatggcagcagcggcgacaacgacggcgagggtggtggaggcgacaacggcgaggttaatggcgacagcaagggcgacgacaacagtgattcaagggcgatggtgacagcagcaagggcgacaacgacggcggcaagggcgatggcgacgatagcaaaggcgacggcaagggcgacggcaagggcgacggtgacggtggcaaggtcagaggcataa

SEQ ID NO: 1972 - DNA, 435 bp, Zea mays
  Peptide Sequence Number=SeqID_45347
atggatttagaaaaaccaaaaagcaccatatctgttgatgagttgactaaagaacatgaggagctaaagtgctcccatgttgatttggcccaaagcaaatcctcctttgagctagaatttctaggaacaaaagatgatacatgtcaagagctcaaagaagaaaatgcgaggctaaaaatgagcttgacacaactaaaagggaagtgcactgctcaaccttctcaagataaccgtgatcacatggtgaagaagcttgagatgggaacaaccgtggcatgcactaaatcccttgaagaaaatgtcaaggacttgaggattgccaagaggaaggaacaaaagaagaaaatcaatacctctgccaaaagcctcaaccgtgcctccatgcaagatcaagccacacttcacactaagagaagtaaaaagtgtagtgaatga

SEQ ID NO: 1973 - DNA, 417 bp, Zea mays
  Peptide Sequence Number=SeqID_45348
atgcccagcaaggttccaatgatgctgtcaaaaacattttttgttacatgcatcaaatcaatgctgtggcaaatttccatatccttccagtacgggaggtacttgaaaaaaattgattgcttcttgaaagttgttgcataccgtttttattggaaagatcttggcggcgaacatccagaggacaagcctaatttgtcaatatcattatttccatatggtgacaaacaacctccgggtactgtcctgtgcagttattatgtatgcgaatggtgtcgtgtcaccttccattacatggtcaatcgtgaggatgttcctaaatccaaaatcaatgctgaatggttagaaagagatatggtttccgtcggcgttgctaaggttgcggtgcaccacaagcggttcctggaaccacctgtgtag

SEQ ID NO: 1974 - DNA, 636 bp, Zea mays
  Peptide Sequence Number=SeqID_45349
atgtcttcgcgctcccttatgcatcgtgtctttccaccttccaagcccccggatgggggatacccgccgtctttccgcctcatcgttggaggaacgcaactccgtgggagttggtacctttcagccatcgttcggcttcaaggattttcatcatgcagcccggctgcacccctccgccggcggtcacccaagacggtgaccaccagcccctgggtggggagaagcaagccgggctgcgatcttggtcccaccctcagcttcaaggatgttcatcatcctcgctggggtggaggccgggctgagccggagctctaccttccgcgcgggttcgtgggtcaccctctcctgcggcgttcgagggagagggcgctcactggccctgcgggcgggtcggacttcgacaacgtggggctagtcgacggcgggcgtcgccagcctcagcgtatcgagctcgtcggcttggcccccggcgcctcctcctgccggaaggcggctgccgcgccgtgtgcacgggagggccgcccaagatgtcgcgcgctgctagggcagtgttcgtgttctggtgcggtcctgcctttgcatcggtatggcgtctccgcgtggaggtcggtgccccactcgtccggaaggatctga

SEQ ID NO: 1975 - DNA, 1011 bp, Zea mays
  Peptide Sequence Number=SeqID_45350
atgaccattagtgggggaacgcagccgggctgcatgataaaaatccttgaagccgagcaacgactggagagcgccgccccccacggggtcgcgctcctccaacaacagcaagaagaaggcaacacaggtgcaccccatctgggggctcagaagggggaaagacgcgatgaacgcgaggagtgtgaaggcatggctatcgcccggggggtcgatccctttttaaaggcagacctcctcactcgcacccccaagcgccacgggcaaaatctccaccgacgcgctccagggttctcaccctccgatgcgggggctgggtcccacacgtcatgcgagctgacccgaaaccaacgggaccgggaaaggggatattgcgaaaaggatccttctcgacgaaggaaacgggccccgagccctcttactgatcaggggttcgaaggttgcgccctccggggtttggcaaccgcccagagcactcgggctccgagccctttactgatcaggggttcgaaggctagcccctcggaagggttcgacagccgccccagagcacgcagagtcagggatgaccctgggtacgtctgttacatggccgaggctcgggctacgctcccgaggtaccctaggacatttccgagaccagcgggaacgatttgtaacggaatcccaccggaggaggcatcgagccctcggaccctatcgaatgggtccgggtccggcaaatcacctgcaggaaagcagcactgttcaccccgctccggcaactgtgccagccaccagggaaaggctaacaacagtcacggcctctcccgagttcggtctcgggcacaacaaggagctctgcctcgcccgaccccaggcctcggcctcagcttcggtctcgggagaaggtctccgcctcgaccgaccccgacctcggcctcagcctcggcctcggaggagtcgccgcctcgcccgacctcagcctcggcctcggaggagtcgccgcctcgcccgacctcggcctcggattaa

SEQ ID NO: 1976 - DNA, 318 bp, Zea mays
  Peptide Sequence Number=SeqID_45351
atgtcagatgtatcaccaactaaagtaaccaaacacaacaatggggatctgctatatatgaaggctattgacaccaatacagagcatgctgagcctaagcacaaataccttctgagagagctaccagagctacaacagaatgtgtccatgcagagcgggcaagaagatttcgcagtggataaggattcaagcaggactctaacaagtgtgcgtgagacccctccagctaccttgccgatgcatgaacaagaggacgggttagactttgtcgaaaccctcttcaacagtggaggtattgatggtgatcggcgaccgtga

SEQ ID NO: 1977 - DNA, 456 bp, Zea mays
  Peptide Sequence Number=SeqID_45352
atgctgatgcaaggcgccgtggcagcgacggactgtaccccgacgagcgcagcggcgtcgccgtcctcgttcgcgcggtgccggctgggcccggcgggcgggcacgcggggaagcggcgccggccgcggccgtccaagcgcgcgcccaccacgtacatcagcaccgacgccgccaccttccgcgccatggtgcagcgcgtcaccggcgccgacgaggccgacctgcagccgccgcagcaggacgggctcggcctcggcctcctcctgccgcacctcggcgccgagcggttcctacaggcggcggggcacgcggcgccgcacgtcgctgctgcaccgtacacgcctgccccgcccgctgcggcagccgagcagcagccgctgtacccgactctggactcgtggaacgtgatgcacgggaagaagaccgaggtggtctcagccctgactggccaatga

SEQ ID NO: 1978 - DNA, 249 bp, Zea mays
  Peptide Sequence Number=SeqID_45353
atgaagctgtggaaggagacttccaggagttccaagactacgacgagttctaggtgtgggttagcggcaacccccagtcggctgcctgtgaaggccgcggttatctacgtttcttttccgcactttgatttattaaagggagaagctcaaaagatacaaaggttgacacagcgccgaagctgtgaagcaggaaagcttcggcatgttcgcagaaaagggaaccgacttaaagatgaaaaggccatttag

SEQ ID NO: 1979 - DNA, 519 bp, Zea mays
  Peptide Sequence Number=SeqID_45354
atgcggcttcatatccttagaggtatgaaggcagaagtcatccttgcatttgcagacatttgcactcatgaggttcagacatcaacagggggagcagcagcaccttcggcgtcgactccacctccgtcggaatctgacccgaccttggagggcggcacggtcggaggatctccacctcgaaggaagatgtcagcgccgcgcctgggccatcgccgccagggtctcctccaggaacccggcccaagcagacggctcggctggccgctccgtagtcacagccagctgtcccccaaggacatcagcccggctcatggcctcggcagcccgacttcggggttggtcctgcaagtggacgacctggccaggttccagccgccgctgctacgcctcctcggcctgggaaagcggccgagggtttctttaactgagcaagagaagccttgggtggcaaggctgaccgagccgagggactcctacgcctccgggatacggatacctcactcgtcaccttccgcatag

SEQ ID NO: 1980 - DNA, 336 bp, Zea mays
  Peptide Sequence Number=SeqID_45355
atggcgtggcgcccccctgcccctctcctccggcagcaagctccctccaggcaggcggcagctcctcctccctctgcttcgtgcgcgcaggagcaggagctccttgggagcacgccgacgccccagctctccccttggccacgaccttccctgttccctgctccatggcacgcccctgcgaacctccccaacagggagcctttccccctgcgcgcaggatctccaggcccaatctcggcgtgctccatgtccatggcgcagcagcagcttgggtttcacacatggacgcccctctacagctcgcccctctctgtccatggccgaactcccatgtag

SEQ ID NO: 1981 - DNA, 1032 bp, Zea mays
  Peptide Sequence Number=SeqID_45356
atgtcgtcctcctcttcttccgctgccgctacgccgccggccgccgcctcgtcggaggagacgctgagtagttgggtggtggaggaattgcgcgccggcgattctgttgatttcggcgtgtcgcgaatgtcgtcggcccgcgtggaggatatgcagcggttgggctacttcggcggcggagttgcacgtgccccggggacggaggaagtccccgagccagagggcgagttggttgttttcgaggcgttcttcgccgccggtctccgcttgcctgcacaccgtgatggacaaggatcgccaggggctgcacaaaagcgccaggcggctgttaggcttgttgaagccaggccgaagaggcagcgggggtcggcgaaggctgcggcccccggcggaggcaagccgccgctggcggcgaagtcgggcgtccctgcgtctagcaaggcgccagagacagcggcaggcgccgggggctccaaaccggtgaaggctgtgccgccgcccaacagggtggcggaggccgcgaaggcggcccgagcgttgccgtcggctggcaagcgtgtcgccgacttcgccaccgacatttgtgtggaggactatcttggtgggtcggacgaaggccaacttgttatagttgcgcctgccgcggcgacagcggttgctgccgcagcgccgaaggcgaagggcggggctcttagcgccggaggcgaggtggcggccctcgcggctgtgagggatgaggcgggcgctgcgtcccgccggctgaaggaggtggtggagtcgctaagtcaggtggctgacttcgccaaccgcacggcgtcgggggcctttacggcagttatgtctgccgaagtcgagagacttcggacgcaacatgctgacgccgttcaagagaaatcggccgccgacagcaagtgccgcaagctggcggacaaggtggccgcgctggagggagagaaggctgacctccggcgccagttggcgggggagagaagggagaccaacgaggccctcgtcaaggcgcaagcttcgtag

SEQ ID NO: 1982 - DNA, 702 bp, Zea mays
  Peptide Sequence Number=SeqID_45357
atggaggatgaggcgagtcggggggctgcctccgtgggggtcggttgccctcttcttcccttggcgtctgggggagaacggcatcctccagcttcacggagacttcctccagccatgccgggagaggcgggccgccgtcactcagccagggcgcagcactacgtcctccgtccggacgacggttgcgccgcgcaccgcgagggcagcgcccacgctctgggcggtcctggcaagggcgaagacctgccggcgtgcttcgaggcgtcggcagccggagatggcttctctaccgaggagattgccaactccgccagtagccctgggtcttcgtctcccggcctgaatggctggctctcgtcctcggtgggtgagagtccttctgccgtagcacccgccccgaagccgctgctgaagctacttcgtcgctcggggcgagggtcgggctggcgcccttgggagatggtcggccgaggccccaggggcaaccggccgagccgcctgctcgggccggattcccggagaagtccctggcagcgattgcccgggcgtggtgatgacgtcgtccttcggagcagagatcctcggaccgcgtcgccgtccgaggctaggtcgggcctcgccgaaggtgtcgtcgatgccgagggtgttgctccccccttccagcgtcaagacccgagcctgcagggtcagagtgtcttgtag

SEQ ID NO: 1983 - DNA, 1479 bp, Zea mays
  Peptide Sequence Number=SeqID_45358
atgtcccaccgcgtccggctcgcggcggcggcgctcgtcgcggtcgcggcgctggccctggcgctcgcccccggcgccgcggccaagtggcagcggaccaggaacggcaccgtggtcagctacgaccgccgctcgctcatgttcgacggccaccgggaaatcttcttatccgggtccatccactacccgcggagcccgccggacatgtggccggagctcatcgccaaggccaaggagggcgggctcaacaccatcgagacctacgtgttctggaacatccacgagcccgagaagggtgagttcaacttcgaggggcagaacgacgtggtgaggttcttccagctgatccaggagcacgacatgtacgccatggtccggctcgggcccttcatccaggcagaatggaaccacggaggactgccctactggctaagggagatccctgacattgtgttccggacgaacaacgagccatacaagatgcacatggagacgtttgtgaagatcataataaaaaggctcaaggatgccaaccttttcgcgtcacaaggaggccccatcattctagcacagatcgagaacgagtaccagcatatggaagcggcgttcaaagatgagggcaccaagtacatcaactgggcagcgaagatggccatctccaccaacatcggcataccgtggatcatgtgcaagcagaccaaagctcctagtgatgtgattcctacctgcaatgggagaaactgtggagatacatggccaggtccaacgaacaagagcatgccgctcttgtggactgagaactggacagcacagtacagagtattcggtgaccctccatcccagcgttctgctgaggacattgcattcgccgtggcgcgcttcttctccgtgggcggaaccttggcaaactattacatgtaccatggtggaacaaacttcggaaggacatctgctgcctttgtgatgccaaaatactacgacgaggcacctctcgacgaattcggcctgtacaaggagcccaagtggggccatctgagggacctgcaccaggcgctgaagctgtgcaagaaggccctgctgtgggggacgccgtcgacggagaagctgggcaagcagttggaggcgagggtgttcgagatgccggagcagaaggtgtgcgtggcgttcctctccaaccacaacaccaaggacgacgcgacgatgacgttccggggccggccctacttcgtgccgcgccactccatcagcgtcctcgccgactgcgagaccgtcgtcttcggcacccagcacgtgaacgcgcagcacaaccagcggacgttccacttcgcggaccagacggcgcagaacaacgtgtgggagatgttcgacggggagaatgtgcccaagtacaagcaggccaagatcaggctgcgcaaggccggcgacctctacaacctcaccaaggacaagaccgactacgtctggtacacctccaggtag

SEQ ID NO: 1984 - DNA, 1272 bp, Zea mays
  Peptide Sequence Number=SeqID_45359
atggcgcttcctgttgacgtggctggcctgcgccctaggttgggcgacgtggaggctcctccgaagccgaggtcgagtctgtcttccatggccgaggccgagtccgagcccctgggtcgggcgaggcggaggtcgtcggcagaggccagggcggtgtccgagccttggggtcgggcgaagcggagttcgtcgtcttctggagctgagcccgagcccgagccctggggtcgggcgaagcggacccgagtccgagcccagggtcgggcggagcggagttcaccgtcttccggggctgagcccgagtccgagccctgggtcgggcggagcggagttcgtcgtcttccgagtcttagcccgagtccgagccctgggtcgggcggagcggagttcgccgtcttccgggtcttagcccgagtccgagccctgggtcgggcggagcggagttcgccgtcttccggggctgagcccgagtccgagccctgggtcgggcggagcggagttcgccatcttccggggctgagcccgagtccgagccctgggtcgggcggagcggaggcctggcttcctgtcagcatcactctgtcaagtggcgctgcagtcggagtggcgcaggcggcgctgtccttctgtcagaccggtcagtggagcggcgaagtgacggcggtcacttcggctctgccggaggacgcgcgtcaggataaagctaagctagaagaaaaggcgaaagaagagtcagaattcccattaaaagtcatctcaaatgctgaagcggcggcggcggttccctcgggcgtgcgaggaggcgcccgtgagcaggagagccccggcctccgcggcgctctccagctggcggattggcggtcgtggagggggcgcgaggaggagcctcagcgtccgcgtcggtacagcttcaggaggcaccggtcaggcgcggcggagtgggcggcggtggtgctgttcatggtgcttgcggtcgtggtgctgctgggcgccgtggccgtccttgtggtggtgctgctgctgcagccccgcgtgtcgtacgtggcgggcgccccgctgggcgccgccggcagcgccgccatggaggccgcgctccgcgacggcgtggtgccgttccgggtggatggggaggcccggacgcgatggaaggtcgcggggatcatcggcgtcgaccagtggacgcgcctggcgtgccagctccgcttcttctggcccaacggcaccgtgctccccttcagatgcatctccaagtccaagttcttgttcttctga

SEQ ID NO: 1985 - DNA, 540 bp, Zea mays
  Peptide Sequence Number=SeqID_45360
atgatacaaatgggtcaagttaatatgatagaaatcaaggaggccgcggaaaaagggagaaatgggaaggccaaggccgtggagaaggaaaggggcgtaaacaacggactcatgggtatcctctgtcggaacagtaaacccatggcaaatccgccaagaacagagttcccgcagaggaagaaccccgatggatacgaggtggagaagttcagtttcagaaatgatggacatatgaacaccggtgcgccacctcatcactcggccatcgtcctcaaagtggctcgcgcggcctgctatcactcggcgttgcctccaaaacgccgatttcgtgttcagtcgctcggcattacctctaaaatgccgacgtcgccttccagtcggtcggcgttgcctccaaaacaccgatttcgtgttcagtcgctcggcattacctctaaaatgccgacgtcaccttccagtcggtcggcgttgcctccaagtcgccgatttcgtgttcagtcgctcggcattacctctaaaaatgccaacgtcgctttctaa

SEQ ID NO: 1986 - DNA, 459 bp, Zea mays
  Peptide Sequence Number=SeqID_45361
atgggcaaaagtaagaaaggtagcggttcttctcctcgctctggtgacaagtgcaaacgtgagccgactcctccttcagaggacttcggcgactcggagtactcggaggaggagttctcctccgagtccgagggatccccggctcccgtctctcccccgacgtcgtctgatgattcagacgactcccaggggattgttgcggaggtctggacctacatccgggtcgtcgagcgctctgggctcgagggctcggatgagtcagagtactcctcggacgaggaggactccttggactcgtccgaggaggacagcggcggcaatggtggtgatggcggcgacgacggaggcaacggtgatggcggcggcgacagcggcaggggcggcgacggcggcagcaagggcgaccatagcagcggcagcaagggcagcagcaagggcagcaacaagaccagtggctag

SEQ ID NO: 1987 - DNA, 519 bp, Zea mays
  Peptide Sequence Number=SeqID_45362
atggcgaggagcttaacccctgaacgcccaattgtgaaggagctcgttgggcacatcggcagccctggtcttgtgcctcctgcagcactagggatggcaacgggcacattttacccgtgtgcctacagagacttggcgaacgccacgggcgaggcgtgtgcgaacagcgcattccggttcagggagacagggactgatgcatcatggtggagcagccggcgggctgcctacgaacatcttgaggaggcccacaagcaagatgttgtgcaaacgggccctagccagaaaggtgagatggacgacaaccgtgttgatgagctcgttgatgcgatatggctcacagtagtgtggcttcagcttccactgtgccagagtctagaaaggtgcagctggatggtggcggagtcgaagccacacccaatcgccaacgacataagagaccgccctatggtgtttgtcgtagtggcgtttgaagatcgtctgggcttgttcaaagcagtagcgaacaacggacaatag

SEQ ID NO: 1988 - DNA, 852 bp, Zea mays
  Peptide Sequence Number=SeqID_45363
atgaagacccagttgcaactcatggaggttgtgttgcgaccggttgtagtagaccgaccccctgaagactatgatcgtgttgtggatgacgtgccaactatgcctgatgctcaatctggacccaatttgatcccattaagtcagccaggagatggcctgcagacagattctcctgcgtgtatctctttggcacaaaccaactgcagtaaatttcattggcattacatcttcattttggaccatgagcactttgctcattccatttgtcgtgggactgatgatcttgtacatgttgcaggagagactgctgctcttgtggttgatcctcagaccgtggcatgtggctgctttggtgatggatttattgccttgaacagtcttgagtttaggaatgaagaggagtcatatgcctttgttatgactgctgattcagatgatgatcgtccggttggtgaactcactatcggtgtttggagcctgaccgcacacccggcatgggcaagagcaagaaaagtgggagttcctcacaccattccggcgataagcggaagcgcttttttgactcctccctcggaggactttggtgattccgagtactcggaggaggagttctcctccgagtcagaggaggtgtggacctacatccgggccgtcgagcgcgccgagctcgagggctcggataaatcggagatctcctcggacgaggagaactcctcggactcgtccgaggagggcggccgtgacggcgatggcgacggtgacggcggcgaaggtggcggcaagggcggtagcggtgacggcaaggacgacagcaagggcagcagcaagggcagcaacaatgccagtggctag

SEQ ID NO: 1989 - DNA, 402 bp, Zea mays
  Peptide Sequence Number=SeqID_45364
atgggcgcgcctgccatctgcgcgcgctgcgcgcgcatttattgcgcagcaggtagccgttggcgccaagatagccgttgctccggagtcacaccggacagtccggcggatccggccacgttcacgtccgatcccgaggacgacgaggacttcgccgcgtggagtaaggggtttatcctggatgagaaggaggaggagatcgaggccctatgctacgacagcgacgcgctggaagccatggcggacaggctcgtcccggacgccgtgccccgcgaggtgttctggccgaggctcgtcccggacatcctcgtcccatacgcgcgttcagcaactgccatgttgggccagcgcccacgccgcacactccgctcccctagctcgtcgcgcggggacgcggggtag

SEQ ID NO: 1990 - DNA, 408 bp, Zea mays
  Peptide Sequence Number=SeqID_45365
atgacgcccgagaagattcttgggaagtttgtgagtgggcgcatgatggttgaaagtcgcctagagggggtgaataggcgaaatctgaaatttacaaacttaagcacacactacaagccggggttagcgttagaattaaattcgagtccgaaagagagggtgaaaacaaatcacaagcaaataaggcgaatgacacgtgctagaaacaggagaaacaattttggagaagttggctgtgtacagccaaaaggctgctcggtctgggtgcaccggactgtccggtggggcaccggacagtgtccggtgcgccagactggcgtctatcaactggctgctctcgggacttcaacgacggtgtacgactataaatcaccggactgtccggtggtgcaccggactgtccggtga

SEQ ID NO: 1991 - DNA, 1605 bp, Zea mays
  Peptide Sequence Number=SeqID_45366
atggattctctatttgtaggcttgtctcataacaagccaaaaacatctgtggcaaacgcaatagttcgagaagttttatctcatgactggttgctcctagactatatttgcacgcaaggtgatcttgctctcatcgattttatcaaggaaatcccttatgaaccaagggtagaagtcgttcttattgatgatgcctttgttgaaaggaagtggatggagtgtctatttcagccgaacgcgtatttaggtgacgaggtgtttattccgataaacatccgagagacgcactggtaccttgccatgattcatgcaagaaatatggagatacaagtgctcgattcacttggtacttcacaagaccgcaaagacctcactgactctattaaaggactgcaaagacaaattgatatgatatctcaacgtaaggagttaaaagaccacaggtggccagacctccaagttgcttcttggccgctcagagaaatagacatgggatatgcaaagcagacagatagctcttcatgtggcctctttattttgaactatatcgaatactggacaggggatgaattgtctgacagttttacccaggaaaaaatggctgatatattactatcttcagacctaaataagagaagagggtgtctgttatacaaaaatgaaaaagaagttaactctggaagcccatcagatgttgagatattagaaaacccaacagattctaataagaggaaactactccacatgcttgatgatagcgaagtagtgtatgaagatgaggaaggccctattactcaagcagacttgcaaaggtggtttgttgatgattgggataaaagagttcctgtaaaagtctctaccgatgggtgcaccaatgactttctaatggttggtctttctacaaaggacatgccagtgaccaaagccgattcaatagatgttttatgtgattatatcatggcaataaaagacgatgcaatattagagatgacatgggtgcgaagtttcaatccttttaagatagaaatatctgtcaaagacctgcaaaacatattaacgataaatcaagatatgattctaagatgttttgacatggatgttcgactgcttgctaataaagagtcacgtaggccgaaagaagaaatcataaataatagaaagcattatatggacatgcgtttttgggttcttatgccatggaaattcaatggatgtcacgcccttttcgtaatagatcatgttaaaaagcatgtgacttttatcgactttacaccgactcaagattggtgtaaacacatgccatacaagaggttcgcggaagcgattatcatggcctcaaaaaatataagattgcttacagcaagaaacgttctggatgggcggaggatatctttaagtgggaacatacaattcagactggatgcaaagattattcgaaggaactttgtgattgatctgttaaattatgaagacaattcgtgtcgatatgtgtcacacccggttttagaaggcaaaccgaatgcgaaccatgtacgtgccaggatcagttattcacgtacacagcagttacataacatggacatcatcacacagtgctcaaactag

SEQ ID NO: 1992 - DNA, 210 bp, Zea mays
  Peptide Sequence Number=SeqID_45367
atgaacgtatgtgagctcactcttgctgtctcacacaccccacaggtcaagaacaggtaccacaggatgaggcgcttggaggatgctgcgataactcctgttatatataaagatgtgacattcgatcctgtgccactatacatcatatgtgtgagacttggtcccagcacacctggtgtttatgttagcgcccgggttttggacccctaa

SEQ ID NO: 1993 - DNA, 801 bp, Zea mays
  Peptide Sequence Number=SeqID_45368
atgcaagcactaccaacttcaaatcaacgtggatgtataggtttatcccaagctaatatgtttctgatagaaatgaggcaggctgcattagaggagaggacaaaaaggtactttatgcaaaggctgacttgggaaaacaagtacagggagcgtgtacaatctgcaatacaaaagtgtaatgctggtgagaagagacgattggggctgcttgaatctgagaaaagacgggtacagagtaggctcttgcagattcaacttgctgtgaagactgcctctaaccagagaaaatctgagaggagcaagttaaatgagcaattagaagaaaagcttcagaagctctttaacttgtctcaaacaaaaatttcagcatttggcgaggctatgcttcacaccattggttatatttatgtccagcaagcagcaagagaactcggaaaaagtagagtttacataggtgtaccatttatagctgaatgggttagagacaaaggacaccacattaaatcacaggttaatgctgcttcaggtggacgtaaaagactgcatagctcttacactggtgaatatctttcagtggatggcattccattgttccaacaacttgataaaggagccaaggtggtagtggccttattcaagctggtggccttgctgcagaactggacggtgatggtatcacagaaggataaagaaagagtggcagagcttatcaggaacatgagcgcagagtctatgtaccgtcgtgaaaacagcctgcgcgttgaaacgagcacagaccaacaagccgctccgtcacagtga

SEQ ID NO: 1994 - DNA, 1110 bp, Zea mays
  Peptide Sequence Number=SeqID_45369
atgatggtgtgtttgggcctcggcggccgcagaaaacacacgctacaagataatccgatcctgcaggctcggatcttgacagttggagggagcagcagcaccctcggcgtcaactacaccttcggcgaggaatccggctcgagcagacggctcggccggtcaccccgaggcctcggccagctgtcccctgaagacatcagcccggcccgaggcctcggcaactcaattccggcgtcggtcccgccagtggacgtcccggccaggctctggccgatcaagtcttcttttcgagccaactctgcctctgtccgtgctgacaccgctacccctggcttcggctcatcgaagagcggccgaggggttcctttaactaagcaagagaagcctcgacagcaaggccgactgagccgagggactcctacgcctccgggatacggatacctcactcgtcacctttgcacggggcgactcacgcttggtgaagcggttcagataaccaacaggcgagtcttagtgctcgaaaattcggaaaaaacacggctccgcgccaaaaatacatacatgtacgaacaaccccacacgatttgggggcctgcggaacaacagaagaccgacgaacggctcgccgtcgcccgctccaacagcggcgacgacgacgacttctgctctggggggccgaacagcagcagtgatgacctcagggcggatgctgctgccatgaggccctcgcccatgccctcactcgagaggcaaggacgggcagaaggccgtagagttggaggtcagtccgtgggcggcaccggctatctcgtcggcggaagaacctcttccagctgccgtggcggaaggcggcgccgggagcggctccgaagccactcgggtcagagggccaggcacgccgcagctgccagcgccacgaacggcgaacgcccttccccccgatcactgagggaaggagcaggccgccgcccgcgcaggggccgaccccaactcggcacactcccctccccagcaccgatgatgaaaatccttgaagctgagggaggggcagaggccgtagcccggctggattttccccgccatcgagctggaggtcaccgtcttgggtga

SEQ ID NO: 1995 - DNA, 3705 bp, Zea mays
  Peptide Sequence Number=SeqID_45370
atggctgaaaggtaccaacttccacgaagttgcgttcctccgacgacaaggcggaaggattgcgggtgtcccccatctgggggctcgaaaggtggaaagacacggtgcataagggagcgcgaagacatggtcgcctttcaaggggatcaccccccttttaaaggcgactctccctacttgtgtccccagccatcgtgggctgaatcttctccaacacgctccaaggtcctcccctatggcgcgggggctgggtcccacgcgtcatgcaagctggcccagagcagaagaagccaaaccgccgcgcgcggtgcatgcaaccgcccagcggttacaagcatcccttcactttcgcccagaccagcgggtgaaagggcggacagccgtgcaggcggcatgcaaccgcgccaagtgggcgcgcccctccgacttccaacgcacccagcatggaagcccaggcccacgcatcatgcaaccggcgcgccggttgctacgtgcgagcaactgcaccaccgctcgcaccactaccacgcctcctcgactgcggaaccagaaccgcgactcgaggcaaccctgcgtacgacccagcagtgcgagccaggcgcgacggtcaatacgaccaaaaatgggccggcagtaatggcggtggcaggcgggcaggagcagcggtcacgtcgtcagccaagcttacgtcccatccaggggcagcgagagaaccctctctcacggggaagcaagcgacgcttcgccttcgccataatgaccgcgtcaaaaaaggccccgagcctccctactgatcagaggttcaaaggctggcccctcggaggggttcaacagccacctcagagcgcttgggttccacacccactactggtcagaggttcgaaggccggccccttggaagggttcaacggccgcctcaggccagtcgggctccgcgcccactactcatcaggggttcgtaggctggccctcgaaggcgggaacgatcttgtaacggaatcccatcagagggaggcatcgagccctcggaccccgtcgaaaggggaccgggtccggcagatcacccgcagaggctcgggggctgctctcgcgaacccgtctccggccagaccgttgacagcgtcaacataccagcccgagaacttgggacccgaccgtgcactcgggcccggcctcaggcgccataggaaacttcgcttcgcccgaccccagggctcggactcgggctcagccccagaagacgacgaactccgcttcgcccgaccccagggctcggactcgggctcagcccctgaagacgacgaactccgcttcgcccgaccccagggctcggactcgggctcagcccctgaagacgacgaactccgctccgcccaaccccagggctcggactcgggctcagccccggaagacgacgaactccgctccggccgacccagggctcggactcgggctcagccccggaagacgatgaactccgctccgcccgacccagggctcggactcgggctcagccccggaagacgacgaactccgcttcgcccgaccccagggctcggactcagccctggcctcagccgacggtcttcgcctcgcccgacccaggggctcggactcgacctcggcctcggaagacagacacgacctcgacctcggaggagcctccacatcgcccaacctagggcacggaccgaccactctcacatgagcactccccactcgtcctccacctcctccgtcccaccacaccgcgcctcccctccccagatcccccaatccctaaccctagcacccacggcgtcctccgcctcgccctcctcctcctccgcgtccggtatgcgggacgcggcggaggacgactccgactcgccgccgtcgcagatgtcggaggacgaccccggcggagggggcggggaccggtgggagccggatctgcggggcggcaacggcggcggcggcggcggcgggaggtgggctccgccggaccaggtgctggagaacgtgctcgagaccgtgctcgagttcctcaccgccgcgcgggaccgcaacgccgcctcgctcgtctgccgctcctggtaccgcgccgaggcgcagacgcgccgcgagctcttcatcggcaactgctacgccgtctcgccgcgccgcgccgtcgagcgcttcggcggcctgcgcgccgtcgtgctcaagggcaagccccgcttcgcggacttcagcctcgtgccctacggctggggcgcctacgtctccccctgggtggccgcgctcggccccgcctacccgcggctccagcgcatctgcctcaagcggatggccgtatccgacgacgacctcgcgctcgtcgccagctccttccccttcctcagggacctctcgctcgtgtgctgcgatggcttcagcacgctcggtctcgccgtcatcgccgagcgctgccggcatcttcgtgtgctggatctgatcgaagattacgtagaggacgacgatgaggagctggtggattggatctccaagttcccagagtccaacacctctctggagtcgcttgtcttcgattgtgtcagctgcccgttcaactttgaggccctggaggcacttgttgcacgctcaccggctttgcgacggctgcgtgtgaaccaccatgtttcagtagagcagctgcgtcgtctcatggcaagagcaccccagcttacgcactttggaactggtgcattccgatctgagggtgcccctggtggggggttggctgtgactgagctcgctacatcttttgctgcatccaggtctctggtttgtctatcaggtttccgggaggttgacccagaatacctcccggcgatctaccctgtctgtgccaacctcacgtcactaaacttcagctttgcaagcctaaccgctgcggaactgaagccagctattcgcaactgcacgaatcttcgcactttctgggtccttgatactgtgggtgatgaaggccttcgtgctgtggctgatgcatgctctgatctccgtgagctgagagtttttcctttggatgcctctgaagattccgagggttcggtctcagacgttggtcttcaggcaatctcagaaggctgccggaagctggaatcaatcctctacttttgccagaggatgacaaatgcagcagtaattgatatgtcgaagaactgtcctgagctcgtagtgttccgcctctgcattatgggccgccaccgacccgatcgggacactggggagcccatggacgaaggtttcggtgcaatcgtgatgaactgcaagaaactcaccaggctttcggtctccggcctgctcaccgataaggcctttgcgtacatcggaaaacacgggaagctaataaagaccctctccgtcgccttcgctgggaacagtgacatggccctccagtatgtattcgaggggtgcaccaagctgcagaagcttgaggtcagagatagccctttcagtgacaggggtttgctctcaggactggactacttgtacaacatgaggttcttgtggatgaactcgtgcaggctgacgatgaggggctgtagaggtgtagctcagcagatgcagaatctggtggtcgaagtaatcaaggaccactccgaagatgaaggggaggctgagaccgttgacaagctgtacttgtatcggtcactggcagggccaaggaatgatgctccgccgttcgtcaccctcttgtag

SEQ ID NO: 1996 - DNA, 717 bp, Zea mays
  Peptide Sequence Number=SeqID_45371
atggtcgcctttcaagggggtcaccctccttttaaaggcgactctccctacttgcgtccccagccgtcgtgggctgagtcttctccaacacgctccaaggtcctccccctacggcgcgggggctgggtcccacgcgtcatggaaaatggcccagggcagaagaagcaaaccgccacgcgcggtgcatgcaaccgcccagcggttacaagcattcctccacttctcgcccagaccagcggcatcggaggcccaggcccacacgtcatgcaaccggcgcgctggtcgctacatgcgagcaactcgcaccgccactcgcaccactcgtcgcgcctcctcgactcgcggaaccagtaccgcgactcgaggcaaccctcgcgtatgacccaacagtgccagccaggcgcatcgatcacgggccagtcagccgcgggagaaggcgcgacggtcgatgcggccaacaatgggccgacagtgatggcggtggcaggcgggcagaagcagcggtcacgtcgtcagccaagctcacgtcacctcgtgggacagcgagcgaaccctctctcacggcgtgaagatgacgcgtccgtgtcccgttcctcgaacggcctgcgcacgcgcaatggctgccccgtgaaccactcgctccgtcacattaactccgcggcgggacaggcggcgcctcaggcaggagaagcaagcgacgcttcgccttcgccataa

SEQ ID NO: 1997 - DNA, 201 bp, Zea mays
  Peptide Sequence Number=SeqID_45372
atgcggattgcactctcattagacccggagagggactttgctcaatttgtagccatagtcgcaaagggtttgcctcatccaaaatttacctcccgtgtcgaggtcgagatgcccattggttcccatgggtgtctagatgggcttggcatccttcattccaaacttggtgccctcttggagttgcttgacttgaaatcctag

SEQ ID NO: 1998 - DNA, 141 bp, Zea mays
  Peptide Sequence Number=SeqID_45373
atggccatgatgggttcaacatcagaaaagatgtacctctgtcaggtgaagaagcaacaaacttttgttgcttctgttcaaaggtggtacccaaagaagagaaccaagactaaagctgctggaggaaagaccctccgttaa

SEQ ID NO: 1999 - DNA, 486 bp, Zea mays
  Peptide Sequence Number=SeqID_45374
atgacatttgcattcataaacattcatttagacatatatagaatcatcatcatcatatcacaaaagacagatgcttcggctatgagaaaaacttcgaagaaagaggaaatgttcatgcttcgttgtgtacgaaaagaagggaagatgtttttcgccttcggctcaaaagtgaagtttcgttcacagcaaagcagattgtacacggataaaggagacaagatatattacaaggtcatgggattaccactagacgcgcagagcagcggaagacgtctcgatgtagacgaacgcgtcgagcagtgccgtgcagtcgccggcgtccttcacgtcctcgcacggttcgtccaagtgctccagatgcagcacctccgaggtatccacacgtacagggaggaagcaccgcgtaccgaactgctaggtttgcgacggcggcttggcgagggcgagagtcgagcggcgactgctggtttgcaggtggcgaattag

SEQ ID NO: 2000 - DNA, 843 bp, Zea mays
  Peptide Sequence Number=SeqID_45375
atggaaggctcctttgtcattaggacatcctactgcttagaggtggaaggattccctcatcttttacggagttgcgcgcttcgcatggggatatgcaagaagccggagtacgtctggaaagaataccgggagaatagaattgagaaatgctctatggcagtctacctgggagaaagccaaaactacccaaatcaccctcctttccaagtcatcttcactggacaccgcttcccagacacttgccaaaatgttgcccgaaaagccctttgccagctatgccaaaactacagcagggaagtctttgagacaccccttcgttactttccacccaacaacaaaaatacccctacctggaggaaaagacttcatgctctatcaagaagagatcctactgaagatgaccccaccatagtctacatggccggatatctccacacccttgacaaccactatgacgaccttttctcccactgcacgcacctaaactcccgggtggagagcctagagcaacaaatcaagaaattaaaagaggagaaggcgtccctccaagaaagtctcgaaatagcagaaggtgaagaggccaacactcgtgaagcctaccgaaccctgaagatggactacgataagaagttaaagaagctcacccccactaagaagatccgaaagcggaccaaaagccaagtggtaatcctctccccctggcagatggcttcggataaaatcacgcctaccgcctctgggattggagcaaggttccccctaagagctgaaggaaaagtcggtggagaaggaagtgagacccacctccccgcacctccggagctgccattagacttagcctaa

SEQ ID NO: 2001 - DNA, 573 bp, Zea mays
  Peptide Sequence Number=SeqID_45376
atgtcttcgcgctcccttatgcatcgtgtctttccaccttccaagccccggatgggggatatccgccgtctttccgccttgtcgttggaggaacgcaactccgtgggagttggtacctttcagccatcattcggcttcaaggattttcatcagccagcccggctgtacccccccgccggcggtcacccaagacgcttcaaggatgttcatcatcctcgctggggtggaggccgggctgagccggagctctacctcccgcgcgggttcgtgggtcaccctctcctgcggcgttcgagggagagggcgctcactggccctgcgggcggctcagacttcgacaacgtggggctagtcgacggcgggcgtcgccagcctcggcgtgtcgagctcgtcggcttggctcccggtgccccctcctgccggaaggcggctgccgcaccgtgtgcacgggaggaccgcccaagatgtcgcgcgctgctagggcggcgttcgtgttctggggcggtcctgcctttgcaccggtatggcacctccgcgtgggggtcggcgccccactcgtccgggaggatctga

SEQ ID NO: 2002 - DNA, 1258 bp, Zea mays
  Peptide Sequence Number=SeqID_45377
cgacagcaatagcagcaggagcggcagcagcaacaacaacagcgggcgccccgcttccagggccactggaagggcctccccttcttcggcttccgaggatgctcctcccccgtcggccgctatgcccgccggtgggtctggttcccagcagcatacatctgctgggaatgtcacctgcgacccgtcagcggttaccgtagcgtcatcagcgtcagcgtcaagcccaccaccggcagcagccgaagaggttcctgctgcgttttcccccaccatgcagggtgatgctggtgctgaggtggcgccgtcaggcccccaggacccacctgtcaccgtcgaggcaatgccttcgggttgccaagttccaactaggggtccagaggaaaccgaggcggctatcctgcgggagtgggaggcgctcgagaccgagcaccagcgccttggcgactggtgcacccaactggagaagcgcactaaggcggcgtcctgccaattcgcctcagagcgggccgagcttgagcaggagtgcgaggacctcaaggaggacatccgaaaggtgtctgaccgagagcaggagaagctgcagcaggaacttgtcgacaaggccaacaacattgcttgcgtcgaggaaagcctcagggctaaggatgcctccctggagaaacgagcgactgatctcacctggcaggaggaggacctcgcctttagagaggagatgtgggcaaggtggaacaagttgctggacgagcttgagctcgaggcagaggagaaagggaagcgtttggaggggaaagtgcgggcactggaggagcagacgaccttgggcccccaagcggtggaggtgatgaggaagacgctcgacgacctctgggccgatcaacgcgccggggcccagcgcatcgccgcctgggctgacgaggcaagtacgacattggtgccgttggggatgagtcccatcccgacgttggtgcggccggcgtccatctccgacgcgctcccggtactggattctgctgctgaccgcctcctacgtctggatcagattcttggcgcccgcctggaggccgagggcagcagactctgccggtcggtaatagagtatgtcttgacatgcttccggagccacgacccgactgtctccttggggccagtcgtcgcaggcccggtggtcgatactgaagatgctgcccgggagggcgtgcagggtgttgtggacatggtggtcgggcgcttccagcgggatcctactgacgatgagtag

SEQ ID NO: 2003 - DNA, 405 bp, Zea mays
  Peptide Sequence Number=SeqID_45378
atggaatacttggtgtactctgatcacagattccgacaattacatgtgctaagcccagctgccaactcggccaagatagcagacggtcctatatacctcggaccaagctttcctgacaccaaatcaatcattgacatatgcaagtacttcaaggaatgcttcgccgagaagcaaccttggccaaatcgcctcaccaaccgaccgtatcgcaggcgcattcaatgcgaggatcgcctgacaccttatcctgacacgcgcgtctcagttggcaaggtcgaagactcggcctcagcctcggcctcgggaggaatcgcgtcctcgcccgaccccggcctcggcctcaggagaagtctccgcctcgcccgaccttgggctcggactgaccgcgccacaggggatacataa

SEQ ID NO: 2004 - DNA, 312 bp, Zea mays
  Peptide Sequence Number=SeqID_45379
atggcggcggtgggtgcactgcaaaagggggcatgggtggcggtagtgcgctgcaaagggggcatgggcggtggtgctagtgcgcatggaggcgggcacgcgtgcgggggcacggagaaaacctttttaagaaaaacgaaaagaaaacacacaagctcagcaatgataagcacaaacaaatcaaatgttttgaataagggaagaatagagtttttccaaagcatggactactcagattcgggggctaagcataactactattgcttggctcctgaattgagaactatgctaaatgcaacttttgagcactaa

SEQ ID NO: 2005 - DNA, 72 bp, Zea mays
  Peptide Sequence Number=SeqID_45380
atggcgcaccggacactgtccagtgcaccaccagacagtccgattccaaaaactggactaccgaaacaatag

SEQ ID NO: 2006 - DNA, 681 bp, Zea mays
  Peptide Sequence Number=SeqID_45381
atgtcccagcagctgaggcatgcttcgcagcagctgaagcatgcgaccgccttcgccgaccatgttgcgtcgggtgctctgacttcagagtttgctgctgaaatcgagcgtctccgggcacagcatacggatgctgttcgggagaagtcggctgcggaaaacaaaagccgcaggctgacggagaggttggctgctgcggaggccgagaagcgggatctccggcgtcagctggtggaggagaggagggacgcgaacaaggccattgtcgatgcgcaggctactcaagtcgaggccaaacttgcgtgggtggaggccagtcttgcccgccaacgcgccgaggagctggaggcgaggctcaacggcctgcgcaaccgcgtggacaaaaccgaggcctcgacgcgcgcggaggtcgagcggacacatgcgcagcttgtggacgcgtaccgggagctaggtgcacggaccgccgccttcgaagctctcggccaagaggtgggcctccgcttcctcgagtggctacaggaggagatgggggtgctcccgacaatcgtgacgggcctcatgtactttgcctcccttgtcacctgcgagggggccgtgaatgctctgtcccgcgaggggtgcaggcacttcgaggtcttcgaccggtcggacgaaggcttcgaacgcaaaatcttctag

SEQ ID NO: 2007 - DNA, 624 bp, Zea mays
  Peptide Sequence Number=SeqID_45382
atgccgtcgtggctgtcggagaggttttggcgccctgttcatgtgatgtcgtggctgtcggaggagcgcttgagccctatggaaagaccgtcgtccgaggtcgaggttgagtccgagccctggggtcgggtgaggcggagaccgccgtctgaggtcgaggttgagtccgagccctggggtcgggcgaggcggagaccgtcgtccgaggtcgaggttgagtccgagccctggggtcgggcgaggcggagtccgtcgtccgaggtcgaggttgagtccgagccctggggtcgggcgaggcggagcttcctatggcgcccgaggctggacttagctgctgtcggcctcactctggcgagtggcacagcagtcggagcagggcaggcggcgttgttttcctgtcaggcgatccttgcattgaatgctcctgcgatacggttggttggcgtgacgatctggccaaggttgcttctccgtgaagcctgcccgagctgggcctcaggtgagtcgaagctttgtgctgatgggggttaccagctgagattaggagtcttgggggtgccaaaggttcacaataagccaataaaaataccaagaaaagggttcaacaaagagagtaagggataa

SEQ ID NO: 2008 - DNA, 450 bp, Zea mays
  Peptide Sequence Number=SeqID_45383
atgcagtcgaggatcgagctctgcctctgcgtctgcctgcttgggagagcgaagaggagagatgcctgtggctcctctcatttatggttgcgtcgccagggcactgtgggcgtctcccgccgttgctgcagcgtgcagcgcagtgcagccttctctctccagccatcatccttgtcaatttctcatggtgcgcagcgctgcgtgctcgtgcagtggcgggggagacttattaaatgtgcattgaaccccagctcagaaaggcagcagcagggccacaggcgaggaatggatcaccagttcacccacacgagttttgacatggcgtgtgaattcagcgttccacttcgctgcctgccagcttccagttccccgtttccgctttttttccaaaatgcccatctgaagaaaaagagggcacggaccgagctgcagttcagccgcttcctttga

SEQ ID NO: 2009 - DNA, 96 bp, Zea mays
  Peptide Sequence Number=SeqID_45384
atgcacccgagggctgttgcgaaaggtgcctacgcgaggtggaagacaccggatatcgggcccacccgccagaataacagggacgcgggagcttag

SEQ ID NO: 2010 - DNA, 195 bp, Zea mays
  Peptide Sequence Number=SeqID_45385
atgaacgtatgtgagctcactcttgctgtctcacaccccccacaggtcaagaataggtaccacaggatgaggcgcttggaggatgctgtgataaatcctgttatatataaagatgtgacattcgatcctgtgccactatacatcatatgtgtgagacttggtcccagcatacctggagtttatgttcgcgcccgg

SEQ ID NO: 2011 - DNA, 441 bp, Zea mays
  Peptide Sequence Number=SeqID_45386
atgggtaagacccgcgggtcaaattttgcatccgaatccgaacccgacgggtcggatatccgacggatatccgaatccgcgggtaaaattgccatccctagcggcgggtgcgttggtggcggggacgccaagttcttgcacccggaaaggacaagcctcttcgcgcgtgacaagttcggtggcagcggcggaggcggcgtcagggaggccgcgccggcgtcggctacctctgccgagttcctctacatggggacgctggcgagcagagccggcgagaggagcagcgacacgacgtcgtccgacgacgaggtgtcccggagctcgcccgagctccgcccgcttccgccgctggcgcggcagtgcgcaccagcgccgtcgaggagccccgacggggcctccccgtcgttcggagagtgttggggacttgttctcaaatgctaa

SEQ ID NO: 2012 - DNA, 162 bp, Zea mays
  Peptide Sequence Number=SeqID_45387
atggggctcggtgtatgcggctcgctctgccaaggtggctatgagatcgatggttttggttatgactatggtgctggttgtcagcattgcaaccactgctcaagcgaagatgaagctgtggaaggagacttccaggagttccaagactacgacgagttctag

SEQ ID NO: 2013 - DNA, 726 bp, Zea mays
  Peptide Sequence Number=SeqID_45388
atgactcgccagcagtggcgatcacctcagcatgtgcgccattgcgaaaaggtcctcgcccccgtcttcctatgggggggcgacaacgaggccattaaagccaaagagttggaggctcggcggcaggtggcactgatggtcttgccagcggaggcaaccacctctgcaatgggcagcctcaccagcgacgacgaccacctcagcaccgacgacagggccacccctacaccagtgggcgacagctgcctcagcacgcgcgaagaggtcctcgctcccgtcctcctacagagtcaggacaagaccatccaagaacacggcggtcgctcccgcggcgtacgacgtcttgtacgacccccggaggcagcgtcggaggcggcgccgaagccacctaagccgaggcaccgggcacgcggtggctggcggcgcctgcagtcggccggccccgcgtacccgaagttcacctccttcgcaaggctgcttcgctgcaactggcggtccaacatcgggtcccaggcccacatgtcatgcaaccggcgcgccggttaccggaaccagtgcggcaactcgaggcatcccgcgcatggcccaacagtgacattaagtacaaaggagcagcaggccaaccgtcaatcagactctggccccacctacaggctcgcatcctcccctgaggcgggcccgggggccactgtcggtaccctgaatcaggggtaccctcttctatag

SEQ ID NO: 2014 - DNA, 519 bp, Zea mays
  Peptide Sequence Number=SeqID_45389
atgagaagggaatctgcactgcatagcggatccaccggagaagaggccttcctcggaaatctccgagaaagtcagaacaagacagcggatggcgcaacctcctgcgccccagatgaagactacctcttgcaagtggagaaccgggaattcacttgctcgaagaaccccattatccacttcgcccacaaaggagtggacacggattacaagaaagaaggaagcaagcgttcctggaacggagctccgccgagtcgtctttccagcaccttcgccctcaatgaaggatggaaaggaatccatcaccgcagcaactcctttctaccccgacatcctcttcattgggggggagattggagtcatctcccatctccgacgacgagcctaccatgccaagggaagaacctccccagtgagaagctcgacgatggaggaatagtcgccggaatattcggcgacatcacgaggctggggagcgggacccagcgcagcccatatcccgggatgaagtctcagaagtag

SEQ ID NO: 2015 - DNA, 396 bp, Zea mays
  Peptide Sequence Number=SeqID_45390
atgaagaggtccatgtcaccggaccacccgtctctcatgcccgaggggcaccccgtggaggtgaacagacactggacgacatcatcgatgcccagtgcccgtatcacaaggacatgcgtcataccctgcggaactgcagggacttcaagcattccgtcaggaatggccgaccattccagcctctaccacctcccccaccacgaggagggcctagcgagcccagatagcctcagcagcaggaagggggagggggtggagcatttccacgcgttgacggggaggtcaatgtcatcttcggaggacatgggtcgcaagagaacagaaggcaacaaaagctcaatgaccggcaggtcatggtggacaccactaatgccccagctccctatcggtggttga

SEQ ID NO: 2016 - DNA, 117 bp, Zea mays
  Peptide Sequence Number=SeqID_45391
atgacgggctatcggctagacgataggctggtggcaatggcaggcgagccgcaagctagagacggtgtccggatggctggctatgacgattgggtgggcggctgggcgtcgacatag

SEQ ID NO: 2017 - DNA, 195 bp, Zea mays
  Peptide Sequence Number=SeqID_45392
atgcataggagtccaatactcaagaacaaaagaagcccaaagaaatcagcgaagaaatccaagaagtgggctgtcagccagcgcctggtggcgcaccggacatcggtgtccgactgcaacggtcggatccaacggtcgactgctacaggcgccaacggtcggctgacgaggcgtgcaccggacactgcacagtag

SEQ ID NO: 2018 - DNA, 756 bp, Zea mays
  Peptide Sequence Number=SeqID_45393
atgccttctgagatagtaaatgcagaccaactattcgttggtaaccaacctagtgttggtagacacctagaggatatggattatcctgtgaatggaagacattcacaacctagctcagtgcacactgatgaggctaggttatcggaagcccttgattctcgttttgggatttcacgaggaatcataaggttgatagatgtagtgacaacatgtgcatatgtggtcactggattatgcttctacgtcgacgacacgccgatccgggaggtggtccggcacccggacatgggcggcgacttcccggcgaagccgatggcggtgtacgccaccatctgggacgggtccgcgtgggccacggacgggggcaagtacaaggtcaactacaagcacgcgccgttcgcgtccgacttctccgggctggtcatcgtcggctcccgcgccgacgatccggtgctccgggaccaggaggacctcctcgggctcgtgacggccgactactacgccgccgtcatgacgccgcgggagcgcgcggccatgcgcgccttcagggcgcgccggatgacgtacacggtgtgctacgacgccgtgcggtacgcggacgggccgttccccgagtgcgacaactcggacgaggagagggagtccttctcggcctggggcgagtccaagaccgtcgtcgtgaggccccgcgcccgaggccgccgcccgcgcggacgcaaggtcggcgccggcgcccggcgccacgggacgtgctga

SEQ ID NO: 2019 - DNA, 552 bp, Zea mays
  Peptide Sequence Number=SeqID_45394
atgacgccgcgggagcgcgcggccatgcgcgccttcagggcgcgccggatgacgtacacggtgtgctacgacgccgtgcggtacgcggacgggccgttccccgagtgcgacaactcggacgaggagagggagtccttctcggcctggggcgagtccaagaccgtcgtcgaaacccccacctcgtatgttagacctttgaaggccaagaagaacaccacccaagggaggcaaaggagaatgacaagcacgagagggcgtgagagagccatccacaccaagcgatcgcttgggcagagccattgtttttcaggcgatctaagctttggctgcaataagttcttggaatttatttgccctgagaccaagcttttagacagcaaaatgttatttgcccatcaatatgttggagatgtgatgttggttattcacctttatggtgatttccattttatttttgaaattttggtcaagcacaggttcaactcatgcaatggattcttccaattgaggaagaaacatgcaatgtggagaattgagccacaaactctataa

SEQ ID NO: 2020 - DNA, 255 bp, Zea mays
  Peptide Sequence Number=SeqID_45395
atgggtttgttaatgggttcaaatggaaacccaacggtgggtatgagaaacctgttgggtacccgaaacccgcatgggtatgggtttgggcaaaattttatacccgtcatgggtatgagttttttagcgggcgtattttttcttcgcgggtatgagtttgaagtgaacggaacggagcgtgactgtgagagcgggatggtaacggagcggctccgttcggttgatttttttggagtggattggttccggatctga

SEQ ID NO: 2021 - DNA, 882 bp, Zea mays
  Peptide Sequence Number=SeqID_45396
atggaagaaacacacctccacgtgttcgacgctttccgcccgcgccagagcacgctcacgcgcgcccccgcatgcccagcgccgcgcttgagccaaaccagcgccgtggcccgcgcccgagcctataaaaccctcccaggcttcgactacactcttccgcgcaccctcaaacctcaccggagtttagctcgtcgccgtttgcccgtgcgcagcgagtccgcggccgcccaatccccctgtcaccgtagaccggccattagagccattcccaaccccgtccagccctcggagaagactgtgcacacctccgtgaggctccccgagcgaggaatcggagtttgcttcgccggagaggccagtccacgctcgctggagctctcaaccccgccggagtacgtggaccgggtaaaccactccaccatccttcgattccttgtgcacacggttgctacgttaccccgtgaagctcaccgtgccctcggattgaaccagttcgccgtggtttggctagtatactcgccgccgacgaggacacccgcctgcgcgcgtggaccgggcgattccggccatccccgacgtcaagccgtacctcgacgtgaccgccagagcctccccgagccaaccccaccctccgccggacctccctcgccgccggataacttagaaaaactctacaaaaataaccccaagacaatacaaatccactatgttatcctaaaagaaaacctaagcctaaaagactgtaaccttgctgacggagagtacatcctcgtgccggagcaaggagttgctcaggaggtagccccagatctagcacccgagcctgcaccagaggacctgcctgccactgctttggaaggcaagccccggttttatgcataa

SEQ ID NO: 2022 - DNA, 656 bp, Zea mays
  Peptide Sequence Number=SeqID_45397
atgacttcccctttaaatccgatgacggaaatgcactgacccacactgacggacccagcacgagagggctttccccgcattttgtgggaggctggcgctccttggactccgagtctttcggataccgagcagaggacacgatcgaggcgatcgctctgcatggattgactactttctgcggattccatccattggagctggctacccaccccattggcttgttccccgctgagagggaggacgacccaatgtggaaggatcgggtggagcatgccaaggatatctgggccatctacccaggacagaccgcgcacttgaccgtacggtgcatgaatgctctgtaccgtctgcaggtgatgcgcggtgaggcgatgtcccatctgatggcactgctggaggcaacaaagattacgttggataacagagaggaactcgtggtcgatttgtctcaagaaatggtggagcagctatccactgatattcaggagttggaggagctagtgggcaccagggagaacaccatcgaggttctagatgatcagctcattaacactcagcagcagcttgctgaggctaacgagcacctggacatgcatcaccaggagagccaggaccaggaggccaacgaggacgtcgacattgaggggaggagatga

SEQ ID NO: 2023 - DNA, 564 bp, Zea mays
  Peptide Sequence Number=SeqID_45398
ctcctcctgtccctccacctcgattccgggagcgcgatgagactgaggtacaaccacttgatgcggatcctagactatttgaccttcagcgtgctacagcggcacggagctcagatgtctgctcagatagctctgcgagtgcaccggcttttggatcttccagcctttctgcttgcagccggtgctgactctgaggcgcacctcacatatctgcctggccttctgacccttttgacttccagcggcagggcccgttacaatgggccggatcgcacgtgggcctctgagctggacgaggctgcactgtgggatgccttcgtcgccggtcttcgtctggtgccgatcaagcgaagggtgtccctgcctgctttgtctctgtcagagcagcggctgagcagcggagacttcgagcgaagggtggcatttctgccttcgctccaacatttgccctctgagggaccagttcgacaaagtcacctggtgccgaagacgtcgctagatggcggagacgctgccctcgctcgaagtggttccgcgggggtttttgatgtgaccgttgattga

SEQ ID NO: 2024 - DNA, 624 bp, Zea mays
  Peptide Sequence Number=SeqID_45399
atggaagaaacacacctccacgtgttcgacgctttctgcccgcgccagagcacgctcacgcgcgcccccgcatgcccagcgccgcgcctgagccaaaccagcgccgtggcccgcgcccgagcctataaaaccctcccaggcttcgactacactcttccgcgcaccctcaaacctcaccagagtttagctcgtcgccgtttgcccatgcgcagcgagtccgcggccgcccaatccccctgtcaccgtagaccggccattagagccattcccaaccccgttcagccctcggagaagactgtgcacacctccgtgaggctccccgagcgaggaatcggagtttgcttcgccggagaggccagtccacgctcgccggagctctcaaccccgccggagtacgtggaccgggtaaaccactctaccttccttcgattccttgtgcacacggtcgctacgttaccccgtgaagctcaccgtgccctcgactgtaaccttgctgacggagagtacatcctcgtgccggagcaaggagctgctcaggaggtagccccagatccagcacccgagcctgcaccagaggacctgcctgccactgctttggaaggcaagccccggttttatgcataa

SEQ ID NO: 2025 - DNA, 153 bp, Zea mays
  Peptide Sequence Number=SeqID_45400
atggatgccaagcccatcaagacacccatgggaaataacgccatctcgacctcgacgagggagccaaggcagggtcccactcgacagtccaacccggtggcaaggtggacggccaagttattccagcaaccatttcctccagagaacctgtaa

SEQ ID NO: 2026 - DNA, 135 bp, Zea mays
  Peptide Sequence Number=SeqID_45401
atgtttgtgctccctcatgatccagtcctctgtgcggttctgattttctttacgaagctcatccaggttcctaaatccaagatcaatgttgaatggttagaaagagatatggtttccgtcggcgtggctaaggtc

SEQ ID NO: 2027 - DNA, 459 bp, Zea mays
  Peptide Sequence Number=SeqID_45402
atggccttgctagaccctcccaagtgcttccagcccaaggtggcactcaacttggtgcgcaacctgctcggatggggtgcgccagcgttcgccggaaggatccgtgtcggcacctctcccctcggcgatctcgccgccggggagttcgtgctcttcgtctccaacctcccctgcgggttggcgctgccgatctcgtccttcttcgtgctgctgctggaggagctcggcctccaacctctgcacttcatgccccgcttcatccttcaagcggtcgtctacctctacgagatgtccgtgggggcaacgcttcttccgccagcattcggacgaaagggtcttgtgcagcaaccttccgggggtgaaaagcaagctgagctgcggctctatctttcgcgtgagcttcaccagcatcccatggatttggtctgggaagccaagccgtgtgcccggaccccctga

SEQ ID NO: 2028 - DNA, 519 bp, Zea mays
  Peptide Sequence Number=SeqID_45403
atgccttcgcactccccttatgcattgcgcccttccaccttccgagcccccggatggggggcgcccgcgttgctttcgtcttgctgtcgttggaggaacgcaacttcgcggaagttggtacctttcagccatcactcggcttcaaggattttcatcaggcagcccggctgcatccccaagacggtgaccaccagtttgatggtggggagaagcaagccgggctgcaacctctgccccgccctgagcttcaaggatcttcatcatccttgctggggtggagggcgagctgagccggagctctgcctcctgcacgggtccgtgggccaccttctccttcagcattcaggggagaaggcactcactggcccagcagaaggggtggactttgacaacgcggggccgagcggccgcaagcgtcgtcagctccagcatgtctggttcgccagcttagctggctctggcacggcttccggtgccacctcccaccactgggcggagtacggctaccattcgtcatga

SEQ ID NO: 2029 - DNA, 411 bp, Zea mays
  Peptide Sequence Number=SeqID_45404
atgtcgcgccctagatcttcgcccgggcagttgagggagagattgggggagatctgggtcgaggccgaggctcagatcccgtccccaccaagttcatctcgccaagcgtgggatctgggcgctggtacatggagcaacctccaggttggactcgcccatggcgcgaaggagctcgtcgcggcggaaggccaggaaggccgcgagcgtggggagcaggtgcgaggagatggcgagcaccagcgcctgcgcggcgggggagaggaaggagtgcggcagccgcggcggcgtctggtgcgaccgccgcggcgcgggggcgggcgcggtgaggtggagcaggagcgagtcgagcgggaccaaggagcggttgccagcgcgcggagaactgcgaacgggagggggcagaagagctag

SEQ ID NO: 2030 - DNA, 1305 bp, Zea mays
  Peptide Sequence Number=SeqID_45405
atggcgcctcttgttgacgtggccggtccgcgccctaggttgggcgatgtggaggctcctccgaggtcgaggtcgagtctgtcttccgtggacgaggtcgagtccgagcccctgggtcgggcgaggcggagactgtctgctgaggccagggctgagtccgagccctggggtcgggcgaagcggagttcgtcgtcttcaggggctgagcccgagtccgagccctgggtcgggcggagcggagggctgagcccgagtccgagccctgggtcgggcggagcggagttcgtcgtcttccggggcttagcccgagtccgagccctgggtcgggcggagcggagttcgtcgtcttcaggggctgagcccgagttcgagccctgggtcgggcggagcggagttcgccgtcttccggggctgagcccgagtccgagccctgggtcgggcggagcggagtttcctatggtgtctgaggccgggcctgactgcctgtcagcctcactctgtcgagtggcgcagcagtcggagcggtgcaggcggcgctgtccttctgtcaggccggtcagtggagcggcgaacttctgggcggcttctggccgccagaaccagaagctagaaccaaacgcccagattttcgcgcggcttctgcgcgacgcgcttcggttagaagccccccgcccacggtccgctggaagcggccttcagctggcttcggttagaagccccccgcccacttcgctagggttgtatcccacgcaacgcgcctccgccaccgcgaacccaacgcgccgccgctacgcacccaacgcgccaccgccgggttcgcgcacccacgtcggcgcctcggccccgtcgcgaaggaacctctccccccgtcttcgtcttcgcaggcttcatccacggccggctgatctccagttaattcagtacatcataacggcagactccatagccgacaaggcaattggaaggatgcaagagattgcggacaagatattttccatagctcgggaaacaatccgtcctggacgcgggttgacctcatttgacgctaccaaacttcatgtagcattggaggacattgcttgcatgatggagcaagattctctggtgtttcaagagtatttggacaaggtcaacaacgttacccaccagcctgacagcaactacgaaccctcagacttgtcctcaccaccccctggtgaagacaaccttagtctagactgggactttgccgagcacttcgaaaagttttggggtattgaatatgactccgatcagatgccttcatttagtgacaatgaggtttaa

SEQ ID NO: 2031 - DNA, 1443 bp, Zea mays
  Peptide Sequence Number=SeqID_45406
atgtcttcttcctcccttatgcgtcgtgtctttccatcttccaagcccccggatgggggcccggctgctcccctccaccggcggtcacccgagatggtgacctccggcttgatggtgggggaaagcgagccgggctgcggcctctgcccctccctcagcctcaaggattttcatcaccagggctggggaggggagtgcgccgagttgagctgcagcgtgcccggtcttcagacgcgagtggcttcggagccgctcgcggcgccggcgtccgccacggcagctggaagaggttcttccgccggcgcgatagccggggccggccacagactgacctccaactctacggccttctgtccgtccttgccccacgagttttgtcgtgggcgggggcctcctggcagcagcatccgccctagggtcagtgctgccgctgttcgaccccccggagcagaagtcgtcgtcgtcgccgctgctggagcaggtgacggcgcgccgttcttcggccttccgttgctccgcaggccttccccctcggagtggggttgtaattacctgcggagggggaaccggagttccgtttgtaatggcatctcgaatgccggtgtgtttgttcattgcggctgtcggggcctgaacatgtatgaatccctcggcccgatcggccttgttgtctggggctcctctagcttagttaaagagacccctcagccgcccttcgacgagccgagcgggcccggcctgtcggcgcgcccgccttccgcgcacccgcctccctctctcactgctcgtccggccctacctgtcggcgcccgccttccccgcgcgcgcccgctccctcgctctctctctgcccgtgggcccaacccgtcagccccgcttctctcgcgcccgcacccgctttcttctctctctctgcgtcgcgggcccgggctgtcagccccgtcgtccccgcgtaaccgccgccgagctgctcgcgcccacctcccccgcgcccacgtcgcgcgtggaactcgccccacctcgccctcggccacttgtgccccgagcccactcgccctcaccctctccccccatttgcgcccagtagaccctctctccccccctcgctgcgcgcacgcagagcaccgccgccataaccccgccgtcccgagctcggttcttcgtcgccgttggagctccgccgcgcccttagccccggtgagctccgccccgacgcccgcaactcggaacgcgccccaattccctctccccctccctatttctctctgcccacgctcacccgtcgtccgccgtgcagccgccaccgtcgacccgggtccccgtcgcgtctccgtcgccgccgaggagtccccggagcccgccttgagagccccgccagtcgcccgtgcccctcgtctccggcgagccctccgccgcggggacgagcgccgccgccccagctag

SEQ ID NO: 2032 - DNA, 78 bp, Zea mays
  Peptide Sequence Number=SeqID_45407
atggctctcttttttctgctgatcaatcataatgctctttacgatgaaataccaacggatttagattggttgaactag

SEQ ID NO: 2033 - DNA, 522 bp, Zea mays
  Peptide Sequence Number=SeqID_45408
atgtccggtgcaccagaggactccaacttcaactcgtcacctttgggaaattccggaggcgactccgctataattcaccggactgtccggtgtacaccggacatgtccggtgctccaaggaagagcggcctccggaactcgccagcctcgggaattcttttcagctgctccgctataattcaccggactgtccggtgtaacagcgggccaacggctatctgcgacgcattaaatgcgcgcgctgcgcgcgcagaggaaaaatccaattggaaatgtcttggctcgagcagccaagaatctgctgagtctgggggcaccggactgtccggtggtgcaccggacagtgtccggcgccaggctggctcgagcgaaatggccgctctcgggaattcaccggcgacgtacgactataattcaccggactgtccggtgtgcaccggactgtccggtgagccaccggtcggccgggccaacggtcggccgcgcgatctgcgcgggccacgtggccgagccaacggctag

SEQ ID NO: 2034 - DNA, 279 bp, Zea mays
  Peptide Sequence Number=SeqID_45409
atggcgggcggaaatgagctcgccggagctaaaggaaagtggctggccggtgaggggacagggagttgtagcgtcaccaaggtgccagtgtcagaatgcctggtcccgaggttaagctgcgccaaaaccgtgccaaatggatttggtttgagttcaaactttcccagaatgtgttcaagttttgaaaaacagagaacaaagatgatctttgggaagaggtctgaaaattcaggaattcagaaatctgaattccctaaggattcattgatcaagggatga

SEQ ID NO: 2035 - DNA, 447 bp, Zea mays
  Peptide Sequence Number=SeqID_45410
atgcaggtggcgtgcaaccgcaccgcggtggcgcaccccttcggcttcgacgcatccagcatggaggcccaggcccacacgtcatgtaaccggcgcgccggttactacgtgcaggaaaccgcaccgccacttgcgccaatgtcgcgccttctcgactgcggaaccggtgccgcgactcgaggcaaccttgtgcatggcccaacagtgccaatcgagagacgatcacggggcaagcgacacctttggcaggcgaagcgggcgacgtttcacctccgccatgatgaccgcgtcaaaaaagggaccaggaaaggggatattttgaaagggatccttctccgcgaaggaagcgggccccgagccctcctactgatcaggggttcgaaggctggcccttcggaagggtttgacagccgccccagagcactcgggcttcaagcccattactga

SEQ ID NO: 2036 - DNA, 576 bp, Zea mays
  Peptide Sequence Number=SeqID_45411
atgatgaccaccagtttggtggtggggagaagcaagtcgggctgcggcctgtgccccaccctcaacttcaaggatcttcatcatccatgctggggaggagggcggggcgagtcggggcctgcctccgcgtgggctggcgacccgcttcttcctccggcattcgggggagaaaggcatcctcccgctctgcggaggaggcgccctccagccatgcgggggaaggcgtactgctgctgccgggccagggtgcagctgtccgtcctacactcgggcgacggccatgctgcgtgcgggcctgctacgtctaggtcctccctgcgccgtcgactgcacaacacgtcgtacgccgcgagggcgaacgggagtgaggacctgccggtgcgctttggggcggccaccgcttgctggtgcggtgttggtgggcaggtggctgctatcgttggtgctaaggttgcggtcgccataggtgaggctgcctctagcgaagcggttgcctccgccgacgagaccgtcagtgccatctgcgctccgggcctccggctctttggctttaatggctggttctcgtccccgtga

SEQ ID NO: 2037 - DNA, 390 bp, Zea mays
  Peptide Sequence Number=SeqID_45412
atggttttccttccatcttgtgggaagtgctcaactccgccggttaccctacgccccctttgtacacagtgtagctatatgaagagcatcgggacggacgacaccaccgaaacggcaactatgaagaccctgatgactttctgtgggtaccatcccctggagatggtgatgcatcccttgggactcttcctcgctgagaagagggatggccccatgtggtgcaaccgtgtgagccatgtgaaggacgtatgggccatgtatcctgacttggttgggaggatcactgttcagtgcatgagcgcactgtaccgcctacaggccctgcagagcgacgctatggcacatttggctaaccttgctcaaaccaccaagctcaccctcgacaactga

SEQ ID NO: 2038 - DNA, 1378 bp, Zea mays
  Peptide Sequence Number=SeqID_45413
aagtcaaatggaggttcgctgccaaaccagcttttgccagaatgaagatggtttccccaagttgttgagagcatgcacagtccacctcggaatcaggagccagccagagtatgatggtcatgaattcgtcgagcatggcacagagaagtgtgtcgtgactgtatacattggatccagtctgcaccatgtggaatggagtgtcactgctgctggacacaaattcagagacacctatcaagtcgtcgcctgcaaggcattgaggaccctgtgtcagatctatgaagaagtggccgacaccccgctcagattctttccgccctttcagagagaccatccagtttggatggccaggatgcatgcattggaagggaagcagctgcttgaggacgaccccatagtcgtgtacctcactgcatacctgctcaccctggatgcccagtatgatttcttggctcggcaccactgtcagatgattgctcgagcagaagatgcagagaagcacaaccgtcagctccatgtggatctcaccaaagctcaagcccgtgcaactgcattggaaagtcgtgaagtcattgcggttgaagccttgaagcaagccaaggatgagcacgtccagaagctgatagaggccttcttggtaacccataaccaacgtagagccctgcggatccaagagcccgctccatccaacccagtccaacccatgagagatgaagatccccagattcttgaaggtcacccggtctctatcgaaggagagaagaaggcttgggaactcccggaaggagccatagtcttggaaggaattccagtcttccctcaggctatggataagcaagagcaccctgaatcctcccaagatccctcgccagatttgtttgagcccctaaccatgaagaagattccagcaccatcccttgaagtcaaagaagaagctgcaagcaccccgccagcaccgccgccctctgaggagctacaagagccaatcccgcttgagaagagttcgaccccgtgttgccatctcagtcgccgccagaagaaccctgcatgtatgagaggaagcttcgcctcgcccgaccttaggcctcggcctcggaaggaggtctccgccttagggctcggcctcaacctcggcctaggaaggaggtctctgcctcgcccgaccccagggctcagcctcaacctcggcctcgggaggaggtctccgcctcgcccgaccccagggctcggtctcaaccttggcctcggaaggaggtctctgcctcgcccgaccccagggctcggcctcaacctcggcctcaggagaagtctccgcctcgcccgaccttgggctcggaccgaccgcgccacgagggatacatcattaccctacccctag

SEQ ID NO: 2039 - DNA, 1035 bp, Zea mays
  Peptide Sequence Number=SeqID_45414
atgatgaccactagtttagtggtggggagaagcaagccgggctgtggcctctgccccgcccttagcttcaaggatcttcatcatccgtgttggggaggagggcggggcgagtcggggcctgcctccgcgtgggccggcgacccacttcttcctccggcattcgggggagaaaggcatcctccagctctgcggaggaggcgccctccagccatgcgggggaaggcgaactgctgttgccgggctaggttgcagctgtccgtcctacactcgggcgacagccgtgccacgcgtgggccggctatgtccaggtcctccctgcgccgtcggctgcacaacacgtcgtacgtcgcgagggcggtggctgctatcgtcggtgctaaggtggcggtcgccataggtgaggctgcctctagcgaaacggttgcctccgtcgacgagaccgtcagtgccacctgcgctccgggcctccggctctttggctttaatggctggttctcgtccccgccctctggtgtggaggttgttcatacccgcgggagtggaaccggagtcccgcttgtaatgaaccttcggtcgctctgcgatgagctggagccagaggcagcgcagcggcggctggagcttggccaggtcatccgcgagcgggaccaacctcggagtcatgcggccgaggccgtgagccgggctgaggtccccgggggacagctggttgaggctacggagtggccaaccgaggtgtctgcttgggccggggccctggcggagacccgggctgtgagggcccaagcgcggtgctggcgtcctccttcgaggtggagatccttccgcccgtgtcgccgtccgaggccgggccagattccgccgaaggtggaaacgacgccgagggtgctgctgctccctctgccgatgtctgaacctgcaggaacagtttgtctgtacagaattgcttatccgagcgagagttacttttcgcggaaggtgatgagtgaggattctgttatcgatatagtcgtgaaggcacgaaagtcgttctag

SEQ ID NO: 2040 - DNA, 429 bp, Zea mays
  Peptide Sequence Number=SeqID_45415
atgggcaagagcaagaaaggtggcagctcttcgcatcactcgggtgacaagcgcaaatgcgagccgactcctccctcggaggacttcggcgactcggaatactcggaggaggagttctcctccaagtccgagggctctcaggctcctgcctctcccccgacgtcgtctgatgactcagacgactcccaggggatcgccgcggaggtatggacctacatccgggtcgtcgagcgttccgggctcgagggctcggatgagtcggagtactcctcggacgaggaggattcctccgactcgtccgaggagggcagcggcgacgacggcggtgacggcgacgacgacggaggcgacggtgatggtggcagcggcagcggcaagggcggtgacggcgacagcggcagcaagggcagcaacaaggccagtggctag

SEQ ID NO: 2041 - DNA, 918 bp, Zea mays
  Peptide Sequence Number=SeqID_45416
atggtggggagaagcgagtcgggctgcgatcttggccccgccctcagcttcaaggatcttcatcatcctggctggggcggaggccgggctgagccggagctctacctcccgcgcgggttcgtgggtcaccttctccctcagcattcaagggagagggcgctcaccggcctagcgggagggccggacttcgacaacgcggggctggtcggcggcgagcgtcgtcagcttcagcgcgttgggctcgctggctcagctggctctggctcggctcccggtgccccctcccgccgcgagagcggttgtcgcgccgcgcgcaccggaggaccgcccaagacgtcgcgcactgctagggcggcgttcgtgttctggggctgtcctgcctttgccccggtatggcgcctctgcgcggaggtcggtgcttcgctcgtccgggaggatccgagtggggatctgccggtggacagatggcttccgtcgtcggcgctgaggtggtggcggctgaagaagtcctcatcgccgacgggatcaccgccaccatccgcgctccgggcctccggctctttggctttgatagcttgtcctcgcccctcgagtggagacgtgggcgagggcattgttgcagcggcgtccgccctgaggccatcgccgctgcagtttggccacctggagcagaggtcgttgtcgctgctgccggagcgggcggcgccgaagccggaggcagcggtgttagcatggacagaggcagagttggctcaaaaagaagacttcgtcggccagagcctggccgggccgtccactggcgggaccgacgccggagtcgagttgtcgaagccacgagccgggctggtgtcctcggaggacagttggctgaggcttcggggcgggcggccgagccgtctgctcgggccggattcctga

SEQ ID NO: 2042 - DNA, 108 bp, Zea mays
  Peptide Sequence Number=SeqID_45417
atgtcacaggaggcgccatcattaccctaccccaagctgactcaggctacggggaacaagaccggcatcccatctggctcgctccgggttagtctcaacatccagtga

SEQ ID NO: 2043 - DNA, 1146 bp, Zea mays
  Peptide Sequence Number=SeqID_45418
atgtccgtcgcgtccgtggccgccctccggacggccggctccggccgccgccgcggcgcgggttcccagcagaccggccttaacggtgagcgccttcgtctctgccagaggagggagctggtgaccaaggccgggatcgcgctcgccgtctcctgctcgatggctacctcacccgcttcagccaacggcgctgctcaagggctggagattttgccgttcaaagctgacgggtacaacttctggacgtggcggggtcgccggatacactacgtcgagcaaggcgcggggcggcccgtcgtgctcatccacggcttcggcgcttccgccttccactggaggtacaacatccctgagctggccaagaagtacaaggtgtacgccatagacctgctggggttcggctggagcgagaaggcgctggtggactacgaggccaccatctggatggagcaggtctccgacttcctccgggagatcgtcaaggaaccagccgtccttgtaggcaacagcttgggaggcttcacgacgctgttcacggccaccgaggtgccggagctggtccggggcgtcgtgctcctcaactccgccggccagttcgccgaccccaacaagccggccgccgcgccggccgaggaggaggaggggggcagcgcgctgtccaggtacatcgtgcagccgctcaaggaggccttccagcgggtggtgctggggctcctcttctggcagtccaagcagcccgccagggtcgagaaagtcttgaaaagcgtgtacatagatcccagcaacgtcgacgactacctggtcggctccatcacggcgccggcggcggaccccaacgccggcgaggtgtactacaggctgatgtcgcggttcatgtcgaaccagagccggtacacgctggaccggctgctggggaagatgtcgtgcccgctgctgctgctgtggggcgacctggacccgtgggtcggcccggccaaggccgcgcggatccaggagttctacgccgacaccgccgtcgtgcacctgcaggccggccactgcccgcacgacgaggcgccggagcaggccaaccgcgcgctgctcgagtggctcgcggccctcgacgcccgcgctaagtcggccgagcccagcctacagaccgtctga

SEQ ID NO: 2044 - DNA, 447 bp, Zea mays
  Peptide Sequence Number=SeqID_45419
atggaggttccactggccgtggaggcggctagggctggtcgttgttctacaacccctagaccggaaccatctccatgtggccaggttaggcccgagtgcctcccgtcctccggcgccgactctcttgagtgcccccgacttctcaggctccgcctcagctcccgcccgctagaggctaggatgccgcctcccttgccaccgcctacaacatcatggcgttggctccaccctcccctgactaggtcatcgactccggcgcctctccctgccagctactgggcagaggccctgcgcatcgccacccacctcctcaaccgccttccatcgaaggcggccaagcgcggaccgtccgggcccttgcggcggaccgtccgcggcacaaggatgacccttggacagaaccaatgcaaaaatccgagtgtgcactatggaccgtccggaggataa

SEQ ID NO: 2045 - DNA, 1002 bp, Zea mays
  Peptide Sequence Number=SeqID_45420
atgaggataaatgtgggcgcgacgtctccacgctcttctttcccttcttcctgccacgcttgctctcgccgtcctccttgccggcagacttgcccgcggggacgcgcttctccgccttgggcttcttcccggcggtcgtcttctccgccgcgggcttctcctcagaagaaccatcaatttgtcttagctgacaataacatgacacccaagcttactacacaagattactcacgtctaagctcttcagtaatagctcacgagctgcaactaaaaaatggagaaaccagatgggtggttgataccattgttggtaaagaggatggacttggttgtgagaatctccatggcagtggggcgattgccagcgcatattctaaggcatacaaagagacctttactctgacatttgtgactggaagagctgttggcattggggcttatctggctcgtttaggcatgaggtgtatacaacgtcttgatcaaccaattattttgactgggttttcggcactaaacaagctcctggggcgggaggtgtacagttctcatatgcaattgggtggccccaaaatcatggctacaaatggcgttgtccaccaaactgtgtcagatgaccttgaaggtgtttctgctatcctgaaatggctcagttatgttcctccatatgttggtggtcctcttcccattatgaaacccctagacccacccgaaagaccagtaacatacctccctgagaatgcttgtgatgctcttgcagccatctgtggcattcaggatggtgaagggaggtggttgggtggtatgtttgatagggaaagctttgtggaaacattggaaggttgggcaaaaacagttatcaccggaagagcaaagcttggtggaataccagttggtgtcatagctgtagaaacccagactgtgatgcaagtcatcccagctgatccaggtcagcttgattccgctgagcgcgtagtccctcaagcaggtcaggttagccaatga

SEQ ID NO: 2046 - DNA, 159 bp, Zea mays
  Peptide Sequence Number=SeqID_45421
atggagattctcacaaccaagtccatcctctttaccaacaatgctcgtgagctattactgaagagcttagacgtgagtaatcttgtgtacaatggagatcgtggcgcgcgggggtgggaagccctggcgatgaccccgcgcggggatgggcctcgctag

SEQ ID NO: 2047 - DNA, 495 bp, Zea mays
  Peptide Sequence Number=SeqID_45422
atggagaacttgagtacaatgaccccgaccatcgtgattgggaaaatcgcggcctttgagatgtcgcgaaaaatgtgtcggggagaggagccaactttctcaaggccatatgcttttgcatgtgatggaaggaaggcccccgatggtgcggcccctcagccccccctcgcgcgcggccgcctcagctccccggcccctggcggcgcggcccctcagccccccctcgcgcgtggaccctcagcccccggcgcggctcccccagcccccgacggcacggcccaccccggcccccctgcgcgcgacccctcggccccccgcgcacgacccctcggccctctgcgcgcggccgcctcggcccccggcgcggcctgcgtggcctcgcgcgccccggcacgtggtgatgaagatgatggttttggttatgactatggtaatggagaagatgaagtcgtgaaggaggacttccaggagttccaagagtatgatgagttctag

SEQ ID NO: 2048 - DNA, 255 bp, Zea mays
  Peptide Sequence Number=SeqID_45423
atgggcgggggcctcctggcagcagcacccgccctgaggtcagtgctgccgctgttcggccccccggagcagaagtcgtcgtcgtcgctgctgctggagcagtatctggacttttttgtcggtaacagggatgtttgtgcgagcgagagttgcttctcgcggaaggtgatgagtgaggtatccgtatcccggaggcgtgggagtcccttggctctgtcggccttgccgcttacgcgtactttcacccgtccatga

SEQ ID NO: 2049 - DNA, 588 bp, Zea mays
  Peptide Sequence Number=SeqID_45424
atgatggtccttgactcaattgtcgccacctcattcaccatcctgcttcttttttctcttccctcatgcctccgcctccgcgccaccctattctcggcagagggcgtgggagcatgtgcctcctccccgtattcgtccgacaccagtcccgacaccgacccgcgcagtggctattgtacgtccacgaggatgtttcacagcatgcgcacaccatcgttttcgtcgtcgtcggacgtctcgttcgccttcccggccttcgccctgttcttcctccctaacctgctgcgtccgcccacggtcgtagccacaagccgaccgacgctcgtcgacgtgggtacgaggcgagtcggtcttgctcttagcctttctccatgtgtgccaccgaggaggacacggtggcacctgccacgctttagttatcttggcgatgaggagtccaggaggcttcgacttcgggatgaaagcatgtgtgatatgaaacagcatgaacgggcgccgaagctgtggccgaaaaagcatcggcttagcacaacgacgaaggtggaagatggaaccgacctaaaggataaaggactacttaacccttga

SEQ ID NO: 2050 - DNA, 1275 bp, Zea mays
  Peptide Sequence Number=SeqID_45425
atggcgcttcctgctgacgtggctggcctgcgccctaggttgagcgtcgtggaggctcctccgaagccggggtcgagtctgtcttccgtggccgaggccgagtccgagctcctgggtcgggcgaggcggaggtcgttcggcagaggccagggcggagtccgagccctggggtcggtcggagtggcgcaggcggcgctgtccttctgtcagaccggtcagtggagcggcgaagtgacggcggtcacttcggctctgccggggggcgcgcgtcaggataaagggttgcttcttagcgaaggcaaggcctcgggcgagctggagatgtgtccgccgttggaggggggcctcgggcgagacggaaatccctcggggcctctgcagctttacgctgatgggggttaccagctgagaattaggcgtcttgaggaggagcgcaaccccgtggtggttggcgctcttccgctatcgctcggcttcaaggattttcatcatgcagcccggctgcaatctcctgctagtggtcatctagagggcattcgggggagaagggcgttcaccagccttgcggaggaggcgaacttcgggtacgtggaaccggccgactgcaggcccgccggccgccacgtccgccgcatccacggcttctcccgcgccggcggccgcaccggggggccgtacaagacatcgtacgccgcgttcttggatggtcttgtcctcactcctgcaccgccgcccaccggtgcagaggtggccgctgtcgtcggtgctgaggtggtcgccaccgctgaggtggccgccgccgtcggtgctgaggtggtcgcctccgctggcgagccgctcggagctagctatcccgtggccctactggtgtggaggcttgatttgttgaggttggataccagcgtatctgaaaaggttgtcaataattctcgggaggcagcctcgccgagggcggtggagcgtgcaggcccacggtacgggaccaggctgagcggctacacgagctccggaccaccccaggagactaatgctttcgggtacggaaccaggctaagcggccacataggctccggaccaccccatggaacggggtcatgttctctggagccagctcgcaggctgtcggacctcccaactttcgtatcgggggccctaaactgcaagcctagctgctcaattcggatgtcgtcataccaacaggctgggtttatggggacggaccccaccaggttggcgtacaccatcgggctgagggactccttcagtcgtagctag

SEQ ID NO: 2051 - DNA, 708 bp, Zea mays
  Peptide Sequence Number=SeqID_45426
atggcgcgggaggagtcgacggggccgcgcgtggagcaggtagtgtcgacggggttgcacgtggtgctggtatggtcgacgagaccgcgtgtggcgcaggcagggtcaatggggccgcacgtgggatgggaagaggcgcgagcagaggcatcgaggctgcacgtggtgcaggcaacgacgcaaggtgggcgcctcgggtggaggggtaatcggattagactcgagaagggagtcaagatcggtaggtggggaggagccagcaaggggaaacacatcttcatcgaagacgacgtgacaagagatgatgatgcggtgatagcaggcacaactgaacacgcgaaggtggtcgtaggaggggttgtgccatacagggcgaagtggggagtagggtggctcaccgccttcgagggaagacggttgaggaggtcctgggtggccaagacgacgatgccaagtgatggaggaggtggtggagaccaaggcgggaggtggagacgtgccggtggtggaaggccggaacgtgtagaggggctcagtgctgtcacggctcgcgagagggttcctggtggccagatccttcacagaaaaaccagaggggtcaaactcaatggaacaagaattgtcggtggtgaaccaacgaacataaaggagattataggtgatgtgtggggctatgagaacgtcgttgagatagaacgacccaggtga

SEQ ID NO: 2052 - DNA, 381 bp, Zea mays
  Peptide Sequence Number=SeqID_45427
atgtgcagccccgtcgaccacgcctacgccacgcgcgatctcgtcgacacctcccaggcaatgcgcggcccgccgacgagcttggctcgcttcgctgaccccgctctcgtctaccaccgccgcgggcgtgccactccctcaaaacccactgactcgggcccgtcgacgggcgcggctcactttgccgaacccgtcgtctatcactgccacaagccggccacacccgcggacctcgatgtcccggcggcccgctctaaaacgcctgtgtaccacccagtcgccatccaccgcgaccacaggcacatccaactgcaaataatcgaccaaaggatgaaggttcttcaatacccgatgccaggatgccgatggtctggtttctga

SEQ ID NO: 2053 - DNA, 738 bp, Zea mays
  Peptide Sequence Number=SeqID_45428
atggaacacacagaactacgacgctcgaacgggcagctcacctacgaacgttgcacacgaaaaaagcaacacaggttccagactaccgcatccgcagcagaagagccctacaaaggacacacacaaaaaagacggcggatcggtaggcgctgccgagcaggcgaacaatcggtgagcagatcggagcagagaaactatacgttggctagccctatacactggagcccctcgcagcagcaggacgacggcgctatgagcctcaggcacgacgaccgagcactgagctcggactcggacacgaacacgaacacggacaccgcgtggaacagaagatcgggctcggacacggacacggacacggacacggacactgtgaacgatgcaatcccgtttgccttgatgttggaataccaaaacgtcgttgggggacggctgaagctgaagggtaaagcgctggacgtgaaggatggtggtgtaatgaaaaagaagaagaagtaccagcgtgaggaatcgtctcagactgaatctgataagaatggagacgaaaggaacccacattctaactatgactatctcacaccagcagagcgccgctacatggaacagaagcagaagatcgacatgaagaagatggccaaagtcgcaaacaagtcgtacaaggaccacatgcaggacttcaaccagtacctggctaacctcagcgagcactatgacatccccaaagttggtcctggctaa

SEQ ID NO: 2054 - DNA, 537 bp, Zea mays
  Peptide Sequence Number=SeqID_45429
atgccgactgctacacctattcccacggctgactggcccgtgaccttcgtacttaatgtcactgttgggccatgcgcgagatgcctcgagtcgctgcactggttctggaaacttatcttttcagtcttccgtgtcggccctgagaagacgtggcattggcgcgagtggcggtgcgatttttccgcacccggtaaccggcgcgccggctgcatgacatgtgggcctgggcccccatgccggaccaccagttgtagcgaagttgagggggcgcacaactacggggcggttcggttcgccttcctgaccgctggttgctccgaaaatgaaggggcgcataaccgtggggcagttgtatgctccttgtgcggtggttcgccttcttcgttctttgggtcagtcagtatgacatgtggtgcctggcccccgtgtcatagggtgggaaccctggtgcacgtcgggggagaccatgcccgtgacgcttcggggcgcgagtggggagatctgcctttaaaaagggatcgatctcctagccagtag

SEQ ID NO: 2055 - DNA, 579 bp, Zea mays
  Peptide Sequence Number=SeqID_45430
atggcgccgaggtatcaacttcattggaatctggatgctgcgctggcgcttacgtggcgtgacctcggcatcatagatcatggcaccgaggaagaagagccccttgccagtttggtaaaggagatcatgggagaggcgctctgcttgtgtgagatggtcatagtcagaatgtgggttcctttcgtctccattcttatcagattcggtctgagacgactcctcacgctgctctttacccttcagctgcagccgtcctccaacgacgttttggtattccaacatcttgatgtaacaaagaaatctagtaaaattgtagaaagactcctagagactgttgttgagcacgagagatggaaccgcgaaatttgtaaagagactgccgaaccgaacgggattgcaggagaaatatatattaccaaggcaaacgggattacatcgttcagagtgttcgtgtccgagtccgagctcctgttccacgcggtgtccgtgttcgtgtccgagtccgagctcctgttccacgcggtgttcgtgttcgtgtccgagtccgagctcctattccaagcgggttttggccgttga

SEQ ID NO: 2056 - DNA, 225 bp, Zea mays
  Peptide Sequence Number=SeqID_45431
atgtctattgtgagggttggcgaagacaacagcgttcctgcgcctgaggagaacgaagttgtgatttttccgaagcttcttcaaagctgggcttcggttcccactgagcagaatgacttgatagcgagggaggacatcaaggaggttattatgcgccccatatggtcccgcttcggcctccgaaagccgaaggttgaaattgatgaagccgccgaagcatgctag

SEQ ID NO: 2057 - DNA, 300 bp, Zea mays
  Peptide Sequence Number=SeqID_45432
atgtcagaattctggaaacatctcgtagaattacatggagtaaagtcattaacatgtgaaaagttcagtggagtcatcattctgaagatgaggccacttgagaaagagaagatgaactcagagcagaattcccccagttattctcgaaagttctttaatctcgaggacgagattcttttaagaggggtaccttcggacttagatccttcggacttgggtcaaaaccacagtgtgaagaagcacaagggatacgaaggatggagcagagccgaagctatgcgcaggggagcttcgacatga

SEQ ID NO: 2058 - DNA, 447 bp, Zea mays
  Peptide Sequence Number=SeqID_45433
atggcgaaccgccctctcgcccgccctaccgcccgcacgccgcaatcccgcccgcccgatgcatgctcgcacaaccgcaacgagttcgtcatgatccgccatgacggcgatgcgccgggcccggctaagcccacaaagagtgcgaatgggcaggtctgccaaatttgtggtgactctataggtgtttctgccactggcgatgtctttgttgcctgcaatgagtgtgccttccctgtctgccgcccatgctatgagtatgagcgcgaggggaaccaatgctgcccccagtgcaagaatagatacaagagacaaaaatgttggtttcctggcaacttctttgagtgggactataaggacaaggatggtgtcaagggcctatgtatcgtgggcgccatcaacaactatacctcccagctccccacctatgggagatcttatcccccataa

SEQ ID NO: 2059 - DNA, 345 bp, Zea mays
  Peptide Sequence Number=SeqID_45434
atggacatcacaagaaagatggacattgcaaaagtgatactcggaaagaagaagaaaagaagagaggtgcaaagggcttggctatgtacagccaaggcagctcagtctggcacaccggactgtccggtggtgcaccggacagtgtccggtggtgcaccggacagtgtccggtgcgccaggctgaactttagcgaactggccgctctcgggaattcaccggcgacgtacggctataattcaccggactgtccggtgtgcaccggactgtccggtaagccaatggtcggccgggccaacggtcggccgcgcaatctgcgcgggacacgtggccgagccaacggctag

SEQ ID NO: 2060 - DNA, 60 bp, Zea mays
  Peptide Sequence Number=SeqID_45435
atggcatatagcttgctagagcctaatacagcccgcgccgctatggcctactatgattga

SEQ ID NO: 2061 - DNA, 726 bp, Zea mays
  Peptide Sequence Number=SeqID_45436
atggaccgaaggtccatgacacctggtatcagctccaggttatcctcaccaccaccagccgcccatccctcaccaccaccagccgccgcgccatctgccgccgcaacgccctcccacccgccctctccaactccagatgcattcactcggctcgaagagaagtgggatcaattcgttgtgatgttccaccgctacaaggagaagacagagaaggaactccaagcagcggtgcggcttcaggcggcagcgcgagggttcctggcacgccgccaggtacaatcccttcgtagggagaagcaccttgctgtggcctccagggccaccccatggccgtcatcacatgagcaggccgtggtgcgcctgcaagccgcagtacgcggcttccttgttaggcgggcggtgcggaagctacacttgttgatcagctcatcgctgcaccaactcgcaacctgcgcgcccaaccaccaggtctcgtctatactttttgaaccccctgcagaagtcgagatctgggtatgcagcccccctgcacggccaaagagggtcgtctccttcattcgggcaactgccttggtgctggacagacccatcataagaacgagctggttcctccttcacctttcatccaacctcgaggacgagctggtcctcaagggagggggagatgtcatgggcatcatagggagcgagaggcaacagccaggctgggataaggctagagaataa

SEQ ID NO: 2062 - DNA, 465 bp, Zea mays
  Peptide Sequence Number=SeqID_45437
atggctgcctcttcggctctcaggagtgcggatatcgatgagaaagcgatcagaaaggagaacccagaggaactggtggtcgccttggctcatgcgaaagcagacgctattctggagaagatgcagaacaatgggatgatgaaagagattcttgattctcaagatactactctgatgataactgctgatcagcaccttgctcctaaccttgagagctcttcctttgaggattggtgggaaggagttgtcgcagttcctgctgatccagcatacaaggggctgcacaagggcttgaattctttgatcatacttggtgcttgggccatctggaatcaccacaaccgttgtgtatttaatggtgtgcagtctagttccagcatggtcatcaattgggtcaaggaggagtctcacatctggtgtagggttggagccagtgatttatctagcatccttatgctccagtga

SEQ ID NO: 2063 - DNA, 123 bp, Zea mays
  Peptide Sequence Number=SeqID_45438
atggtccaagaactggattatggatacatgatggacatcacaagaaagatggacattgcaaaagtgatactcgggatgttggagctaagaaatgtcaatctagatcaagtcaagccaacttga

SEQ ID NO: 2064 - DNA, 876 bp, Zea mays
  Peptide Sequence Number=SeqID_45439
atgtggctgttgtgcctggttagcaggaaaaaccaggcaaggaaggtggtctgcatcccagcacctgcagcatcagcaggaggaaggaccactggggaggttgttccttctgatctctgggcttggaggaagtatggacagaagcctatcaaaggatcaccgtatccaagagggtactacagatgcagcagctctaaaggatgcccggcgcggaagcaggtggagcgcagccggacagacccaagcctgctcgtcatcacctacaactcggagcacaaccacccttggccgacgcagcgcaacgcgctcgccggctcaacacgttcccaccacgccaagagcagcaagaacaagtactcctcgcacagcctgccgcagacgccaaacctcaaagcggaacctgagcatcaccaggcctcgggggcagtccccagcgccaccgccgcaaccgcagcaacagccacaagcaccacaacgaccacgagcaccaccagcaacagcacccctcctcctcctccgacgatggctgtgaaagaggaggcaataatggtggggtcggaaatggagaaagtgatagaccaccatgacgcttctggctggctggatcacggtgatctcatgcagcagatgttcagccagagctactacaggccgatgataccggaggcggccggcggtggcctccatgccgatgacttcttcgctgacctcgccgagctggagtcggatcccatgagcctcatcttccctgcaggtggtgaacctggaaaggagaacaagagcttggatgccgatccattattcaacatgctagactggggtgccactaatgttgcagctacttcttcatttgagcaagacgagagtggctggtga

SEQ ID NO: 2065 - DNA, 111 bp, Zea mays
  Peptide Sequence Number=SeqID_45440
atgaagctgtggaaggagacttccaggagttccaagactacgacgagttctaggtgtgggactatatggacgtctcagacgtatgatgtaatcgactatttcccttattaa

SEQ ID NO: 2066 - DNA, 693 bp, Zea mays
  Peptide Sequence Number=SeqID_45441
atgacgctcggactcacgtcgcaagcacgcttcaccaacagtcttgaagagaggccgttccagcaggagtctttgctaatgacatttttgagccgaccgttcggtgtggtgaaaccccacgcgagaacggctgacccgggacttcacgctgaactcttcaccttcgcgaaaatccagaggcgctccgctataattcaccggactgtccggtgtacaccggacagtgtccggtgccacaaggaagagtggctctggaactcgccagtctcgggaatttgctccgctataattcaccggacatgtccggtgtacaccggactgtccggtgaaccagcagagcaacggctacttcgcgccaacggtcacctgcaggtgcatttaatgcgcgccagaagcgcgcagaagtcaggcacgcgcgagacggtgcaccggacaatctacagtacttgtccggtgtacaccggacagccaggcgggcccagaagtcagaagctccaacggtcggaacccaacggcctggtgacgtggctggcgcaccggacatgtccggtgtgcaccggactgtccggtgcaccatacgacagtcagctccaccaaacggctagtttggtggttggggctataaatacccccaaccaccccacattcaagtcatccaagttttcccacttcaactacttacaagagctctag

SEQ ID NO: 2067 - DNA, 1382 bp, Zea mays
  Peptide Sequence Number=SeqID_45442
atgttcagccagagctactacagccgatgataccggaggcggccggcggtggcctccatgccgatgactttttcgctgacctcgccgagctggagtcggatcccatgagcctcatcttccctgcaggtggtgaacctggaaaggagaacaagagcttggatgccgatccattattcaacatgctagactggggtgccactaatgttgcagctacttcttcatttgagcaagacgagagtggctgcccaccgtgcggcctaccttcacccaaccctcatcttcatgcgcggcacaaccgtccccaatcccacgaccccatctcttcgccatcccgtgaacccatccccgcgctccctccgctgctccagcagcccagcaggaaagggagaacatggtggggaagaagaggggtattatctcccccgctggaccatctcgctgggctgctggaggtgcgcgtggtgaggggagtggacctcgccatccgcgacctccgatccagcgacccctacgtcgtccttcgcatcggcaaggcgcaggtccgcttctcctcccctcccttttggttcgctttgctgctggtaggttttatcggcaagagatccggcgaattaaaatcggtcgcgccactgcgccaaccccgcgccactgcgccaaatcgccgccccggatcgaggagggggaggagccggtggaggctcctgtggtggctgcgggggcgagagcgggagcgccatgaggggcggtggccgtggcggcggcgagagctcaggcagccttcctacgcgacgtcagacggggcggatgcggcggcgatcccggtcgcctcaaggaagatggtgcagagcctcaaggggatcctggccaaccgctcggagggcgagatctacgccacgctctgcgactgcggaatggaccccgacatagccgtcgagaggctcatctcccagggttcaaaagcatctgttactcgggcattgcaaagagctgagaggtatcggactgaactgctcaaggagagggacttcctgcgcgcgatgatgttggtcgccgagcgtgcgttccagtcaccggacgcgctcctggtcctggagaaggtgctcgccaagttcctcgtcatgtaccctaactacgcatccgccttagacgtgggccgcctccacgacgatcagtacccgcacctggacaaggtatgcctccactgcgacgcgagagccccctccccccatccccgcaatgctcgtcgtgacagtccaccaccccgtgcagacatcgtggagcgtgtcgcccagcagaccgtgcacaccatggctccacccaatccccctgttccccacggcttcaacgccgcgacctccgccgccacatcatcattcccctag

SEQ ID NO: 2068 - DNA, 267 bp, Zea mays
  Peptide Sequence Number=SeqID_45443
atggcatacatatctcttattcactgcattcatttagattgcaacctcgctgttggagagtatgtgttcatcctcgagcaaggagctacccaagaggaagcccaggagctagctcaagagcctaccaatgaggatctccccgcagcccgagcttttgaaggtatgctacaggatgtggttgacggtgtgacttggccttccaccctgccaccgggttggaaggttgagtgggatgctgcctcgacaggagaggaccaggaggagtag

SEQ ID NO: 2069 - DNA, 210 bp, Zea mays
  Peptide Sequence Number=SeqID_45444
atggcgagagtggcatgtaccctcctggcaaaggactgcctaaaaggggtggtgtgctctcgggtggcgcggacctgttcatgcaatggaggatccgtgggaatggtagacataagcaagagttacgagaaacatatgtcgtgtggtactagaattgtgctgctatggatggtgttaaacgccggtgggcaggaccttcttataggttaa

SEQ ID NO: 2070 - DNA, 1008 bp, Zea mays
  Peptide Sequence Number=SeqID_45445
atggagttcgtcagccgtgtggctcggccccttccccacgctctcgccccagtcgagatcccacccctgcgtgcacgcagagctcggcgttctctgttttccccatggcgcaccctgctctgttgctgcccgccggacactcgtgcttgccactggctcgcgttaacgctcgcgcgcctgctcgttgtcactgtgtcgcactcgctcttggtccatcgggcttcacgcgtgctcgcgtttgtcgtcgagctgttgaacccgtcctcccttgctcgtgacttcgtcgtcgccagagccctcattggattcgtgtccttgccagctcgctctagatacaatctcgtcgtcattccatacgtcatcaagaaatcccaagaatcgggtgaagacgaagctagcagcgtgatattcaccaagtgcttgacaccagctcgaacaagtcgtcgagcgtcatcctcgtctacgccaagcccccaagctgtgaagacactctattgttggccacgcgtcaccagctcgacaaaaaagaatcccacgggtgcatgtgggcccaataacttgggaggttctgccacagaaggtctggccattcctaacatgaattttccagtgttcgatggaactaatcccaaattgtggaagcatagatgtgagacttattttgagttctatgcagtacctatcgaggaagacgtgctgctgcacatgggtcgcagagaagtcagaagaccggagttcagcagtttggctagaacaccagtcaaagcagtcccaatgcctctaccgttgccaccggttattgcaactcggactagtggtaccaccgaagaccggagaagcagtggatggtaccagaggataggagaagatatcaagctatcagctctaagagattacagaagatcaaaaggattcggggagttctgccagtttcctgggaagtcatctcatgggagccatgccgggagtgcagctacttaccaagctagtgagggtaaaagtggctga

SEQ ID NO: 2071 - DNA, 657 bp, Zea mays
  Peptide Sequence Number=SeqID_45446
atggaagaaacacacctccacgtgttcgacgcttcctgcccgcgccagagcacgctcgcgcgcgcccccgcatgcccagcaccgcgcccgagccaagccagcgccatggcccacgcccctgcctataaagccctcccaggcttcgactgcactcttccgcgcaccctcaaacctcaccggagtttagctcaccgccgtttgcccgtgtgcagcatgtccgcggccgcccaatccctctgccaccgtagaccggccaataaagccattcccaaccccgtccagccctcggagaagactgtgcacacctccgtgaagctccccgagcgaggaatcggagtttgcttcgccggagaggccagtccacactcgccggagctctcaaccccgccggagtacgtggaccggagcctccccgagccaaccccacccttcgccggacctccctcgccgccgattgccctcctcacgcgacctgagacgtggtctcccattccggttatggtgggtacaagtgcggtcactgcacgacggccagtcggggtcagtgaggcattgtacgccaaggcggtttaccttgcaaggtttaaaaactcgattcgaatcgtctgcttctcgcagctaatgagactgcttgatccatgctgctacattgagtaa

SEQ ID NO: 2072 - DNA, 339 bp, Zea mays
  Peptide Sequence Number=SeqID_45447
atggggaagcctgtcccatcactcctcatgctcctcctctaccgagccatcaacaacttttgcgaagtcaccacatttccacttgttactcaatgtagcaacatggatcaagcagtctcattagctgcgagaagcagacgattcgaatcgagtttttatccttgcaagatcagggctcaccgccttggcgtacaatgcctcactgaccccgactgccgtcttgcggtgaccgcacttgtacccaccataaccggaatgggagaccacgtctcaggtcgcgtgaggagtaaagtctgcgggcaggttcactcaggatttagaaatcattatgctaagtga

SEQ ID NO: 2073 - DNA, 78 bp, Zea mays
  Peptide Sequence Number=SeqID_45448
atggaccggtacctgagggtggagcggccgcggaacaagtcaaccatcgaggagaacgagttacatataccttggtag

SEQ ID NO: 2074 - DNA, 108 bp, Zea mays
  Peptide Sequence Number=SeqID_45449
atggcgagagtggcacgtaccctcctggcaaaggaccgcctaaaaggggtgcatacccttgagagtcttttctttagtcgggttatgagtcactttgattatgattga

SEQ ID NO: 2075 - DNA, 1365 bp, Zea mays
  Peptide Sequence Number=SeqID_45450
atgtcagccacgtcgtcgttcacagcgggggagtcgtctcgagctggcgagcaaccggagcgcgacgaggtggtcgagttcctggactgcccttgggtagcactctcctccgccatcgtcgtcatcggcgccaacgacgagcgggcacggatgctcgcgcccggtgcctccgacatctttctcgacctccagcccccgctggtcggcgcctcctatctggtcctgcccgagcgcatcgtcgcgcactacaggtattcaggctaccaaccctgcgtcttgtccgcctgctccaactgcctcctcttcctggctatccaagccgagggcgtctcgaacccggccttcttcctcggcaacgcccgcgcccgcaccgtcgtccgcctccccgacgtccccgcccacctcggcgtcaacatcatccggcgacagagcattggtctcatcgccgatcagcgacacgatggacattacatggtggcccagctccaccccacctggacgaccctccacaagaccctgctatgctactccaccgtcaccgaccagtggactgccaggccgctggcctccgccgaggagcaccctcgctggggcgcccacggcgttctcgcccacggcggcctcctctggtggatcgacgtctcctacggcatgctcgtctgcgaccctttcgccgcagacgacaacctgcacctccgctttatcccgctcccggtcggctccatgctcatggcccagccagagctcatggcccatggcctccgctttatctcccgctcagggctcatggcccatcaacgcttcatcaggcccagccagggcaagctgcgatacgtggagatccaaggagcccccagcggtatgcttactaccaactaccagcccccgtcgaacccccaggtccgcatgttcacgctcgtcagccaagagggccagcatcactgggtacacgagtacacggcgaccttcctcgacatttggagctaccgcagctacgccgacgccggtctgccccggggcgtggtgccttcgctcgccctcatcgaccccaacaacgccaacatcatctacttcttccagggcacgacgctcttcgcagtggacagatacgccaggaaggtcttgcaccacctgcaatacttggtagacgtagtagactccacatacgcggacctcacgttgcagaactcccgctacgttagtgcctgggagctgccaccaggagttttcgtcaacggtcatgggccaaacgataccgagaagactaaattactaacatatccatcctccaatagaaaaattccttgtgatgaatcggagatcgggtccctattaccatctctatcttcaatggagtcaatgtga

SEQ ID NO: 2076 - DNA, 1329 bp, Zea mays
  Peptide Sequence Number=SeqID_45451
atggcctcactaggtcatcccgaccgcttccagtccaaggcggcgctcaacctggtgtgcggcctgtttgggtggagcgcagcggggctcgccgaaagaatccacgccggcgccgtccccctcggcgatctcgtcgccggggagttcgttttgttcgtctcctacatctcctatggggcttcctcctcctttgctcccaaggtcacgccccctccgccagataccaggcccaccggcgggtttggttctcagcagcaggaatctgctgagagtggtgtcggcgaagccaccaggacagcaccaccggcctcccacgtcccaactggaggtccggctgcggcgacgctaacgtcaggcggcgccacgacggtggaggaggtcccagctgggggacctgcgcctgctcctgccaccgggggtgacctaggaggcgcgtccagctccgtccctctgtttgctccggaggagatggagctggaggagcacaccaaggcggcgtcccgccagttcctctccgagcggtcccaactcgagcgggaccgcaaggagtacaagagggacctccagaagaccctggaagagcagcggatccagcagaccaaggttgtggagaggctacaaaagttgcagcaagtgctcgagggcaaggccagcgacgccgccctcacccaggagaaactcaaggcaaaggagcagtccttcgacaggcgggagacagacctcgccaggcgagagatggatctctccaggcgggagacggatctcaccttctgggcagaaatgctcacccggcggagtgagatgatgaccgagcacgagctcgaggcagaggagaaagagaagaagctagaggagcggatccggcagatccaggcggcgcaggcggcaccgggcccccaggcggtggaggccaccaggaaggctcttgaagaccttcaggcggagcatcgcgtcgaggtccagcgcatcgccgcatgggccggcaaggtgagcacgacactggtgccgctagggatgagtcccctcccggtgtcggagctgccgacgtctatctccaacgcgctcctggtgctggactccaccaccgatcacctccgacgcctggaccagattcttggtgcctgcctggaagccgatggcggcaggctctgccgggcggtgattgaatatatcctgacatgcttccggagtcacgacccggccatatccttggagccggtgatcgctggtccagtggccgccactgaagacgccgcccgggagggcgtacaagatgtcgtggagctggtggccgaacacttccagcgggatcctactgatgacgagtag

SEQ ID NO: 2077 - DNA, 1335 bp, Zea mays
  Peptide Sequence Number=SeqID_45452
atgttgccctcggagggcgccgaacatggtgtctccggtgagctgctggcggcctttgaacctctgatcagtagggaggctcagggcttgttttccttcacggagaaggatccttttcgggtcattatggcgaaggcgaagcgtcgctcgcttctcctgcctgaggcgccgcctgtcccgccgcggaatcaatgcgacagggcgagtggaacgcaacttcgtggaagatggtacctttcagccatcgttcggcttcaaggattttcatcagttagcccggctgcatcccctcgccggtggtcacccaagacggtgaccactagcccctgggtggggagaagcaagtcgggcttcgatcttggtcccgccctcagcttcaaggatgtacatcatcctcgctggttcgggctaagccggagctctacctccccgcgcgggttcgtgggtcagcctctccttcagcattcgagggagagggcgctcactggccctacgagaggggcggacttcgacaacgcggggctggtcgacggcgggcgtcgtcagcttcagcgcgttgggctcgccggcttggcccccggcgccccctcctgccgcaagggtggttgtcgcgccgcgcgcacgggaggaccgcccaagacgtcgcgcgctgctagggcggcgttcgtgttctggggctgtcctgcccttgcaccggagtccctcggctcggtcggccttgccgtccgaggcttctcttgcttagttaaaggaacccctcggccgctcttcgatgagccgaagccaggggtagcggtgtcagcacagacagaggtagagttggctcgaaaagaagacttggtcggccagagcctggccgggttgtccactggcgggaccgacgccggaattgagttgccgaggcctcaggctgggctgatgtcttcgggggacagctggccgaggcctcggggtgaccggccgagccgtctgctcgagccagattcctggagaagaccctggcggcgatggcctgggcgtggtgatgatgtcgtccttcagagtggagattctccgactgcttcgccgtccgaggctaggtcggacctcggtgaaggtgtagttgatgccgagggtgctgctgctcccttcaaaattgttcgtgcgagcgagagttgcttttcacggaaggcgatgagtgagggttctgtcaccgacgcagtcgagaaggctcgaagaatcgtttcggcagaggagctttcgagcgtgaagacttgttcggtccgcggaatcacttatccgaacgcgagttacttatcgcagaaggtgatgagtgaggatcccctttcgaagtag

SEQ ID NO: 2078 - DNA, 231 bp, Zea mays
  Peptide Sequence Number=SeqID_45453
atgacgtcggttgctctcaacctcctacggaagcaaggaaacgtcagtaggatccatgccacactgccagctatgcttctacagggctcaaggcatctctccgacagccacgtgctgcatctggagcacttggacgaaccgtgcgaggacgtgaaggacgccgacgactgcacggcactgctcgacgcgttcgtctacatcgagatgtcttccgctgctctgcgtgtctag

SEQ ID NO: 2079 - DNA, 198 bp, Zea mays
  Peptide Sequence Number=SeqID_45454
atgacgaaggtgatgcttgccgaagatgttcaaagctcaagaaatggaatcaagcttcgtcttgaccatgctcttgtatacccgcaacctgattctgaaaatacctgctcgcatacttggaaaacattgtcaaatcatgtttttgaggaccttcggaagccaaaggcccccaacacccagctgtacaatggggtgtag

SEQ ID NO: 2080 - DNA, 144 bp, Zea mays
  Peptide Sequence Number=SeqID_45455
atgtctggtgcaccaacggctctctggctgccaacggtcgacttcgccgtagaaggaaagaaatcgggcaccggacactgtccgccagtcatcaacgtcgagtgggttactggatccagcgaatgtgggaggcttaagccttag

SEQ ID NO: 2081 - DNA, 540 bp, Zea mays
  Peptide Sequence Number=SeqID_45456
atggagggttttgtttgtgttggatccactggagcaggcacaggtggactgggagatacgaagccggaagcccacctctgggacaacagctgcaggaaggatgggcagactagaaaaggcagacaaggtggttacgacaccgaagacaaggcagcgagggcttacgatctggctgctctgaaatactggggtccagctactcacgtcaatttccccgtagaaaactatcgagatgagctcgaggagatgaaaggcatgacaaagcaagaattcattgcacatttgagaaggagaagcagtggattttctcgaggcgcttccatctaccgaggggtgacgaggttcgtttgcacagactactatgccaccgcatttcgcttccttagagatcatctcaatgtacacgctaactgcattgcaggcaccaccagaaaggaagatgacagtctcggattggaagggtcgctggaaacaaggatctatacctcggcattttcagtaagaaagatcgttccatttgggtgcagaagtagattttag

SEQ ID NO: 2082 - DNA, 924 bp, Zea mays
  Peptide Sequence Number=SeqID_45457
atggggaacactcacagtccttccgccttgtcgttggaggaacgcaacttcgcggaagctggtagcccggccgcatcccctcgccggtggtcacccaagacagtgacctccagcttgatggtggggagaagcgagccgggctgcgatcttggtcccgccctcagcttcgaggatcttcatcatcctggctggggcggaggccgggctgagccggagctctacctcccgcgcgggttcgtgggtcaccttctccctcagcattcaagggagagggcgctcaccggcctagcgggagggtcagacttcgacaacgcggggctggtcggcggcgagcgtcgtcagcttcagcgcgttgggctcactggctcagctggctctggctcggctctcggtgccccctcccaccgcaagagcggttgtcacgccgcgcgcaccggaggaccgcccaagacgtcgcgcgctgctagggcggcgttcgtgttctggggctgtcctgcctttgccccggtacggcgcctccgcgcggaggtcggtgctccgctcgtccgggaggatccgagtggggatctgccggtgggcagacagcgtccgtcgtcggtgctgaggtggtggcggctgaagaagtcctcgtcgccgacgggatcaccgccaccatccgcgctccgggcctccggctctttggctttgatagcttgtcctcgcctctcgagcggagacgtgggcgagggcgttgttgcagcggcgtccgctctgaggccatcgctgttgcagttcggccacccggagcggaggtcgttgtcgctgctgctggagcgggcggcggtgagcgacctggagccttgtcgccccgcgggccctccaatgtggggggttactcatacccgcggggacggaaccggagttccgtttgtaatggcaccttga

SEQ ID NO: 2083 - DNA, 333 bp, Zea mays
  Peptide Sequence Number=SeqID_45458
atggggggggggggtttgggcgccgggggcgcgcaggccgaggcgggccgggcccggctgggctgggctaggttgggccgggccacctcgcggatcgaaaacccacgacgagcgcgaccactaaacggaattaaatcgcgaaccgaaatccggaacggaacgagacgaacattcaacatcagacaaagaaatgtgcttcggcatgatgcaacacccatgacacttaggttttggtttatacataacacggacacctgtcgctatactggtttgaaattgggaagaaggggcaaatggggaaagagaaaagagagtaacgcccgaatttggtga

SEQ ID NO: 2084 - DNA, 651 bp, Zea mays
  Peptide Sequence Number=SeqID_45459
atgagcacgactgatataccagttttacactctggagaggttgtgcatctttacccacaagtcatgttacccatttgccatggggttgatcggaccccatacacctctaccaaggaagcaaggcagggtaccactacgaggcctttacaaagttccactaacttcagaaaacccgctacagtttttaggaagctccaatgcagggatccctcgtctgaccgccatcgcagcaaaatcaaccccaagtacctccctacattgaccactcccctactgcccttgcccctttcgggttcctaccatgaatcatgccctcaggcaccctggccacgacgcagcacggtttcgcggtggaggatggccattgacgacgaattctcggtctccccgacgtccccaccgcccgcagagatcacatcagcaagcagtgccaccatatgtatccatggggccaccaaccgaggttcatcaggcgacgaggtaggaccccccacgacggcggccaaatatccctctttctactctgtccgcctgtacaacaatggtggcgaggccatcgattcggtagagctagggatcccagtgctccgattatatgtacccgaggcaatgcccgagatcgaggtccagaacccaacggatctgcgatga

SEQ ID NO: 2085 - DNA, 261 bp, Zea mays
  Peptide Sequence Number=SeqID_45460
atggctgctgctgagctaccttctttggacaatgcatcacccaatggccttgttgtccacaatggaaacatgctctatctcctccttgcactggggttgcttgactgctctagttggttgctggggcaggaaggcgaggtgcctgctgattctgcctctagaactgacttcctcatgtctgactgttctggtgatactgttgctgatgctgagggtagtgcctctgaaactgctgctaaggcgggcgttgattctgcttga

SEQ ID NO: 2086 - DNA, 273 bp, Zea mays
  Peptide Sequence Number=SeqID_45461
atgaagggtggtcatgagatgtctgatgaagcgattagaaaaaatgagaaagaatctcacgacgctcaagaagaagctaagcgagctgaagaagctgctgaacgcacaaggcttatagctgaactttcgcctccaccggagccatataaccccgaagctgacccagccatgaaggagtcgttagacataataagaatcgctaatgaagttgttgacgaagccattgacagactgctaaatgaagctactgaaaaattgctgaaggaagactaa

SEQ ID NO: 2087 - DNA, 1023 bp, Zea mays
  Peptide Sequence Number=SeqID_45462
atgcaggcggcatgcaaccacaccaagggggcgcaccctttcgacttcaacgcatccagcgtggaggcccaggcccacacgtcatgtaaccggtgcgccggttactacgtgcgggaaactgcaccgccacttgcgccagtaccacgccttctcgactgcggaaccggtgccgtgactcgaggcaaccctgcgcatggcccaacagtgccaaccgagcacatcggttatggggactgggaaaggggatactccgaaagggatccttctccacgaaggaagcgggccccgagcccccctactgaccagaggttcgaaggcaaacagccgcctcagagcattcgggctctgcgcccactactgatcagaggttcgaaggctggcccctcggaatggttcgacagccgcctcagagcactcgggctccgcgcccaccactggtcagaggttcgaaggctggcccctcggaggggttcgatagccgcctcagaccactcgggctccgcgcccactactgatcaggggttcgtaggctggcccccgaagggttcgacagccgcctcagagcacgcagagcgagggatgactctggagggaggcatcgagccctcggaccctatcgaacgggaccgggtccggcaaatgacctacaggtacttttggagcgtgcctctgggccataagccgacccttatcgaacggggcacgggcgtccactcggatcaccctttagcaactcactggagacacgatgttcggcgccctccgagggcaacatggcgcttcccccctcctccttgcggaaaggcgacacaggggcatatgaaaaaagccgagtctgtccttgaccgtcctctcgctctgtgcggaggctcgggggctgctctcgcaaaactggctccggccaaaccgttgacagcgtcaacataccagcccgagaacttggaacctgactatgcacccgggctacggccagttcacatgagggaacaaccagaccgaccgaagcatcacgaaacacgttaa

SEQ ID NO: 2088 - DNA, 267 bp, Zea mays
  Peptide Sequence Number=SeqID_45463
atgccgcacccttttccacctcctattgcgcttgactgcctcgccggcgacttcaccgccgcgagcacccgccaatgcgccgtggaccggccaccccaagcctccaccgcggaagaggtgtctgatcctccagaatttatagctctggaagaagggcaggaacccgacccctccgagataaatcttttgtgccaggaaagcttcgacgaaggcaagtccatccttcccttgatgcataatttacctattctctctaccactacctaa

SEQ ID NO: 2089 - DNA, 201 bp, Zea mays
  Peptide Sequence Number=SeqID_45464
atggcgctcgaggctggacttagctgctgtcagcctcactctatcgattggcacagcagtcggagcagggcaggcggcgctgttttcttgtcaggtacgcttcaggacatggttgatggtgtgacttggcctaccaccctgccaccgggttggacggtcgagtgggatgctgctccagcaggagaggagcaggagaagtag

SEQ ID NO: 2090 - DNA, 300 bp, Zea mays
  Peptide Sequence Number=SeqID_45465
atggcgagctcgccggtgctcgccatctcccccatccccctcccttccccgagcgcctataaaaggacccgctcgagccccttcttcgccacacaactccagccacccccactgccctcctccctgagccattcaagcaagcaccgccgtgctcccttcaccgctccgtcgtgccaagagctccgccacacttccacgttcacgacacgccacttcccccactcaattatgtccggaaaactcaccggcggcttcgccgccgcgggcacccaccaccgtgccgcggaccggccgccttag

SEQ ID NO: 2091 - DNA, 961 bp, Zea mays
  Peptide Sequence Number=SeqID_45466
acacactgcacgtaagtcggtgattcctttcctgccgtctcgacttgcggagcgtcctctgcaccgcaccgtgtccggacagtcgagtcacctggagaggctgcaccaccgcctgcgtgaggagcaggaacgccggcgccagcacggagagcagcagggctcttcctcctcaccccagcaggaggtggagaccgtgaggccccgttcctctgttgcccagctggaggcgccccttgttccaccgcgggacgtcccggctgttggaggagctgttggaggagctactggaggagaccccgacgacgacgactcaaaccacagcacggagtcttctgagccgcaggaggcggaaggatgggtcgcccgacccatcacccgtgacgccgctcgcggttgtcacttccacgacgcactcgacaccttgctgcgccaggctttcgaccggcacacctggtcgatcgagtatcgctgtgtggtctaccagcacagtcgcgggaggatgacctccgggggtgcggaggccgttttggagcactattccatctccgagagggacactgcagaggcggctatgcaggatgcagcacggcgtgcactctcccagtactgttctttgttcggtggcgtggccgacggtcttaaccttcggtactacccccgccgccctactggcagcacagagagtgtggttgtttcacctgttggtgaggctaaccctaggttgagcagcacagtcaacctagtcgcagtgcttaacacggagctggatcactctctagacgagctaagcagggctcgaatggagattgcggagttgcgtgctgagttggcagagcgccatcaccaggagggtggttcccccgctcctgtcgggactcagcacccataccgctcaccgccacgtggtcaccacacttatggttcccctgtctgtaagaccaggatagatttggatccttag

SEQ ID NO: 2092 - DNA, 726 bp, Zea mays
  Peptide Sequence Number=SeqID_45467
atgacaccccctcagtacgcggtgcagcagttcgagaagcaccgagtgccccgctgtagggtgaggatgaccttggagcctcatcccctgcagccaggctggcgctccttggactcagagtctttcgggtaccgagcagaggacacgatcgaggcgatcgcactgcacggattgactactttctgcggatttcatcccttggagctggctacccaccccattggcttgttccccgctgagaaggaggacgacccaatgtggaaggatcgggtggagcatgctaaggatatttgggccatctacccaggtcagactgcacacttgacagtgatgcgcggtgaggccatgtcccatctgatggcactgctggaggccaccaagatcacgttggataatcgagaggagcttgtggtcgacttgtctcaagaaatggtagagaaagatttgcaagtggagcagctgtctggtgagattcatgagttggaggagctagtgggcacccgggagaacaccattgaggtcctagaggatcagctcctcaacactcagcagcagctggcagaagcaaatgagcacctggacatgcaccaccaggagatccaggaccaggaggacgacgaggacgtcgacattgagggaggagatgagcctgcctccagtgtggacactgctggctcgggaagaccaccttcccccgagtcaagtgttgcttcgttcgctcactag

SEQ ID NO: 2093 - DNA, 453 bp, Zea mays
  Peptide Sequence Number=SeqID_45468
atggattctggggctggtggtgattccgtagctgggtctagaacttctcgagttaggagaacgaggaagctgcattttgttggaccacctccagagctttcactcgaatctcaggttttgattaagcctagtggaaagacttggatcgacgactcgttcacaggcacaggacactacatgcagaaacagcacaagttgccggacgatggatcatatgatacgaacgctggttacgtgtttgagtataacgcgaacgatgtcgttgcagatgcaatgtactatgcacgaattcagtctataaaggcatggtacagagcaagtgctgatgatcgaccgatgccaaataccaaggccgagtggtcatcaatttaccttacggaggagcaataccttgagagtctagccggaggaagtggttataactcggaccaaccaggcgatggatatgagtga

SEQ ID NO: 2094 - DNA, 234 bp, Zea mays
  Peptide Sequence Number=SeqID_45469
atgccgccgtggataggccggagcacacgccgccgacgagctcgcccgcctgctcacgtggaccgggcgattccggccatctccgacgacgagccgtacctcggcatgatcgccagaccctccccgagccaaccctacccttcgccggacctccctcgccgccgcacaaagacctatcattaccagaggatgccaacaaaaataacctttaggacagagcctacccctaactag

SEQ ID NO: 2095 - DNA, 690 bp, Zea mays
  Peptide Sequence Number=SeqID_45470
atgaagatgtgtttccccttgctggctcctccccacctaccgatcttgactcccttctcgagtctgatccgattacccctccaccccaggcgccaaccttgcgtcgttgcctgcaccacgtgcagcctcgatgcctctgctcgcgcctcttcccatcccacatgcggccccattgaccctgcctgcgccacacgtggcctcgtcgaccataccagcaccacgtgcaaccccgtcgacactacctgctccacgcgcggccctgtcgactcctcccgcgcaatgcgcggtcccgtcgattcctctcgcgccatgtgcagccccgtcgaccacgcctacgccacgcgcgatctcgtcgacacctcccaggcaatgcgcggcccgccgacgagcttggctcgcttcgccgaccccgctctcgtctaccaccgccgcgggcgttccactccctcaaaacccactgactcgggcaagtcgacgagcgcggctcactttgccgaacccgtcgtctatcactgccacaggccggccacacccacggacctcgacgtcccggcggcccgctctaaaacgcctgtgtaccacccagtcgtcatccaccgcgaccacaggcacatccaactgcaaataatcgaccaaaggatgaaggttcttcaatacccgatgccaggatgccgatggtctggtttctga

SEQ ID NO: 2096 - DNA, 441 bp, Zea mays
  Peptide Sequence Number=SeqID_45471
atggccggatacctccacaccctcgacaaccactacgacgagctctcctcccactgcacccacctaaactcccgagtggaaagcctagagcagcaagtcaaagaacttaagcaagagaaggcatccctccaggaaagtctcaacatagcagaaggcgaggaagccaacacccgtgaagactatcggactttgaagatggattatgacaagaagctaaagaaactcgcccccaagaagaaaatccagaaaaagaccaccaaccaaggatgccagacagagaagaagaagaagaaggcccctctagccctacctccccccagaatagatgattggtccgacgacgaggatgtatccctagcaagcctcgatgatcttctcaaggcatttggggacaccttagataaggaattcgctagtacctcggggaacgctctcgtgtag

SEQ ID NO: 2097 - DNA, 912 bp, Zea mays
  Peptide Sequence Number=SeqID_45472
atgcaggcggcatgcaactgcaccaagggggcgcaccctttcgacttcgatgtgtccagcatggaggcccaggcccacacgtcatggaccgggaaaggggataccccgaaagggatccttctccgcgaaggaaacgggccccgagcccccctactgatcagaggttcgaaggctggcccctcggaggggttcaacagccgcctcagagcgctcgggctccacgcccactactggtcagaagttcgaaggccggcccctcggaagggttcaacggccgcctcaggccactcgggctccgcgcccactactgatcaggggttcgtacgctggccctcgaaagggttcgacagtcgcctcagacgtagagcgagggatgaccctgggtacgttcgatacataaccaaaggctcgggctacggtcccgagtcacttcgccgctccactgaccggcctgacaagaggacagcgccgcctgcgccgctccgactcgacagagtgaggctgacagcagccaagtccggcctcgggcgccataggaagctctgcctcgcccaaccccaggtctcggactcggcctcggccccggaagatgacgaactccacctcgcccgaccccagggctcggactcggcctcggccccggaagacgacgaactccgcctcgcccgaccccagggctcggactcggcctcggccccggaagacgacgaactccgcctcgcccgaccccagggctcggactcagccctggcctcagccgacggtctccgcctcgcccgacccaagggcttggactcgacctcgacctcggaagacagactcgacctcgacctcggaggagcctccgcctcgccctacccaggtctcggaccgaccacgtcacaagaggggccatcattaccctatccctag

SEQ ID NO: 2098 - DNA, 669 bp, Zea mays
  Peptide Sequence Number=SeqID_45473
atggcgacctccggcttgatggtgggggaaagcgagccgggctgcggcctcttcccctccctcggcctcaaggattttcatcaccaaggctggggaggggagagtgccgagttggggtcggcccctgcgtgggcggtggccgggggcggccacgggctgacctccaacttctcggccttctgcccgtccttgcctcacaagttttggcatgggcgggggcctcctggcagcggcatccaccctgaggtcagcgctgccgctgttcggtcccccggagcagaagtcgtcgtcgtcgccgctgctggagcaggtgacggcgcgccgttcgtcggccttccgttgctccgcaggccttccccctcggagtggggtttctcgcctgttgattatctgaaccgctttaccaagcatgagtcgccccgtgtcaaggtgacaggcgagtatgaacagaggcggagttggctcgagaatgggaacctggttggccggagcctagccgtgtggtccgtcagcggagccgatgccaaagtcgatcagccgaggcctcgggtcgggctggcgcccttggaagccggttggccgaggccccagggacgtcgtcgatgccgagggtgctacggctcccttcagcgtgaagacccgagcctgcaggatcagaccgtcttgtag

SEQ ID NO: 2099 - DNA, 258 bp, Zea mays
  Peptide Sequence Number=SeqID_45474
atgaaccgtacgagcacatcctctgtcacccccaccgcgcttacggctctataccccaacccaacttgctctggccctgggtcctcccgcatctcttcctcggcaggaagggcgcggaagctaccgtttaacgaatgcaagcaaggtagcttgcttactctccatctagcgtgcattggcggcaaggaaagaggcattggaaagactagaccatacacattaattagtacaagaaagaggcattcgggaagcgactag

SEQ ID NO: 2100 - DNA, 489 bp, Zea mays
  Peptide Sequence Number=SeqID_45475
atggacaaggatgtccgcgccgggcgaatcctgatgagaagacctggcgttgtggtgcctgaggacatcattgctgacgttcttgctgcatccgctggcggcgtcgagatcaccctcgaatatgtgagcatgttgtattactttgagggtatagtgatcaccctaagtcattgtgtcaatgtcctccagcctggttgcttctacttcagctatgcttttgaatgtcaattgggtgctccaaagatcaaatctgttggcaatactgcctccgacccatataccatgaagaatggggtgtttctgtgtaacgctcggctcggctgggttcgtaggctccatacaacatatggtagttccctgatccattttcctgcgagtttctcactcttgtcaaacacctttttcatgagtgcatcgagtatcctcccgttggctctttctacttgtccattagctcttgggtgtgccactgatgcatacttgatctag

SEQ ID NO: 2101 - DNA, 423 bp, Zea mays
  Peptide Sequence Number=SeqID_45476
atggctgcgcagggtgagagccgccatggccgagctgaggaggggcatggccatgggttcgccctacgttcaccaggttcagcttctacttctgcatggttggcttgcctccggttattggagcctcctgagactaaaagttatgtcgtccgtacagaggtcccagatgacgtccctttagctggtaatcctgtcgggcaagaaataacccaaacagtttctcacgtttcttcgaccttggagggcggtctagatcatggggatacattggctcttgacattgtcggccagggtcacccagctcctgtgggtacgaccgagggtgcctcagcttctgaaggtgccgctaaggataacccagcccctgagggtggtgctgaggatgactgtaacacccctggtgttactgtaactaaaacttga

SEQ ID NO: 2102 - DNA, 636 bp, Zea mays
  Peptide Sequence Number=SeqID_45477
atgggcactgactccaatctcccctggatgaacaggacatcagggcagaaaggagcaggtatggtggtgttcttcttcccatccccctttgagggcggaggtatcgggaggatagctcaatgtgttctccttccctggtacgggatttttacttccttctttcgagggatccacgtccactccttagtgggcgaggtggacaacggagttcttcaggttagtgaaaccccgactgattggtcttccttcttccgagggctcctgagtcatggtcagcgaggggtcatcttcttttgggctgtgagcgggggggcgccccacagacttgcttcggctcctcttgagatttccaaggagggtatcttctcaggtgggtccgctacgcggtgtagagtcccctctacgtctgctatgcatgtgatggttccaaagcagaacatagctcctggactgagagtgatcttgttcttgaagatgacggtcatggagataactttgatcatcaacacaccccctacctggcgcactaactgtcggtgtctagagtccgaccgcacacccaggggtaccctcacggtgcttttgggtaggacggtgtcgctgattgtagctcgatggttcatgtcggatgcatga

SEQ ID NO: 2103 - DNA, 1653 bp, Zea mays
  Peptide Sequence Number=SeqID_45478
atggacgggcacgccgcctgcaagatggcctggtcgccgcccgtcagcagagtggacagggcacatttaatgctaaggcggcacatcgcttcgcgcctcatccacaataaatgcgaaggacgcgcggctcagaggccttacgtcaggcttcgcccgttggcttacgtcacgggcagctggccagatggcagcatcgggtctccgcctgagcagggagtagaggcatacgcgatatggttcggacacgtgtcggctccggacccccgcctgaccttgattaaggtccgggtactccttcccctagaatcccggaaccttgttgtgagtgacccggaccccacacagggaggtccgggacccgtcccgggggtccagtctgtacctgcggaggtcctagacctcgcccggaggtccgggctgtgtatccaagggtccgacactttcccgtgggggtccggacccactattgacaccttggaatatatcgtctcctctggccacgtggcggccctggagccgcccacatggtggggtcaggcgctggtaccgatagtggcccccgcctcaggggaggatacgagcctgcaggtggggccaaagcttgattggcgattggcgcgctgcttccgtgcacttgctgacgaaccggcgcccaaggaggatgactcgtgggcccgggcccccgtgccagaagctagtccgctgctttcagcggagatgaagaggcgcggcgaggctgggtcaccttggcgcgcgtcgggcgagatcttctgtggcatctcagggcgtcagcgggggaatctttctttaaaaaggggattcttgagtgcggtagccattctcctcactcgcagtgccctttcgccctcgagttctccacgctcttctgccgccgtagccgccatggccttgctagaccctcccgagcgcttccagctcggatggggtgtgccggcgttcaacagaaggatctgtgtcggtgcctctccccccggcgatctcgccgtcggggagttcatgctcttcgtctgcaacctcccctgcgggttggcactgccgatctcgtctttcttcgtgctgctgctggaggagcacggcctcgtgggggtggcgctcttcggccagtgcttagtttcaaggatgttcatcagccttgtggaggtggaaagcgagctgagctgtggctccatcttctgcatgaacttcatcgcctcctgcagcggcctcgtggtacgcctccatgaactggtcgagctctggctccgttctagtggccaggccaccgagcgtcgcgtgccgccgtgcttccaactctttggctttaatagccccgacatcacctctaatgatgagggctcctttgtcttggcgcacgtgacgaggaggccaccaccgccggcaagccacccagaaggtcgtacagggcgccatgaagatggtggccgcgcgctttcggcgcgaccttgctggtgtcgagtagttcatacctgtagaaatggtgctaggacttcgttggaagaccaacaggccgggcttatgagggcagacctcaccgggctggcgtacatctattcctgcatagactcgttaaaatactggacccatgaggagcccataaaggtttccgggggaaggcaggcttcagccccgtag

SEQ ID NO: 2104 - DNA, 477 bp, Zea mays
  Peptide Sequence Number=SeqID_45479
atgacccttctacggttagtcgaagatgtaagacagcacgagtttcacagccaattaaactcaaatccaggcatcattcccctgctcggagcatccatccaaggaagattcggatccgattacccagagccatatggcaaaagaaatatgatatctaccctgcacaactcaaagctcgttcttagagcaatccgttcaagcaaggtagggcttccttaccagcgagcgaagaagtcggactatgtcggcacggatctccactccgccgcagtcccctatacaagaggaggaacaaggccacgaggacgagttgtagagaagatgatcccttcgaggccggtggtcggtggcgtgcttcgcttctgttgggctaggaatggaagcacgcgtcttgggtggtttcgtctggaggtcggtgcaactgaagggaaaggcaatgcgaagaagagggagaggaggacggcgggcgcaaggtga

SEQ ID NO: 2105 - DNA, 81 bp, Zea mays
  Peptide Sequence Number=SeqID_45480
atggagatgattgggagcattcgagagagattagaagcggaacaccacttgcgtgtggagaaggtagtgtttggttactag

SEQ ID NO: 2106 - DNA, 990 bp, Zea mays
  Peptide Sequence Number=SeqID_45481
atggggatgcacccttttgacttcgatgcatccagcatgaaggcccagacccacacatcatgtaaccggcgcgtcggttactacgtgcgaaaaactccaccgccacttgcgccagtaccgcgccttctcgactgcggaactggtgccgcgactcgaggcaaccctgcgctcagcccaacagtaccaaccaagcgcatcggtcacgggtcagtcagccgtgggagaaggcgcgacgatcgatatggccagaagtggaccggcaggaccgggaaaggggatactacgaaagggatccttctctgcgaaggaagcgggccccgagccctcctactgatcagaggttcgaaggctggcccctcggaagggttcgacagccgcctcagagcactcgggctccgcgcccactactggtcagaggttcgaaggctggcccctcgaaagggttcgacagccgcctcaggccactcgggctccgcgcccactactgatcaggggttcgaaggctggcccccgaagggttcgatagtcgcctcagaacacgcagagcgagggatgactctgggtacgtccaatacatggccgaggctcgggctacgctctcgaggtaccctaggacatttccgagaccagcaggagcgattctgtaacggaatcccatcagagggaggtatcgagcccgcggaccctgtcaaacgggaccgggtccggcaaatcacctgcagcataagctgcaaaggcctagtgggcgcaatacaggtcaaagctccgtccactccaggggcacgatctcgcctcgcccgagcccagcctcgggcagaaacaatggacccaggtggattcacgcctcgcccgagggcctcctcaagcaacgggcgcaccttcgactcgcccgaggcccagctcgggcaggcttcgcggagaagcaaccttggccagatcgcctcgccaaccgaccgtatcgcaggagcattcaatgcaaggatcgcctga

SEQ ID NO: 2107 - DNA, 1014 bp, Zea mays
  Peptide Sequence Number=SeqID_45482
atgaccgtcccccgccaccatttcctcatctcccctctccgcctcgcctctgcagccacagttccgttcgctcgacgcttctccaacgccgcttccagcaacaagccggagccactcctctcggaaccggatctggagtcaggtctgtatcttgtgtcaacgccaattgggaaccttgaagatatcaccttaagggcactgcgtgtcctaaaatgtgctaatgtgatactatctgaagacacaaggcattcaggaaagctacttcagcattacaacatcaagacacctcttcttagcttccataagttcaacgaacgggagagagagcccactatcttaaggaggcttcatgaaggtgaagcagttgcactgataagtgatgctgggacgccaggtattagtgaccctggcatggaactggctagactatgtgcaactgagaaaatccctgtcattcccattcctgggccatctgctgcaattgctgctctttctgcatcgggtttgccatcaaatgaattcacatttgttgtaaggaactattggggtcagttcatattttcaattttagttgggtttttaccaaagcatgctcggtcaagaagagataggcttgagatatctgctcgtgaagctgctacacaaatattctatgttcctccccatggcattcagcagtttcttgttgatgctgcttcatcttttggcgattccaggcattgtgtggtcgcaagggagataacaaaaatacatgaagagttttggcgtggaactttaggtgaagcaaatgaagcttttgcaactcgacaaccaaagggagaaataacagtgctcatagaggggaagttaatttcagatgacgaaattccatcagaggatttccttgagcatgaactaagagaattgacggcaaagggatatactctttctgcggcggtgaaattggtcactgaagccacatcagcaaagaagaaagatgtttatgcactcgcattgaggttgtttggaaaataa

SEQ ID NO: 2108 - DNA, 174 bp, Zea mays
  Peptide Sequence Number=SeqID_45483
atggagagtcatgatctccgggcagaatgggaatcacggcttgtgggtggttatgagattgatggttctggttatgactctggtgctggttgtcagcattgcaaccactgctcaggcgaagatgaagctgtggaaggagacttccaggagttccaagactacgacgagttctag

SEQ ID NO: 2109 - DNA, 261 bp, Zea mays
  Peptide Sequence Number=SeqID_45484
atggctcaccgccgtcgaaggaaggcggttgaggaggtgggtggcggtatgcagggcctctgcccagtagctggcagggagagacgcctgaaagagaaggcagcggatcatattagtggtggttcaaatgatgcgctcgacccgaccattctgagtagaggtcctaggtggccgagacgacgatgccaagtggtggaggtggtggcggagaccaagacgggaggtggggacgcgccggtggatgaagggcggatcgtgtag

SEQ ID NO: 2110 - DNA, 639 bp, Zea mays
  Peptide Sequence Number=SeqID_45485
atgcccccgcctccgcctcccgtgcgcgatgccccaacggccccacaccgacccagagaaagtgccagcggtcaccagaaggtgcgcttccgccggaagcgcctggccgttgcgaggaggccaacgccgaggcacctggcccacacgcccacctccatcgcccaccgcaccgtctccatctcgacctcctgctcctcctcctctgtatccccgaccacctcccaccccgtcgtcgtcgcactcacagcggcaccagccatagaggcctgtggtgacgtcctccttcggtatcccctccagccgggtggctccgcaccgcatccggccccggccccggccggccgcgcgggccctgtcccgcatcagcacgccgccctccgcgagcaccaccacatccgccacgcacacctccggcgaggccagcgcctggcggcactccacgtgccaccccgccccccgcgtcgagcggagaagacgccctccaccgcggcctcctccccggcggcggcgagcacctcgaatcacgcgctcgcgtacgcgtcggtggcgacccggcggagcgtgaccttggcgggcacgcctggcgggagcgtgcgactgtttagccccagcgtcgcgcccccgatggccgggtggtag

SEQ ID NO: 2111 - DNA, 1230 bp, Zea mays
  Peptide Sequence Number=SeqID_45486
atggttgccatccaagggggtcaccctcattttaaaggcgactctccccacttgcgtcctcagccggcgtggactgagtcttctccaacacgctccaaggtcctccccctacgacacgagggctgggtcccatacgtcatgcaagctagcccaggacagaaggagccaaaaccgccgcgcgcggtacgcgcaactgcccagcggttacaagcattcctccactatcgcccggaccagcgggtgaaagggcggaccgccatgcaggcggcatgcaaccgcaccaagggggcgcaccctttcgacttcgacgcgtccagcatagaggcccaggcccacacgtcatacgggcggaagcagcagtcaagtcgtcagcaagctcacgccccctcctgggacagcgagagaaacctctcccacggcgtgaagacgacgcgcccgtgttccgttcctcgaacggctcgcgcacgcacaacggctgcctcgcgaaccactcgtcccgttgcattaactctgcggcaggacaggcggcacctttggcaggcgaagcaggcgacgcttcacctccgccataatgaccgcgtcaaaaaagaggttcgaaggctggcccctcggaagggttcaacggccgcctcaggccactcgggctccgcgcccactactgatcaggggttcgtaggctggcccccgaagggttctgacagccgcctcagagcacgcagagcgagggatgaccctgggtacgttcgatacataaccaaggctcgggctacgctcccgaggcgtccactcggattacccgctagcaactcactggagacaccatgttcggcgccctccgagggcaacatggcgcttcccccctcctccttgcggaaaggcgacgcaggggcggcttggacacagccttggcctcggaagacggtctccgcctcgcccgaccccaggggtcggactcagcctcggcctcggaagacggtctccgcctcgcccaaccccagggctcgggctcaacctcgacgctggacgacggacttcgcctcgcccgaccccagggctcggacacagcctcgacatcggaagacggtctccgcctcgcccgacccaggggtcggactcagcctcgacctcggaagacagactcgacctcgacctcggaggagcctccgcctcgcccgacctagggctcggaccgaccacgtcacagggtgggcatcattaccctacccctag

SEQ ID NO: 2112 - DNA, 1143 bp, Zea mays
  Peptide Sequence Number=SeqID_45487
atggatctccaggaaaggaacgagtggcttttctacaagctgctcattgacaacgttgaggagttacttccaatcatgtacactccaaccgttggcgaggcctaccaaaagtatggatccatatttagtaaacctcaaggtctttatatcagtttgaaggagaagggaaagatccttgaggtgctgaagaaccgaccagagaggagcattcaagttatagttgttactgatggtgaacgtattttggggcttggagatcccagatgccagggaatggggattcctgttggtaaactttccatctacactgccctgggagaagttcgtccatctgcttgcttgccgatcacattggatgttggcacaaataatgaggagctgattaatgacaaattatacattggattgagacaaagaagagctactggccaggagttcactaattttctgcaagaatttatgactgctgtcaaacataatgctgggtacaaacacaaggagcagcaaactcaaggtgtaattgatcaaataatcaaggagcatcttggacaagttgcggccttccaggcaggtgcccaattcaaccaacatctgcttcttgcattcctaggagctgtgggctgtggcccgccttcactgtccaattctgccagttcctggcacaatcttgtgaatcagaaaatcaactggaagcttctgacccctgatcaaccacaacctggcgcccaccattatccagacagcgccatcaacatgagatccaagtggcatggatccgctcaattgttcctagacaagtttggcgatggaatcttcgctggcagcaatgagttacactcattcctcattgtattcgaggacgtggtagaccatatccagccaagaaaaaaacaacaacaacaatggggtggtactgttgggcttgttgggcagaaggatcactctatgctgcccaagtggcttgctgatagcctgataacatttaaacaaattcttcatcggcttgggggcaagccgaagcttaagaaggggatgtcagggatcagtataggccttaggccttggtttagtctagtgttacatggtgggctggtatgctacaaaaggggaacatcaacaggaagagggggcatcgaatattga

SEQ ID NO: 2113 - DNA, 429 bp, Zea mays
  Peptide Sequence Number=SeqID_45488
atgtcgctccacacaaagctcatccttgacgccattagcgagctcttcgacaagttccacgcgtggtgggccaagcgggacgccccacgggaggcatccaggcgcgtccctgttccgacccagtccgcagctatggctgaggccgcgcgtcgcgctgcggcgcacgagcggctcaacctctccgcctgcgcctcgctcgacgatgcctccctcgttgcgtctgtcgtcggtggaccagctaccgcggcgacctggtggttatgcgtttcggcttcggcacagggcgacatggagagcacgctcaaggggatacgcggcagcaacgcgccgtgtgtgctggacctggatgacgcggccaccgtggtgggcggcgtcgaggacacctacggcgaggaccgcgccactgaggagcagctcgtcacgccctag

SEQ ID NO: 2114 - DNA, 177 bp, Zea mays
  Peptide Sequence Number=SeqID_45489
atggggagtagctctctccgggcagaatgggaatcacggcttgtgggtggttatgagattgatggttttggttatgactatggtgctggttgtcagcattgcaaccactgctcaggcgaagatgaaagctgtgggaaggagacttcccaggagttccaagattacgacgagttctag

SEQ ID NO: 2115 - DNA, 1191 bp, Zea mays
  Peptide Sequence Number=SeqID_45490
atggggggctcggagcccggttccttcgcggagaaggatccctttcgggcaactggcgtgccggttgctcgacgcgtgggcctgggttccaggctggcgtgtcagaagtcggagaagcgcgtccatctggcgcggttgcatgccgcctgcatggctgcccgccccttccgcccgttggtctgggcgaaaatggggggtcgcctgaacgcaactccatgggagctggtacctctcagccatcgttcggcttcaaggattttcatcacgcagcccggtcgcaccccttcaccggcggtcacccgagatggcgacctccagcttgatggtgggggaaagcgagccgggctgcggcctctgccccttcctcagcctcaaggattttcatcaccaaggccggggaggggagagtgccgagttggggtcggcccctgcgtgggcggtggcccgctccttcactcagtgatggggggagaagcgggcattgcccgtggcgtccggcagctgcagcgtgcctggtcttcagccgcgagtggcttcggggccacttgtggcgttggcgtctgccacggcagccggaagaggttcttccgccggcgcggcgaccgggaccggccacgggctgacctccaacttctacggccttctgcccgtccttgcctcacgagttttggcacgggcgggggcctcctggcagcggcatccaccctgaggtcagcgttgccgctgttcggccccccggagcagaagtcgccgtcgtcgccactgctggagggtaaccggttgagccgcctgctcgggccggattcccggaggagcccctgggccgcggcgccgcccgaggctgggtcgggcttcgctgaagacgtcgttgatgccgagggtgctacagctcccttcggcgtgaagactcgagcctgcaggatccgatcatcttgtagcgtgtgcttcctgcggccgccgaggccagaagaaaacaccctcgctgcacttgcgaagctgcgccttttttcctcctgtttcgagcatctggacttcgccggtaacagggatgtttgtgtgagcaagagctgcttttcgcggaagggacgagtgaggtatctgtatcccagaggcgtgggaatccctcggctcggtcggccttgccgcttacgcgtactttcacccgtccatgaggccctgtccctgacttag

SEQ ID NO: 2116 - DNA, 330 bp, Zea mays
  Peptide Sequence Number=SeqID_45491
atggcgatggcagcaaggtccttctccaacttctgcttgagcatcatgttgtactcgacggggtcaacaaccgatctccaggctgacgccggtgccatggaccctagtggcttgctcttcgcctcctcgactctagctccattgctacctctactttacgacaacgatgggactcaagctatcgagctcctcaagaaatttctggaagcaccactccgacagacaccagttcatcgtgtccgccgcgtcccccctcctcctactccacctagtgactggtgcagcaacattatcggcaaccgctggttgagggtgcggtggggcctatag

SEQ ID NO: 2117 - DNA, 795 bp, Zea mays
  Peptide Sequence Number=SeqID_45492
atggcggtccgtgctgtggtgaagaggcagtcaccatcggtgtcgacctcttcgacgtggtcgctaaccctggtgccggagctcggcgaagagctcgagcgcgcactcgtaccggcgggagcacggtggtgtaggcgcggacgtccaggcgggagctcggtgggagcggcgttccgtcgagcagcacgcagacggcgtcaggctggcactcatggcccagcgcgcggacgaccatctcgagcgccgatgcgtcggcggcaccctccttgccggcccactggaggagcgcgagcgcccactccagtgccccgagagctccagcgtcttgagcagggacgtgatgtccgcgcggaggagctcgtcgcggcggaaggtcaggaaggccgcgagcgtggggatcgggtgcgaggagatggcgagcaccagcgcctgcgtggctgggagaggaaagagtgcggtggctacgacgtctggtgcgaccgctgcgacgcggtggcgggcgcggtgaggtggagcaggagcgagtcgagcgggagcgagtcgagcgggagcgaggagcaggatccgtggcccagcgaggagacgacgtcggtgggagcagggcacgggcggaggcaccagggagcgggacgcggtatccaggggctgcaagcgccgctagggtttcgtggcccaacggggaggcgaggatgctatctgccttcgaccaacctttgctcaagaggaggaggatctggtagcacaacaagagatcctccccatgattctttggtggatatgggaatgacggaataa

SEQ ID NO: 2118 - DNA, 702 bp, Zea mays
  Peptide Sequence Number=SeqID_45493
atgcaggcggcatgcaaccgcaccaagggggcgcaccctttcgacttcgacacgtccagcatggaggcccaggcccacacgtcatgtaaccggcgcgccggttactgcgtacaagaaactgcaccgccactcgcgccactaccgtgcctcctcgactgcggaaccagtaccacgactcgaggcaaccctgcgcatgacccaatagtgccaaccaggcacatcggtcacgggtcagtcagccgcgggaggaggcgtgatggtcgatacggccagaaatgggccggcagtaatggcagtggcaggcgggcggaagcagcggacaggcggcacctttggcaggcgaagcaggcgacgcttcacctccgccataatgaccgcgtcaaaaaagggaccgggaaaggggataccccgaaagggatccttctccgcgaaggaaacgggccccgagcccccctactgatcagaggttcgaaggctggccccacggaggggttcaacagccgcctcagagcactcgggctccgcgcccactactggtcagaggttcgaaggccggcccctcggaagggttcaacggccgcctcaggccactcgggctccgcacccactactgatcaggggttcgtaggctggccctcgaagggttcgacagccgcctcagacgcagagcgagggatgaccctgggtacgttcgatacataa

SEQ ID NO: 2119 - DNA, 504 bp, Zea mays
  Peptide Sequence Number=SeqID_45494
atgaagaaatcaaacgggagcagtaagagggagatatgttgcgggggagagggggagaacaaggtatgtttggggaaaggaagagaccaccatgccaaagatgtcagcgaggcctcgagcagtagtgtcgtccacacaaacagggaggagggtggttttatggaaattaatggtaaggctagtagcaagagcaaagtcatcgatggcctttttaacagcggaaacagacgagacagatgccctagcaaaaataagcatatcatcgacatattgaagcaccgggcaagggacattatcaatagtcgggtggctaagatcctcgatattgatcctatggataataaggcgatggagaacgtcaacgacaatgatgaacaaatagggagatatcggatcaccttgacagaggccttcttgcaggaaatccaagtccccaaaacatcgtttagcaatacaaggcttttactcatgctaaggagatttttcatccagccaaactactga

SEQ ID NO: 2120 - DNA, 1284 bp, Zea mays
  Peptide Sequence Number=SeqID_45495
atgtcgtccccgccagagtttctggtttctgggttggatccctcggagttggagcgagcgaggatgggcggcggcaacggtgaaactacccagctgggggagccactgctggcgaagaaggcgaaggcgtaccgccctaggtgccccggctgccgggaggaccgcctcaacgcggagcgggagggggtcttccctctcaaggacgtcttcctcatctggctcgtcaccatcacctgcaataaggctgtttcggctcatgagctgggtcacctcaagtgcgatcatggtgtttggctcacttttgccaatatactcacaatgggagcatacactgtccctggtttcgacatggttgctggctttctggaagagcagctatatagatggctacgagctgcagagctgacttgtgacagggcagctcttcttgttgtgcaagacccgaagccacgggatggtggcggccttcgcgcgggcagcgtggctcaaggagtaccacgagaaggtgctggtggagatctacagatcaaatcttttttgagtgcatacactttatttcatcttggtttcatggttgggtacatgcgggtggccttcgcctacaacgtgtgcgggcagcgtacgaccagggccatcaatcctcatgcctacaccaatgagactgtgtttgttcagatatggtcgtccgcgtgctgggccgcgagggccagcacgacaccgtctgcgcgctgctcgacgaaatgccgctcccgcctggacgtccacgcttacaccatcgtgctgcacgcgctctcccgcgcgggccggtacgagcgcacgctcgagctcttcgctgagctccggcgccagggggtggcgcccacgctcgtcacctacaacgtcgtgctggacgtgtacggccggatgggccgctcgtggccgcggatcgtcgccctcctcgatgagatgcgcgctgccggggtcgagaccgacgacttcaccaccagcacggtcatcgccgcatgttgccgcgacgggctggttgacgaggcggtggcgtcaaccatagaattgtacattgaataccaaaaggagcgggttcacatggtggatgatgcgagactagcatttgaactaagcacagttctctctaaggaggggattgaagtctgcatggtaccttctgctgataggccagatgatgccaaatttgctgtaccacttctggagtctgactttgactttgccattgccaaactcaccattagattatcttcacttaatgatttcattagttgttattga

SEQ ID NO: 2121 - DNA, 387 bp, Zea mays
  Peptide Sequence Number=SeqID_45496
atggcggcggtgggtgcgctgcaaaggggggtgggtggcggtagtgcgctgcaaagggggcgtggggcggtggtagtgcgcatggaggcgggcacgcgtgcgggggcacgggtgagtggtggggtcaatgaccctgatgtttgtggtctctggttccaagaatctttgcctctctgtatgcttattccaggcttcaagggtaagcttcccggtatcttcttggagaaaacctttttaagaaaaacgaaaagaaaacacacaagctcagcaatgataagcacaaacaaatcaaatgttttgaataagggaagaatagagtttttccaaagcacggactactcagattcgaggctaagcataactactattgcttggctcctgaattga

SEQ ID NO: 2122 - DNA, 303 bp, Zea mays
  Peptide Sequence Number=SeqID_45497
atgaagatcaagacgatgagccacctcaagaggaggacattgatcaaggaggagatgaagatgatcaagacaagggagatgatcaagaaattcaaagtcaaagaccaccacacccaagagtccaccaagcaattcaaagagatcaccctgtcaactccatacttggtgacattcacaaggggtttggagcctctcgcccttacacaagatgttcacaaagaatcacagagcaagggagggattagcaactcacacacgacacaaagatcacagcgaatacgcacacgcaaaacccagacttga

SEQ ID NO: 2123 - DNA, 792 bp, Zea mays
  Peptide Sequence Number=SeqID_45498
atggcgcatcctgttgacgtggctggtctgcgccctaggttgggcgatgtggaagctcctccgaagccgaggtcgagtctgtcttccgtggccgaggtcgagtccgagcccctggttcgggcgaggcagagaccgtcggctgaggccagggcggagtccgagccctggggtcgggcgaagcggagttcgtcgtcttccggggctgagcccgagtccgagccctgggtcgggtggagcggacccgagtccgagccctgggtcgggcggagcagagttcgccgtcttccggggcttagcccgagtctgagccctgggtcgggcggagcggagttcgccgtcttccggggcttagcccgagtccgagccctgggtcgagcgaagcggagcttcctatggtgcctgcggccgggcctgactgcctgtcagcctcactctgtcaagtggtaccgcagtcggagcggcgcaggtggcgctgtctttctgtcaggccggtcagtggagcggcgaagtgacggcggtcacttcggctttctcggctggggggcgcgcgtcaggataaaggtgtcaggccgcctttgcattaaatgctcctgcgatttggtcggtcggtgcggcgatttggtcagggttgcttcttggcgaagacagggcctcgggcgagccgaaaatatgttcgccgctggaggggggcctcgggcgagacgaaaatcctccgagctttatgctgatgggggttaccagctgagaattagaagccttgagggtacccctaattatggtccccgacagtag

SEQ ID NO: 2124 - DNA, 156 bp, Zea mays
  Peptide Sequence Number=SeqID_45499
atggcgcggcggccccgcccgccctcggtgctcgcccaccccggcgcgctcgctcggcctggtgtagaccctcgcgccaccccttcgagcccaaaacctcgagtgtcccatgagaatcataaagtcatggcgatgcaccatggaagcgccgcttgg

SEQ ID NO: 2125 - DNA, 354 bp, Zea mays
  Peptide Sequence Number=SeqID_45500
atgggggagaatcctgagataggcctcacacaaatgaataaaaatggaaacttgcaagatagaattagggttcaagtgggtcaagttcagatcgtagaaatcaaggagtccgcggaagaagggagaaacgggaagagcaaggccgcagataagaaaaggaacatagacgacatactcatgggtgtcctacgtcggaacagtgaccccgcggcaaatccgccaagagcagagttcttttggagaattgaacacgactcggcgattacctctaaaacgctggtgtcatcagctatcgctcggcgattacctctaaaacgccggtatcatcagatatcgctcggcggttatttctaa

SEQ ID NO: 2126 - DNA, 1281 bp, Zea mays
  Peptide Sequence Number=SeqID_45501
atggcactcgacaaagaaggaaacctgggaactggcaaagccatcttcgccgagtgttgttgccaaggcactcggcaaagggactggcaaaggggcccactggaggactctttgccgagtgccagtccactagacactcggcaaagaagcctcctttgccgagtgcctacgagagctcttggcacagggactggcgggaccaaaacacaaaatcggccatcttctacctctggttcttggcttccacggtacaagggagacgaggagctagggggcatgttacctacgacggacagcactctgggcagggattcgacggagggggcgctagagaactcgctgacgtcctcgctagtgacggggaaggggcaggttgatggttttgaggtgttacaagcaggagcatcggcgccaggagctggagcagtcgggctcttctccctcgcctcagcaggaggtagagtctatgaggcgttgctctcccgtgctccgctagaggcttcccctgcaccaccactggtcgcctcggccgctggagtagctgttggaggagaccctgacgacagagacggcgacgacagcagctcgagccacagtactgacctctcagaggagcaggagccagagggatgggtcgcccgacccatcactcgtgacgccgctcgcgggtgtcacttccacgatgcgcttgacaccttgttgtgtcgagcacttgatcggcacacttggtccatcgagtatcgttgtgtggtctaccagcacagtcacggggcatactcggaccgctgggaggcgacttgcttggtgtgccgtccggaggatggtctccggggtgcggaggtctgctcggagcattattatatctctaagcgggactcagctgtggcatccatgcaggatgtcgcacagcgtgcgctttcgcactactgctcggtgctcggtggggtggccgatggtcttgacctgaggtattacccccatcgtccatctagcagcactggaggtgtggttgtctcacctgttggtgaggacaatactaggttgagcagcatagtcaacctagccatcgtgctaaacacggagctggaccacgctttagacgagcagagtagggctcgtgctgagatcgcccagttgcgtgctgagcgcgcggagtgccgtcacctagcagatggctctcccaccaccatcgggattcagcacccttaccgcttgcctcggcgtgggcaccatgtctatggcaaccccgactgcaggacccggataaatttagaaccatag

SEQ ID NO: 2127 - DNA, 168 bp, Zea mays
  Peptide Sequence Number=SeqID_45502
atggttacttttatgatgatgattaacaacggtgattataatcctgatctctggtatttcctcttggagggagtgcctctaggttgtccctattgttctcagtgctcaggaggtgaagctggcaacatgtatgacttcaaggagttccaggaatacgacgagttctag

SEQ ID NO: 2128 - DNA, 174 bp, Zea mays
  Peptide Sequence Number=SeqID_45503
atggtgggtacaagtgcggtcactgcacggcggcagccggggtcagtggagcattgtatccaaggcggtacgcttcaggatatggttgatggtgtgacttggcctaccaccctgccaccgggttggacggtcgagtgggatgctgctccgataggagaggagcaagaggagtag

SEQ ID NO: 2129 - DNA, 288 bp, Zea mays
  Peptide Sequence Number=SeqID_45504
atggctcaccggattgctctgcccacgcgcggaggcgggcgaccgaagtccggcgagggtgaatccgcctctccggtgaggcaatgcctcggctcaagctttgagaagcttcacggcttcacggggatgcggtccaggggctggggcgaggctgggggtcaacagaaggggctggccacaacggccgtgctcgggcagagatggtgggcggtgcttcggcagaagtatctgcttcggcagctggtgtcatctttgatgctgaggccggcggcagcgtttcctcaatag

SEQ ID NO: 2130 - DNA, 981 bp, Zea mays
  Peptide Sequence Number=SeqID_45505
atgaagaggacggtaggtgtggaagtcggcaacacaaggcgaggagctggagttcccgcctcttccgtagcgtctcccgcgcgccgcgtgtccgtgaccgctccgagcctaaacgtgacgcccacgaccggggatccaacactggtgatcgacgccaccaccatgacgggggctcctacaacgatgacctgccccatctccccgggctcgtgtctgccccccactccgggcctgcgtggcaggaccgtggacgcagccgggagacattattcgccccgtcgccatggacaccgcaaccggtcctcccccgtgggctccaccagcgccgcgagccctctctggtcgagctgttgtgctgcaactcgggatccccagcgggcaacggagaagaccgctaccccttcccatgactgccgctgcatcgtgtcgcaggcgatcagtgcggagagagcgtgccataggaatatcagaaccactcaacaccgctgccacagacggcgatgtcgagcccagcattcgcctgccaccatcacaatggatgcggcgttggaggttgctgtgggttcgaagacaactcaacctgtctccggcatggagaacgctcaacaggctacaactgctttcccagagctaggggagccggcccctaccactgtgaagaagcaagaagccaggccgacccgcaggagcatgtggctgcgacaatcacatggccgcatgggaacatctaggaacacgcgccaggtcctgctgaagcgcttgggcttgctgcctaaggaaggccagtcgtctgatcagtctgctacaagtgcctcgctagagacctgcatcaacctcttcaagggaccgctgtcgtccttggtgctacaagcactgatggacctctgcggaatccttccaccacaggacctgcggcgcaggaatcacgacagcagccaggggccttcaattgctgcgattctactggaccactcagcttag

SEQ ID NO: 2131 - DNA, 675 bp, Zea mays
  Peptide Sequence Number=SeqID_45506
atggcgcctcctgttgacgtggctggtctgcgccctaggttgggcgatgtggaagctcctccgaggtcggggtcgagtctgtcttccgtggccgtggtcgagtccgagcccctgggtcgggcgaggcggagaccgtcggctgaagccagggctgagtccgagccctggggtcgggcgaagcggagttcgtcgtcttctggggctgagcccaagtccgagccctgggtcgtgcggagcggagttcgccgtcttccgggacttagcccgagtccgagccctgggtcgggcggagcagagttcgccgtcttccgggacttagcccaagtccgagccctgggtcgggcggagtggagttcgccgtcttctggggctgagcccaagtccgagccctgggtcgggcggagcggagttcgtcgtcttctgggacttagcccgagtccgagccctaggtcgggcggagcggagttcgccgtcttccgggacttagcccgagtccgagccctgggtcgggcgaagcggagcttcctatggtgcctgcggccgggcctgactgcctgtcagcctcactctgtcatgtggcaccgcagtcggagcggcgcaggcggtgctgcctttctgtcaggccggccagtggagcggcgaagtgacggcggtcacttcggctctgtcggctga

SEQ ID NO: 2132 - DNA, 1542 bp, Zea mays
  Peptide Sequence Number=SeqID_45507
atgaacaagacaccggcactcaaggtgccattacaaacggaactccggttccacctccgcagggcggatgctgctgccacaaggccctcgcccatgtccccactcgaggggcgagaacaagcagaaggccgtagagttggaggtcagtccgcgggcggcaccgactatctcgtcggcggagaaacctcttctggctgcctcggcgggaggtggcaccggaagcggcgtcgaagccactcgggccggagagccagacacgcggcagctgccagcgccacgaacggcgaacgcccttccccccgatcactaagggaaggagcgggctgctgcccgcacggagacaggccccaactcggcgcactcctctccccagcactgatgatgaacatccttgaagctgagggaggggtgaaggccgcagcccggcttgcttctccccaccctggaactggtgatcagcgggtgaaagggcggaccgccatgcaggcggcatgcaaccgcaccaagggggcgcaccctttcggcttcaatgcgtccagcatggaggcccaggcccacacgtcatggaccgggaaaggggataccccgaaagggatccttctccgcgaaggaagcgggccccgagcccccctactgatcagaggttcgaaggctggcccctcggaagggttcaacagccgcctcagagaactccggctccgcgcccattactggctggcccccgaagggttcgacagccgcctcagacgcagagcgagggatgaccctgggtacgttcgatacataaccaaggctcgggctacgctcccgagggctcggcccccgtctcagcctcggacgacgatctccgtctcgcccgacccagggctcagactcggcctcggctccggaagacgaagaactccgccttgcccgacccagggctcggactcggcctcggctccggaagacgacgaactccgcctcgcccgaccccagggctcggactcagcctcggctccagaagacgacgaaatccgcctcgcccgaccccagggctcgaactcagccttggcctcagacaatggtctccgcctcgcccgacccagggctcggactcgacctcgacctcggaagacagactcgacctcgacctcggaggagccaccacctcgcccgacccagggctcggaccgaccacgtcacaggggggccatcattaccctacccctagctagctcaggctacggggaacaagaccggcgtcccatctggctcgccccgggctctcatacgagaaggttggccgcgcggcgaggacgggacggcgcgtacaagcctctcgctccctcccacgcggacgcttgtaaccccctgctgcaagcgcacccgacctgggcacaggacaacacgaaggccgcgggtttcccctttacgcctgtctccctcttcttgccccccttcgtgctccgtctcgcgccgacccatctgggctgggacacgcggcgacaatttactcgtcagtccagggaccccccgaggtcgaaacgccgacaaagctga

SEQ ID NO: 2133 - DNA, 2085 bp, Zea mays
  Peptide Sequence Number=SeqID_45508
atggaggtagtggagttggttccctgcgcccgcaacaagtggggcaattggcaagacttttggttctacgtcgcggagggtaccgtcgaagaccatccggggctccccgtgtctgagatgtgctcgcatttctactcagcatacccgccttttgaagtggcgaaggaggatgcggacaaaggggcccttcggtgcgccgccggcctgagcagcgggcgcgatttggttgaggaatttattgcgtacggggtatggcctttggcgcatggctgggcgttgggcgaagtgtgccctcgccggatgccttcccatggtgggaagctggtgcgaagtcctgtcttcgcgctggatttgcatagccgcgatccggccgcctttgtgcgtgaggcagaggatggggcggtgcggatcgttggtcggtacgtgctgaggacagagggccagcgtagctgggatatccatgggtcgaatgaccgtttgaacagggtttttgaaatgaatcgactgccgtatggtggttatcctggccaggacgatgtggatcgtcgcgggaagaaaccagcggtagagtttggagacgaccccgcgccggcggccgccccgtcctcgaagaagaggaaactaggtactgctgtgggaggacttggggtttccgatggttttgctagagaattgatgaggacatgcgcggccccgggtggaaggatgtcttcgcccgagctccgggagtcttcggcgcggatgctgagggttaccgggggttggtggccaaggaatgttcctatcccccgcgcggccggcgaagacttttttacatctcgcatggttcgccgaagaggcagcgggggggctgcgaaggctactgcccccggcggaggcctgccgccgctggcggcgaagtcggccgtccctgcatccagcggggcgccggaggctgcggttgccgccggtggttccaagactgcgaaggctgcaccggtgtccggcagggtgccggaggccgtgaaggcggcccgagggttgccgccgccgggcaagcgcgtcgccgactttgccaccgagattagcgtggaagactatcttgttgggacgaggcggcgttgtgtcccgccggctgaaggaggtgaaggaggcacaagtcaggcggctgacttcgcagaccgcgcggcgtcgggggccttcacggtggttgtgtctgccgaagtcgagaggcttcggacgcaacatgtcgacgccgtccgggaaaaatcggccgccgacagtaagtgccgcaagctggcagacaaggtggccgcgctggagggggagaagactgacctccggcgccagctggcggaggagaggagggaggccaatgaggccctcgccaaggcgcaggctacggagcgcgccgagcagttggaggagcggctccgcgccctgcagagccgtgtggagagggccgaagccgcgatgcgcacggaggctgagcggactcgcaaacagcttatggattcataccatgagctgggcgcgcggaccgctgagttcgaagtgccggaccgagagcccggacttcgctgcctggagtgggtgcaggaggagttgcaggcgctccccaccatcgtggaggggtttatgtcttatgcttccctggtcacctgcgagggggcgatgaacgcgctctctcgtgaagggtgccagcactatgaagtcttcgaccaagctgatgaagatttcgagcgtgatatctacaaggccgaggactctatagtgaaggaatccgccggggccctctacgaccggatgtggggcccctacggtcgagaggtggtcagggaatgggccgagacggcgagggcggcgcgtggtgagagggtggatgactttggggctttgaacagcacgctgcctgactcggagtcgaacccggcggaggccgccctagagccgctcccggagaccgccgaaggcgcccctgatgcccccacagtcgctgcggccagcgaaggcccacccccggagaccgccaaaggcgttcctgaagccccatgcagccgctgcagccggcgaaggcccgccgccaactgctgcgccgagggttga

SEQ ID NO: 2134 - DNA, 372 bp, Zea mays
  Peptide Sequence Number=SeqID_45509
atgggtacccaaggttcgggtatgttggtggcctttttcttcgctgaaggtcctccaagcaaaaacaccttcggcagggtgatatgcaagcagacacaacacgaagcatttgagaacaagtccccaacattggcacccacatccggtgaactcacttccactgttgagacgatggcttcgttcaacaaccaagctatagcaccttcggtcattgttggaacttgctctcagttgcaaggggatccaacgggggtgaacagtgacgttaaccgggttctcgcgcaagatggcaatagctccgttaatctagcctctcaagggcactgtgcgggggtatttataggtatccgagtgcccagcgtcttgtgttaa

SEQ ID NO: 2135 - DNA, 759 bp, Zea mays
  Peptide Sequence Number=SeqID_45510
atgacttctcacggatcctcggacgaagggaacgtacagtcccacacggacggacttgcacgagagggttttccccgtatcttgtgggaggctggtgttcgttggactccgagtcgttcggatacaaaggctgaggatactatagaggcgattgctctccacgggctgaccaccttctgtgattttcaccccttggaattgtctactcatcccattggcttattccctgctgaaaaagaggacgacccaatgtggaaagaccgagtggagcatgccaaggaaatatgggctctttacccagggcagactgcacacttgacggtgcgatgcatggatgctctgtatcatctgcaggtgaggcggggagaagcaatgtctcatctgatggcattattggaggctaccaagattaccttggataaaagagaggaacttgtgggagacctgtccactgagatggtggaaaaggacctacaagtggaacagatgtccaatgagatccaggagcttgaggaattagtgggaaccagggagaacaccattgaggttcttgaggatcagctcatcaacactcagcaacaactcgcggaagctaaccaacatttggatatgcaccaccaggagatccaggatatggaggccaacgaggatgtcaacatcgagggaggagaggagccggagcctgcctccagcttggacactgctggctcagggagacctccttcccccgagtcgagcgttgcctcgttcgctcattag

SEQ ID NO: 2136 - DNA, 156 bp, Zea mays
  Peptide Sequence Number=SeqID_45511
atggcgcccacgttcccgtgctcccgcgctcgcgcgcctctccccggcggctgtgatgatgatgaggaggatggttatgattatgcttacggcaatggtaaagaagaaggcgtcgagacggatctccaggagttgcgtgacttcgacaagttctag

SEQ ID NO: 2137 - DNA, 198 bp, Zea mays
  Peptide Sequence Number=SeqID_45512
atggccatgatgggttcaacatcagaaaagatgtacctctgtcaggtgaggaaacagcagagtttcgttgtttctgtgcaaaggtggtacccaaggaagaaccccagcagtgatgttggtcgcgggaggatgtttgcctcccacattgaaaacaataatcttatgtgcgggagggtgttttgcctccctggtctgtaa

SEQ ID NO: 2138 - DNA, 228 bp, Zea mays
  Peptide Sequence Number=SeqID_45513
atgtcgtgtgctcctgccatagttagcgcaaacaccaaaacaccaaaaggagaaaaaaccgacgacaacaggggaatggtggtgacaacttgctcgctcaatggaatgctgttatcaagttcttatacgttcttaccaagccacagtggtgaactgcaatcaacaggtggaaccggtgaaagattggatgagcgattgcgtggagaaacagaaatctgctcgtcgtag

SEQ ID NO: 2139 - DNA, 561 bp, Zea mays
  Peptide Sequence Number=SeqID_45514
atggccaatgtgctggatgctgtgttggagactacaaaggccttgagccttgctcctacaaagaaaattgttgaagctgccaaagcgcaaaccgaagccgaaactgggcaagcagaaaccgaagctacgaaggctcaggctgaagccaaagctgggccttcagcgcccagcgagatgaaggttgtcacgcctgaagttcaagctggtcagcaaacttcagataccattctgacagcagcccaagaccaacaccctcacacgcgcaccactcgcactgacgcgtggggcccggctgccagccctcacccgcttactatttctgttgctggcacgtgggcccggtaccgtgccctggcatcaaccactagcgattgggcccaggctgtcaggccacctaacccaacagcacgcccgagcttggcggacgagcgcgccaacgtcgcggcatcgggtgcggcaccccgaccattcctgtgcatacatatgttgaccgcgctagatcaaggaacgagtaacctagctgccactagtccagagaacaccggctgccgcaatcaatag

SEQ ID NO: 2140 - DNA, 1062 bp, Zea mays
  Peptide Sequence Number=SeqID_45515
atgtggaagctcctccgaagccgaggtcgagtctgtcttccgtggccgaggtcgggtccgagccccaggttcgggcgaggcggagatcgctggctgatgctggggcggagtccgagccctggggtcgggcgaagcggagttcgtcgtcttctggggccgagcccaagtccgagccctaggtcgggcgaggaggagatcgtcgtcttctgggacttagcccgagtccgagccctgggtcgggcggagttcgccgtcttccgggacttagcccgagtccgagccctaggtcgggcggagttcgccgtcttccaggacttagcccgagtccgagccctgggttgggcggagttcgccgtcttctgggacttagcccgagtccgagccctgggtcgggcggagcggagcttcctatggtgccttcggcagggcctgactgcctgtcagtctcactatgtcaagtggcaccgcagtcggagtggcgcaggcggcgctgtccttctgtcaggtcggcctttgcagctttatgctgatgggggttaccagctgagaattaggagccttgaggccgctatcgctggtatcctcagtttggtagctcttggcctcccagtcaccgacgagcagcccaccgagatccctcatatgctcatcctcttgcccgagcaatcatgcctccagccgccatcgcgccagacgctgtcggccgccctccaggctccaggtatgcagccgggccccctcctccctcctcccttcgccctccaggacccagatgatttcaatttatcgtgggaccaagttgatgaagctattggtgcatctgcacatctcagaggtcgtaattttcctaagagagctgctggtgggtgtgtgagaaggaatgaataccttgaggaagaggagactaatttagcaaatgaagatgacgaggatgaggaatatattcttgatgatcttgatgtggaagatgaaattgaaggaagcaatagtggaaacgatggtgatgatcaaggcgtgtatgctcatggtcttaatattgatgagttcgatgatggttactaa

SEQ ID NO: 2141 - DNA, 1398 bp, Zea mays
  Peptide Sequence Number=SeqID_45516
atgggcgcgtcgtcttcacgccgtgggagagggctcccctaccgcttcaggaggggacgcgagcctgcaggcgattcgactgctgcttccgcccggctacctcgagtcgcggcaccggttccgcagtcgagaaggcgcagcattggcgcaagtggtgcttcaaggatcttcatcacccgtgctggggaggagggcaggggcgagtcggggcctgcctccgcatgggccggcgacccgcttcttcctccgacgctcgggggagaggggcatcctccagctgtgcggaggaggcgtcctccagccatgcgggggaaggcgaactgctgctgcttggacaggatgcagctgtccgtcctccaccccgggcaacggtcgtgccgcgcgcgggtggctgctgtcaccgagttcgcggagggggcgaacttcgacgacgcgggcccggttggccgcgagcgtcgtcagctgcagcgtgcctggcacgttggctcagctggctctggtgccgcctctggtgttgcctcccaccgcttggtccgggcgtggctgtccgtccaccgcacgggcgactgtcgcactgcgcgcagcacgacgcctccgcgtggaggccggtgccggcccatctgcgagaacttgagtggggatctgccggtgcaggctggggcgtccgccattcgtcggcgtggcgctggcgcgcaggtggccgctgtcgtcggtgctgaggtggtggcagccagagaaggtttctccgccgacgagaccatcggcgccatctgcggtcgaacccccggctctttggctttgatggcttgtcctcgcccctcgtgtgggggtgtggacgagggcctttccacagcagcgtttgccctgaggtcatcactgctgttgtttagccgcccaaagcggaggtcgttgtcgctgctggtgcagtggtcgccggcgaaccacctggagtttgttgtcccacaggccctcttgtgtggaggttgttcatacccgtgggagtggaaccggagttccgtttgtaatggcaccctgagtatgggtaaccttcggctgctctgcgatgagctagagctagaggcagcggtgtcggcatggacagaggcggagttggctcgaaaagaggcttcatcggcccaggagcaggcggcttcccaggccgaggaggtgcagcagcggcggctggggcttggccaggtcatccgtgagcgggaccaaccccggagtcacgctgtcgaggccgtgagccgggctgatgtcctcgggggacagctggctgaggctacggagcggccagccgagatccttccgcccgtgtcgccgtccgaggccgggccagattccaccgaaggtggaaacgacgccgagggtgccgctgctccctttgtcgatgtctga

SEQ ID NO: 2142 - DNA, 75 bp, Zea mays
  Peptide Sequence Number=SeqID_45517
atggagaggaggagagtgccgtcgctagggcctgtgtggggaggagagttgaaaagtacaacttttggtgactag

SEQ ID NO: 2143 - DNA, 252 bp, Zea mays
  Peptide Sequence Number=SeqID_45518
atggatggcggcaaccacccctgcggcggtgagccctccatctcgcagcacctgcaaggcctccagaaggggctggagattcttctgtctctcgcacggggccccatagcgccagttggtgccggcggcggtcaccactcgttgagaaaacgatgggagcctcccatcgtcgttccgaagggaccaggaaaggggataccccgaaagggatccttcttcgcgaaggaagcaggcctagagccctcctactga

SEQ ID NO: 2144 - DNA, 357 bp, Zea mays
  Peptide Sequence Number=SeqID_45519
atggggcatcatcacatatctaggtcgtattttcgacagacagatataaaacggagtgggaatgcctcgattgatatcatgtccaagttcttcaagctgatggtgctacatataattcaaaagtacatggattttgcaacggacgaatgctcgcttggtgtagaagccatggagctctttggaccaaggggtgacaaaaatatgatggattgtaggaagaggcctttgcccaagtgtattgtctatggcaagcccaagcaccagggtatcacccaactcaagttccagaggtacaagaggtgtgtcgctgagagagctatacgcaagcttggtggactgagggttcttatgttatga

SEQ ID NO: 2145 - DNA, 633 bp, Zea mays
  Peptide Sequence Number=SeqID_45520
atggaccgaaggtccatgacacctggtatcagctccaggttatcctcaccaccaccagccgcccatccctcaccaccaccagccgccgcgccatcagccgccgcaacgccctctcacccgccctctccaactccagatgcattcactcggctcaaagagagttttggccgcttcgcagagcagtgggatcagttcgttgtgatgttccaccgctacaaggagaagacagagaaggaactccaagcagcggtgcggcttcagacggcagcgcgagggttcctggcacgccgccaggtacagtcccttcgtggggagaagcaccttgctgtggcctccagggccaccccatggctgtcatcacatgagcaagccgtggtgcgcctgcaagccgcagtgcacggcttccttgttaggcgggcggtgcggaagctgcacttgctgatcagctcatcgctgcaccaactcgcagcctgtgcgcccaaccaccaggtctcgtctatactttttgaaccccctgcagaagtcgagatctggatccttggattggtcactattgagctggtggacgtcgtccacgagtgtgatggcactgatcttcagggggacctcactgtcatcaaatactgttgctag

SEQ ID NO: 2146 - DNA, 2532 bp, Zea mays
  Peptide Sequence Number=SeqID_45521
atggaggtagttgagttggttccttgcgcccgcaacaagtggggcaattggcatgagttttggttctacgttgcggagggtaccgtcgaagaccatctggggctccccgtgtccgagatgtgctcgcatttttactcagcatacccgccttttgaagtggcggaggaggatgcggacgaaggggcccttcggtgcgccgccggcctgagcagtgggcgcgatttggttgaggaatttgtggcgtacggggtatggcctctggcgcatggctgggcgttgggcgaagtgtgccctcgccggatgccttcccatggtgggaagctggtgcgaagtcctgtcttcgcgctggatctgcaaagccgcgatccagccgcctttgtgcgtgaggcagaggatggggcggtgcggatcgttggtcggtacgtgtcgaggacagagggccagcgtagctgggatatccgtgggtcgaatgaccgtttgaacagggtttttgaattgaatcgactgccgtatggcggttaccccggccaagacggtgtggatcgtcgcgggaagaaaccggtggtagagtctggagacgaccccgcgctggcggccgccccgtcctccaagaagaggaaactaggtactgctatgggaggacttggggtttccgatggttttgctagagaattgatgaggacatgcgcggcctcggggggaaggatgacttcgcccgagctccgggagtcttcggcgcggatgctgagggttaccgagggttggtggcctaggaatgttcctatcccccgcgcggccggcgaagacttttttacatctcgcatggttcgtgaatggaaagtgtttccttacgggcggaatattgctgttgttgtgtcggcagtgatggacaaggatcgccagggagctgcacagaagcgtcaggcggtcgtcaggcttcatgaagccaggccgaagaggcagcggggggctgcgaaggctgctgcccccggcggaggccagccgccgctggcggcgaagtcggccgtccctgcatccattagggcgccggaggctgcggctgccgctggtggttccaagtctgggaagactgcaccggcgtccagtaaggtgccggaggccgcgaaggcgggccgaggtttgccgccgccgggcaagcgcgtcgccgacttcgccaccgacattagtttggaagactatcttgttgggtcggacgaaggccaacttgtcgttgttccgcctgccgcggggaccacggcggctgccgtagtgccaaaggcgaagggcggtgcccttagtgctggcggcgagatgccggcactcactgctgtgagggacgaggcgggtgctgtgtcccgccggttggaggagatgaaggaggcgctaagtcaggcgtctgacttcgcgggccgcgcggcgtcgggggccctaacggcagttgtgtctgccgaagtcgagagacttcggacgcaacatgctgacgccgtccgggagaagtcggccgccgacagtaagtgccgcaagctggcggacaaggtggccgcgctggagggggagaagactgacctccggcgccaactggcggaggagaggaaggaggccaatgaggccctcgccaaggcgcaggctgcgcaggcggaggccaatttggcgcggatggagggcggccttgccagggagcgcgccgagcagttggaggagcggctccgcgctctgcagagccgtgtggagagggccgaggccgcgacgcgcacggaggctgagcggactcgcaaacagcttatggattcgtaccatgagctgggtgcgcggaccgctgagtttgaagtgccggaccgagagcccggacttcgctgcctggagtgggtacaggaggagttgcaggcgctccccactatcgtggaggggtttatgtcttatgcttccctggtcacctgcgagggggcgatgaacgcgctctctcgcgaagggtgccggcactatgaagtcttcgaccaaggtgatgaggatttcgagcgtgatatctacaaggttgaggactctatagtgaaggaatccgccggagccctctacgaccagatgtggggcccccacggtcgagaggtggtcagggaacgggccgagacagcgaggggtcaggtaatgtttgacttttgtttggtgtttgttggatgtgggctatgtatgggtttgctgaatttatgtgctgtgtctcacgcagcgcgtggtgagagggtggatgactttggggctttgaacagcgtgctgcctgacccggagtcgaacccggcggaggccgtcctggagccgctcccggagaccgccggaggcgcccctgatgcccccgcagccgctgcggccggcggaggcccgcccccggagactaccgaaggcgttcctgatgcccccgcagccgctgcggccggcgaaggcccaccgccaactgctgcgccgagggctgaggatcctgtgacggtggcggagtcaacagcggaggctcccgtgacggctgggtcttcgcaggtggcgtag

SEQ ID NO: 2147 - DNA, 1020 bp, Zea mays
  Peptide Sequence Number=SeqID_45522
atgcaggcggcatgcaaccgcaccaagggggcacaccctttcgacttcgacgcgtccagcatggaggccaaggcccactcgtcatgcgggcggaagcagcagtcacgtcgtcagcaagctcacgccccctcttgggacaatgagagaaccctctcccacggcgtgaagacggcgcgtccgtgtttcgttcctcgaacggatcgcgcacgcacaacggctgccctgcgaaccactcgtctagtcgcattaactctgcggcaggacaggcagcacctttcgcaggcgaagcaggcgacgcttcacctcccccataacgaccacgtcaaaaaagggaccgggaaaggggatactctgaaagggatccttctccacgaaggaagcgggccccgagcccctctactgatcagaggttcgaaggctggcccctcggaagggttcaacagccgcctcagagcactcgggctccgcgcccactactggtcagaggttcgaaggctggcccctcggaagggttcaacggtcgcctcaggccactcgggctctgcgcccactactgatcaggggttcataggctggcccccgaagggttctgacagccgcctcagagcacgtagagcgagggatgaccctgggtacgttcgatacataaccaaggctcgggctacgctctcgagagtgaggctgacagcagccaagtccggcctcgggcgccataggaagctccgcctcgcccgaccccagggctcggactcagccttggctccggaagacgacgaactccgcctcgcccgaccccagggctcggactcagccttggctctggaagacgacgaactccacctcgcccgacccccgggctcggactcagcctcggctccggaagacgacgaactccgcctcgcccgaccccagggctcggactcagtctcggttccggaagacgacgaactccgcctcgcccgaccccagggctcggactcaacctcgacctcggaggagcctccgcctcgcccgacctag

SEQ ID NO: 2148 - DNA, 543 bp, Zea mays
  Peptide Sequence Number=SeqID_45523
atgccgaggaaggcgaactgctgctgcccagccagggtgcagcattccgtcctctgtccgggcgacggtggccagccgcaccgggggatctcacaacacgtcgtacgccgcgagggcggtactcgtgttctgggacggtcccattctcattttcgtggcgaggacgggagtgaggacctgccggtgtgctttggggcggccagcgcccgctggtgcggtgttggtgggcaggtggacgccgccgctggtgctgaggtggtggcagctggagaaggcctcgccgccgacgagatcgtcggcgccatctgcgctccgggtctccggctctttggctttgatagcttgtcctcgcccctcgagtggggacgtgggcgagaaccttgtcgcagcagcgtctgccctgaggtcattgctgctgctgtttggccgcccggagcggaggtcgttgtcgctgctgccggagtgggcggcggcgagccacctggaattttgtcgtctcacaggccctccaatgtggggggttgttcgtacctgcgggagtag

SEQ ID NO: 2149 - DNA, 2031 bp, Zea mays
  Peptide Sequence Number=SeqID_45524
atggagcagatccagtactccgagaagtactacgacgacacctatgaatacaggcacgtcgtcctcccgcccgaggtcgccaagctcctccccaggaacatccttctctccgagaagcagtggcggttggtgggtgtgcagcagagccgcgggtgggtgcactacgcgatccaccggccggagccgcacatcatgctgttccgccgcccgatcaactaccagcagcagcaggaggaagcggctgccgcgcatgtgctgcccaaccctactagttcttccctcgcgttcactccccagcgtgggaaaatcccggaattttcttgtttgtccactggttttcttgcgccaaaaccaggtttctccccgttgccgtggcagaactctgttcttgcccagtctagaagatctgcaccgttccaaccaccgactccggccgccaagcatatagccagcgcggcgaagaattcccaacgcgaaagccaaaacctcttcacttcacttcacgtcgacacgtgcggggagaatatgcgcgcgacaatcccagccctgtcgctcctggtgacgccgcggctcccctcgctcgccgtgccgctggctggaggccgcctccgcgtgggcggtcgttctcggacccgcctccgcgtggcggcgccgacgtccgtcccaggggaagcggcggagcaggcggagccgagcacgtcggcgcccgagtccggcgagaagttctcgtggagggatcactggtacccggtctccctcgtcgaggacctcgaccccagccgccccaccccgttccagctcctcaaccgcgacctcgtcatctggaaggaacccaagtccggcgagtgggtcgcgctcgacgaccgctgcccccaccgccttgccccgctctcggagggcaggatcgatgagacggggtgcttgcagtgctcgtatcacggatggtcattcgatggctccggcgcctgcaccaagatcccccaggccatgcccgagggtcctgaggcccgtgcggtgcggtcaccgaaggcgtgcgcgatcaagttccccaccctcgtctcccaggggctgctcttcgtgtggcccgatgagaatgggtgggagaaagcggccgccaccaagcctccaatgttgccgaaagaatttgaggacccggccttctccacggtgacaatccagagggacttgttctatggttatgatacgttgatggagaacgtctctgatccgtcccatatagaatttgctcaccacaaggttactggacgaagagatagagccaggcctttgacattcaggatggaatcaagtggtgcctggggttactcaggagcaaattctggtaatcctcgcattactgcaacttttgaggccccttgttatgcattaaacaaaatagagatagacacaaagttacccatttttggcgaccagaaatgggtcatatggatttgctctttcaacattccaatggccccagggaagactcgttctattcttgttcctcgatggtatgaacattggacttcaaatttggtctatgatggcgatatgatcgttcttcaaggccaggagaagattttcctagctgcaaccaaggagtcttctacggatattaatcagcagtacacaaagatcacattcacgcccacacaagctgatcgatttgttttagcattccgcacgtggctaaggaaatttggcaatagccagccggagtggtttggaaatcctacacaagaagcattgccttccaccgtcctttcaaagcgcgagatgctagacagatacgagcagcacacgttgaaatgctcgtcttgcaaaggagcatataatgctttccagaatctgcagaaggtattcatgggagcgacagtagtttgctgtgctgccgctggtattcctccagatgttcagctcaggctattgatcggtgcggctgctttggtcagtgccgctatagcatacgcattccatgagctccagaagaattttgtattcgtggattacgtgcatgctgacattgattga

SEQ ID NO: 2150 - DNA, 1026 bp, Zea mays
  Peptide Sequence Number=SeqID_45525
atggcactagcacacacggccaccgaatctagatgtcgccgagcaccctgccaccttgcgtcgtcctggccactgaccggcgccacccctcataaacgtgcgacctcaagcaccgccacgccgacgccggagcgtcgagccaccaccatcgcagcatcacacagccgcacgccgaggccacaaatgaccaacgtcgttggcccggcacctgtcgatgttgccgccatcatccgccagcagccacaggacgtgtgccccaccatctcgggtgtcgcccctgccctgaggccaccggatctggatggcaggccccaaaaccggtgtccctgcagacgtcgcggcctccgtgtcgaccacaaccgtgagcaccaccctgggtcatcgccaaacgccaaggccaccgcccgaacaccgctagtcggtcggtcgaaggaggttgtcgcccccaccacagcagcagtcaaggccgtgaggggagaggttgcaaagaagagagcgccaccccacaacacctgcacaagccccaaccaactgccgccaccagcccaaaaattgtgcctgatatgccgatttgactgtgtagcggtgatccgcagtgaaattccaggtgatggcatcatcacgctctgggtgaaactggatcttttggacttcagaccaaagaatgcagaactcatgaatgtggtggggaaaaagagacgaggcgccaagtcctttggcctttgccccctcacccaagcgttgccccagaaggagattttagaaccatcaccaatctcaatggtcgtcgatgccgcaaaaagcagtctatcaacatcagagcaaggaatctctaagttgtcccaaatattctgtgatgaggtgcaattatgccagagccatcgcgcgcgcaaggcacgtgcaaaagcgcccaaatcaagaactcccaagcccccaagggattttggcctcgccaccactttccgcccgtcagtcgttcagaaccagcccaaaggaattgtcttcttttggagtctagaaggctaa

SEQ ID NO: 2151 - DNA, 324 bp, Zea mays
  Peptide Sequence Number=SeqID_45526
atggcgaatagggttttctgcagcagcaagtcgcaagattcgacccttcaacaacttacatcagatactacaatagaggttgcaattgatataccttttccatttcgagcaataccagttgaagccattgaatcaagtggcaggcaagtgcttgaacagttactcagagtcatgcttccaagatttctgaagcagaattacctttcgctttattgtaaatcagacagtgatggaataagtcttgagcatctagaggacagcctgcttttgactgtcctctgtagtcctttagcatctagaggacagcttgactgtcctctgtag

SEQ ID NO: 2152 - DNA, 444 bp, Zea mays
  Peptide Sequence Number=SeqID_45527
atgggccaaatcgcctttaccaaccgaccgtatcgcaggcgcgttcaatgcgaagattgcctgacaccttatcttgacacgcgcgccgcagtcggcaaggtcgaagtgaccgcagtcacttcacccccttcatttaccgatctgacaggaaaacagcgccgctcgccccgctccgactgttgtgctaaccacccgggtaaggctgacaacagccaagttcagcctcgggcgcaacaggaagctccgcctcacccgaccttaggcctcggcctcgggaggaggtctcggcctcgcccgaccccaagactcgacctcagcctcggcctcgggaggaatcacaccctcgcccgaccccggcctcggcctcgggagaagtctccgcctcgtccgaccttgggctcggaccgaccgcgccacagggatacatcattaccctacccctag

SEQ ID NO: 2153 - DNA, 426 bp, Zea mays
  Peptide Sequence Number=SeqID_45528
atggagatcaacctgagcagtgagcaactggatggtagtgtcatgtcagccgtcgttgctgattcgaccccgcctctagcgcgccagggtgagcaagaactaatgcttcgaagaattttgcacatgactcatttgatggtgtatgaagtattgaagccaatgagcaacaaaggcaacagttcagcaatattccaaggtttcttctcacaggaaaactacaccataaatgatagaacagaggaactgaggaagtgcgtccgccgcctgctagtggctggtggagatagagatgcccctcttttttcaggcgagaagacggcagcggagatctggggctcaccttctggagttgttctctacgtcctgtgtatgcgctgtggtagtacggttgctccaccaccgccagttgaaggactcatgcactga

SEQ ID NO: 2154 - DNA, 159 bp, Zea mays
  Peptide Sequence Number=SeqID_45529
atggcgagagtagcatgtaccctccgtggcaagaggctagacggtggtgtatctgtgctctcggtgaagaagcaacgaacttttgttgcttctgttcaaaggtggtacccaaagaagagaaccaaggctaaagctgcgggagggaaggccctccgttaa

SEQ ID NO: 2155 - DNA, 1713 bp, Zea mays
  Peptide Sequence Number=SeqID_45530
atggccctatggcacatttctcttcatgttgtccactaccaggagccttacccctatgacacaggcgcaatgacagactgtactgctggcacacaaagaacgtgcaacaactgcccctacgcgtgctacagtggcagaggatggagggatggcaacgtgcacattttacccgtgtgcccgcggctcaccaccctgggcattgcgcccccttcccgcaaactccccccttcagccatggtcaagccgccgccgccgccgcccacctccacctgtacctccgacaccccgctacccaccccagggggcctcctcggctcgctctcctcctccgcgcactccctcctcgccgcggcgcgccgctccccggtcaccaccctggtcgccgccttcttcctcctcgcgctcttcatgtacggcgaggacgtccgcaccatcgccgagctttccatcgacgactacctctaccccgacgccgacttctacaacgtctccgccctcccgcccctcgcgctgcccccggccacctgcgacctctcccgcggccgctgggtcttcgacaacgtctccctcccggcgtatcgggagaaggactgcaccttcctcaccaagcaggtcacctgcctcgccaacggacgacccgacgatctgtggcagtactggaaatggcagcccaacgagtgctccctccccacgttcgacgctcggaggttcatggaggcgatgcgcgggaagcggctcatgttcgtgggggactcgctcaaccgcaaccagtgggagtcgctggtgtgcttggtgcagcccattctgtcgaagggcaggaagaagatcgtcaagcggggctccctcactgtattccacgccaaggagtaccgcgccaccctcgaattctactgggcgcccttcctcgtcgagtccaactccgataaccccaagatccacagcatcgagcaccggatcatcaggcccgagcggatcgaggggcacgccaagtactggagaggcgtcgactacctcatcttcaacacctacatctggtggatgaacacagccgacatgaaagtcaggagaccaaattcgaggtattggtctgaacatgacgaggttcccaggattgaggcgtatggactggtgttcaagacgtggtctgattggctcaatgacaacatcgatcctgaccgcacacttgtattcttcatgacaatttctccactccacatcaggcgttgtgtgattaacatggtatatgaaaatcgagtgccggtctcgctaacacttgtctacgttcttttctatgaaaacagcccacataactgggggaacccggacgggatcaggtgcgtgaaggagacgcttccgtaccagaactacagccagccgctggacctgtaccacgacatgcggatgcacgacctggtggtgaaggtggccagcgccatggcgaaggtgccagtgacggtgatcaacatcaccaggatgtcggactaccggaaggacgcacatacggggctgtactccatccggcaagggaagctgctgacgccggagcagaagggggacccggagaagttcgcggactgcatccactggtgcctccccggcgtgccggacgtgtggaaccagatactctacacgaggatcctttccaaaccgccttcttggggttcttctaatgttagccccttatctccatcccagtccctgcctccccggtga

SEQ ID NO: 2156 - DNA, 60 bp, Zea mays
  Peptide Sequence Number=SeqID_45531
atgggccctccgctcctgaaagttctactagaactaatcagggttgagactaaattttag

SEQ ID NO: 2157 - DNA, 618 bp, Zea mays
  Peptide Sequence Number=SeqID_45532
atgggcatcacggcgtgctgctcactgcgcaacaaaacagcaagccggcagcgcgcggagccgtcggggctgctgcacatttcgtcgagcaccttgcacacattggaaaggagcaagggaaggggttgtcctaggaaggtgggcacagggaacttggacgccacggctgctgaccgagcggagaggggcgctgtgcagggcttcgggcagaggtggaagaaggggttcgacatccaagctgttggcgcccatggagagggggcagagggaggcggccatggggaggggagcgaggagggagacgcagggagctcgggcttgagccatggatccgagctgctgggcgccgaccatggagcaggggcttgcccagaggacgttcgccatgggaggagcaaagagctcgcagggagaaacggcgaccggaaggggagctcggctggcgtccagcttggaggaaggagctcgccgcaggggaaggctggcggccatgggactcctgtgcgctggtggctgttgccgtggagcagggaggaagaagggcgcttgctgctgctcgtgggaggaagcagccagggagaaatgaaagtggcggctaggggtgggagtgaaaaatag

SEQ ID NO: 2158 - DNA, 1122 bp, Zea mays
  Peptide Sequence Number=SeqID_45533
atggccagcatatggcttcgtgttcgccggagctccgtgcgtgttcagcctcaagtttatgtgcgcgcgctccactattccgtggccgagttcctcgctgccacagttatccgcaagaaatctcaagagtcgggtgaagacggagccatcagcgtgggattcaccaagtgcgtgacaaaagctcggacatcctgcgcgactcaagttcggttcgtcaaaaccgccctcgccggatttttctcagccgagctcgtcttctacggcgccgcccctgggagtcttcaaatatcagtcgtgctttgcttcttctccgtggccggcgtcctctaccccatccatggccagagcttcctgtccgacgcccagccgaagccgcccagccgaagtctctttcctggccgcacgcccagcccgctctccttcctctcagttccgtgctctgctcggccggatttccatggcgcgcgtccagcttctggcgccttgctctctctctatttctcctgccgtgagcccggtgcccagccccaactccctgccgagtgctctctgcgcgcgtcttgctcgctactcgcccagctctctgttcgccggcgtcctctgcttactcgtccccagctcgtccgaccactgcgcgtcgcggagcttcgtttctctggtcgtcgtatcctctcggcctcctgctcgacgggcttagcttcgagctcgcccaactcggccgtcctccaagtttcgcccagcccagtcgcgcgtctgctctgctcgtcgacacgcgttcctctctccgcctgccgcgtccggccgaacgtccctgcatcgcggcttctcagctcgccgcgttctcttgggtctctgtgccgcgctctgggtggtcgtgagatatctgatgaagctattaagaagattgcaaacggatctcatgatgctcaagaagaagccaaacaagctgaagaagctgctgagcgtgcaaggcttatagctgaactttcaccccacaaccccgaagttgacccggtcttgaaggaagcattagatattattaaaattgctaatgaagctgttgacgaagctatcaagagactgctgaatgaagccgctgagaaagtgttgaaagaagattaa

SEQ ID NO: 2159 - DNA, 108 bp, Zea mays
  Peptide Sequence Number=SeqID_45534
atgtcgaaagaccaacttgcagatagccttgcctacaatagtctgaagggcttaattctaagcaaggctttgaaggcccagaaggaagcagaagatgaaagctcataa

SEQ ID NO: 2160 - DNA, 441 bp, Zea mays
  Peptide Sequence Number=SeqID_45535
atgggcaagaacaacaaacgcaagcgtgagccgactcctccatcagaggacttcggtgactcagagtactcagaggaggagttctcctctgggtccgaggggtctccggctcccattcctctgcgtgagtcgtctgacgattctgacgactcccaagggcttgcggcggaggtctggacttacatccgggccgtcgagcgctccaggctcgagggctcggatgagtcggagtactcctcggacgaggaggactcgtccgaggaggacggtgacgacgatggcgaggacgacgacgacgacgacaacgacgacgaaggcggtggcggcggtgacggtgacggcggcggcggcagcggcagcaaggatggcgacggcggcagcagcaggggcggcagcggcggtggcggcagcagcaagggcagcaacaaggccagtggctaa

SEQ ID NO: 2161 - DNA, 603 bp, Zea mays
  Peptide Sequence Number=SeqID_45536
atgtccggtgaccgttggcgcgaagtagccgttgctccgctggctcaccggacagtctggtgtacaccagacagtccggtgaattatagcggagcgaattcccgaggctggcgagttccagagccgctcttccttggggcaccggacactatccagtgtacaccggacagtccggtgaattatagcggagcgcctctggattttcctgaaggtgacgagtttgacttggagtcccctggtgcacaggacagtccgaaatcttatgacaaccgatttgattatcacccataccctaaggaacaacgatacccaaattcacaaaatttttggatgaccacgagtgatggtccaaaggctgagttgattatggttgtggacatcacaagtgaagaacattgcttaagtgagactcgtgtgcataactcggagacaaccgatcaagccaaggatggaggcaagaagagcttcgaggtatcaagtgcatgggagaaggtcatgaaggtcgaggaacccaaagccaagggtgaagaagaaacttgcaaagtcaaggttgatcgagttgagaagagatttggtgcatcgaggatcacgactaaagaataa

SEQ ID NO: 2162 - DNA, 252 bp, Zea mays
  Peptide Sequence Number=SeqID_45537
atgacgatttgtggagttggaggaagtgatcctattctagccaaaggagttacatccatggagcttaccatcaagaacaagactttgttcgtgtccttctttgtcatggaggtgaaaggagatgatgttgaaattgtctatacaaattcatcatcttatgttaatatggttgacgagatcaataagtttggccaaggtttcacattagccaacccattggaaaaagattatattgaggatggctctgtctag

SEQ ID NO: 2163 - DNA, 234 bp, Zea mays
  Peptide Sequence Number=SeqID_45538
atggatcaccaccttggcgtacaatgcctcactgaccccgactgctgtcgtgcagtgaccgcacttgtacccaccataaccggaatgggagaccacgtctcaggtcacgtgaggggcaaagtctgctgccaggttcactcagacaacgcattcccatggatcgttgtccacataccatcatcattacgatataaaaatggatacaaccaattcctgacctcgcgcgagtgctag

SEQ ID NO: 2164 - DNA, 885 bp, Zea mays
  Peptide Sequence Number=SeqID_45539
atgacttcttacaaatcctcggaaggagggaacgcacattcccacacggatgggcttgcacgagagggttttccccgcattctgtgggaggtactgcagggagctggttatactacgcctccccagtatgcggtgcagttattcgaggagcaccgggtaccccgctgtagggtgaggatgactttggagcctcatcccttgcagccaggctggcgttcgttggactccgagtcgttcggtttcagggctgagaatacaatcgagtccaccgctctccacgtgctgacgaccttctgtggtttttaccccttggagctatcaactcatcccattggcttgttccccgctgagaaggaggacgacccaatgtggaaggatcgagtgaagcatgccaaggatgtgtgggctctttacccgggacagactgctcacttgacggttcggtgcatgaaggccctgtatcgtctgcaggcagtgcgaggtgaggcaatgtcccaactaatgggaatagtggaatctaccaagatcaccctggataatagggaggaccttgtggaagacctatccactgaactggtagagaaggacctccaggtggagcagatggccactcaaatccaagagcttttggatcaggtagaggccagggagaacaccatcgaggttctggaagatcaactccagaccacccaacaacagcttgaggaagccaaccagcacttggatctgcaccatcaagagattcaatacatggaggtagaaggggccgatgaggatgtcgacatcgagggaggagaggagccggagcctgcatctagcttggacactgctggctcagggagaacaccttcccccgagtctatcgttgcctcgtttgcccattag

SEQ ID NO: 2165 - DNA, 192 bp, Zea mays
  Peptide Sequence Number=SeqID_45540
atggggcgtgggagcggtggcgagagtagcgtgtaccctccgtggcaagaggctggacggtggtgtagctgtgctctcggatccactttagtaagcatttctgcaaaaacagagtcattgatgattgaaaagccttaccttgactcccatataaccagcatacccttgagagtcttttctttagtcgggtaa

SEQ ID NO: 2166 - DNA, 252 bp, Zea mays
  Peptide Sequence Number=SeqID_45541
atgaagggtccctgcactccaacatgttgtacccttctttgtgcctccttcgtctacttcttgttagctggtttagaacttgaatcgcccgtgtttgggaacaccaacttcatagctgaagatgtgatggttttggttccttgcgaagtcattgtcgcggtcgtggaagtgagttcaccggaggtgggcgccaatgttggtcacttgttctcaaagactgtgaatcaagaacaaggcaacacaattgtttaa

SEQ ID NO: 2167 - DNA, 1887 bp, Zea mays
  Peptide Sequence Number=SeqID_45542
atgggtaaacagagccaatgtttccacaaatggtattttgctatgaccacaccaatatctcgaagacaaagtgccacacacttcatggtacgatacgaagaacatgattttcttgaaaaatctggggtctatgcagtagaattcagtgatgtatttcacatctacaatgatcttgcccttgacatatccttacatcggagttggatgctatgcatgaggaagatagacaaatacagaggcatagttggctttttggatctaaagatgatcattttaaagagaatcaatgaagaggctgatgaagtcgaagcatacattgtgaaagcattgcttgctcagcaggacaaggagtgcatatttgttgtttgccaggaaggggcttttggtgcttatgtcgacaaaaaggttgccataacaagaattttggtcgcacagttatatggaaacattttcagacaatatgtgatgtaccacatgttatcctttgcggataatcttagtttggaccgtgatcgatatcctcagggtcatgctggttttgcaacctgtccattattgcctgatgagatagcaaatgtccgagaacggttgctcgacttcttcatgaatgaggtgatagacattggtggatcatgcagggaggacgctgtcaagatattacttggtctgcatgagaaatatgagacttaccataaatgcaaatacactttagaagggatcaatgcagtagtttacttgtcagcaagatacatccctgacagacatcttcctgataaggttattgatctgattgatgaagctggcagtagagctcagatggaatcatttaaaaggaagaaggaagaacaatgctccattctctccaagtcaccagacgaatattggcaagagattagagctgttcagagtacacatgaagtggcgctggctaacaggttgaagcattctcttgatgagaatgacaaagaggatggtgttaatattgaagtcataggggacaacaagattgcttcgccatcaatgcctccaacttcagtcgatgaacttattctggttggttcagagaaaattgcaagagttacatcattgtggtcagggatacttttggctctactacctttacctggcgatgctaaaagccaaccagcactaacaacaacgactcaagttgctgccacacaaacagctgcactagcagtggacgctaccacagaagccaccacagaatcagatcctgcaacgccaacacctctttcaccttatacaaattacccagatctcaaaccgccatcaacccctatgccaccgttagtggagtctgaagtcgagacgaaggctggcagcaccgtgactgaagaaccagcagtggtcaattctgcacctatagcagacgctagcactgggtcatctcctgtcactactaggcccagacctcagtcaccataccctaatgttagtgtaaacctgaaacttcttagccatctgcataaaaacaccgtttgcatcaggttatgctcatcattctttgatctgtatgcagtatccagatttcaagccaccatcctcgccttcgccgtcagcaccttaatttggcaagagtacaagaaaccgggtctagaggatattaaagaagttgagttgttcatatggagccggcatctcaccagaggtttcaagctctgcaaggtgaggtctgttcagtttggccagaaaggcatcccctacctgaacacctacgacggccgcaccatccgctaccccgacccgctcatcaaggccaatgacaccatcaagatcgatctggagaccaacaagatcatggacttcttcaagtttgatgtcggcaacatggtcatggtgaccgcgggaggaacaccaggcgtgtag

SEQ ID NO: 2168 - DNA, 89 bp, Zea mays
  Peptide Sequence Number=SeqID_45543
atggagtctctggcgtgcgggagactggagagaaaaccccccaaaaaactcccgtgctcgtttggcggaataggcctcggggtgttggg

SEQ ID NO: 2169 - DNA, 525 bp, Zea mays
  Peptide Sequence Number=SeqID_45544
atggcgcctcctgtcgacgtggctggcctgcgccctaggttgggcaatgtggaagctcctccgaagccgaggtcgagtctatcttccgtggccgaggtcgagtccgagcccctaggtcgggcgaggcggaggccgtcggctgaggccagggcggagtccgagccctggggtcgggcgaagcggagttcgtcgtcttctggggctgagcccgagtccgagccctgggtcgggcggagcggagttcgccgtcttccgggacttagcccaagtccgagccctgggtcgggcgaagcggagcttcctatggtcggtcaatggagcggcgaagtgacggcggtcacttcggctctgccggctgggggcgcgcgtcaggataaaggtggcctcgggcgagccggagatatattcgccgttggaggggggcctcgggcgagacggaaatcctccgggctttatgctgatgggggttaccagctgagaattaggagccttgagggtacccctaattatggtccccgacagtag

SEQ ID NO: 2170 - DNA, 534 bp, Zea mays
  Peptide Sequence Number=SeqID_45545
atggctgaaaggtaccaactcccacggagttgcgctcctccggcgatgaggcggaaagacggcgggtatcccccatccgggggcttggaaggtggaaagacacgatgcataagggagcgcgaagacatggtcgccttccaagggggtcgccctccttttaaaggcgactatccctacttgcgtccccagccgtcacgggctgagtcttctccaacacgctccaaggccctcccctgcggcgcgggggctaggtcccacatgtcatgcaagccggctcagagcagaagaagccaaaccaccgtgcgcgggaccgggaaagggggataccccgaaaaggatccttccctgttaaggaaccaggctccgagccaccctactgatcagaggttcgaaggctggccccccgaaagggttcgacagccgcctcagatcgcgtgggccctacacccactactggtcagaggttcgaaggtcagcccctcggaagggttccacgaccgcctcaggctactcgggcttcgcgcccattactga

SEQ ID NO: 2171 - DNA, 2658 bp, Zea mays
  Peptide Sequence Number=SeqID_45546
atggactttggtgattacgctaacaggccatcaacctcttcagcggtctcacgagggatttcaccaagacttcaattagcctctgatggtgttggcactgtatcaaaaggctcagatcttgctgatggactagacaggccatcaacctcatatgcaacaccgcgaggtatgtcaccacgctgcagggttgcatctgatgccatcaatgtcacttcagaaaggatcaagttcactgaaaaggattccagaactgtgtcctcctcagttgcacctagaggggtctcaacattaagacaacttgcctctgatggtgttaaaaccatatcaaaaagtatggatcttgttgagaaagacactagacctactacctcatcagctgcatcacgagggctttcaccaagaaggcgactttcgtcagatggtgtcaatgtgattataaagagcatggatcttgttgaaaacaataacaaacttgtcaccatgtcagctgcagcacgaggggtttcaccaagaagacgactcgcctcagacgttagcaatgtgatatcaatgagcattgatctcattgaaaacagtaacaaacccttagccatgtcagctgtagcacgaggggtttcaccaagaagacagctcacttctgatggtatagaatgtatatcaaagagcacagacattactgaaaaatgtatcagaccttcaacaccgtcaacttcatcacgagggttttcgccaagaagacggctggcctctgatggtatcaatgctgcattgaacaaagaatttgctgacaaaaactgtagaccatcttcctcatcagctgctttacgaggggtttctcccagaagcagggttgcctctaatgccatatcaacaggcatgacttttgctgaaaaagacagcagactgtccacagcatcaagtgcgtcgtgtcagactctgcagagcagtaggcttgaatctgatggtgttaataccctatcaaaaggtgtggagagcccgtcaactgcatctggttgcatttcagacagtaaacttgatgacactggtgctctagtaaaaaacatatatgttactgagaaacttattgtgtcaacggaatacggtggtgatggttacgatccaggaagaacagattctagtgacatagctactagtgcagtctcatcatcccttgcatctcaagagccatcactgagacctgttactgatgatgataagaatgcatcagagaatgttgttgtaaaccaaaaaggtaacagaacattgacggtgaaggttccatctcgaggagcttctccaacaaggcgacttgcatccgatggcactgatactatatctaaaagcatggattttgctgaggaagataagaaacccatgacagttccatcacgtggaatgtcaccaagaagaacggcgagatctgaaagtgctaatataatgtcaaaaattatggattttgctgatgaatgtaatggaccagtatcttcaatggttccttcacgagtgttttctacaagaagagtactaggaccagatggtgttaatgccatgtcaagaagcatggatctaactgataagaccagacagcaaatatctttaactgtgcaaccatccagagtttcaccaaggaaaacgcctcttgcttataacagaagaaaaggccctgaaattttatcaggtgatgttgagagccctggttctgctgatggaaatgaaggtcaagaggagaatgccagttcaagtccagatggaccttcaaataattcagaaaaatctacacctccaaagcagttagctaggggatcatcatcaccatcacgtgttttaatacgcccttcatcaccatccaatgcttcgtcgtcaccatcatttgcctctaggagattaccaagcccatcaaggactagaccctcaacacctgtctcaccatgtagttctgccagatctgattcaggctcttcaattcttagctacattgttgatgctacaagagggaagaagagcccagctcacatggaatatgtccatcagttgcgcctcctgcataataggaacttacaatggcgttttaccaattcttatgttgatgaaatgctgtcaattcagaaattaagcgccgagtcgcagcgtcgtgatggtgcgaatgatgcgactgaagtagagactggtgtgtgctccaagaagacgatagcccctagatgccgaggtagccgaagtcgaggtggctgcgatcgggagacacacaacagaagcctgatcttcgggaggggtcgacgtttgagcgtcaacgatcggcagggcgacacaacaaaagggcactggcaggctgaccttcctgcttcttcgatcgtccatgcgtcaaggagccccgccagggaggccgacagcagcgcacgcgtctgcgccggtcctggtgtccacgcccacgacaaaaagaaggggaaacgacagatccgaccgggaaggccatggcagcgacagatccagccgagaagacgcgatccgaccaaagggacgacggatcaaagccgagaaggtcgcagcaacgaggatccggccgcgacagcgacggatccagcgaaggcgatgaagggggagggcgacggggcgagtccagccggacaaggggcctacaccggacctggcaggattggttga

SEQ ID NO: 2172 - DNA, 1590 bp, Zea mays
  Peptide Sequence Number=SeqID_45547
atgccatcagaagcaagccttcttcgtggagacgtcccatgtgatatggaagatgaggtggatggcctgttatcgtttccagaaaacaccgaactccttgatatagtctcaagaccatcagaggcaagtcttctccttggagaaacccctcgaggtggaattgatgagctgactactctgctatccttttcagcaaaatctatatttttcacaatatcattaacactatcagaggtgggtctccttcttggagaaacccctcttgatgaagctggtatcctatctttttcagggaaatcaacgcttttcattaaatcagcaatgccaccagaagttgttcttctcggtgaaagtcctcttgatgaagacaggttggaaacaggtccaattaatctctctgatgattttgtactagtctgcgatgcagcattaaacacacttgataatgatgcacttggtgcaatgctgggtgatgaaactggcgaggagagtgtactgttatcattttcagtaaaatccacgctttctgatagggtcatggtgccatctgatgcagctgttgttattggtgacacccttcttgatgaaattgccgaggatgaaagtttgagatctctacgaacaacggcctttttggacacatcatctgcatcattagaaggtgactttcttggtgtcttggtgctatctgatgcagctgttgttattggtgacacccttcttgatgaaattgccaaggatgaaagtttgagatctctacgaacaacagcctttttggacgcatcttctgcatcattagaaggtgactttcttggtgtcctggtgccatctgatgcagctgttgttgttggtgacacccttcttgatgaaattgccaaggaagaaagtttgagatctctacgaacaacggcctttttggacgcatcatctgcatcattagaaggtgactttcttggtgaccccccttgtgatgacattgacgaagagaccagccggtcaattttatcagcaagatcaatacttcttgacaaggtatttgcagcggagtacattgttgttcgcttaggggtagctctccctctcaacgggctcctcttcctatcagctggtgctgcatccctcgtcttggcctcgcctgcagaagaggtactagaattccttttcccctttgattcgacctggaaagaagaagacagactccgcattgaaggccacaacccatcaggagcccggcaacccgacaacctcctcggagcgctttgcgtctctgaaacggcatcatgcaccggcgtggacgagctggaggatgaggaggacgggctggaaggcgcagacgatggcgacgccgaggcagagatcctggacggggtagtgggccgcgagccgcccgaagacggcctcgacggagtcgcctgccgccgttcggtggactgggacctcttcgcctgtgacccagctggcgtcggggacgacgctcgaccgccggcattgggtgacggtgacgggtgcctcctcggaatagtagatgcttctgctggcatcgcagctaccttgcgcttcaccgcagcatcagcatggccgttagcataa

SEQ ID NO: 2173 - DNA, 168 bp, Zea mays
  Peptide Sequence Number=SeqID_45548
atggagagggagcggcaggagaagctgaagaagaggctcgagcaggagaaggccgactccgacaaggccaagcccgccgacgccgacaagaggggatttagaatggggggatttgggtctaattctgtagccgtgtgtgaatggcataatgctgtggaccctaattga

SEQ ID NO: 2174 - DNA, 711 bp, Zea mays
  Peptide Sequence Number=SeqID_45549
atgaccgcgtcaaaaaaggctccgagcctccctactgatcagaggttcgaaggctggcccctcggaggggttcaacagctgcctcagagcgcgtgggttctgcgcccactactggctggccctcgaagggttcacagccgcctcagacatagagcgagggatgaccctgggtacgttcgatacataaccgaggctcgggctacgctcccgagggctcggactcgggctcagccccggaagacggcgaactccgctccgcccgacccagggctcggactcgagctcagccccggaagacggcaaactccgctccgcccgacccagggctcggactcgggctcagccccggaagacgacgaactccgtttcgcccgaccccagggctcggactcagccctggcttcagccgacggtctccgcctcgcccgacccaggggctcgaactcgacctcggcctcggaagacagactcgacctcgacctcggaggagcctccacatcgcccaacctagggcacggaccgaccacgtcaacaggaggcgccatcattaccctacctcaagctgactcaggctacgggaaacaagaccagcgtcccgtctggctcgctccgccagacaagctccagcgctcctccgacggccacgacaccacacgaaccgggtgccaaaacctctccggctgccacgatggcatgtacatagggcgctag

SEQ ID NO: 2175 - DNA, 723 bp, Zea mays
  Peptide Sequence Number=SeqID_45550
atggcgcggttaggacacgcggcgcaaggccggacgacggctatcaccggcgttcttatcggcttctaccaggaattcaaatgggacgatgtgaaggttgacaagcatcgggagaattaccttggtcatagtgttaaggctccggttggtagatggcagaaaggaaaggatctttactggtatactcgggataagaaatccgacacggaagatgctcttaaggaagaaatcaggagagtgaaggaagaggaggaacaggctatgcgtgaggctcttggcttagctcctaagcgcagcaatcgaactcagggtaatcgcttggataagcatgaatatgctgagctgattaagagaggatcaactgcggaggacttgggagcagggcacgctgaagcagcacaagtgcagggtctaggattgtacaaggcccctcgcgatgagggtggatcaagttctttgagccttgaccctcaaatggagcctgagcaggctgaacccctactagcacccaagcaggaggatgatttggaagataataggaaggggaaaaggccacgtgaacgtgacgagaagagaggggagaaggagcggaaacgagacaggcatggtgatggaaaggagaggaggcgggacaagcacgagaggaggcacgacttggaggacagatcaaagcggcaccgcaaagacaagcagaagaggaggcacgattccgattctgattga

SEQ ID NO: 2176 - DNA, 858 bp, Zea mays
  Peptide Sequence Number=SeqID_45551
atggccccatttgaatttgcacattctgatggtgttcctccaagtgacccgatctgctgtctccagaatctgatttggcttctcaatgttgcacccgtgggggtcctggtcctttcccgggggcccggtctacacgaacaggggtccgacactttcccatgggggtctggacccactgttgacatcttggagtacatcgtcttctatggccacgtggcgaccccggagccgtccacgtggtggcgtcgggtgctgttcaccacgcgactagaggtagctgtgcgggaactggcacccaaggaggatgacccgtgggcccgagtccccgcgtcagggactgggccgttagtttcggcagagatgaagaggggcactaccgtgggtggcggctgggtcgccctggtgcgcatcgagggagatttcctgtggcgtttcggggcgcgggcgggagagtctgctttaaaagggattcaccctgcgagcagcagttatgctttcgcttctctcccactcgctgcgcccttttgcctccaagctctctacaccccattgtcttcaaggtctctgatttgcgctgccatagttgccatggccttgttagttcatcccgagtgcttccagactaagtgggcactcaacatggtgcgccgtctgcctggatggagcgcaccggtgttcggtggaaggatccgcgccggcaccatcctcctcggcgatcttgccaccagggagtccatgctcttcgtctcctgtgtgttggcactgccgatctcgcctttcttcttgctgttgctagaggacggcctcgtggcatgcctccatgaactggttgagctccagctccgtttcagcggctag

SEQ ID NO: 2177 - DNA, 681 bp, Zea mays
  Peptide Sequence Number=SeqID_45552
atgcggggtgaggctggtgctgaggtggcaccgtcggacccccgggatccgcctgtcaccatcgagtcgactccttcagagcgggccgagtttgagcaggagcgcgaggacttcaaggaggacatccggaacatgtctgatcgagaggaagaggtgacccagaaggagaaaagtttggccaagaaggaggcacgcttagaccaaagggaggaagccatcacagcgctccataataagctgaaagcttataatacggtgctggagaaacagcaggacaaacaggctgcgactaaggtgaagctgcagaagctacagcaggaacttgccgacagggcgagcggcattgctcgcgccgaggaaagcctcaaggcgaaggaagcttccctggcgaaatgggcaactgatctcacctggcaggaggaggacctcgccttcagggaggagatgtgggcaaggcagaacaggctgctggatgagcttgagctcgaggcagaggagaaaaggaagcgtttggaggggaaagtgtgggctctggaagagcaggtctgccagttccaggcagcgctagttgctcaggcgatgcagacggcctcgagcccccaggcagtggaggtgatgaggaaggcactcaacgaccttcgggctgagcaacgcgctggggctcagcgcatcaccgcctag

SEQ ID NO: 2178 - DNA, 120 bp, Zea mays
  Peptide Sequence Number=SeqID_45553
atgatggttataaatctgatctctggtatttcctcttggagggagtgcctctggtgcttagaaggtgaaggtggaaacatggaggactttgaggagttccaggactacgacgagttctag

SEQ ID NO: 2179 - DNA, 675 bp, Zea mays
  Peptide Sequence Number=SeqID_45554
atgttcaagcagcttcagcagaagctgtttctttttgtaggaccttcggcgacgaagcatggtcccaacagcggggtagagcaagtcctcatccttccttggagagcagcgtggatctcgccgtggaggagatcgcgaccccggagggaaagcaacccggtgggggagtggatcgcgggaaatcggacgccgtggaggttttcagcgcggctcggtggaggaggggctggggatgcgagggaggggacgcgtaggcggggtacggaggggctgagtgggggggaggcgggggtgacgcggcagcgcccgctcggaaagcagctcggtggggggagtggatcgtggggtagagcaagtccccgtccttccttggagagcagcgtggatctcgtcgtggaggagatcgcgaccccggagggaaccacttgcttcctccacacaatccgccaccgaggacaggaacgaccctcctcggtcggattattggccgccgacgatgggggaaccgtcccttttgcctcctccggcgcggggacggggagcctgaaggcccaccagcccgacggatggccacggtggcggatatggctgcgccccttgcgctggacggtggcgtccaggcaggagacgacgacgggcaggggcagcgccgccgccgggagcgagagcacgtag

SEQ ID NO: 2180 - DNA, 435 bp, Zea mays
  Peptide Sequence Number=SeqID_45555
atggcgcgcgccggaatcaacagggtcgacgacgtcgaagtagcgaaatcagcagggtcgacgaggtcagaagatcacgagcagtcgcgtgaagacgcttcccaaaaaccttcttcgccctctcctggtgcaggatctagaaggcgaagggttccggagacatgctctcctgatcgcagatgcacctctgcggtcgggatgaagagaactagaaggcggctcagctgtgaagagagtttttcagcagagactgttaagttgaacttccgcctagaactccaagctacactaactcacaacttggacaatggactatgccttgaattgcaagttttgcgtgaatgggtttcacatgaagtcatgaccagtacttggctactagtagtccccttctcgggtggagcatatacgtcgtactccaaggtctcttcatga

SEQ ID NO: 2181 - DNA, 90 bp, Zea mays
  Peptide Sequence Number=SeqID_45556
atggccggatctactaatccccctattcccgcacctaaacttcgatctaaaggatttcttttagatgacccatcctactttggactttaa

SEQ ID NO: 2182 - DNA, 720 bp, Zea mays
  Peptide Sequence Number=SeqID_45557
atggagcatctccaagttttggatttcttgatccaagtcgtcctccggaggcgttgggctggtggccttcctcttctggcttcgtgcctccctgagggaaaggacatcctgattgggatccagcggctgcagagcggcacccctgttgctgaagctttcttcggcggcatgacgaaggcctgtgggggacagatatcccctaggtccactagaaggcaagaaggcctcgcgcggggctttgggccagttacctcgcaaggccatcccttcgtgggtcggggccgaactactggcgaggaaagccgaagcaagacaacgggtgacacagcttcctgcgcctcaagcgaacattacctcttacaagccacaaaccggaagtttacttgcccgaagaacttcgctgcccacctcacccacaaaggagtggacgcggattacaagaaagaaagaggcaaacgtcccgagaaaagggacggaacctcgccgagttttctttctggtaccttcgccctcaaaggaggacggaaagaaacacgccatcgcagcagctccattctatcccgacgtcttcttgattgggggggagattggagtcgtctcccatctctgacgacgagccaaccttgcaagggcaaggacctccccagcgtgaagcacgatgacgaaggaacagacaccagaatgttcggcgacatcacgaggctggggagcgggacctag

SEQ ID NO: 2183 - DNA, 369 bp, Zea mays
  Peptide Sequence Number=SeqID_45558
atgatggatcgtcttagacacactgcacggaagtctgtcatccccttcttaccctctcgtctcgcggagcgtccgcttcgccgtcccgtgaccgcaggagatagagtatgtgaggagctgctccccgtgcttcccctggaggcgccccctgcaccaccactgagcgccccagccgctggagtagctgatggaggagacccagacaatggagatggcgacagcagctcgagccacgacaccgacctttctgctgaccaggaaccggaaggatgggttgctcgacccatcactcgcgacgctactcgcgggtgtcacttccatgatgcgctcgacaccctgctacgtcgggcacttgaccggcgtacttag

SEQ ID NO: 2184 - DNA, 408 bp, Zea mays
  Peptide Sequence Number=SeqID_45559
atggtccacagtgcaaacgaacaggacttgtccgaagtggtcagacttcggaccccactggtggatcgcggacgtccctgcccaaaccatatttggcacctgcggactatccgcccatcaaagttggacggtccgcactataattcagggactgtcccgaaagcagtcttctctggtcaggactgcggacggtctggtcccaaggcccggacggtccacagtgcaaaggaacaggacttgtccgaagtggtcagacttcggaccccactggtggatcgcggacggtccgccctcaagacccggacggtgattaaaatggacgacgaagctatagcaaaaaagcttcggcttgaagtgatgacgaagaccaagtacaatgatggacgagaagggacaaagactacttaa

SEQ ID NO: 2185 - DNA, 657 bp, Zea mays
  Peptide Sequence Number=SeqID_45560
atgaactatgacgaaatagtcggcatgggaactaactggaaccaggtgatggcacaatatggtagcttcctaagccatcatgaggagcagcctgttgcgagtgaagaatttgttcttccagcggatgggcacacgtcacttgcaacgtctacatttgctgctattgagaagaagtcgttccattttttgcattgttgggccatgctaaaggatcagcccaaatggatggacagccacatgggtcaccaaaatcaaccagccaacccagctcccacccaatctaacgctatcgatgttgatgcagaggattcagttccaactagcttcacatccaagaggccacttggtcgaggttttattaaggaaaaggcaaagcgaactcgatctgtggacacatcttcaaaggattcagagtacctcacacagatgggagatctatctttggagcgcctatctgtgtacaaaaccatagctacaacagaggaaaagaagttggagtcaatgaacaaaaacaagaggcagaaactaatcattgagaggaagaagttgaacctagagaaattaaggatggataggcagaaacttaaggagtacaaggaagaggaggtcatgatcttaagcatggatctcagtaaatgtaaccttcttcttcgataa

SEQ ID NO: 2186 - DNA, 573 bp, Zea mays
  Peptide Sequence Number=SeqID_45561
atggacgagtctggtatgaaaaaaggagatcggctagggtgccattcgctggactcagaatcctttggtttctgggacgatgacactacagaggccatagccatgcacgtgctgacgactttctgtggatttcaccactggaaatgtcgacccaccccatcggcttgttccccattgagaaggggggatgacccgatgtggaaggattgggttgatcacgccaaggacgtgtgttcactctaccctagacataccactcacttgacagttcggtgcatgagtgccctatatcgtctgcaggccttacggggcgaggcgatgtcccaacttatgggcctggtggagtctaccaagatcaccctctataacagggaggaccttgtcgcagacttgtctactaagctagtggagaaggatctccaagttgagcgaatggctaaccacatccgcgacctcgaggagcaagtggaagcccaggataacaccattgaggttctggaagaccagctccagaccatccagcagggctcgaggaggcaaaccagcacttggacctgcaccatcaggagatag

SEQ ID NO: 2187 - DNA, 1344 bp, Zea mays
  Peptide Sequence Number=SeqID_45562
atgccgtcctcttcttcttccgctgccactacgccgccggccgccgcctcgtctgaggagacgttgagtagcttgatggtggaggagttgcgcgccggcgactctgttgattttggtgtgtcgcggatgacgtcagcccgcgttgaagatatgcagcggttgggctactttggcggcggagttgctcgtgctccggggacggaggaagtccccgagccggaggtggcagaggaggatgcagacgaaggggaccttcggtgcgccgccggtcagagcagtgggcgtgatttagttgaagagttcgtggcgtacggggtgtggcccttggcgcatggctgggcgttgggcaaagtgtgccctcgccagatgccctttcacggaggaagggaggtgcgaagtcctgccttcgcactgaatctgcgaaaccgcgacccggacgcctttgtgcgcgatgcggaggacggggcggtgcggctcgtggggcgttacgtgccgaggacggaaggccagcgcagctttgatatccgcgggtcaaatgaccgtttgaacagggtcttcgaattaaatcaattgccgtacgacggctatcctggtcaagacgaagcggaccgccgtgggaagaaaacggcggtggagactggagacgaccctgcgccggcggccgccccttcctcaaaaaagagaaaattagggtcggacgagggccagcttgctatggttgcgcctggcgcggagatcgcgacggcggccatagtgccgaaggcgaggggcgaggcccttaacgccggaggcgaggtgtcggccctcgcggtggtcagggacgaggcgggcgcagcgacccgccggctgaagggagtgacggaggcgctgagtcaggcgacggaggcactgagtcaggtggctgacttcgccagccgtactgcgtcgggggccctcacagcagctgtgtctgccgaagtcgagagacttcggacacaacatgctgacgctgtccgtgagaaatcggcctccgacagcaagtgccgtaagatgacggacagggtggccgccctggagagggagaaggctgacctccggcgccaactagcggcggagaggagggaggcaaacgaggccatcgccaaggagcaggctgcgcaggcggaggccaaactggcgcgggcggagggcaatcttgccaaggagctcgccgaacatctgcaagagtggcttaccgccctggagagccgcgcgaagggggccgaggccgcgatgcgtgcggaggctgaacggacgcgcgctcagcttatggatacatatcgcgagctgggcgcgcggaccggcgacttcgaggtgccggactga

SEQ ID NO: 2188 - DNA, 541 bp, Zea mays
  Peptide Sequence Number=SeqID_45563
gggcagtgatggagcaggtctacgtggaagcaagcgcgatggaggggaagggggcctggtgctggcgacgatggtggcggtgggtgcgctgcaaaggggcgtggtcggcggtagtgcgctgcaaagggggtgtggggcggtggtagtgcgcatggaggcgggcacgcgtgcgggggcacgggtgagtggtggggtcgatgaccctgatgtttgtggtctctggttccaagaatctttgcctctctgtatggcttcaaggattaggcccgtaacacaaaggcggccacgcagggcccgttacaatgggccagatcacacgtgggcctcagagctgaacgaggccgcgctgcgggatggcgtcgccgcaggccttcgtctggtgccgaatggagcgaagggtgtccccgcccgttttgtctctgtcagaccagcgactgcagcgaaggcctcgagcgaagggtggcgtctttgcctttgccccaacatttgccctccgagggaccagttcgacaaagtcacctggtgccgaagacgtcgctag

SEQ ID NO: 2189 - DNA, 195 bp, Zea mays
  Peptide Sequence Number=SeqID_45564
atggccagcgctcgggtggctcgggcgggcggcgtagagctcgccggagctaaggacggggtcggggcagcggggactcaaatggcagggggaggggttgggcatggttacgtaccgattcccttaggtagacaatcggggaagttcgaacgtagaaattcctcagtctcccaagtagcttcttcctctgagtga

SEQ ID NO: 2190 - DNA, 1116 bp, Zea mays
  Peptide Sequence Number=SeqID_45565
atgcgcgtaactgaccagcggttacaagcattcctccactttcgcccagaccagtgggcaaaagggcggaccgccatgcaggcggcatgcaactgcaccgagggggcgcaccctttcgacttcgacgcgtccagcatggaggcccaggcccacgcgtcatgtaaccggcgcgccggttactacgtgcgagaaactgcaccgccacttgcgccagtactgcgcctcctcgactgcggaaccagtgccgcgactcgaggcgaccctccgcacggcccaacagtgccaaccgagcacatagatcacgggtcagtcagccgcgggagaaggcgcgacggtcgatatggccagaaatgggccgacactaatggtggtggcaggagggcggaagcagcggtcaagtcgtcagcaagctcacgtcccctcctgggacagcgagagaaccctctcccacggcgtaaagacgacgcgcccgtgttccgttcctcgaacggctcacgcacgcacgacggccgccccgacagtcggcacctttggcaggcaaagcaggcgacgcttcacctccgccataatgaccgcgtaaaaaaggtgcgccacgtcattcgatttcgtaaccttttccacttcctctttctctctcttgcctcagggatcgggaaaggggatactccgaaagggatccttctccgcgaaggaagcgggccccgagcccccctactgatcagaggttcgaaggctggcccctcggaagggttcaacagccgcctcagagcactcgggctccgcgcccactactggtcagaggttcgaaggctggcccctcggaagggttcaacggccgcctcaggccactcaggctccacgcccactactgatcaggggttcgaaggctggcccccgaagggttcgacagccgcctcagacgtagagcgagggatgaccccgggctcgggggctgatctcgcaaacccggctcctcccgcaaacccggctccggccaaaccgttgacagcgtcaacataccagcccgagaacttgggactcgactgtgcacccgggctatggccagttcgcatgagggaacaaccagaccgaccgaggcattatgaaacgcgctaa

SEQ ID NO: 2191 - DNA, 2034 bp, Zea mays
  Peptide Sequence Number=SeqID_45566
atgggaggactgggggtctctaatagttttgctatggagttgatggggacatgcgcggcccccgggggaaggatgtcttcgcccgagctccgggagtcttcggcgcggatgctgaaggttaccgggggttggtggcctaagaacgttcctatcccccgcgcggccggcgaagacttttttacatctcgcatggttcgtgacttgagagtgtttccttatggacggaatattgctgctgttgtgtcggcagtgatggacaaggatcgtcaggaagctgcgcagaagcgtcgggcggtcatcaggctgcccgaggctaggccgaagagggcgcgggggactgcgaaggctgccgctcccagcggtaggcagccgacgttggtggcgaagtcggctgcccctgggtccagcaaggtgccggaggtcgtgaaggcggccagcgccggcggaaccaagtctgcctcggccggagccgcgaaggtccgagaattaccttcgccggggaaacgcgttgccgatttcggcaccaatattagcgtggacgattatctcgttggatcgggcgaggggcaacttgttgttgttccacctgcggtggcgaccacggtgtctgccacggtgcctggggtggagggtagcgctctcagcgctggcggtgagatttcggcgctcactgccaaggacgaagcgggcactatgtccagccggctgagggaggcgtcgcagcggctgagtcaggcggctgacttcgctgaccgcgtggcgtcgggggcccttacgacagttgtgtctgccgaagtcgagagacttcgggcgcagcatgatgacgccgtccgggaaaagtcggccgctgatagcaagtgtcgcaagctggtggagaaggtggccgccctggagggcgagaggactgacctccggtgccagctggtggaggagaggagggaggctaatcaggccctcgccaaggcgcagtcggcgcatgcggaggccaatttggcgcggatggagggtagtctcgccagccagctcgccgaggaatgggaggcgcggttcaacgctctgcaggcccgcatggagagggctgaggcttctacgctcttggaagttgagcggacacgcaaacagctcacggactcataccgcgagctgggcgcgcggactgctgacttcgaagtgcccgaccgagagtcaggccttcgctgcctcgagtggctgcaagaggaattgttggcgctcccgaccattgtggagggatttatgtcctttgcctccctcgtcacctgcgaaggggcgatgaacgcgttgtcccgcgaagggtgcagtcactatgaggtcttcgaccgatctgatgaagatttcgagcgcgagatttacaaggtcgaggaccctgtggtgaaggactccgcgggagccctctttgaccggatgtggggcccccacggtcgggaggtggttagggagcggtccgaccgggcgagggatcaggcggcgcgtgccgagaacgtggaggacttcggacctttgaacagcgcgcggcccgaagcagaggcgaacccggtggcggccgaggccgaggtcgacccggcgccgcccccggaaactggcgaaggctccctcgctgcccctgcggctactatgtccggtggtggctcgtcaccaaccgctgtgccgagggctgaggattccccgaagacggcgacggagccagcagtggaggatcccacgatggctgggtcttcgcaggttcaagattttgggcccgcgcacgcaaccgctactgctaattttgtggcggcttcgaccgtggatgctgggaatgaatcggatgagtctgcttctaagttttctgattttggtgactctgggagttcggttgagtggacggaagagtcttcggatgaggacttggattactttgcggctttggatgtggctgcggcggaggcttctccgcgtgttacggatgctgaagttttgcctggtccgagtgctaggcgcaggcggcgaagggcggtggcgaagcgtagggtgagttag

SEQ ID NO: 2192 - DNA, 285 bp, Zea mays
  Peptide Sequence Number=SeqID_45567
atgaccatagggaagcgcgagcgaggcctcaccgatgaagaaggcgggaacagggccagccatggcgcagggcggaccggcggcagagattcatcaatggaagtccgcgcggggatcacgccatggttcacggagctcggagttcacggcgtgctgagcggaggttgttgtgagaagggagagaagattactaaagagattctagaaggtttgtctgaagatactgatgatagtgatagttatgatgtggagagtggagacgaagattctgaagatcggccctag

SEQ ID NO: 2193 - DNA, 1473 bp, Zea mays
  Peptide Sequence Number=SeqID_45568
atggcctcccatcctcctcctgcggagccgtcttctaagtcaaacaagcttcttgagcttttcatcttctttctactcattgatccatgtccccgtcgtcctcgattgtgcttgcgccagcaggggcagagcgagcacgaggagatccacgtctcctcgggcggcgttctggcttacaccgacgacgatgactgcgagagcaggcgccccttgctgctcaggactcccgcctccgccgagtgctactccgtctccgccgccgtcttcccgtttctctttccagctttgggaggccttctgtatggctatgacattggggcaacatccggtgcaaccatatcgctcaagtcgtcgacattcagtggtactacttggtacaatttgtcatctgtgcaaacgggtcttgtggtcagtggctcactgtatggtgctttgatcggctccgtcttggcatatacaattgcagattttttagagactgcaccgagccagataagaggcatgctcatttctctaaaggagttctttattgttcttgggatgcttcttggttatatagcaggaaatctctatgttgaagtggtttctggttggcgttacatgtatgcctccagtacaccattatgtctcataatgggagttggaatgtgctggttaccctcatcacctaggtggctcctgttatgtgccatacaagggaaggggaatctgccagagacaaaagaaaatgcaacccggtgcttatgtcggttgcggggtcaagcttcacctgatttggtctcagagcagattgacttgattctagaggaactttcatatattgatcaagagaagcaagctagcttcggtgagatctttcaaggaaaatgtcttaaagcaatgataattggatgtggtttggtgttctttcagcaggtcactggtcaacctagcgttctatactatgctgctacaatttttcagagtgctggattctctggggcatctgatgccactcgtgtgtcaattcttcttggcttactgaagctaatcatgaccggagtagcagtccttgtggtcgacagacttggcaggagaccattgcttattggaggtgtcagtggaattactgttgccttatttttgctgtcctcctactacactttactgaaagatgcctcctatgtggctgtaatagcgcttctactatatgttggttgttatcagctctcatttggtcctattggctggcttatgatctcagaggttttcccgctgaggctgcgagggcgtggactgggcgttgctgttcttgtcaattttgcgtccaacgctctggtcacctttgctttctctccactggaggatttgattggaacgggagcgctcttctctggattcggggtgattgcagtggcatctcttgcattcatattctggatcgtccctgagacaaaaggactcaccctggaagagattgaagcgagtttgtag

SEQ ID NO: 2194 - DNA, 177 bp, Zea mays
  Peptide Sequence Number=SeqID_45569
atgagcttcacaggaaaaagcaaaaatggtgttatcttcaaaattgattttgagaaggcatgtgacaaggatgccctagaccagtacatggaaatttttggctgtaaggctggagaatttccattcaactatctaggcattccaattcattttaaaaaactaagaaatgtggtctag

SEQ ID NO: 2195 - DNA, 411 bp, Zea mays
  Peptide Sequence Number=SeqID_45570
atggtcacatcaaaaacccccgcggaaccacttcgagcgagggcagcgtctccgccatctagcgacgtcttcggcaccagccgctggtccgacagagacaaagcgggcagggacacccttcgcaggactcggcactttgacgaaggcctgcggcgacgtcctcccacggcgcgtcctcgttcagtcccaaggcccacagctattgcccccgtgcacgtaaccctgttgtcaccactgttcacccttgttggccttcttgctgctgagagcaagttccaacaggaggttgttgtgagaagggagggcacacgcgacatgtggagcctggcggctagggtttgctacgccgcaggggaggcgcgctggtgggctggctgcgcgaggggatgggagatgtgggccggaatgtga

SEQ ID NO: 2196 - DNA, 2709 bp, Zea mays
  Peptide Sequence Number=SeqID_45571
atgccagtagtggagttggtcccgtgtgcccgcaacaagtggggcaattggaatgaattttggttttatgttgctgaggctactgtcgaaggccatgaagggctccccatgtccgaaatgtgctctcactattactctgcgtatccgccttttgaagtggcagaagaggatgcagacgaaggggcccttcggtgcgccgccggtcagagcagcggtcgagatttagttgaggagttcgtggcgtacggggtctggcccttggcgcacggctgggcgctgggcgaagtatgccctcgccagatgccctttcacggaggaagggtggtgcgaagtcctgccttcgcactgaatttgcgaaatcgtgacccggccgcctttgtgcgtgatgcggaggacttggcggtgcggctcgtggggcgttacgtgccgaggacggaaggccagcgcagctttgacatccgcgggtcaaatgaacgtttgaacagggtcttcgaattaaatcaactgccgtacgacggctaccctggtcaagacgaagcggaccgccgtgggaagaaaccggcggtggagactggaggcgaccctgcgctggtggccgccgcctcctcgaaaaagagaaaattaggtactgcgatgggaagacttggggtgtctgatagtttcgctagagagttaatgaggacgtgtgcggccccaggggagaggatgtcttcgcccgagctccgggagtcttcggctcggatgctgagggttaccgggggttgctggcctaaagacattcctatcccctgcgcggctgagcaggactgttttacatctcgtatggttcatcggtggagagtttttccttatgggcgaaatatcggtcatgttgtgtgggcagtgatggacaaggatcgccaaggggcggcgcgaaaacgccaggcgactgtgagggttcacgaagctcggccgaaaaggcagcggggaacggcgaaggctgaggcctccggcggaggcaagccgccgctgccggcgaaggtgggcgcctctgcgcctggcaaggcgccggaggtgacggtgggcgccggaggccccaagctgacgaaggtggtgccgtcggtcagcggagtggcggaggctgcgaaggcggcccgaacgttaccgccgcccggcaaacgcgttgccgacttcggcaccgagattaatgtggaggattatcttggggggtcggacgagggcccgcttgctctagttgtgcctggcgcggcgatcgcgacggctgcgccagcgccgaaggcgggggaagagacccttggcgccggaggcgaggtgtctgcccttgcgctggtcagggacgaggcgggcgtggcgacccgccggctgaagggagcgacggaggcgttgagtcgagcgacggaggcgctgagtcaggtggctgacttcaccagccgcaccgcgtcgggggcccttacggcagctttgtctgccgaggtcgagagactccggacgcaacatgttgatgctgtccgtgagaagtcggcctccgacagcaagtgccgcaaactggcggagaaggtggccgccctggagaaggagaaggctgacctccggcgccagctgacgggggagaggagggaggccaacgaagccatcgccaaagagcaggctgctcaggcggaggccaggctggcgcgggcggaaggcaatatcgccaaggagctcgccggagagctgcagcggcggcttactgccctggagagccgcgcggagggggccgaggccgcgatgcgagcggaggccgaacggacgcgcacgcagctcatgactgcatatcgcgagctgggtgtgcggacgggtgacttcgaggtgccggagcgagaggccggacttcgctgtctagaatgggtgcaggaggaactgcaggagctccccactgtcttggcggggttgatgtcgttcacctccctggtcacctgcgaggcagcgatgaacgcgctctctcgcgaaggctgccggcactttgaggccctcgaccaggcagatgaggattttgggcgagatatctttgaggtcgaagaccccgtggtgaaggaatccgccggggccctctatgaccggatgtggggttcatacggttgtgaggtggtccgggcgcgggccgaggctgcgagggctcaggcggagcgcggcgagcgggtggacgacttcagggcgctgaacagcgcgctgcctgacccggagacgacccctgcggaggccgcgactggagtcgccccgggaccgaccccggagactgcggaagatgcaccaggcgcccctgcacctgctgcggccggcgaagaccttcccccaaaggtggctgaaggcgcgcccgatgcccccgcagctgctgtgccgagcgctgaagatccagcggaggtgggggcggaggcagcggcggaggcctcggcggaggctcccgcagcggcagggccttcgcaggttcaagattttgggcctgcgcacgcaaccgctactactgagtttttggcggcttcgaccgcggaagatggaaatgaatatggtgggtctgtttctgagttttttgattttactgactctgggagctcggttgagtggactgaggagtcttcggaggaggacttggattattttgcggccttggacgtggctgcggcggaggctgcgccacacgctgcggacgcgcccagacgtgcccggtcctag

SEQ ID NO: 2197 - DNA, 597 bp, Zea mays
  Peptide Sequence Number=SeqID_45572
atgcccccgccttactcctgcgccaccaattatgcccaagcccccgccaccatcgtgcagcgcctctgcaatgccattgccgccactccccacgcgcggttgggatggaaagttggccttgtcgaaaagactgttgtcttgtttacaaaagatggtgatcaacacaataatcttcatgacatgtggtgcatgtggtatgagcttgcttctggggagagctattactgtcaaggtgaccttggccaggccctaaacaatttcttggcagttgaaaaacattacgctgatatgactgaagaccaatttgacttctattcatattgcttgcggaaaatgacacttcgagcatatgtttttatgctgaagtttcaagattgtttgcatgctcatgaatacttccacaacgctgctgctggagctatcaggtgctatatgaaactacatgattctccaacaaaatctacaacggaagagaatgatgagataccaaaactgccacctgctcagaggaagaagttgaggcaaaagcaaaaggaagcaaaagcgtgtgctaaacacaaattgtatatgtgtctgattcattatcaattattttaa

SEQ ID NO: 2198 - DNA, 537 bp, Zea mays
  Peptide Sequence Number=SeqID_45573
atgggcgggggcctcctggcagcggcatccgccctgaggtcagtgctgctgctgtttggcccccccggagcagaagtcgtcgtcatcgccgctgctggagcgggtgacggcacgccgttcgtcggtcttctattgctccgcaggcccacccctatcgagtggggttgttcgtacctgcagagggggaaccggagttccgtttgtaatggcactttgaatgccagtgtttttgttcattatggttgtcgaggcctgaacatccgaggcctcgggtcgggctggcgcccttggaagatggttggccgaggccccagaggtgaccggccgagccgcctgctcgggccggattcccggagaagaccctggcggcgatggcccgggcgtggtgatgacgtcgtccttcggagtggaagtcttcggaccgcgtcgccgtccgaggctaggtcgaacctcgccgaagttgttgtcgatgccgagggtgctgctgcccccttccagcatcaagacccgagcctgcaggatcagattgtcttgtag

SEQ ID NO: 2199 - DNA, 993 bp, Zea mays
  Peptide Sequence Number=SeqID_45574
atgaggatgatccgcaagattaatctaatgggtgtgcccctgcaggtcgaggatcttctctttaacattgataggaaaaagcaaagaaagagaggatgcttcgcatgcggggagaagggccacttcagggacaactgtccaaatatggtcgaacccacaaagaggaggagcaaaggcaaggcacttataagtgtcaaaacttgggattactcttcaagcgaagatgaatccccaaggatgcgcacccaccgatcctcatcacgctcatcacggtcatcacgcaagtgccttatggcaagaggtaaaatgagtattccatcctctagtgatgatagcagtagcgatgatgaagggaaaatggaaattcttagcatacataataatgatctaactactaagctagaaaacattggtagcaccctaggagtatctttggttgaaataccggaaattattaagaaagatgcttctacttcttgctttgatttagttgataattctaacccctgcaatcaagttcttgttaagaatgttgttatagaaacatgttcggatgagattgcaatggagaatgagcaattaaagcaagaggtggctcgccttggcaaggctttgtatgacaagaaaggcaaagccaaacaaatccaacctcctcaggataacaccactgcaagagtgaacaagcatgtggagggagaaattgtgatttgtaggctttgtcacaagaaaggccacaagtattaccaatgcaaggcgaagaccagggataagcaaaagccaacaagcaaaatctccaacacctacatcaataagatgaacaaaaaggttgctacaccatatttgatcaagaagaaaaagaatggaaaggtgatagtaatcaaggctaacaagcaagccaacgaaggaaaaggtggccaaatgcatctgggtgccaaagtgattatctcaaccatgaaaagcaccaagaaagtttggatcccaagagggaagtaa

SEQ ID NO: 2200 - DNA, 855 bp, Zea mays
  Peptide Sequence Number=SeqID_45575
atgacttctcacggatcctcagaggacggtaatgcactgtcccacactgacgggcttgcacgagagggctttccccgcattttgtgggaggtacttcagggggccggatacacgacaccccctcagtacgcggtgcagcagttcgagaagcaccgagtgccccgctgtagggtgaggatgaccttggagcctcatcccctgcagccaggctggcgctctttggactccgagtcttttggataccgagctgaggacacaatcgaggcaattgccttgcatggtttgaccactttctgtggcttccatcctttggagctatctacccaccccattggcttgttccccacggagaaggaggacgacccaatgtggaaggatcgggtggagcatgccaaggacatctgggccatctacccaggacagactgcgcacttgaccgtacggtgcatgaatgctctgtaccgtctgcaagtgatgcgcggtgaggcgatgtcccacctgatggcactgttggaggcgacaaagatcaccttggacaacagggaagagctcgtggttgacttgtcccaagaaatggtggagaaggacttgcaggtggagcagctatccactgatatccaagagttggaggagctagtgggcaccagggagaacaccatcgaggttctcgaggatcagcttatcaacactcagcagcagcttgccgaagctaatgagcacctggatatgcatcaccaggaggctgacgaggaagccgacatcgagggaggagatgagcatgcctctagtttggacactgccggctcagggagaccaccttcccacgagtcgagtgttgcctcgttcgctcattag

SEQ ID NO: 2201 - DNA, 234 bp, Zea mays
  Peptide Sequence Number=SeqID_45576
atgacccagctcttcgagttctacaaggctgaagatcctgagcatatgtttggtgaaggcaagaactggggtgtagttcgcttcgccgtcgtgccgttaatggggctcggtgtatgcggctcgctctgccaaggtggtgacgaggatgatggttttggttatgactatggtgctggtgaagatgaagtcgtggaggaggacttccaggagttccaagattatgacgagttctag

SEQ ID NO: 2202 - DNA, 297 bp, Zea mays
  Peptide Sequence Number=SeqID_45577
atgggcagcgaggacgtgctcgtcgagattcacctccacgagctctacttcgtcgacaccaaacaacaccgcctctcgcgcctgcacggagagcaaccgcttcgatctctccgtgttcgtcctctctactctctagccagtcgcgctcgcttgccatccgctcaggtcaacgacgaggacgagtggtcgttcgggttctgcgagatcgacaaccacgtgttcaattgccccacgaggaagaaccccatgtacacctattgggaacgcatcgtcctcagggagaccaaggcatactag

SEQ ID NO: 2203 - DNA, 201 bp, Zea mays
  Peptide Sequence Number=SeqID_45578
atggccggaatcgctcagtccacgcgcgcaggcgggtgtccttgttggcggcgggtgtaccggccaaaccacggcgatctggttcaatccaagggcacgattagggtgaacatgtgggatctttgctcaaaggttatgaagtatactacaacttttacatttggcccaagccatgatcataaggtttacatgaccttttga

SEQ ID NO: 2204 - DNA, 441 bp, Zea mays
  Peptide Sequence Number=SeqID_45579
atgggcccactaggacatggtgggaccattacctcgccatgcagcgagccgaccacgtggttgagtggggagagttcaagacaacattcagagggcatcacataccagtgggcatcatggaccgcaagctcaacgagtttttggcactcacttagggaagtcgtaccgtgttgcagtacgcccaagctttcaatgacctgtgtcagaggattgcatcacagctcgccaggcagagaagaagaggaagacctctatggcaaggccatcagcacaacctcagcgcttcaagattgtgtccgacactcagagcagaggacctcagcagcaacaggggcgatggtgatccgaccacaacagcagcagcaggcacccaaccgctcccaacccccagctcagaggaacatcaatcagcagcatccgcaacagcaacagtaccgctag

SEQ ID NO: 2205 - DNA, 81 bp, Zea mays
  Peptide Sequence Number=SeqID_45580
ccccaaggcagctaggagcgtgggaacaaatctggaagggcatctttgccttctgtctctggcgcaccggaatgtcctggg

SEQ ID NO: 2206 - DNA, 3348 bp, Zea mays
  Peptide Sequence Number=SeqID_45581
atggtgtcgcaggctcccgtggcgggcgccagcctcgccgcgtcgctgtgcaagaagagcaaccgcgtcgcgcgggtgctcgcgtacgcgctgctcgagtggatcctcatcgcgctgctcctcgccaacggcgtcttctcctacctcatatcccggttcgccgccttcttcggcctcgcgccgccgtgcgcgctctgctcccgcctcggcgtcgacagcctcttcgagacccgcccgccgcaccaccgaggcgccgagcccctgcgccgcttgctgtgcgacgcgcacgccgccgagctgtcgcgcctcggctactgcagcgcgcaccgccggctcgcggacgccggggacatgtgcgaggactgcgccgcggcggcagcgcccgggaaggcgctgttgtcgtggatgggccggagcgagctgggtgagcgggacctcgcctgtgcctgctgcggtgtcgcgctcgagagcggcttctactcgccgcccttcttgctcaccacgtcggcgccgcgtggttcagattgtggcctcaagcaagaggaagaggcagcgatgccaaatggagacgtggtcgttgtctccaaggaaggtcctgtgatcgagctcttcgacgataagccgtttgtggaggatgactcaatcggcgtcttggctgccgaggttgttgccaatgttgagcggccggttgctcttgaatcaattgactcgttggtggtcaccatgggcaccgtgtcatctcaatccggtggcgaaggaaaggaagcagttgaccatggtgttgtaaggcagaacaacgtggacatggagaacacagttagtagcaatgaggagaaaattatgccatctgatgataaggtggatgtggttgatcggctgattgatgaacagattgttgccgtagtccttgtgccagcttgtatagaagctacacttgatggtggcataaatgcagacaaaaccgtggatgcctttgctgatcatcagtctcttgaggatgacagtggattggaagttaaggaccagaaaatatcatttgaagatgaggtatttgaaggtgagcaagctgaacaggttactcaacaacaggaactgtgtgctatgccaacagatcctagtgaccatgaatttgttgagaggttagatagaagtactgagttggagcattttccactggctgagtcaaagcataaaatgaactctatgccagtggaagcttctaagcacgttgctgtaactcagattgaggggaagcaggttcaacaagctgaggtaaatcaggagttggattcaataccaaaatgttccagggagcatgctgatgaagaacttcaaggagagagaactgcacaggctgggttggaacaagagtgtgactctgtgccaattgattatggggaacacggttcccttacttcatatgctcatactgatgatgagcaagatgaggcgatgcagaaagtcacttctgtaactcggattgaagagaagcaggttcaacaagctgaggtaaatcaggagttggattcaataccaaaatgttccagggagcatgctgatgaagaacttcaaggagagagaactgcgcaggctgggttggaacaagagtgtgactctgtgccaattgattctggggaacacggttgccttacttcatatgctcatactgatgatgagcaagatgaggcgaagcagaaagtcacttctgtaactcggattgaagagatgcaggttcaacaagctgaggtaaatcaggagttggattcaataccaaaacgttccagggagcatgctgatcaagaacttgaagtagagagaactgcacaggctgggttggaacaagagtgtgactctgtgccaattgattctgaggaacacggttgcctgttttcatatgctcatactgatgatgagcaagatgaggtgaagcagaaagtcacttctgaaacagcagatgttctacattatgcagcagacacttttaatgttaacacaaactcatggaaagaagatattgaagaggattcaactgaagctgctctaacagccatacatcaaatttgttacgaacctttgacgagcatagtcaagttctctctagatcatagtgtctccgaagaagacagagagcctgatacgccgactcatattgaaggtatatgtgattcacaggaactgctggattctaaagcagttgtttctgatgctaaatctgtagattcaagtgttgctactttgtctactgatctggaaagcactgaattggtgagtgtggatcaactaaaatctgctttggcttccacacgcaaatcattgaacaccctatattctgaacttgaaaatgagaggaacgctgctgctatagctgccgatgaaaccatggcaatgataaaccgcttgcaagaacagaaagctgcaatgcagatggaggcgattcaataccagcggcttatggaggaacagtcagagtatgaccaagaagcactgcagaggttgaatgaactagttgttaagagagagaaggagaagcaagatctggagagagagctcgagctgtatcgccacaaggttcatctctatgaggtaaaggtgaggaaattgtccaggcacaaggctgatgaccagaatggatcatcgtcaacttcatcgagtgctgaggatagtgatgacctttcacaaagtttctatgaaggtgatgaatcttcccatggtattaatggaagcaatgggagtattcctacagatgttgtgctacaagaaactgccaggcatcttgttacccttgatggctcactagctgattttgaggaagagagactatccatactggaacagcttaaagtgctagaagataaactttttgatcttgatgatgaagagtccgataacatgaagcatttctcagaagaaaaccatttaagtggtgcctcaaatggtttctctgatgatgatagctgctttaagctccatgacaagagaaagaatgtaacctacagaggaaagaaactccttccattgttcgacgatgctaccgtggaagctggaaacgtcccccaaggtaatgatgcacagcattcaacagaggtcacactggaccttgctagagagcaacataagcttgcaattgccaatgaaatcgatcaggtacacgagaggctgcatgctcttgaggcagatagggaatacataaaacagtgcgttaggactttgaagaagggagggaaagggtttgatcttcttcaggagatattacagcatcttcgggacctaagaaggattgagcaacgtgcaagtgcaaggaactctggggagctttcgcctcattacctacatcatcacacggattga

SEQ ID NO: 2207 - DNA, 393 bp, Zea mays
  Peptide Sequence Number=SeqID_45582
atggcggacaatattggtttcctgaagctagaggccatgttgccaaccatgtctttcgaagatttctctgactatttagcttatacacacctgaagggtttttttcttagcaaggccctgaagaacaaaagaaatgttgagggcaaggctgcccgtaaagagatagttaagcttaggttcgaagtatctaggctttggttcgactgtgaagaaaaggaaagatcctttaaaattttagagaaagattttgttgagagacgaaccgaagttcaggctttgctcgaagaaaaaatcaagttgagagaaacaatggaaagtaaaatatcagatcttgaagcttctgctactgtaaaagacaagcacattgcctctcttgatgttgagttgcaatga

SEQ ID NO: 2208 - DNA, 759 bp, Zea mays
  Peptide Sequence Number=SeqID_45583
atgtacgtgccgtcgtggctgtcggagaggttttggcgccctgttcatgtgatgtcgtggccgtcggaggagcgattgagcctcgtggaagtacagctgtcagggctgtcggatccttgcttccgtaaggggctaagagccgtcgtcgtcatggagcacgcggggtgccatcattacttgtttaccgggcccgaggtcgggcgaggcggaggctcctccgaggttgaggctgagtctaggcccgggggtcgggcgaggcggagaccgtcgtccgaggtcgaggctgagtccgagccctggggtcgggcgaggtggagtccgtcttccgaggtcgaggctgagtccgagccctggggtcgggcgagacggagtccgtcgtccggcatcgaggttgagtccgagccctggggtcgggcgaggcggagtccgtcttccgaggtcgaggctgagtccgggcccgggggtcaggcgaggcggagaccgtcgtccggcgtcgaggctaagtccgagccctggggtcgggtgaggcggagtccgtcgtccggcgtcgaggttgagtccgagccctggggtcgggcgaggcggagcttcctatggcgcttgaggctggacttagctgttgttagcctcactctgtcgagtggcacaacagtcagagcagggcaggcggtgctgttttcctgtcaggtcggtcagtggagcggcgaagtgactgcggtcacttcggccctgtcgactgaggagcgcgcgtcaggataa

SEQ ID NO: 2209 - DNA, 393 bp, Zea mays
  Peptide Sequence Number=SeqID_45584
atgggcgcaaaccggacccctctgtgtggggtccgggtcactcacagcagggtcccgggattgtgggacaaagaatacccaggccttaatcaaagccagacgggggtccggaaccgacacgtgtccggaccataccgtacacgcttctactcctcgctcaggcggagccccgatgctgccacgtggcatggtgcacgtgacgcaagccaatgggcggagcctgacgtaaggcctctgggctgcgcggcctctgcatttattgcggaaaaggcgtgccgcctgtccattccattggcaggcgatgtgccgcctcggcaattaatgagccatgtgcattccactggcagtcgatgtgtcgccttcgcatttaatgagccctgtccatcccgttag

SEQ ID NO: 2210 - DNA, 534 bp, Zea mays
  Peptide Sequence Number=SeqID_45585
atgacgatgcatgggcgctggtcgggcagtgatggaagcaagggcaggggagtcatcgggaggaggaggatccactatgaactgtatgctcgcagccaacttccattggaggcgattttggaggtccagatttcacagaatacatggggagagggtttcaccccttcatccttcccgacaagaactatagctcgcaacctatgtggattctatgcgtgcgagttcatgagagtgaacggacgatacatcacgaaccctgacaagcaatttcaacgaggaaacccggagaacttgaccgaagctgcattgtatggcatagtcgaggacctctgcacattcatattgaaagaggcggtcctccagtggcaagaggcttcgacggtgggcagctccgacggcgtgttccccgacgatgaacagaggatcgactggcgatggttggcacgagcaaagaggagcgacgtgggagaagctcgagacagccgggacagacccaaggaggcgaggcgagggatttatagtgagggatgttag

SEQ ID NO: 2211 - DNA, 384 bp, Zea mays
  Peptide Sequence Number=SeqID_45586
atggcatacagattgcttccgtcttgctcatggtggaaagatcacttacttcgattgtcatcgacgctggttgcccaggaaacacccctttatgcaatgaactcttggtttccacagcaggcacagcagcaaccatttgttttccctcagtttcagtcgccgatgcctcagtggggattacatgctccaccacctccacctccacctcagggatccgaggtcatgggccacaacacgccaccaccggtcataccagcaccaggaggagcttatgcaggggagggagcttatgtaggagaggatccaaacccgttacacgacttcgtcaaccagttcttggtttttggaggtagtggacacaactccaacgaccccaatatgtga

SEQ ID NO: 2212 - DNA, 468 bp, Zea mays
  Peptide Sequence Number=SeqID_45587
atggggcaccggactgtccggtgcgccaacggctccaaatcttcaacggtcggctgcgctaatttaggaaagcaatctgcaccggacactgaacagtgcctgtccggtggcacaccggactgtctggtgtgccacccgacagaaggcaagaattgccttcctggattgctctcaacgactcctagctgccttggggctataaaagggacccctaggcgcatggaggaggacaccaagcatactctgaacattctaagactcccgcactccatgttcgcacactcgattgacattcttagtgatttgagctccgttctagtgggcgagaggctccaagttgtggagattcctcgcaaacgggatatagtgaaagaaagaaaaacatcatggtattcaagtggatctttggatcacttgaaaggggttgagtgcaaccctcgtccattgggacgccacaacgtggaatag

SEQ ID NO: 2213 - DNA, 366 bp, Zea mays
  Peptide Sequence Number=SeqID_45588
atggatcctaagggaaaggggatggtggtcgacaacaacgagaaggagtctatcttcaacgagccaaagaatgacaaccgtggaccgtggtcgccgccgatctcggagttcgttgaaacaaacaccgcgtcccggccagatcgtgcgggtctccgtgcgggcttctcggggtccctggcgactctctcttctcctatttggactctctccaggagcgattcggatctgagttttgcgctcggggttgagctttggggcgttgtggccatggcgtccgccgcgggctggggcgccgccgcactctcccgtcggggttggggcagagtccttttcaccgtcggatctgtgggcgacggctcggattag

SEQ ID NO: 2214 - DNA, 162 bp, Zea mays
  Peptide Sequence Number=SeqID_45589
atggtgaaatggcacaagtcacaggctcgatttgtgtttgcttcaaaagatgttgatcttagggcaatagatcttgccatgagaattgccgaaaggatgttcctcaaaatgaaggaagatgaggcgaagaacaatattgaagaagaagaaaatgatcgatga

SEQ ID NO: 2215 - DNA, 780 bp, Zea mays
  Peptide Sequence Number=SeqID_45590
atgtgcgagcagcgacggcgccgcacgaggcgcgaggatcgagcggcgtccacggaaggtgcgagccccacacgccagccacgctcgcccccgctccctcgcagccgccctctctctggcaagcgggccccgcttgtcagcaccttcctcgcgcccgtgaccaagctatcgacgcgatcaacgccggccgtcgcgcgctccattgcttcgccattaacacgctcgccagctcggtttggcgccttgcgccaccgcgcactgtgcccgagctgtcccttcaccccgcctgcccgagccatcccgtcgccaccactgtgtgccatcatcgctgtcgtggcaagctcgccggtgctcgccacctcgcctcccttcaccgccccgggcgcctataaaaaggatcgcccgagctcccttcttcctcacaccggccttggccactccctctcccctcctttgagccgaatcgagctccgcgccaccgcgcccttcctccgctctgaaggattgtcccctcacataagcaccggtttgtcatccttcactacgtgtactcatggcaagtacaaccactcgagactatatgggcagtcactcaatgtgaactcatacggcccaaaccccagggttatgatggctggggagcattgggaggataaggagggggaatgttttgtccggtttggacatggcggtggcctgactccttccggtataaccgttaagcagctgaagacttcttttctgctctgctcgactagaggaggctgtgtctgcacctag

SEQ ID NO: 2216 - DNA, 564 bp, Zea mays
  Peptide Sequence Number=SeqID_45591
atgagcaagaacacaagagacacaagatttatcccgaggttcggtcacaccaccaaggtgccctacttcctcgttgaggcgcccacaaagagcttggtctctttcaaccctaatcctccctttgccgaccacaaaggtcaagcccacacaataatctttgctcaaacgagcggtggtggtaaggcacgggcgaaggtatgggattacgggcgtggggccaatttggctggagggtgcttaggacggccggtccacggcgaggtggtgggccccgcggcggtgggatcaccgacgaggttgccggacgcgataggtgaaggggatgggtgtgtcgtgatcgtgcccgaggcggtgaagggaggcgaggtggcaagcaccggcgagcttgccatggcggcgatgatggcgcacagtggtggcgacgggatggctcaggcaggcggggtgaagggacaactcgggcatagtgcgcggtggcgcaaggcaccaaaccgagctggtgagcgtgttaatggcaaagcgatggagcgcgcggcggccggcggtgatcgcatcgatagctag

SEQ ID NO: 2217 - DNA, 894 bp, Zea mays
  Peptide Sequence Number=SeqID_45592
atggcgaagcagcagcagcagggcatggcggcagtggcgctggtagtgctggtggtgctggcgacggcggcggccgagacggcgtcggcggcttcgtgcaacgccgggcagctggcggcttgcgcgccggcgatcacggccggcgcgaggccctccgcgtcgtgctgctccaacctcaaggcgcagcaggggtgcttctgccagttcgtgaagaaccccacctacgggcgctacatcaacagccccaacgcgcgcaaggtcgtcgcctcctgcggcgtctccgtgccgcgctgctaccgccacccactctctcctcttccctctctctgcacgcgaccaactcgctccgggctccggtcatccaccgtgcgtcgttggctactcgcctgctcccatgctccctccggatctgccctctcggtgatttggcgcggtggttctgcgcctccacacctgatcgccggcctcctcacctccacatgcccacaccgtcgccatctcctctctgccatcgccctgctcgcctcctctgccaatggcccgaccaacctcggctcctcgctctgcccctccctcccaactcctgccatcaaagtgcacagcttcgccggccccaatgtggctatgtcgaccctccgtcggcacccacgcacaccacctcgactgcgcgtagcctctgcggcaccgccgccagggccgcctcttccgcgacggtgtgtcgcccctctccgcctccccagcggtcgccccaccctctcttctacatcgaccaacatctcaggccactgtcggggtgtaggcgcggttggggctggggttctggatttgggtggggatgaagagctgaggtttatgtatgaacaatatacgaagcaccatccgttcattgagtaa

SEQ ID NO: 2218 - DNA, 1104 bp, Zea mays
  Peptide Sequence Number=SeqID_45593
atggtgactacttttcttgtgtatgaaaaaaacctcgacctacaggggggcttatcaccatacgagaagaaaaaatatgtatggaaaatgctttacatttatatgctgggttatgatgttgattttgggcatatggaaactgtctcgttgatatctgcaccaaagtatcctgagaagcaggttgggtatattgtgacatcttgcttactgaatgagaataatgatttcttaagaatggtaataaatacagtaaggaatgacataatcggacgaaatgagaccttccagtgcttagcattgacaatggtaggtaacattggtggtaaagaattttctgagtcactagccccagatgtccagaaacttcttatttcaagcagttgccgtcctgttgtcagaaagaaggctgctctatgccttctgcggctttataggaagaatcctgatgttgtgaatattgatggctgggctgaccgaatggcacaacttctagatgagcgtgatttaggtgtgctgacatctgtcacgagtctttttgtttcactagtatccaacaatgttgaagcatattggaattgtcttcctaaatgtgtgagaatattggagaggttagcaagaaatcaagatattccacaagagtacacttactatggaattccatctccttggcttcaggttaagacaatgagagctcttcagtacttccctaccattgaagatcccaacgcaagacgagctttgtttgaggttttacagcgcattttgatgggtactgatgttgttaaaaacgttaacaagaacaatgcctcacatgctgttctctttgaagctcttgctctggtcatgcatctggatgctgaaaaggagatgatgtcacagtgtgtggctcttcttgggaagtttattgcagtccgggagccaaacattcggtaccttggtctggaaaacatgactaggatgctgttagtaacagatgtgcaggatatcattaaaaggcaccaggctcagatcatcacatctttgaaggatccagatatcaggtttgactctcttccagtctgtaattttctatacttatcaaaaggattaaatggtataacatga

SEQ ID NO: 2219 - DNA, 837 bp, Zea mays
  Peptide Sequence Number=SeqID_45594
atgcaggcggcatgcaaccgcgccaagtgggtgcacccctccgacttccaacgcacccagcatggaggcccaggcccacgcgtcatgcaaccggcgcgccggttgctacgtgcgagcaactgcaccgccactcgcaccactaccacgcctcctcgactgcggaaccagtaccgcgactcgaggcaaccctgcgcgggcaggagcagcggtcacatcgtcagccaggcttacgtcccatccaggggcagcgagagaaccctctctcacggcgtgaagacggcgcgcccatgttccgttcctcgaacggcttgcgcacgcgcaacggccgcctcgcgaaccactcgccccgtcgcattaactccgcggcgggacaggcggcgcctcaggcaggagaagcaagcgacgcttcgccttcgccataatgaccgcgtcaaaaaaggttcaaaggttggcccctcggaggggttcaacagccgcctcagagcgcttgggttccgcgcccactactggttagaggttcgaaggccagcccctcggaagggttcaacggccgcctcaggccactcgggctccgcgtccactactgatcagggcgggaacgatcttgtaacagaatcccatcacagggaggcatcgagccctcagaccccgtcgaaaggggaccgggtccggcagatcacccacagctcaccggagacaccatgttcggcgccctccgagggcaacatggcgctttcccccctcctccttacggaaaggcgacgcaggggccgtcaacataccagcccgagaacttgggacctgaccgtgcacccgggctacggccagctcgcatga

SEQ ID NO: 2220 - DNA, 1830 bp, Zea mays
  Peptide Sequence Number=SeqID_45595
atggcgcactgggttagcgacagtgatggcagtgacaactttgaatgggatagtgatggcaatggggaggagccagcgaacttcaatgctgctggtgccggttcatcagctctgagatcaacgaacactgatgctccaggtccatcaacacgggttgctaatggcaatgggaaggctgggccatctgcctccttggttcaaaagtatatggacatgggtttcacggaagagattgttcggaaggccatgaaggacaatggggataatggagcagattcattagttgagcttcttcttacttaccaggaactaggcaatgacctcaaagtggataacggcttcgcttctggttgtgccccccaaactgttgatgatagtgatgatgacgacattctagaaaactgggatgatgaggatgctgatggtgggagaagcaccagggttgctaactctattgatgattctgaagacgaggatttcttaaatgagatgtcacagaaggacaagaaagttgattccttagttaaaatggggtttcctgaagacgaggctgcactggctattactagatgcgggcaggatgcatctatttctgttctggtggattccatatatgcttcacagaccgcaggagatggttactgtggcaatttgtctgactacgagggtaattccaatggagggagaaacaaaggaaggttcatggacgggaacaaaaaaaagagaaaaagatatggaggtcaagcacagggaaatagaggcccattagatggtagctgtgaagaacccatgcctctcccaaatccaatggttggatttaatttgccggaccattggacaagaccagtagacagatcgctgcctacacaagctattggaccaccatacttctactacgagaatgttgctcttgctccaaagggtgtctggactaccatatctagattcttgtacgatattcagccggagtttgtggactccaagtacttctgcgctgctgccaggaaaagaggctacatacacaatctaccacttgagagaaggtcgcctctcctccccttacctccgaagacaatatttgaagcatttcctcgtaccaagaggtggtggccttcatgggacccaaggcggcagttcaattgcctccagacttgtacgtctagcgcaaaactgttagagaggattcgtgtaacccttgcaaacagttcggatccaccacctccattagttcagaagtttgtgctggaggagtgtaggaaatggaatctggcttgggttggcctaaacaaggttgctcccctagagcctgatgagatggagttcctgcttggctttcccaaggatcacaccagaggtatcagcaggacagagaggtaccgatctcttggaaactcgtttcaggttgacactgttgcttaccatctctcagtcctcaaggataggtacccacaaggcatgaacgtgttgtctctattcactggcatcggaggagccgaggtggctctccataggctcggtatacgcatgaacacagtcgtttcagtagagaagtctgaggtgaacaggactattctgaagagctggtgggatcagacacagactggtaccttgattgagatcaatgatgtgcagacgctgacagctgataggatcgaggcatatattagacgaattggcggctttgatctcgtgataggtggaagcccatgcaacaatctcgctgggagcaaccgccaccacagagatggcttggagggcgaacattcttcattgttttaccattattttaggatcttggactccgtcaagtccatcatggagcgcctgtag

SEQ ID NO: 2221 - DNA, 351 bp, Zea mays
  Peptide Sequence Number=SeqID_45596
atgaacagaggagagagccaagttggagacgatatagatgatggtgggcttgacgaccgaactgaaagtctcgtcgaagtcgacgccaggacgctgggtgaagccacgaaggacctagcgagctttataccgatccaagtagtccagcaggcggctgcccagggtctcgaggcccattggctatgggggtcggcccactcgaggcgtctggtggagcagatgccagagggttgcctggtgggcttgaatggcgaggcacagttgaaggcatcccaggggagcgaccatgtaggccatttgggccggttgaagtgggaggtgtgggggatagacatccccgagtccgcatga

SEQ ID NO: 2222 - DNA, 1129 bp, Zea mays
  Peptide Sequence Number=SeqID_45597
atggactgtacgggggaagttataggtaaccggaacgccagcgatgtccgctacgaccttacgcagtttttctacgtcttcaccttttttaccgataacgatacccgggcgagcagtgtgaatggttacacggatgctcttagccggacgctcgataacgatacgagatacggacgctttagccagttccttagtcagatcgtcaatgtcagcgccatcgttgtgttcagcgttagcaatggcagattccagaactttcttgaccagtacagccgctttcttgttggtgtaggtcaaaatatccagagcctgcgacactttcttaccgcgaatcagcagcgtggccgcgataagtacgagtcggtgcgaattcacccagtttgtgaccaaccatttcgtcggttacaaataccggaacgtgctgacgaccattatggacagcgatggtcaataaaaggacctttcttgagagaacgtggcatggcttatcctctaaaattatttgctacggcgacgtacgatgaatttatcagtacgcttgttgctgcgggtcttcttacctttggtctgaacgccccacggagttaccgggtgcttaccaaagttacgaccttcaccaccaccatgtgggtggtctaccgggttcatcgcggtaccgcgaacggtcggacgaacaccacgccagcgtgcagcacctgctttacccagaacgcgcagcatatgctcagcattgccaacttcgcccagagttgcacggcagtctgcttctactttacgcatttcaccagaacgcagacgcagggtgacataagcaccatcacgagcaacgatctgaacgcctttaggggccaggatgtaacggcgttcaccgtctttgtacagaaccagcgcgatgttcgcggaacggttcggatcgtactcaagacgttcaacaactgccgggataccgtctttgttgcgtttgaagtcaacaatacgcaacggagcaaaagcgccgccaacgaagtccagattctggccttctttcagggtgacggtgttaacgacttcgacttcgacttcaaacagtttctgcacagcagctttgatttctgctttggtcgcgtctttagcaactttgagtacgatg

SEQ ID NO: 2223 - DNA, 879 bp, Zea mays
  Peptide Sequence Number=SeqID_45598
atggaccaccagcgcctaagggcggaccttccactggccagaccgtccgggcctcatggccggatcgtccgaccgtgcccagtgccacaaatggtgctcaacatatgcccctctcttttggggaagctgagcgaactaaaaactgatgacaacccaattaaaggactaacaagtgtgctaagtgttgaacaggtgcttaatgcaaagctaacagggttcaacacaaagacaaccgatcaagccaaggatggaggcaagaagagcttcgaggtaccgagtgcacgggagaaggtcaaggataccaagaacccaaagccaggggtgaagaagaagacttgcaaagtcaaagttgatcgagttaagaagagttatgccaagtccggcctcgggcgccataggaaactccgcctcgcccgaccccagggcccggactcggcctcggccccggacgacgacgaactccgcctcgcccgaccccagggcccggaaacggcctcgaccccggaagacgacgaactccgcctcgcccgacccagggctcggactcggccttggccccggaagacgacgaactctgcctcgcccgacccagggctcggactcggcctcggccccggaagacaacgaactccgcctcgcccgaccccaggctcggactcggccatggccccggaagacgacgaactccgcctcgcccgaccccagggctcagccctggcctcagccgacggtctccgcctcgcccgacccaggggctcggactcgacctcgacctcggaagacagactcgacctcgacctcggaggagcctctgcctcgcccgacccagggctcggaccgaccacgtcgcaggaggggccatcattgccctacccctag

SEQ ID NO: 2224 - DNA, 617 bp, Zea mays
  Peptide Sequence Number=SeqID_45599
ctatctcgatcgtccaatatgccgtggagctcctccccgtccgatgcgcgctctctccagtcctccaccgacgcccaccctcccacgatccccgcatcgctctccccctcgcccaccagcccttcccgtcctcgatgcgctctgcaacttccaccctcctcgccgcgacgagctcggccggccgagctccgcgccaacctccaccgactgactgccacgggctcaagctgtgcaccgtccgactgccacgggctcaagctgtgcagtgcgtcctccacggaaccgccctcgccaccgctcctctccctctcctctttatcaccgcacctaatgtcgcctcccccggtgcacctcgtgcctgctccctcgagcacgcctcccaatgcaccggcgtgccgtggctgcagaggtgggcgccctccaacccctcccgtcccgccccagctccaaccccgtgggccaacctatcgacgcactggcgcgcaatcgcgtggccccagcgccggcgtgttgtgtctgcagaggctctcgcacccatgctcgacgtccttatcgacgccgctatcgtccgcgtctgcatcctcctccgcgtcgatgtcggcgtccaacagttgtga

SEQ ID NO: 2225 - DNA, 552 bp, Zea mays
  Peptide Sequence Number=SeqID_45600
atgagtgaggacaaagtgcacacaaaagactcgtgttggtctgtggggacaatatgtgatcctagagagctgccaggagtaagtaccgccggttcgggagttgacagggtgttacagctagatgagtgcgatggtggtggtgctgggcaacggttgggtggaggtggacagggaggcggttctggcagtggctggggtggaagagggcagggaggcggctggggctggtggtgggtaattcatggtggccggaagatcagaggctctggataccaaatgttatggtcgctagatcgaagcacatatgttcttcaaagcaagattcaaagtatgcacaacacaaggggtccaaaaaatatgagggtgcttctgctcaactatgatgccagcagctctgcaattggcagcgttgtcagtgatcacttgcacaacattttgtgccccaacctcattgtcaagcgcctcgacgcccaacgtcgctggaccgcggctacgcagttcgtagtcgcgctccagaccttcaccgtgagggattcctcaccggtggcttga

SEQ ID NO: 2226 - DNA, 483 bp, Zea mays
  Peptide Sequence Number=SeqID_45601
atggcccgcgcctataaagcacccagggacttcgaccgtacccctccgcacgcgctcgacctcaccggagcccaaaaccaccggtgtttgcccgtgcacggcgtgcccgcggccgcccgattccccctccaccgtagaccggccaacagaacccttcccgaccccgttcaaccctcagagaagactatgcacacctcggtgaagctccacgagcgaggaatcgaagtttgcttcaccggagaagccagtccacggtcgccggacttcgcccgaccgccggtgagtgtagaccggactgtaacctcgctgacggagaatatgtcctcgtgccggagcaaggagctgctcaggaggaatcctattgagatggatactagttctctcgaggacatggttgctggagtgacttggccgtccatcttgccaccgggttggactgttgagtgggaccccgcctcggctgaggaggagcatgatgagtga

SEQ ID NO: 2227 - DNA, 645 bp, Zea mays
  Peptide Sequence Number=SeqID_45602
atggacatcctaggacaatttggagtaattatggctgaccccccttgcgatattcatatggagctaccatatggaacaatggctgatgatgaaatgaggacgcttaatgttccaactctgcaaactgatggtttgatttttttttgggtcactggtcgtcccatggagcttgggcgtgaatgttgctcatcaagctctgattccctcgaagttgaagttcgagatctactccccaacgaggaaacagaccgacgaccaaagctatcgcgacattgcatacggtcattgcatattcccttgggtccatatggtttcagcaacattgcgctcttggtgcatcaaatctatgttgtgtgtgatgctagggacccatcagatacgaaatccagcactaaaattgttagtagtgctgataatgccaagtctgtggacataaaaccggtcagtggaagtgataagagcaatgacaccagtgataagagtaatgacaccgtcgatgctaatgtgaaatccatctctggaattgttgcaaacagtgatgctagaaacaccgatgtacagactaatactagaagtgtcgacagcagcgatgattacatcattgactcaaaaccaaacattggccgggttgctgcaagcatatag

SEQ ID NO: 2228 - DNA, 198 bp, Zea mays
  Peptide Sequence Number=SeqID_45603
atggcggcctcgcgcccccggtggctgcacgccctggcggccccgcgccctggtgcctcgtgccccggtggccgtggtgatgaggatgatggttttggttatgattatggtaatggttgtctgcgttgcaaccactgctcaggtgaagatgaagtcatggaggacttacaggagttccaagagtatgatgagttctag

SEQ ID NO: 2229 - DNA, 411 bp, Zea mays
  Peptide Sequence Number=SeqID_45604
atgggcaagaacaacaagcgcaagcgtgaaccgactcctccattggaggagtttggtgactcggaatactcggaggaggagttctcctccgagcccgaggggtctccggctcccgtctctcccccggcgtcgtctgatgactcggacgactcccaggggatagccgcggaggtctggacgtacatccgagccgtcgagcgcgccgggctcgaaggctcggatgagtcggagtactcctcggatgaggaggactcggacggcggcgacgagggtgaagacgacgacgacgacgacgacggcgacgacagtggcaggggcggcggcgacggcagcagggacagcaccaagggcgacagcagcaggggcagcaccaagggcggcggcggcggcaggggcagggccagtggctag

SEQ ID NO: 2230 - DNA, 600 bp, Zea mays
  Peptide Sequence Number=SeqID_45605
atggagaatcacaacaaatccctccccctcggtctggaaggcagcccgacgttcgcacgcccagctgggtggagtaccctacttattcagaggcagccgaagccaaggccagagagtgcggccctcccagaggacattgagtccttgattgctccccttcggaatcttctcgaggctgaaaaacaaactcattttgagatgccatccagcaccgatgttgctgaaatggatgttgtacttagcctgttggccgaagattcatctgactctgcccgcactgagccgatgacaattgcgactaggaaagagttagatgaagacgaggaaatccagaaacccaaaggttgtgatgaggctcaggctgctggtggtgtgcttgatgaggaagaagaggaggaagaagaagaaatttcgctgatccgcaagaatagccgtcactacaggggcagcgacattcccgtgcaagccttgtcagcgcttgttagccttcaagggttgtcaatatctgattttgaccaagcactggaagaggtcttctgccgcatgattctgtcgggcaagagatatcccgggtggtttctcgtgcctcgtcgactttag

SEQ ID NO: 2231 - DNA, 288 bp, Zea mays
  Peptide Sequence Number=SeqID_45606
atgcaaccgcgccaagtgggcgcacccctccgacttccaacgcacccagcatggaggcccaggcccacgtgtcatgcaaccggcgcgccggttgctacgtgcgagcaactgcaccgccactcgcaccactaccacgcgtcctcgactgcggaaccagtaccacgacttgaggcaaccctgcgtatgacccagcagtgccagccaggcgcgacggtaccgggaaaagggggataccccgaaaaggatcctttctccgtgaaggaaacaggccccgagcctccctactga

SEQ ID NO: 2232 - DNA, 1026 bp, Zea mays
  Peptide Sequence Number=SeqID_45607
atggccgcagccgcagggccatcaaggtgggtgatcgatcgctctgtgaaggagacgctcccgccggccctcggctccacctcccagccacctcccgtcttcgatggcaccaccaggctgtacatctgctacttctgcccgttcgctcagcgcgcctgggtcaccaggaacttgaagggtttgcaggacaagatggagctggtggccatcgatctgcaggacaaaccggcttggtacaaggacaaggtttacgcacagggcacggtgccttccctggagcacgacagcgaggtcaggggcgagagcttggacctgatcaggtacatcgacagcaactttgacggccccgcgctgctcccagaggatgctgcgaagaggcagtttgctgacgaactgttcgcgtctgccaacgcgttcaccaaagccctctactcgccgttgctgtcccacgcggccgtgtcagacgaagttgttgcggctctggataaactcgaagctgacctatccaagttcgacgacgggcccttcttcctaggccaattcagcttggcggatgtagcgtacgttacgattctggaaagggttcagatatactattcccatcttaggaactacgacatcgcccaaggcaggtccaacctacaggaattcatcgacgagatgaacaagatcgaagcgtatgcgcagaccaagaacgatcctctgttcttgcttgatcttgccaagaaccatcttaaggttaggtactacagaacagatagtaaaagtacgatttttttaaaaaatgggaaaaaatgtcgaagacgctttgaaaccacttctaaccatggtatggagtggctacatacatccgacaacgatagtggggacttgagcaccagccaagctgatgctagatcttcccatgctggtgacatcatgccaagtcctaaggatgagtggtggtcgggcaacatccttggccaatcgaccattcccctagaccgatcagccataccatggccgcctagtcaccctagccactaa

SEQ ID NO: 2233 - DNA, 1392 bp, Zea mays
  Peptide Sequence Number=SeqID_45608
atggcagccgccgcgcctgcaagctccgtgaaggaagtgctgccatctcccctgacctccgcctccgagccccctcccctcttcgatggcaccaccaggctgtacgttgcctatcattgcccgtacgcgcagcgcgcttggattgccaggaactacaagggtttgcaggacaagattaagatagtcgccatcgatcttgctgacaggccaacatggtacaaggagaaggtttatccagaaaacaaggtgccttctctggagcacaacaaccaggtgaaaggtgagagtttggatctggtcaagtacattgacagcaactttgaaggcccatcgttgctcccagaggatccttcaaaaaagcagttcgctgaggagctgcttgcatatactgatgcatttaacaaagcattatacttttgtatagtctccaaggaagatgtgtctgaggaagctgtcgctgctttggataaaatagaagacgccctcgggaaattcaacgagggtccattctcccttggtcagttcagtctggtggacattgcgtatgtaccattcatcgagaggtttcagatattctattccaacataaagaactatgatattacaaagggcagacccaaccttcagaagttcattgaggaagtggacaagattgatgcatacacacagactaaacaggacccacagtttttacttgagcagacaaagaagcggcttggggctaaaaaggcaaatatggtacaacaagtagatgtagtctcaagaataggtatagggtgcaaatcaaatgggccaggagataacataagatatatctataagagctgcagattgtatatgtcctacgtttgcccgtatgcgcaacgggcatggatcacgaggaattacaagggtttgcaggagaagatcaagctagtccctatgaacatggcagataagcctggatggtataaggaggtttaccccaacaatcaggtgccttcgttggagcacaacaagagggtcataggagagagcttggatctgataaagtacatcgatagcaacttcgacggacccaaacttaccatcaccgacgttgctgatctagttggtcgtctcaggatcctgaaaggcaaagttgctgctctggacaaaatcgacagcgccctgttaaaattcgatgatggccctttcttccttggccaacttaatctggtggacattgcatacgcaccattcatcgaaggttttcagatattttttgctggcatgaagaattgtgacatcacccaagggagagttcacatacagaaattcatcgaggaaatgaacaagattgacgcgtgcacgcagaccaagcaggaccctcaagtgctgcttgctctcacaaagaagaagtttgggatttaa

SEQ ID NO: 2234 - DNA, 468 bp, Zea mays
  Peptide Sequence Number=SeqID_45609
atggggaatgtgaaactgatagtgagaggagagaataataggaaggctgagcccttaacagagcttccagaaaagaaatgcaagcgatgtggtttgtatgaggaggacacaattacacctgatgatgtctttgatgaatgggagatgtgttcgagtgatttcaagggtgggaaatacacccggtttaaggaaggccagttcaatgcaacattcctatgtccaaactgcactgcctcaactggacatggaaaccgtgaacctagtgaagatttggaaactaagaagacatctgttgtggtcatcataatagttagtgttcttgcatcagtccttctcaccattgccttgttcgggggctacaagtactggcagaagaagaagcgggagcaagaccaggcgcgattcctcaaactctttgaagagggagatgaccttgaagatgaactgggccttaccaatgaactctaa

SEQ ID NO: 2235 - DNA, 258 bp, Zea mays
  Peptide Sequence Number=SeqID_45610
atgtcaggagatcacgccaagaaggagatgatgaccggcgagaagcccgctacaagccatgggaaggctccatccggggagtccgccaacaaagtgaagggatctccttcacacaacaagtcgggtcggagcagtgacatgaagaagaagatgaggaaggacgaaccgtgtgaggacgtgaaggacgccgacgactgcacggcactgctcgacgcgttcgtctacatcgagacgtcttcagctgctctacgcgtctag

SEQ ID NO: 2236 - DNA, 489 bp, Zea mays
  Peptide Sequence Number=SeqID_45611
atgcccctcggatccccgcggcggctcaccgctcggcccctacaccgccctgaccctaacgcggaaggctccccgaccgacctacatccccggcgacggccaggctcgcccagctcggcgcccgtccccggctcgcccgcccccctccccttccccgaccccgcggcggcgatcaccgcccgccccctgcccgggccccgcgtggcggcgcccgccctcccctggcccgcggcggcgctcgcccgcccctgctcgctgcggcggcgcccgctcgcccctgcccgcccggcggcgctcccccgcaccctgccccgtgcccgcccggctcggccgcccccgtgcccgcccggcctcgaccgcccctggccggttcaaccgcccccctggccggttcaaccgccctggccccagctcgcccgcccgttcccccgtcccggcctcgcccgaccgtatcttcgctcgcccgcgctcgcggtgattattcgttaa

SEQ ID NO: 2237 - DNA, 294 bp, Zea mays
  Peptide Sequence Number=SeqID_45612
atgagcttggcacaactaaaagggaagtgcattgctcaaccatctcaagataaccgtgatcacatggtgaagaagcttgagacgggaacaaccgtggcatgcactaaatcccttgaagaaaatgtcaaggacttgaggattgcaaagaggaaggaacaaaagaagaaaatcaatacctcttccaaaagccttaaccatgcctccatacaaggtaacatccaaggaaataaagaattaatcctatgccgaaaagtcaaggcctacatcatggaggaaagccaaaggatgatataa

SEQ ID NO: 2238 - DNA, 147 bp, Zea mays
  Peptide Sequence Number=SeqID_45613
atggagagtcatgatctccgggcagaatgggaatcacggcttgtgggtggctatgagatcgatggttttgattatgactatggtactggcgaagatgaagctatggaaggagacttccaggagttccaagactacgacgagttctag

SEQ ID NO: 2239 - DNA, 1224 bp, Zea mays
  Peptide Sequence Number=SeqID_45614
atgcagccgggctgcctgatgaaaatccttgaagccgagcgatggctgaaagccggcgtggaccaagtcttcttcaacacgctccaaggtcctccccctacgacacgggggctgggtcccacgcgtcatgcaagctggcccaggacagaaggagccaaaaccgccgcgcgcggtgcgcgcaactgcccagcggttacaagcattcctccgctttcgccaaaccagcgggtgaaaggtcggaccgccatgcaggcagcatgcaaccgcaccaagggggcgcaccctttcgacttcgacgcgtccagcatggaggcccaggcccacacgtcatgtaaccggcgcgccagttactacgtgcaagaaactgcaccgccactcacgccagtaccgcgccttctcgactacggaaccggtgccgcgactcgaggcgggcggaagcagcagtcaagtcgtcagcaagctcacgccccctcctgggatagcgagagaaccctctcccacggcgtgaagacgacgtgcccgtgttccattcctcgaacggcacgcgcacgcacaacggctgccccgcgaatcactcgtcccatcacattaactctgcggcaggacaggcggcacctttggcaggcgaagcaggcgacgcttcacctccgccataatgatcgcgtcaaaaaagggaccgggaaaggggatactccgaaagggatccttctccgcgaaggaagcgggccccgagcccccctactgatcagaggttcgaaggctggcccctgggaagggttcaacagccgccttagagcacttgggctccgcgcccactactggtcagaggttcgaaggctggcccctcggaagggttcaacagccgcctcaggccactcgggctccgcgcccactactgatcaggggttcgtaggctggcccccgaagggttctgacagccgcctcagagcacgtagagcgagggatgaccctgggtacgttcgatacataaccaaggctcgggctacgctcccgagggctcggctcccgtctcggcctcggaagacggtctccgcctcgcccgaccccagggctcggacacagcctcggcctcggaagacggtctccgtctcgcccgacccggggctcggactagacctcgacctcggaggagcctccacctcgccctacctagggctcgagccgaccacgtcacagggagcgccatcattaccctacccctag

SEQ ID NO: 2240 - DNA, 738 bp, Zea mays
  Peptide Sequence Number=SeqID_45615
atggaggatgactcgtgggcccgggcccccgtgctagagactgggctgttggtttcagcgggggtgaagaggcgcactcctgcaggcggtggcgtgctcctctcgcggcggttcgccttctccgcacacggaggccaacgcccgaagagtatgactcgtgggcccgggtccccgtgtcagagactggtccgctgctttcggcggagagtgaggctgacagcagccaagtccggcctcgggcgccataggaagctccgcctcgcccgaccccagggctcggcccccgtctcggccttggacgacgaattccacgtcgcccgaccccagggctcggactcggccttggctccggaagacgacgaactccgcctcgcccgacctcagggctcggactcagcctcggctccgaaagacgatgaattccacctcgcccgaccccagggctctgactcggcctcggctccggaagacgacgaactccgcctcgcccgaccccagggctcggactcggcctcggctccggaagacgacgaactccgcctcgcccgaccccagggctcggactcagcctcggcctcagatgatggtctccgcctcgcccgacccggggctcggactcgacctcaacctcggaagacagactcgacctcgaccttggaggagcctccgcctcgcccgacccagggctcagaccgaccacgtcacaaggggggccatcattaccctacccctagctag

SEQ ID NO: 2241 - DNA, 1017 bp, Zea mays
  Peptide Sequence Number=SeqID_45616
atggggagcgcccgtgttgccttcgtcttgttggaggaggagcgcaacctcacggaggatggtgaccaccagttcgatggtggggagaagcaagccgggctgcggcctctgccccgccttcagcttcaaggatcttcatcatccttgctagggcaaggggagagggcactcaccggcctagcggagggggtggacttcgacaacgcagggccagtcggccgcaagcgtcgtcagctccagcatgcctggctcgctggctcagccgactctggcgctgcttccggtgccacctcccaccgctggggcggagtgtggctgtctgcccgccgtacgagcggctgttgcgccgtgcgcaccgggggaccgtccaagacgtcgcacgccgctagggcggcgttcgtgttcttggattgtcttgtcctcactccggcacgatgcctccgcgcggaggttggtgcctgcctcgtcggcgcgcaggtggccgctgtcgttggtgctgaggtggtggtcgccagaggaggtttctctgccgacgagattgtcagcgccacctgcggccggaccttcggctctttggctttgatagcttgtcctcgcccctcgagtggggatgtgggcgagggccttgccacagcagcatctgccttgaggtcatcactgctgttgtttagccgcccggagcggaggtcgttgtcgctgttgctgcagtggtcggcggtgagccacctggagtttgtcgtcccgcaggccctccgatgtggaggttgttcatacccgcgggagtggaaccggagttccgtttgtaatggcaccttgagtgccgaggcagcagtgtcagcgtggatagaggcggagtcggctcgagaagaggcttcgtcggcccgggggcacgtggcttccctggccgaggaggcgcagcagcggcagctggagcctggccaggtcatccgtgagcgggaccaacttcggagtcacgctgccgaggccgtgagtcgggctgatgtcctcgggggatag

SEQ ID NO: 2242 - DNA, 162 bp, Zea mays
  Peptide Sequence Number=SeqID_45617
atggggctcggtgtatgcggctcgctctgccaaggtggcaatgagattgatggttttggttatgactatggtgctggttctcagcattgcaaccactgctcaggcgaagatgaagctgtggaaggagacttccaggagttccaagactacgacgagttctag

SEQ ID NO: 2243 - DNA, 600 bp, Zea mays
  Peptide Sequence Number=SeqID_45618
atgaacgatcgaatgatcgaacgaacggacgatcggaatttcggcagcataacggcgtgggaggtggtgtgggcgtgtgggggccaagcggcccagaggccttacgtctggctccgcccgctggcttacgtcacgggtagcgggccacgtggcggcatcgggtctccgcctgagcgaggagtgggagtgcgcgcggaaccggcgtccaaggaggatgactcgtgggcccgggcccccgtgccagagactgggttcggcggaggtgaagaggcgcactaccgcaggcggtggcgtgctcctcacgcggcggttcgccttctccgcacacggaggccgacacccgaagagtatgactcgtgggcccaggcccccgtgttagagattggtccactgcttttggcggaggtgaagaggcgcactaccgcaggcagtggcgtgctcctcacgcgatggttcgccttttccacacacggaggccaacgcccaaggagtatgactcgtgggcccgggcccccgtgccagaggctgggtcaccctggagcgcgtcgggcgagatctttagcagcgtctcagggcgtcagtgggggaatctttctttaa

SEQ ID NO: 2244 - DNA, 1029 bp, Zea mays
  Peptide Sequence Number=SeqID_45619
atgccatcctcttcctcttctgctgccgctacaccgtcggccggcgcatcctccgaggagacgctgagcaatgtggcggcggaggagttgcgcgccggcgacacagtggagttcggcgtgtcgcggatgtcctcggtccgcgtgcaagacatgcaacagcttggttatttcggcggcggagtggcacgtgtcccagggacggaggaggtccaccagctgacaccaaatgccgtggtggccctgtcaaaatatgtctgggcaacaacttcatacggtgggcagccatcagtcgaagtcttcgcgaagtattattgtctgcattggcagaaaaggaggatcggaaataagattgctcaatttggatcttgcacagtcgaagaccatccggggctccccgtggccgagatgtgctcgcattattactcagcgtacccgcagtttgaagtggcggaggaggatgcagacgaagggaccctgcggtgcgcggctggcattagtagtgggcgcgatctggttgaggagtttgtcgcgtatggggtgtggcccttggcgcgtggctgggcgctgggcgaagtatgccctcgccagatgccctctcgtggcgggatgctggtgcggagtcccgccttcgcactggatttgcatggccgagatcccgccgcattcgtgcgtgaggtggaggatggggcggtgcggattgttggtcgctatgtgccaaagacggaggcccagcgtagttgggatatacgcggatccaacgatcgcttgaatagggtcttcgagttgaaccgtctgccatatggcggttatcccgggcaagacgttgtcgaccgccgcgggaaaaaaccggctgcagagactgaagacgactccgcgccggcggccgccccatccactaagaagaggaagctaggtactgggaagggaggacttcgcacttgttgtgctagtccggctgcacccttaggcgacttttgcacggatagtctttttgaggaagacttcgatttttcgcacttgttgtgctag

SEQ ID NO: 2245 - DNA, 393 bp, Zea mays
  Peptide Sequence Number=SeqID_45620
atgaacaacacccgacccctccacgtgggcggcttcggggccgccacgtggccagaggagacgatatactccaaggtggtgacagtgggtccggacccccacgagaaagtgccggacccccggatgcatagcccggacctccgagcgaggttcaagacctccacaggccatcctgcaggcggtgtgcccgtctgctccggtggcaggcagtacagccatgccacgacgtacactgtgctcatcatcatccatacgagaccagggaggcttccgatgcacgccaatgctgcgcagatcacggatatcatggcgcaaggagattgcactggaccagcattagttgctccaaggattacatccgttatgtctctggacccgcatgtcggggcttag

SEQ ID NO: 2246 - DNA, 714 bp, Zea mays
  Peptide Sequence Number=SeqID_45621
atggaggcaggtgataccgtatcgagcatggcatcgcccatggtctctgacctcctacgcgccatccccgacaccctagaagttgtgcccagctcaggggcgggggtggccgtggagggcgacacgtacttcatcctcgacaacaccaaggagcaggagatgtgggaggagctaagggtggtgacccaggaggtcatgacgaggtccatggccatgtccatcttcgtccactgtgaacggggtgtctggaccgcgatacagcaccatcgggccatgatgcttcgttccaatgagcaactagcactgaggagctccgaggtggcggacttgacgtcctggtgcgtgggactgaaagaagagggtgcgaacgatcgtgtgaagttgtgtctgctggaggatgaagtctgccgtctaaaggcagaggcggacctgcgcgaggaggagatgcggcaaatgaagggaaaccttcatacgatggtagtggagcgggacgagtctcagcgtcaggttgccgaagcttccctctgtgttgactccctgaacaagcacctggaggccgagcggtttgaggggcgagccttaaaggcccggataggaggacccttcatcatcgccaaggtgctaagtccaaggacgtacaaactctacaacgaggaaggagaagtctacgacaacgcatggaacatagaacagctacattgcttttatccttag

SEQ ID NO: 2247 - DNA, 51 bp, Zea mays
  Peptide Sequence Number=SeqID_45622
atggagatttgcacccaagttactgtgctcatgtgcctctgcgtggggtag

SEQ ID NO: 2248 - DNA, 687 bp, Zea mays
  Peptide Sequence Number=SeqID_45623
atggaggtgggtgataccgtgccgggcgcgacgtcacccacggtctctgacctcttgtgtgccatccctgacaccccagaagttgcgccgagctcgggggcggagggtagtggtgacctcgttcatgccgcgccggacccctgtatatggggagggccaaccctgatgtggatgtctaccgagggcgacccgtactttgtcctcgacgacaccgaggagcgggagatgtgggaggagctaatgccggaggttgtgatgagcgccatcgggccatgctgcttcgttcccaatgagcagctggcactgaggagcgccgaggtggcggacttgacgtcctggtgtgcgggactgaaagaagagggcacgaacgattgcgcgaagacggtggagcgaaaggtgaccgagctgagggagctatccgacgcggtggcggagttccttcgggacctcgacgtgcgagcgttggccgtggtcgcctcccactacgagattgatctcaagcgggtgtgcgagggctatgttttccccgatgagcccaagattgccgacaccaagatgtggaggctaactgacaccgtcaaggggccagggtcttcgctggctcgccatttcgagaccaaggtggttctgcctccctcaccaccgactactgtcgtaccccttgctggtcctcctccgactgcatag

SEQ ID NO: 2249 - DNA, 138 bp, Zea mays
  Peptide Sequence Number=SeqID_45624
atgaaggaccaacttgcagacagcctcgcctataacaacctgaagggtctgattcttagcaaagcattaaaggctcaaaaggatgcaaaagttgagagcaatcagatagcaactgggaatcttcgttcgaagttataa

SEQ ID NO: 2250 - DNA, 246 bp, Zea mays
  Peptide Sequence Number=SeqID_45625
atgacgcccgagaagaagctaggcgaactgaagaggccgctgaacgcgcacagtttacttactatagctgagctatcaccgttgctggagctgtacaatcccctggctgatccggagatgaaggaagcactggatgttataagcattgcaaactctattatcgacgaagttgtcgacaagttattaacgaagccacagaaaacatcattagagaagagtagactttgttgtaataatactttgtga

SEQ ID NO: 2251 - DNA, 153 bp, Zea mays
  Peptide Sequence Number=SeqID_45626
atgttggacgaggccgcgagatgggacgaccacgtcataggccttcgtctggcgacgcgtgggacgaaggcgaggctggcgaaggcattgagcgaagggtggcgtcttcgccttcgccccaacatttgccctccgagggaccagttcgactaa

SEQ ID NO: 2252 - DNA, 606 bp, Zea mays
  Peptide Sequence Number=SeqID_45627
atggcgccgcgcacaaggaaaaccacacgcaagtctaccgggccaattggcgtaccacgccatcaactagcttcaaggcatgaggacagtagtagtggtagcaatgatcctatcgaagatctggaagctcaagtagaacagcttcgaatggagctccatcgcaggaacgaggtatgggtcgaggatggtcagcgaataaacgagttaagaactgacatccgacacttgcaagaccaacttgatgaacgagatttagcgctcgattgggctgttaacgcacgttcacttgcttgggccaaggaagccaaagctcgagcccatgtggaggagcttagcacagccgtggacaacttgcaagtatactataatatactacatgaggaggttcatgtattgtattcacaactgcaccctaacgtacctgcggatactgtcgggatgggagccagaccttctggagcagcgagtgaagcccttggtggggaactggaccttttcaggccccctccttcaatgaatttggttgacgaatggtctcctacacccgacagcgaggctaccaaaagtgataagaagtgttggaacttgctctcccgagcaagttga

SEQ ID NO: 2253 - DNA, 456 bp, Zea mays
  Peptide Sequence Number=SeqID_45628
atggcgaccagcgtgtttctgcttccacagcgacacaacgtgctttcctcattcatcctcattgtcctgaggcagtcaaaagaatgcccactgccgatgcagcgatgttgccgccgtggtcgcgcgtgcccatccaccgttgtcccgagcaagggtgagtacacatcaacatactcaacaattgtcccgtttgactatagtggactagctttatatggggttaaggtcaagcagttgcttttagttggtcagatgggtcaaaggacacttgccttcaccaacccgctgctgctcagggtctccgcctgcaacttcctcagactccgcaaacagaccgttatctatgcgagcgcaaacatacattcacatcctttagttagaaaaaacagtacgccatacaagaaagcaaatgaattaaacacgcacgacatagaactagcgtttacgaccgtgtga

SEQ ID NO: 2254 - DNA, 660 bp, Zea mays
  Peptide Sequence Number=SeqID_45629
atgtgttgtaatatctgcgtgacgggtgaaacgctcttgggcgaggaaaaaggatacaaataccgaacttgtcgagtgattatgagcgtctacaaggttgtccaagatatggcacgtatgaggaaaaccgtgtgcatgtccactggacctattggcgtgcctcgtcatgagctggctccaagacatgaaggcagcagtagcggcagcaacgatccaatcggagacttggaagcccaagtggaacagcttcggacggagctacgtcaccgaaacagggtgtgggcacaagacggtcagtgtattgctgagttggtagctgacgttagacacctgcaagacgagcttgctgaacgggatttggcggtcgattggaccgtcaactcacgttcggttgcttgggatcgcgaaaccaaagctcgtgctcgtgtgacagagcttagtgcggtcctcaacaacttgcaagtgtactgcaatactttacatgaggaaatgccatcatggactcgtgcgcatgacggtgcggggacttcccgtggtcgggaagatactcctaatccgccacctgtaccaccaacactggccgaggttatcgctgccttggtcaatgctactgcagataatacccgcttcttacgtgagatggcgggtaatcaattctag

SEQ ID NO: 2255 - DNA, 711 bp, Zea mays
  Peptide Sequence Number=SeqID_45630
atgagcaccagcagcaacacccatgtatggctgacatcaacctgcaggacccaagaacatgccctacaggccaccgaccagaagatcaacctgcaggacaccaagaacatgccctacaggccgctcaaatatctgaagcaatgcatgtatttctcgaagaagccatacagcgtgtttttggactatggtggttatggccagaatgatgttcttataaagaaatctaaggcgaggctgggccaatggcacattgcagatgagtatgatggccagctgggccaatggcacatcgcagatgagtatgatggccaggtgagggaacttaattgtaaatcaatatgccatcagcaaagatgggcaaggatgggcaagtatagtccaatgtgtcatcagcaaagatgggcaaggatcgtaccggcttggaaagcagagatgcagcggcgggggctcctccttgggcggtggctctgccttggggtgaggtgggggcagctccaggtccttgcgtgccggcggctggtcttcctgttcgccgacggatgtgtgggggtggcgagtcggggcggcagcgcggcccgctggtgctggcgcggccagctgtcggtgtcgagccgaggcccgctgcgggtggcgcggcggcggcgcggtaggccggcggtggagcggcagcggcgtggcctgctggtggagagaagcgcgggcaggaaataa

SEQ ID NO: 2256 - DNA, 459 bp, Zea mays
  Peptide Sequence Number=SeqID_45631
atgggtaaaaacaacaaacgcaagcgcgagccgactcctccatcagaggactttggcgactcagaatactcagaggaggagttctcctctgagtctgaggggtctccagctcccgcctctcccccagcgtcgtccgatgactcggacgactcccaggggttggccgcggaagtctggacgtatatccgggccgtcgagcgctctgggctcgagggctcggatgagtcggagtactcctcggatgaggaggactcggacgacggcggcgaggacgaggacggcgacgacgacgacgacgacgatggcgacggcagcggcggcggcaggggcagcggcggcggcaaggacgacgacggcggcaggggcggcggcgacggcagcaggggcagcaccaaaggcggcagcagcaggggcagcactaagggcggcggcggcggcaggggcagggccagtggctag

SEQ ID NO: 2257 - DNA, 330 bp, Zea mays
  Peptide Sequence Number=SeqID_45632
atgggtttggtggtttgggcctcaaaaccacccagcgctacggatggcgggtttgctgagtttgggcctcaaaactcggcggcggcggttccggagggaaccggtggcggcacgtggcatgatcgcggagggtgcgtcaaggcgaagcaactccgtgagaaggacgtggccgtcggatcaattatccaggagttggtccatttcgcccccagtggagtggataggctctatgtaaataggggttttagtgctctcacatcttcatccctagactgctctagtttagccagggatccgcagcgattttgtacttcgactgtgttcttgtga

SEQ ID NO: 2258 - DNA, 312 bp, Zea mays
  Peptide Sequence Number=SeqID_45633
atggacgagttttacaggttcgggccgcttagaagcccacgaaagaatgaccttacgacttattgggcccttgggcctttcgtgaggtcttttactcctttagtggacccgggggatatctatcccccacaagcccccgatctttgggttaatttagagataatcaacccgaagatcccagaaattggcgtgaagctgtttgcattatgctttggaggtcagcattatgtcatcaatattttgctgcaaaggtcagcgtatattttgtctttagcagccgagtttgcaatccatccatatcttgctaggtag

SEQ ID NO: 2259 - DNA, 226 bp, Zea mays
  Peptide Sequence Number=SeqID_45634
atggaggagcggcctcaggaactcttcagcttcgggaaaagccaacggctcgtccgctataattcaccggacatgtcgacgtcaggattgcccatactggcgcaccggacaatgaacaggagctgtccggtgcgccaccggacatcaaggctggcccacaagtcagaactccaacggtcagattccaacggcactgatgacgtggcaggggcaccggacatgtccg

SEQ ID NO: 2260 - DNA, 585 bp, Zea mays
  Peptide Sequence Number=SeqID_45635
atgggacactggtcttgttctctacggcccgagtcagctcggggttgggcgacgtggaggctcctccgaagccgaggtcgagtctgtcttccatggccgaggccgagcccgagcccctgggtcgggcgaggcggaggtcgttcggcaaaggccagggcggagtccgagccctggggtcgggcgaagcggagttcgtcgtcttccggggctgagcccgagtccgagccctgggtcgggcggagcggagttcgtcgtcttctggggctgagcccgagtccgagccctagggtcgggcggagcggagttcgccgtcttccgggacttagcccgagtccgagccctgggtcgggcgaagcggagttcgccgtcttccgggacttagcccgagtccgagccctgggtcgggcagagcggagcttcctatggtgcctttggcaggacctgactgcctgtcagtctcactctgtcaagtggcactgcagtcggagtggcgcaggcggcgctgtccttctgtcaggccggtcagtggagcggcgaagtgatggcggtcacttcggccctgccggggggcgtgcgtcaggataa

SEQ ID NO: 2261 - DNA, 402 bp, Zea mays
  Peptide Sequence Number=SeqID_45636
atggcggacaatccaggagggtactcaccggcggtggagatgacgacaggccaggccacgatgaagggcggaattgcggtggttcctccacttcggcgagaaattgccgcgcgaccgcccaagttccgggggggtaaggtcaagacaccattgggacacctctacgaccctcacaagccatctattgaggacggagcgaccctggacttcagatgcacagatcaaaattccagcatggaatacaactttgtttatattatttattttattcatctattggagcaaatgtttcagatattcattaggtcagatgtgattgtggacattactccacaactaatcacactcaatcaaagatccaaatcaaacaagtatcataagaacaaacattcaagagcatag

SEQ ID NO: 2262 - DNA, 345 bp, Zea mays
  Peptide Sequence Number=SeqID_45637
atgccgtcgcgcacgaggagaactgcgcgcaagtatgctggcccaattggtgtgccatgtcatcaactggccccaagacacgaggatagcagtagtggaagtaatgatccgatcgaggatcttgaagcacaagtgaatcggcttcaaacagaactccgacgtaggactgacatatgggtcgcagatggcgacagaatcaatgaattgagaagtgacgtctgccgcctgcgagatcagctcgcggaccgagatttagcgctcgactgggtagttcaatctcgttcgcttgcctgggccaaggaagcaaaagctcaagctcgagtagaagagctcaagctcgagtag

SEQ ID NO: 2263 - DNA, 279 bp, Zea mays
  Peptide Sequence Number=SeqID_45638
atgaaggactggcagcctcggccttcgacaagtcttagctcttccccaacgaacgccacacttgcctcatggccaaggagaagaagggcattggttatgttgtcacatgaaattgggagaaaatctccctacaaatcgctctgtcagctgtctgaaccgagctcgccatggtacagtgccttgagtggatcagactgccagagcagagacctcaccgccgacgatccctccaccgtgatttgtgccatcaccgtcccgattcgtgcccggagtggatag

SEQ ID NO: 2264 - DNA, 771 bp, Zea mays
  Peptide Sequence Number=SeqID_45639
atgatggtcctcatcgcggtggcgctggtcgcgctcatgtgcgcgcgccgcaaggcctcttcgtcgtcgtcgtcgtcggccaacggcggcgacgagaagccggcgtcggtgcgggtcctggtgccgctcgaccgggagccccccaaggtcgtggtcgtcatggccggcgacgccctgccgtccttcatcgccgtcgccagcgcgaggaagccgctcgccttcgccgccacaccggccgcgccggccgagggcttggagcggtggctagggtttcgaccatctctagcagtttcgccgtcctccagcgagagctccaaccgtgtctgctatcctgcggttcccaggaaacctaagtcccagtcgctctgctatccgtcaagtggtactacaccacaaattctggagggtgaaaccactgagaacactaatgacaaggatggagactatgaggccaatgatgacaaggatgaagactatgaagaatgtgaagaggtttcccctgcaactactaaaggaaagcgtcatgtttctgttggtcaaaaggacaagggtaaaaagcccagtgttggaacttgctcttcggtgcaaggtgatccaatgggggtatctgagtgcccagcgtcctgtgttaaggacgcatgtgccctcagacacctaggttatccccggaatattcccataaagcgggcgattatggcgaaggcatctagcgaagggtggcgtcttcgccttcgccccaacatttgccctccgagggaccagttcgactaa

SEQ ID NO: 2265 - DNA, 213 bp, Zea mays
  Peptide Sequence Number=SeqID_45640
atgtcgtttcaaggtggagaggaggtcggaggatttcctcgtcttgactacgatgtcatcgacgtaagcctcgaccgttcgactaatgtcctcgcctatggctctgcgcttttctgcgtcgaatcggtgcagaggctgcttcacgggtcgggctccagctcggatatccagcgagtgctcagcgacatccctcggtatgccaggcatgtctga

SEQ ID NO: 2266 - DNA, 288 bp, Zea mays
  Peptide Sequence Number=SeqID_45641
atgaagccgtggaaggagacttccaggagatccaagactacgacgagttctaggtgtgggttagcggcaacccccagttggctgcctgtgaaggccgcggttatctacgtttcttttccgcactttgatttattggaccgggaaaggggatactccgaaagggatccttctccacgaaggaagcgggccccaagccctcctactgatcagaggttcgaaggctggcccctcggaagggttcgacaaccacctcagagcactcgggccccgagccctcctactgattag

SEQ ID NO: 2267 - DNA, 600 bp, Zea mays
  Peptide Sequence Number=SeqID_45642
atgtcttcacactctccccatgcatcgtgcccttccaccttccgagcccccgaatggggagcgcccgcgttgctttcgttttgtcgtcgttggaggaacgcaacttcgtggaagttggtacctttcagccatcactcggcttcaaggattttcatcaggcggcccggctgcatcccctcgccggtggtcacccaagacggtgaccaccagtttgatggtggggtgaagcaagccgggctgcggcctctacctcgccctcagcttcaaggatgttcatcatcagtgctgaggaggggagtgcgccgagttggggcccatttccgcgcgggcagcggcccgctccttccctcagtgatcagggggaagggcgcttgccgttcgtggcgctggcagctgccgcgtgtctggctctccggcctgatcggcttcggtgctgcttccggtgccacctcccaccgaggcagccggaagaggtttctctgccgacgagatagtcggagccacccgcggactgaccttcgactctacggccttctgcttgtcctcacccctcgagtggggacgtgggcgagggccttagcgcagcagcgtctgccctga

SEQ ID NO: 2268 - DNA, 72 bp, Zea mays
  Peptide Sequence Number=SeqID_45643
atggcgctgtcatgccgtccagctcatcatccacctgaagctcaacctgccacgattataaatggattatga

SEQ ID NO: 2269 - DNA, 174 bp, Zea mays
  Peptide Sequence Number=SeqID_45644
atggagagtcatgatctccgggcagaatgggaatcacggcttgtgggtggctatgagatcgatgattctggttatgactatggtgctggttgtcagcattgcaaccactgctcaggcgaagatgaagctgtggaaggagacttccaggagttccaagactacgacgagttctag

SEQ ID NO: 2270 - DNA, 276 bp, Zea mays
  Peptide Sequence Number=SeqID_45645
atgacgcatttcttcagcggcctcatcgatcttcttctaaagattggcgagatgaagcatcttctccttttttatctggacatgttgatgaatggcttcgaggtccctgatctcttggtccaactcttcctcctgagtggctgcagtgcagcccctagtcctgacgaagctttcttcggcgccatgacgaaggtcacggcttgccgaaggtggtcagatgagttcaccggagagggcaccaatgttggggacttgttctcaaatgctatgagttaa

SEQ ID NO: 2271 - DNA, 525 bp, Zea mays
  Peptide Sequence Number=SeqID_45646
atgtcctctgaggatggtcacactctatggcccgggctaccatctcgaacaggaggattggagacaaagccagagaagggactatgcggaggcaggttccatgcagaacaaagtcaacaaccacgacttcggcagtcagacctctgtccttcagcgagcaaatttcggcaagcagcaccttggcttcggccacctctgaataagtgggggactccacctagctgggcgtgcgaacgtctggttgcctccctgatcgagggggagggatttgttgtgattctccatggtgaaccactcgaggcaacatcccttgatgctgtccttgagagggatatcaaggtattccactttcctccccccgcgaagctccaaactagcaccaccaacaagctgatgctgccctccagccataccgggtcaacagtggtaaaggtacctccagagtccaaagtgggggaggattccaagaaaggccttgcacaggtgtacaaaaatggcaacttgaagaatggagttaaggtttaa

SEQ ID NO: 2272 - DNA, 333 bp, Zea mays
  Peptide Sequence Number=SeqID_45647
atggggccggctgcacagacactccgctccctcaccgcgttgatgcactggcgacaggtcatcgctcgacgacggcggtcggcactgcacaccgtcgctggtgagccacttgccctccgtgatatccccgtgaccccctcgcacctgtgctcgcccgcaccgtccccaaatccctcaccgggagccgcctggcggaagaattccaccgccgcggggtcctcaccgtcgctacctcgtggtcggccatccccgatacctcaagtcggctggccaaccgtttctgatcggacgaccagaaatcacccgtaccccttcgccaggccattttgctaa

SEQ ID NO: 2273 - DNA, 240 bp, Zea mays
  Peptide Sequence Number=SeqID_45648
atgggttcgctggtcatggcgcgccgccgtggactcagccctgggttgccggcgttcaaccagttagggagttttgtacccgagtccctgtacaataaggaaactaacccgtggtccaaggaatcctgttcgccgagtcttggtgatcttgcggtagaagagcacgtgactgaggaccctggtgagcagcaggttgaagtagctgagcaggagctcattgaaggcaagttgtgcccttga

SEQ ID NO: 2274 - DNA, 429 bp, Zea mays
  Peptide Sequence Number=SeqID_45649
atgggcaagagtaacaaacgcaagcgtgagccgactcctccgtcggaggacttcggcgactcggaatactcggaggaggagttctcctccgagtccgagggatctccggctcccgtctctcccccggcgtcgtctgatgattcagacgactcccaggggattgccgcggaagtctggacgtacatccgggccgtcgagcgctccgggctcgagggctcggatgagtctgagttctcctcggacgaggaggactcggacggcggcgaggacgaagatgacgacgacgacgacgacggtggcgacggtgacggtgacggcagcggcagcggcgggggcagcggcggcaagggcagcactagaggcggcagcaacaagggcagcaccaggggcggcggcggcaagggcagcagcagcaaggcaagtggctaa

SEQ ID NO: 2275 - DNA, 615 bp, Zea mays
  Peptide Sequence Number=SeqID_45650
atgcccggcataccaagggatgtcgccgaacacttgctgaatattcgggccggagcccgacccgtcaggcagcctctgcgcctcagtcgtcaaggaagggtcggcctcgcctcggcagagcccgaccctccctcgggggctaaaaagggggaacccctctgcgtcgagattgggtgtacttctccgcatcaaaaatcttcgatcaaaaaggggcttctgcgttctcccggctatgtcagaagcagggtcccgaggaagcgaacgtgggtgcataaaagagagtacgacttcatgcaagaaaaacaaagtgttcaggcctcagcggccgcggtaagacgcacattcaacagaaaccgttccaacaaagagttaggcgccgccttgggaaggagccgctccttcagttccgtccccgccgtcggtaaggtccatctcggcttccggcgacggcgcagggggaaggatctccgcctcaaaggtggtcgccagcgccgcccttggacccgcggcgaccgcatcgagccgctgaacttccgccagggcagcttcgtcctcgtcaggaagacaatacccctcactgacccgttccagatccacgacgtagtgggaagctga

SEQ ID NO: 2276 - DNA, 345 bp, Zea mays
  Peptide Sequence Number=SeqID_45651
atggtgaacaaagtacaaatcaaggataaaggagacatagccacgagtcacccgaggccatgcccaggtgggacaagcagccacgactctcctgtggccaccctcgggcgggacaagcagacacgactcgcccaaggacaaccccgtgcggtactggcagtaatgactcgcccgaggcaacctcgggcgggaaaggcaataatgattcgctcgagggaaaccctgggtgggagaggcagtcatgattcactcgaggccatcctcggggggagaggcagtcacgactcacccgaggccaccctcaggcgggagacacaatcacgactcgtccaaggccaagcctga

SEQ ID NO: 2277 - DNA, 573 bp, Zea mays
  Peptide Sequence Number=SeqID_45652
atggccgcagctgagcacttgcacgcgatcgagctcgtacctgcaacttgcaagtcttgcagaaacccgtcgccctcaccgatcggcagcggccccgactcgccgcgcgcgcaccgccgcgtggcgaggccgcagcaggaggaggaggaggaggaggcggcggccgacgtggacacgcggtggaggacgtcgcggaagtggtcctcgtcgcaggggagcgcgatgggcccgggcgccgccgggaagccgtactcttcctccgcctgccgcagcagctcacggaacgacgggtggctgaggtgcgccacccgtaccacgaaccgcctggtggagccggacccggcggcggcggcggcggcctccacgcacacagccacgtgccccgccggcaccgaggtgcaggggcggggggaggagaaggagaaggaggtggtggtggagcgggaggcgtccgcggcgcggccgcgggaccgccaccgccaccgccgcacggcgcggcacagccacacgagggacgggatcgtgatcgccaccttgcacatgcttggcggcgtcgtgcggcgagatggatag

SEQ ID NO: 2278 - DNA, 471 bp, Zea mays
  Peptide Sequence Number=SeqID_45653
atggcgcctcctgttgacgtggtcggtccgagccctgggttgggcgaggtggaggctcctccgaggtcgaggtcgagtctgtcttccaaggccgaggtcgagtccgagcccctgggtcgggcgaggcggagaccgttggctgaggccagggctgagtctgagccctggggtcgggcgaagcggagttcgtcgtccttcggggctgagcccaagtccgagccctggggtcgggcgaagcggagtttgtcgtctttcggggctgagcccgagtccgagccctggggtcgggcgaagcggagtttcctatggcgcctggggccggtcttggctgctgtcagcctcactctgtcgagtggcatggcagtcggagcggcgcaggcgacgctgtcctcttgtcaggcctgtcagtggagcggcgaagtgactacggtcacttcggctctgtcaactggagggcgcgcgtcaggataa

SEQ ID NO: 2279 - DNA, 792 bp, Zea mays
  Peptide Sequence Number=SeqID_45654
atggcgcctcctgttgacgtggccggtctacgccctaggttgggcgatgtggaagctcctccgaagccgaggtcgagtctgtcttccgtggccgaggtcgagtccgagcctctgggtcgggcgaggcggaggccgtcagctgaggcaagggcggagtccgagccctggggtcgggcgaagcggagttcgtcgtcttctggggctgagcccaagtccgagccctgggccgggcggagcggacccgagtccgagccctgggtcgggcggagcggagttcgccgtcttccggggcttagcccaagtccgagccctgggtcgggcagagcggagttcgccgtcttccggggcttagcccgagtccgagccctgggtcgggcgaagcggagcttcctatggtgcctgcggccgggcctgactgcctgtcagcctcactctgtcaagtggcgccgcagtcggagcggcgcaggcggcgctgtctttctgtcaggctggtcagtggagcggcgaagtgacggcggtcacttcggctttgtcggctggggggcgcgcgtcaggataaaggtgtcaggccacctttgcattaaatgctcctgcgatttggtcggtcggtgcggcgatttggtcagggttgcttcttggcgaagacagggcctcgggcgattcggaaatatgttcgccgctggaggggggcctcgggcgagacggagatcctccgggctttatgctgatgggggttaccagctgagaattaggagccttgagggtacccctaattatggtccccgacagtag

SEQ ID NO: 2280 - DNA, 504 bp, Zea mays
  Peptide Sequence Number=SeqID_45655
atggggagaggcaagccgggctgtgatcttggtcctgccctcagcctcgagggtgttcgtcatcctcgctggggtggggagcgaggcgagccggggctctacctcccgcgcgggccggcgggccacctcttcttccagcttctggtggtggcaaccatcctccagctctgcggaggagacgtcctccagccatgccggggaaggcgaactgttgctgcccagctaggatgcaacattccgccctcttcctcgctttcatggcgaggacgggagcgaggacctgccggtgcgctttggagcggcccgctctttggctttaatagctggttcgcgtcccttgagcgggaacgcgaacgagagccctccggcggccgcgtccgtcctgggaccatggttgctgctgcagaggtcgctggtgggtcccccggtgctcgtcgccttgcaggctccccgatgtggaggttgtacatacccgcggggacggaaccagagttccgtctgtaa

SEQ ID NO: 2281 - DNA, 429 bp, Zea mays
  Peptide Sequence Number=SeqID_45656
atgggcaagaacaacaagcgcaagcgcgagccgactcctccatcggaggatttcggtgactcggaatactcggaggaggagttctcctccgagtccgaggggtctccagctcccgtctctcccccggcgtcgtccgatgactcggacgactcccaggggatagccgcggaggtctggacgtacatctgggccgtcgagcgctccgggctcgaaggctcggatgagttggagtactcctcggatgaggaggactcggacggcggcgacgaggatgaagacgacgacgacgacgatgacgacgacggcgacgatgacggcagcggcagtggcaggggcggcggtgacggcagcaggggcagcaccaagggcgacagcagcaagggcagcaccaagggcggcggcggcggcaggggcagggccagtggctag

SEQ ID NO: 2282 - DNA, 306 bp, Zea mays
  Peptide Sequence Number=SeqID_45657
atgaaggtgcgtgtggcccagacgcgtcacgccgggttccgcccgttggcttatgccgcgcgcagtacgccacgtggcagtatcggggctccgcctgagcagggagcatgcgggggtcaggtctgtactcgtgggggtcccggaccaacttggaggtccgaactgtatatccaggggtccggcgctttcccatgggggtccgaactcactgttgatgccctggagtatatcactttctctggccacgtggcagcctcggagctgtccacgtggtggggtcaggtgctgtttgctggcccagagtaa

SEQ ID NO: 2283 - DNA, 579 bp, Zea mays
  Peptide Sequence Number=SeqID_45658
atggccggtgggcgccgcaccggagatctgccgcgccagggaagcagcgcggggagcatgcgggtaggtccggagcgctccaaagcaggcctggacacgtgtcacctccggacccccgcctgggtcttaagtaaggggtccggcgctttcccatgggggtccggactcactgttgatgccctggagtatatcactttctctggccacgtggcggcctcagagctgttcacgtggtggggtcgggtgatgtttgctagcccagatagtaaggggtaccctagttttagggtaccgacagtggcctccgagcccacctcaggggaggattcacccgaccgcttccagtctgaggcggcgctcaacctggtgcgcggcttgcttgggtggagctcgccagcgtacatcgcaaggatccgcgccggtgctgctcccctcggcgatctcgccttcgaggagtttgttctgttcgtctcctacatttcctgcgggttggcgctgccgatctcgccattcttcctactactgttggaggagttcgggctccagcttcagcacctcacgccccactccatcgtctag

SEQ ID NO: 2284 - DNA, 1515 bp, Zea mays
  Peptide Sequence Number=SeqID_45659
atggaactcctggtgaaggggattactggtgagtcctttatccctgaatccttgatactcccccaggacatcccagtgctctgtgatgatccagggctgcgaacggcggtcttggccacgttgccgaccctcgacgagagcggtcccgccatggcccccagctccttggacaagggcaagggacctgcaagcagctcctctgccccaggtggcaccagggggtcggaggaagagaggcgacaccggctatgtcgtaccgacgggtcgcttgtttcggaccccccagaagcgtcagaggactgctggtggggccgaggaggccggctcctaggcctaggtcacgcagaggcacgggcaccagcagcagcaacagcaacagcaacagcagcagcagtaagagcggtggtcatctcgcttccagggtcgctggaaagtccaaggccccaagcatctgctaggagtggtgccagcgatccgcccccggctgctgctgccgagacagcgccaccgggctcccatgctctagctgggggtccggcagcagcggcgccaacgtcaagtagcgtcgcagcggcggaggaggtcccaactgcgctgacggctaccgcagcctcaacgacagcgatgccgtcgagcccaccgtcagcaacggcgggggaggtcccaactacgcccacccctgccatcgagggtgacgaggggggagcatccagctccatcccgccaccaactccggaggagacggaggtggtttttcagcggcggctccgaagggacctccagaaggtgtacgctcgggagctggaggcgtcctggagggaaaagaagttggccaggagggaggaggtcgtgtctcagcgggaggctctcgcaacaaagctccgggccaagctgagtgccttggacaagatcctggtaaagcagcggatccagcagaccacagctgtgaagaggctgcaaaagttgcagcaagagctcgagggcaaggccagcgacgtcgccctcgccgaggagaagcttaaagcgagaggagagtccttggataggcgggagacggatctcgccttcagggaggaaatgctcacctggcgaggtgagctgctagtcgagcacgagctcgaggcggagaagaaggaaaaggagctagaggagcagcgcatcgccgcatgggccggcgaggcgagcatggcactggtgccgctagggatgagtcccatcccggtgtcggagctgccgacgtctatctccaacacactcccggtgctggactccaccgccgaccgcctccgatgcctagaccagattcttggcgcctgcctggaggccgagggcggcagactctactgggcggtaatcaagtatatcttgacgtgcttccgaagccacgacccggttatatccttggagctagtgatcgctggtccagtggccgacactgaagatgtaacacccctggtgttactgctactaaaacttgagcatggcatcataaacattggcattgcatatgtttga

SEQ ID NO: 2285 - DNA, 666 bp, Zea mays
  Peptide Sequence Number=SeqID_45660
atgacttcccacggatcctcagacgacggaaatgcactgtcccacactgacgggcttgcacgagagggttttccccgcattttgtgggaggtacttcagggggccggatacacgacgcctcctcagtacgcggtgcagcagttcgagaagcatcgagtgccccgctgtaggtcaggctggcgttcactagactctgagtcctttggataccgggctgaggacacgatcgaggcgattgctctgcacgggttgaccactttctgcggattccatcccttggagctgtctacccaccccattggcttgttccccgcggaaagggaggacgacccaatgtggaaggatcgggtggagcacgccaaggacatctgggctatctacccaggtcagactgcgcacttgaccatacggtgcatgaatgctctgtaccgtctgcaagtgatgcgcggtgaggcgatgtcccatctgatggcactattggaggcgacaaagatcaccttagacaacagaggggagcttgtggttgatttttccactgaaatggtggaaaaggatttgcaggtggagcagctatccaatgagatccaagagttggaggaattagtgggtaccaaggagaacaccatagaggttctcgaggatcatctcattaacactcagcagtag

SEQ ID NO: 2286 - DNA, 270 bp, Zea mays
  Peptide Sequence Number=SeqID_45661
atggtctcccattccggttatggtggatacaagtgcggtcactgcacgacgacagtcggggtcagtgaggcattgtacgccaaggcggtgagccctgatctgctgacggggaatcgatggggacggttgatgtgtgtggggacggagtgcctcgccacgtcgtgttctctggaggacatggttgctggagtgacttggcagtccatcttgccaccgggttggactgtcgagtgggaccctgcctcggttgaggaggagcatgaggagtga

SEQ ID NO: 2287 - DNA, 804 bp, Zea mays
  Peptide Sequence Number=SeqID_45662
atggggtgcacttgtgctaccttgctctcgctgccgttggaggagcgtggcctcgtggagggtgatgaccgtaggccttgtggtggggaagagcgagcctggctgtggcctaccctccaccctcagcttcaaggatgttcatcatccgcgctaggggagagggtgcgccgcggtggggcctgcctccgcgcgggcagcggcccgctccttccctcagtgatggggggagtagggcgttcgccgtctgtggcgctgtcagctgccgtgtgtccggctctctggctagggcggctctggtgccgcttccggtgccgcctcccaccgctggggcggaatgtgggccggccacgaccaggtcctccctgcgccgccagtcgtaccggggggtcacacaacacgtcgtacgccgcgagggcggcgctcgtgttctgggacggtcctgttctcgttggcgaagacgggagtgaggacctgccggtgcgctttggggcggccgccgtatgccggcgcggcattggtgggcaggtggccgctgtcgtcggtaccggggtgccgtctgaggcggaggtcgttgtcgcgctgctggtgctgcggtcgccggcgagccacctagagcttgttgtcccgcaggccctctggagtcccttggctcggtcggctttgctgttcgagacctctcttgctcagtttcgggaccttcggccgctcttcgatgagctaaagccggaggtagcggtggcgcggacagaggcggtgtcggctcggatagaggcttcgtcggcctgggagcaggtggcttcctag

SEQ ID NO: 2288 - DNA, 207 bp, Zea mays
  Peptide Sequence Number=SeqID_45663
atggagtccctgcagaccgtgcacagaagccacgacgacgcgattcacgtgcgaggttacgagccacctgaagagcaagttggtacctggaatctcaagtcccaggcaagttgtgcccttgatcacttctttttacctactcatgttctgattaatcataatgatctgcataggttaatttttatgggacccaataggtcaccctag

SEQ ID NO: 2289 - DNA, 558 bp, Zea mays
  Peptide Sequence Number=SeqID_45664
atggcgctgggcaacctcagctccggtcgctgctcccgtaccacgcgctgggcggagttcgaccggttgagcagccacggccgggtggccaccctcgccggctcgcagtacacgctaaacctcacctatgacatgggtaccgtccgggtgaagtcggggtggtccggccccaagatcagcagcagcgtgtactccacccgccccgtcgcggtgtacgaggcctgctgtgctgcttgttcacggaatcacaacacaggtcacgacttcaactgcttgaagctaagtttacctgaaagtccaatgtcttctatggagatctttgagaccggccctgcccccagcccagcgtcagggaagtccgcgagcgtgaaggccaagacgcaagagaagagctcgtcgtaccgagtcggtggtgcccgttgcttgccgcttgttgctgtctcgtcggctgggctgacgctcttgtgtgacgatctgagcttctcagcatgtgattgccttgcctctaacctccgccaccagttcctgccgaggcaggcttcaggaatcagaaactag

SEQ ID NO: 2290 - DNA, 855 bp, Zea mays
  Peptide Sequence Number=SeqID_45665
atgccgaagaaaggagtgtctgacttgtggagctctttgagtgcgactcccaagcctaggagtgtccgggggaaggagaggtcggtgtcgtgcgcggagaggggcggcacgttcggcggcggggcggcggtggacgtccggagctacaacgcctcctacgcgaggctccagccgcggccgccgacgtccagggtgcagcgcgccaggagcgtgagcgcgtggacgcgcccggcgccgccgcccgtgcagtcgcagtgcctccccaccgccctccacgcccggccggcgacgtcccgttccagatccagaagttactttggtagtaagaataatttgacacaggttgctgaaaatttaattctcgagaaaacatcatgtcctttgggtgtcctattggttatttttgagtccaggcctgatgccttggtccagattgcatctttagcgattcgaagtggcaatggtcttctcttgaaaggtggaaaagaagccatgagatcaaacaaagtattgcataaggttataactggtgccattcctagcaacgtgggtgaaaaacttattggccttgttacaagtagagaagaaattgctgatttactaaaggagacattgcttgttcataaagatcttataaaggctccaggtcttgatgacttactgctatcactcaaaacagaaggagttgctatttttgggggcctgttgcacatgaagtattgtgcattccagaagcaaattcattccatcataaggctgcaacaccatctagtggagggtgttctggacaaagaaagcttgtaccttaaaacaggaggatacaagaagctggagtggttgtctgaaggcttttga

SEQ ID NO: 2291 - DNA, 687 bp, Zea mays
  Peptide Sequence Number=SeqID_45666
atgccgcacagcgccgccgaggggacgctacggcggggcggtaccggcgaggacgctggtcaagggggggaggacgaagcggtgccaaacttccctgtgcggcgagatggcagaggggaggacagaggcgacggtcggagactaccgttactggatgtcgtgaccgatgcaccgaaagcgactaagttcctgggccaaatatttgctagagtcatactgaaagacgggatctcgctgacggagggaggagggctcctgcaggagtggaatggcagggaagagccagcaggacagcatgccctggaggacagcctcgcatccgaggatctggggagcatgctggagtccatcagagtggagagggccaaatattcactgatgtgctttcagttccctgttggacgtatccaccgtcagttgaagcagatgattcaagcaaatggtcgtgttggtgccaccacaaccgtctactcagctgccatcctggagtacttgactgccgaggttctggagctggctgggaatgctagcaaggatctgaagttgaagcgtatcacccctcgccatttgcagctagccatttgtggagacgaggagctggacaccctcatcaagggcaccatcgcaggcggaggtgtcataccgcacattcacaagtccctgatcaacaagtcatccaaggagtga

SEQ ID NO: 2292 - DNA, 249 bp, Zea mays
  Peptide Sequence Number=SeqID_45667
atgtccaaaccggacaaaactttccccctccttatcctcccggtgctccccagccttcttaaccctggggttggaccgcacgagttcggattgagtgactgcccacacattctcgagtggttgtacgataaaggagtacagaagatctacttccggaagttcgggctccgacccttcttccggagctacgggatccggatcttcggtccccgcttcttctgggaaacaagcagtaaaacaatacattaa

SEQ ID NO: 2293 - DNA, 453 bp, Zea mays
  Peptide Sequence Number=SeqID_45668
atgaccgactcgccccgtacctacgtcgacgagcgtcggtcggctcgcggttgtgaccgtgtgcgggggcagcaggtttcggaggaagaacagggtgaaggccaagaagacgaacggggcgtccaacgacggcgaaaacgatggtgcgtgcatgatgtgaaacgtcctcgtggatgtgcaatagccactgcgcgagtcggtgtcgaggctggtatcggacgaatacggggaggaggcacctgctcctacgccctctgccaagaatggggtggcgcggagagaggccgtgcgatggtgacgtccgtgggcgccactttccgtgttgagggtgtcgcatttcccagcactgtcttccatgagcaaaaggctggtccatctcggataggcagagatggcatcccggacgtcactaccttcctgatggtgtcgctattgaagcttgccttcggttga

SEQ ID NO: 2294 - DNA, 654 bp, Zea mays
  Peptide Sequence Number=SeqID_45669
atggaaccaaagcatcccattacctgctttcctcgtttcacgtatgaccagcaatcatctgaagaagtaaagaaatatctgaacttgtcgttctcgggctcctgcagcaggttgcccagcaggcgtttgaccacctccacggaggccgcgggcggggccgggtcggcggcgaggtacgcggaagcgcacgcgcgggcgccccctgccgacgcgaggcagccgtcgaggtgctcggagacggcgacctcggacgggaacgcgtcttcgcagctggggcaagcgacggcggcggcggccgcggtgccgttcgcatctggacagcgggaggaggagacgaggggcgtgaagggggcgaaatcggagcggcgctggtggagagctgtcggcgctggtggagagctggagagctgccggtgcgatgggttcgcggcggcggcgcgatggcttcgcggcggcggaggagcgtcgcgtgggctacaaccctgcgcggcttcgaaccgaagccaactgacgggcgcttcgggcgttaagtgggcggaaggcttcctgcggaagcgcgtcgcggagaagcggcgcgagaagctacccgtttggctccagcttctgcttctgtcggccagaagccgcccagaagctgaaccaaacaggggctag

SEQ ID NO: 2295 - DNA, 138 bp, Zea mays
  Peptide Sequence Number=SeqID_45670
atgaccatccatatggttaaaccagtcagatgcaagtgggatttcatgaagaagcttaggcctaatggtaaagaaggagaagaaggtgtcgaggcagatctccaggagttccaagacttcgacgagttcgaggattag

SEQ ID NO: 2296 - DNA, 2358 bp, Zea mays
  Peptide Sequence Number=SeqID_45671
atgcggaggacttggcggtgtggctcgtggggcgttacgtgcccgaggacggaaggccagcgcagctttgacatccgcgggtcaaatgaacgtttgaacagggtcttcgaattgaatcaactgccgtacgacggctaccctggtcaagacgaagcggaccgccgtgggaagaaaccggcggtggagactggaggcgaccctgcgctggtggccgccgcctcctcgaaaaagagaaaattaggtactgcgatgggaagacttggggtgtctgatagtttcgctagagagttaatgaggacgtgcgcggccccgggggagaggatgtcttcgcccgagctccgggagtcttcggctcggatgctgagggttactgggggttgttggcctaaagacattcctatcccctgcgcggctgaggaggactgttttacatctcgtatggttcatcggtggagagtttttccttatgggcgaaatatcggtcatgttgtgtgggcagtgatggacaaggatcgccaaggggcggcgcgaaaacgccaggcgactgtgagggttcacgaagctcggccgaaaaaacagcggggaacggcgaaggcggaggcctccggcggaggcaagccgccgctgccggcgaaggtgggcgcctctgcgcctggcaaggcgccggaggtgacggtgggcgccggaggccccaagctgacgaaggtggtgccgtctgtcagcggagtggcggaggctgcgaaggcggcccgaacgttaccgccgcccggcaaacgcgttgccgacttcggcaccgagattaatgtggaggattatcttggggggtcggacgagggcccgctcactctagttgtgcctggcgcggcgatcgcgacggctgcgccagcgccgaaggcggggggagaggcccttggcgccggaggcgaggtgtctgccctcgcactggtcagggacgaggcgggcgtggcgacccgccggctgaagggagcgatggaggcgttgagtcgagcgacggaggcgttgagtcaggtggctgacttcaccagccgcaccgcgtcgggggcccttacggtagctttgtctgccgaggtcgagagacttcggacgcaacatgctgacgctgtccgtgagaagtcggcctccgacagcaagtgccgcaaactggcggagaaggtggccgccctggagaaggagaaggctgacctccggcgccagctggcgggggagaggagggaggccaacgaagccatcgccaaagagcaggctgctcaggcggaggccaggctggcgcgggcggaaggcaatatcgccaaggagctcgccggagagctgcagcggcggcttactgccctggagagccgcgcggagggggccgaggccgcgatgcgagcggaggccgaacggacgcgcacgcagctcatgactgcatatcgcgagctgggtgtgcggacgggtgacttcgaggtgccggagcgagaggccggacttcgctgtctggaatgggtgcaggaggaactgcaggagctccccactgtcttggcggggttgatgtcgttcacctccctggtcacctgcgaggcagcgatgaacgcgctctctcgcgaaggctgccggcactttgaggccctcgaccaggcagatgaggattttgggcgagatatctttgaggtcgaagaccccgtggtgaaggaatccgccggggccctctatgaccggatgtggggttcatacggttgtgaggtggtccgggcgcgggccgaggctgcgagggctcaggcggagcgcggcgagcgggtggacgacttcggggcgctgaacagcgcgctgcctgacccggagacgacccctgcggaggccgcgactagagtcgccccgggaccgaccccggaggctacggaagatgcaccaggcgcccctgcacctgctgcggccggcgaagaccttcccccaaaggtggccgaaggcgcgcccgatgcccccgcagctgctgtgccgagcgctgaagatccagcggaggtgggggcggaggcagcggcggaggcctcggcggaggctcccgcagcggcagggccctcgcagattttgggcctgcgcacgcaacccgctactactgagtttttggcggcttcgaccgcggaagatggaaatgaatatggtgggtctgtttctgagttttttgattttactgactctgggagctcggttgagtggtctgaggagtcttcggagggggacttggattattttgcggccttggacgtggctgcggcggaggctgcgccacacgctgcggacgcgccagacgtgcccggtcctagcacccgggcaccgacgacgaagggcggttgcgaagcgtag

SEQ ID NO: 2297 - DNA, 72 bp, Zea mays
  Peptide Sequence Number=SeqID_45672
atggccgcctggatccgtcgttctcgatccgcgctacacgaccacctcctccgtctgctaggatttgagtga

SEQ ID NO: 2298 - DNA, 435 bp, Zea mays
  Peptide Sequence Number=SeqID_45673
atgaccgttggtggaggctgtctgtcgtatggtgcaccggacagtccggtgcacaccgagacacgtgcggtgcaccagccacgtcaccaaggtcgttggattccgaccgtcggagcttctgtcttctgggcccgcctggatgtccggtgcacaccggacatgtactgttcaatgtccgcggagcagccgctgcgttttcccgaggctggcgagttccggaggccgctcttccttggagcaccggacagtccggtgaattatagcggagtgcctctggaaattcccgaaggtggcaagtttgagttggagtcctctggtgcaccggacactgtccggtggtgcactggacactgtccggtgccccagaccagaggtgccttcggttgtccctttgctcctttgttgaatccaatatttgatctttttattggctaa

SEQ ID NO: 2299 - DNA, 153 bp, Zea mays
  Peptide Sequence Number=SeqID_45674
atgggtcggcgcgagacggagcgcgaaggggggaggcagccagagacgggcgtgagagaggtgaaaatcccgcggccttcgtgtttgtcccgcgcccaggtcgggcgcaaggagaggatccaggtgtacaatgggggtgtagcagagtgctaa

SEQ ID NO: 2300 - DNA, 408 bp, Zea mays
  Peptide Sequence Number=SeqID_45675
atgggcaagaacaacaagcgcaagcgcgagccgactcctccatcggaggatttcggtgactcggaatactcggaggaggagttctcctccgagtccgaggggtctccggctcccgggatagccgcggaggtctggacgtacatccgggccgtcgagcgctccgggctcgaaggctcggatgagtcggagtactcctcggatgaggaggactcggacggcggcgacgagggtgaagacgacgacgacgacgacgacgacggcgacggtgacggcagcggcagtggcaggggcggcggcgacggcagcagggacagcaccaagggcgacggcagcagggacagcaccaagggcagcagcaggggcagcaccaagggcggcggcggcggcaggggcagggccagtggctag

SEQ ID NO: 2301 - DNA, 2559 bp, Zea mays
  Peptide Sequence Number=SeqID_45676
atgagtagcgggcgcgaccttgttgaggagtttgtcgagtatggggtatggcccttggcgcatggctgggcgctgggcgaagtatgccctcgcaagatgccctcccgtggtgggatgttggtgcaaagtcctaccttcgcgctggatttgcatggtcgagatcccgccgcattcgtgcgtgaagcggaagacggtgcggcgaggatcgtggggcgctacgtgccgaagacagagggtctgcggagctgggatatccgtgggtccaatgacaggctgaatcgggtcttcgaattgaaccgcttgccgtacggtggttatcccgaggaagacgccaccgaccgccgcgtgaagaagccgatgggcggtaccgaggaagggccttcgcaggaggctgccccagccactaagaagagaaaattaggtactataatggggggaaagggggtgtctgataattttgctgtggagttgatggggacatgtgcagcccccgggggaaggatgtcttcgcccgagctccgggagtcttcggcgcgaatgctggaggttaccgggggtcggtggccaaaaaatcttccgatcccctgggcagagggcgaagacatgtctacgtctcgtatagctcgtggcttgaggattttcccttacggacggaatattcatgctgttgtgtcggcagtgatgaacaaggatcgccatgatgctgtgcagaagcgtcgggcggttatcaggcttcccgatcctaggcgtgaggcgaagagagcgcgggggagcgcgaaggctgctgcccccggcggtagccaaccgacgccggctgtgaaaccggccgcgctcggatccagcaaggtgtcggagagcgcgaaggcggtcatcgccggcggaaccaagcctaccccgggcgaagctgcgaaggttcgggagatgccttcgccggggaaacgcgttgccgacttcggcacgaatattagcgtggacgactatttcgttgggtcgggcgaggggcaaattgttgttgtcccgcctgcggtggcaaccacggcgtcaaccgtggtggttggggtgaagggtggcgctttctgcgcaagcggcgagatttcgtcggccgctgccgtcaaggacgaggcgagctccatgtcccaccggctgagggaggcatcgcagcagctgtcgcagcagctaagtcaagcggccgacttcgccgaccgcgtggcatcgggtgcccttactgcagatgtggctgccgaagtcgagagacttcgggcgcagcacgcggatgccgtccgggagaagtcagctgcggagagcaaaaaccgtaggctggcggagaaggtggccgccctggaggccgataagacggacctccggcgccagctggtggaggaaaggagggaggccaaccaggccatcgccgaggcgcaggctgcgcaggcggaggccaaattggcgcgggcggagggaagtctcgccagccaacgcgccgagaagtgggaggtgaggttcaacgctctgcgcgaccgcgtggacaaggtcgaggcctctacgtgctcggaggttgagcggacgctcgcacagctcgtggactcgtaccgcgagctgggtgcgtggactgctgacttcgaggtgcccgaccaagaggcgggccttcgcttcctcgagtggttgcaagaggaattgctggtactcccgagcatcatagagggtttcatgtcctatgcctccctcgtcacctgcgaaggggccatgaatgcgctgtctcaccagggctgcagacactacaaggtcttcgaccaatcagacgagagctttgaacgtgagatctttaaggccgaagaccctgttgtgaagcagtcagcgggggcactttttgataggatgtggggggcgcatggtcgggaggctgtcagggagcgacccgaccgggcgagagagcagatggagcgtgccaaggacgtcaaggacgtcagaggtctggtcggcgcgccgcccgaggctgcggaggtcaagccggtgctgccctcgaatgccggtgaaggcccatcggacgcactcgtgcctgctgtggccgacgaagaccctgtgtcggcccctgtgccgacggtcgaaggcgtccaggaggtggtggcggagccggcagtcgaaggccctacggtcgcgcccgtgccctcgcagatgattctgtgtctaagtttttttgagtctgatgattctaggagttcagttgtgtggacggaagagtcttcggatgaggacttggattattttgcggcatttgatgtggctgcggcggaggcttctccgcatgtgatggatgctgaagctcttcctggtccgagtgctgggcgtaagcggcgaagggcggtggcgaagcgtagagtgagtgaggtggagggtggtcgtcttcgtgtggacagggctggcaagcgggaattgttgtcttcgctggttggggcgagtgtaggtgagggggagttgcaaagtctttttgagggtgaggagctgaggataatgttgtttaactacagggagatgggtatcatcccgaaggttgaaccaatgtaa

SEQ ID NO: 2302 - DNA, 744 bp, Zea mays
  Peptide Sequence Number=SeqID_45677
atgggtcaagttaatatggtagaaatcaaggaggccgcggaaaaagggagagatgggaaggccgaggccgcggagaagaaaaggggcgcaactggctgttggggtcgattggaggaatcaccacagcagatgagctcgcggtcttcctcttgggtgccatctcgattctaccagcgagcagagcggaaggcgaatggcagagaggattcggaagcggaaaagcaagaactagggcacggaaagcaaaggcggctaaaagcgcagctcttatgggatattcttgagccagataccgtttcaaaaagtgcccagtcatcacccggcggttatttccaaaaccccagcatgccacgtggaaacccggcagttatctccagaacaccggcgcgccacctcatcactcggccatcgtcctcaaattggctcacacggcctgctatcactcggcgttgcctccaaaacgccgattttgtgttcagtcgcccgacattacctctaaaagtgccaacgtcgccttccagtcggtcggcgttgcctccaaaacgccgacttcacgttcagtcgctcggcattacctctaaaatgctgacatcgctttccaatcactcggcgttgcctccaaaacgccgatttcgtattcagtcgaccggcattacctctaaaaatgccgacgtcgccttccagtcggtcggcgttgcctccaaaacgccgacttcacgttcagtcgctaggcattacctctaa

SEQ ID NO: 2303 - DNA, 378 bp, Zea mays
  Peptide Sequence Number=SeqID_45678
atgggcaagaacaacaagcgcaagcgtgagccaactcctccatcggaggagtttggtgactcggagtactcagaggaggagttctcctctgagtctgaggggtctccggcccccgtccccctgcgtgagtcgtctgacgactcagacgactcccaggggctcacggcggagggctcggatgagtcggagtactcctcggatgaggaggactcggacggcggcggcgaggacgaggatgacgacgacgacgacgacgacgatggcgacggtgacagcagtggcagcggcggcggcagcaggggcagcaacaggggcggcagcagcaggggcagcaccaagggcggcagcggcggcggcagcaacagggccagtggctag

SEQ ID NO: 2304 - DNA, 306 bp, Zea mays
  Peptide Sequence Number=SeqID_45679
atggataaaggaaatacagttttgcgttggggtccctggcgaaagttcttaagtgaattacagacagtggccgcggaggaagaaaggggcggaggggcataccggcggcaagactgctccgatgaggtggtcgagggtgtaggggaggtcctgagggtcacggtgatgtgcgggtcgtcgtcggggatagtcggagtcggccggtccacgtgcgcaggcggggaagctcgtcggcagcgaggagtccagcctaaccagggcacgattggccaatcaaatgggtcagcgagcttcaccagggattaa

SEQ ID NO: 2305 - DNA, 507 bp, Zea mays
  Peptide Sequence Number=SeqID_45680
atgggttggcgtgagatggaacacaaggggaaaacgcggcttgtattatctcgcaccaggggtgtgctcgtagtaggggttacaagcgttcgcgagagagagagaatgagcatgttcgtttgctcgtccctctgcgcgaccctcccgcaggaaggccctacacctcccttttatagatgcaaggagagggtccaggtgtacaatggggggtgtagcttatgcgctaacgtgtctggcagagaggtgcctaagccctgtgtacatgccaacgtggctgttggagaggtgctagagtcctgtgtacgcgataacgtggccgtcggagaagtgcctaagccctgtagaagcacagctggcggtgctgccgggatcctgctgacgtctccttgcttccgtaggggggctgagaaccaccgtcgtcatggacgcacgcggggagccatcattacctgttaccgggacgagccagatgggacgccggtcttgttccctcgtagcctgagctag

SEQ ID NO: 2306 - DNA, 558 bp, Zea mays
  Peptide Sequence Number=SeqID_45681
atgatggtcctcgcctcagttgccgccacctcgttcgtcatcctgtttcttttctctctcccctcatgcctccgcctccgcgccacctattctcgccagagggcatgggagcaggcgcctcctccccgtattcgtccaacaccagccccgacactgacccgcatagtgcctattgcacgtccacgaggacatttcacagcatacgcgcaccatcattttcgcagtcgtcggatgtctcgttcgtcttcccggccttcgaccagttcttcctccccaacctactgcccccacacccatggtctcagccacgagccgaccgacgctcgtcgacgcgggtacaagcggtatactacctatgtcgcctctagatgctcaggtcttcatcgtgtccttctccggcaacgaataggtatgcctgcctcttcccttcccttcctactctacgaaaccttggaagtgggggaggcgagggatggggtccctgatttgctgcctatggtacctgttcgatggctcggcatcgcctgtctacatggtctttcccttaccacggtgtag

SEQ ID NO: 2307 - DNA, 210 bp, Zea mays
  Peptide Sequence Number=SeqID_45682
atggggacaagcggacatctcaacctcaacattggagctaagttcatagatcaaaagtatccaaaggggtctacctttgatcttgttggatatttcaatatcgactgtgccggatgtaagagcaaagtcacactcctatgtgataatgagagtgcaatccgcattgtggaaaatcctattgatcacagccgcacaaagatccaaaaataa

SEQ ID NO: 2308 - DNA, 507 bp, Zea mays
  Peptide Sequence Number=SeqID_45683
atggggatttggcttcctggacggagacgagctccagctccgaacagagtcgcgcgacacgaggctgacggaggggatggagtcggacgcgtcagcgagtgcggcagcgacgacctctccttcacacccgccgccgccgcgggcatccaccacctgctgcgctcctgcgcggccgtcgctggaatcgctggaatcgctcctttgctgctgatgcagatcgaaatgggatttggcttcctttatggtgcgcaatcagggtgtgaacgagaatatgtggcgcatggggaacgatgcagcggcggtagtgcgaacggcgtgacggaggctagttgccagatctgcgtggatttcgaaagggatgccagatctgcgtgcctaaagcaagggccgcagcgcagggtggcagggcacaggttggaaaaaggcctggccctggcgtggctttgcgatttgatgctggcgccacaaaagtccatggcaatgcaaatgacactgttgatgcaatga

SEQ ID NO: 2309 - DNA, 444 bp, Zea mays
  Peptide Sequence Number=SeqID_45684
atgggcaagaacaacaagcgcaagcgtgagccgactcctccatcggaggagtttggtgattgggaatactcagaggaggagttctcctctgagtctgaggggtctccggctcccatccccatgcgtgagtcgtctgacgactcagacgactcccaggggctcgcggcggaggtctggacgtacatccgggccgtcgagcgttccgggctcgagggctcggatgagtcggagtactcctcggatgaggaggactcggacggcggcggcgaggacgaggacggcgacgacgacgacgacgacggtggcgacggtgacggtgacggcagcggcaggggcggcggtggcagcagcaaggacggtgacggcggcagcagcaggggcagcaaccagggcggcagcaccaggggcggcagcggcggcggcagcaacagggccagtggctag

SEQ ID NO: 2310 - DNA, 135 bp, Zea mays
  Peptide Sequence Number=SeqID_45685
atgtatccaccaggaccacaatatgggtatggacaagttctcgctgcaccgacctatcactatcattatgacagattgaaacaatatcacgttccttccaacatgcctgagtactatcactatgactcgagctga

SEQ ID NO: 2311 - DNA, 1257 bp, Zea mays
  Peptide Sequence Number=SeqID_45686
atggccatgctcgctctctcctcccgccccctctcctcctcctccttcctccgctcgaagccgcgcgcgctccacctccaccgccacctcctccccaaacccctcggctccgcctccccgctcacgccgcctactccccgcgccgaccccgccccggcgccggacgcggaccccaccccgctcttcctccgcccagcgtcccaccgggtcccacgcgccgccctcgccgcgttccgccgccgcgcggccgcgctcgtcccgcccaccgcgccgcacctccaccgccacctccgctggctcctcgccgacgccaccggggacccgtccgccgccaccacctcgtcctccgaaggcccagcgctcctccgcgcgccgctcgaggacctcgaggccctgtggctgcgccacgtccgggagcgcacgccgttccagtacgtggtcgggaacgagcactggcgggacctggtggtcgccgtcagggagggcgtcctcatcccgcgcccggagacggaggccatcatcgacatggtgcgcgccgtggaggacttcgccgacgggtggtgggccgacctcggcaccggcagtggcgccatcgccgtggcgctcgccagggagctcgccgggcaagggagggtgttcgccacggatgtcagcgaggtggccatcgacgttgcgaggctcaacgtccagaggtacggtgtgcagcatcgttcggcttttggtgtgcctttcattgaagaaagcatgcccaaagatgttcctttagcctttaagttggctgctcaaagatgctcagctgatcaaatcgatgctgaaagcatgcccaaagatgctcacatccacctagaggtggacgtcaatttattacgccgtgctggagataaagttgaaataaggcatggctcatggtttgaacctctggaagatttgaaaggaaaacttatgggtgtgattagtaaccctccgtacataccaaccgacgacctacctggtctgcaacctgaggttggttggcatgaaccaaagttggcgcttgacggcggcaaggatggccttgaacatctgctgcatctctgtgaagggttatcctcagttctgaaacctggaggcttctttgtttttgagacaaatggcaacaaacagtccgagctccttgttgatttgataagcacaaagtggagttgttcttttcacaatgtcaaagcagttttagactttgcagacatcaagcgttttgtaacgggatatcgaagatga

SEQ ID NO: 2312 - DNA, 438 bp, Zea mays
  Peptide Sequence Number=SeqID_45687
atgggcaagaacaacaagcgcaagcgtgagccaactcctccatcggaggattttggtgactcggagtactcaaaggaggagttctcctctgagtctgaggggtctccggctcccatccccctgcgtgagtcgtctgacgactcagacgactcccaggggctcgcggcgatggtctggacttacatccgggcggtcgagcgctccgggctcgagggctcggatgagtcggagtactcctcggacgaggaggactcgtccgaggaggacggcgtcggtgatggtgaggacgacgacgacgacgaaggcggtggcggcggtgacggtgatgacggcggcaggggcggcagcagcggcggcaagggtgacgacggcggcagcagcaggggcggcagcggtggcggcggcagcagcaagggcagcaacaaggccagtggctaa

SEQ ID NO: 2313 - DNA, 2262 bp, Zea mays
  Peptide Sequence Number=SeqID_45688
atggcgagcagcagggggaggctgaggctctccccgcgcgcggcggcgccgcagctggacgcgggcaagtacgtgcggtacacggcggagcaggtggatgcgctggagcttgcctacggcgagtgccccaagcccagctcgctgcgccggcagcagctcatccgggactgcgccgtcctcaccaacgtcgagcccaggcagatcaaggtctggttccagaaccgcagatgccgggagaagcagcggagggagtcctctcgtctgcagaccgtcaaccggaagctgggtgccatgaacaagctgttgatggaggagaacgaccggctgcagaagcaggtgtcccgtctcgtcttcgacaacgggtatatgaagaatcggctccacagtccttctgtagccaccaccgacacaagctgcgagtctgtggtgacaagtggtcagcacaagcagcagcaaaacccagcagttctgcatcctccacaaagggatgcgaacaacccagcaggtctactcgctattgctgaggagacattggcggagttcatgtccaaggcgaccggaactgctgtcaactgggtgcagatggttgggatgaagcctggtccggattccgttggaatcatcgctgtttcgcacaactgcagcggcgtagcagcacgagcttgcggccttgtgagcctcgagcccacaaaggttgccgagatccttaaggatcgcgcatcgtggtatcgcgattgtcggcgtgttgatatcctccatgttatccctacgggtaacggtggaacgattgagctgatctatatgcagacttatgcactgacaactctggcggaaccgcgcgacttttggacactacgatacactagtggtcttgacgatggcagtcttgtgatctgcgaaaggtcattgacccactccactggaggtccttctggacctaaaactccagattttataagagctgaggtgcttcctagtggttatctgattcgaccttgtgatgggggaggttccatgatttacattgtggatcatgttgatctgaatgcttgtagtgtccctgaggttcttcgaccgctctatgaatctcctaagatactggcacaaaagatgactgctgcgaatgtgccacctgctctacttgtgcgatttttgagggagcatcgctctgaatgggctgaccctggtgttgatgcttattccgctgcctctctgagggccaacccatataatgttccgggtttaagggctggtgggtttatgggcaaccaggttatactaccccttgcacgcaccgtggagcatgaagagtgcttggaggttattcgacttcaaggacatggctttagccatgacgaggttcttatgtccccggatatgtttcttctgcagttgtgcagcggcatcgatgaggatgcgccgggtgcttgtgcacagcttgtcttcgctcctatcgatgaatcttttgctgacgatgcaccgttgctaccctctggcttccgtgtgataccgcttgatgctaagacggatgtgccatctgccacacgtacccttgaccttgcttctgcgctcgaggtcggatcaggcggaggtctgtgtgctttaagcgatagcgggtcaggcacgcgcagcacgaggtcggtcctgaccatcgccttccagttctcgttcgagaaccacctccgcgagagcgtggcagcgatggccaggcagtatgtcagggcagtgatggcgatcgtgcagagggtggccatggcgatttctccctctcgccttggcccgcatgtcgaactgaagcatccgccaggctctcccgaggcactcgcactagcttcgtggattggcaggagctacagggcgcacactggaacggagatccgctggtcggacactgaagacgcggcgggctctcccctgacgctgttctggaagcacagcgacgccataatctgctgctctctaaagccggctttcacactcaagttcgccaacagcgccggcttcgacatactggagacgacggtcgcgaacgtccaggacctgcagctggaggcggtccttgatgacgggggacagaaggccctggtcgcacagctccccaagatcatgctgcagggcctggcgtacctccccggcggcgtgtgcaggtcgagcatggggcggcaggcgtcgtacgagcaggcggtggcgtggaaggtggtgggcgacgacggcgcgccgcagtgcctggcgctcatgttcgtcaactggaccttcatctga

SEQ ID NO: 2314 - DNA, 870 bp, Zea mays
  Peptide Sequence Number=SeqID_45689
atggccgaggcatcacgaaaggtattaagacctcgaaggagtcaaaccactcctccgaggcctcgggggctacacccggcgggtgcgctcgcgcgcacccaccggaacgaaatgcaaccgagaaaggtcggtccccttgcaaaaaagtgcgacaaaagcctccaagcgagtactaacactcccttcgaggctcaggggctactgtcggggaccttaattaggggtacccccaagagtcctaatctcagctgcctcgactccggaagacggtctccgcctcgcccgactccagggctcggactcaacctcgactccggaagtcggtctccgcctcgcccgaccccagggctcggactcaacctcgactccggaagacggtctctgcctcgcccgaccctagggctcggactcaacctcgactccggaagacggtctctgcctcgcccgaccccagggctcggactcaacctcgactccggaagacggtctccgcctcgcccgaccccccgggctcggactcagcctcgacctcggacgacggtctccgcctcgcccgaccccccgggctcggactcaacctcgacctcggacgatggtctccgcctcgcccgacccccggggctcggactcaacatcgacctcggaggagccttcgcctcgcccgacctcgggctcggaccgaccacgtcacagggggccatcattaccctacccctagctagctcaagctacggggaacaagaccggcgtcccatctggctcgccccgccccttacggaagcaaggagacgtcagcaaggatccgacaaccccgacagctgtacttccacggggctcaagcgctcctccgacagccacgacatcacatga

SEQ ID NO: 2315 - DNA, 1575 bp, Zea mays
  Peptide Sequence Number=SeqID_45690
atgctggacgcgccgaagtcgaaagggtgcgccccttggtgcagttgcatgctgcctgcatggctgtccgccctttcgcccgctggtttaggcgaagatggaggaatgcttccatgccttcgcacttccctcatgcgtcgcgtccttccaccttccgagcccccggatagggagtgcccgcgtcgctttcgtcttgctgtcgttggaggaacacaacttcgcgaaagttggtacctttcagccatcgctcggcttcaaggattttcatcaggcagcccggttgcatcctctcgccgatggtcacccaagacggtgaccaccagttcgatggtggggagaagcaagccgggctgcgacctctgccccgccctcaacttcaaggatcttcatcatccttgctggggcggagggcgagctgagccggagctctacctcccgcacgggttcgtgggtcaccctctccttcagcattcaggggagagggcgctcaccggcctagcggaaggggtggacttcgacaacgtggggctggtcggccgcgagcgtcgtcagcttcagcgtgttgggctcgctggcttagctggctcggctcccggtgccccctccccccgtcgggcagagcgtggctatctagccactgtatggggtctcgccgcgcgcaccgggggaccgcccaagacgtcgcgcgctgttagggtggcgttcgtgttcttgggctgtcttgcccttgctccggtacgacgccgccgcgcggaggtcggtgctgaggtggtggtggctgaagaagtcctcgtcaccgacgagatttccaccgccacccgcgctccgggcctccggctctttggctttgatggcttgtcctcgcccctcgagtggggacgtgggcgagggccttgtcgcagcagcgtctgccctgaggtcatcactgctgctgtttggccgcccggagcggaggtcgttgtcgctgctgccggagcgggcggcggcgagccacctggggttttgtttccccgcaggccctccaatgagtccctcggctcggtcggccttgccacccgaggcttctcttgctcagttaaaggaaccctcggccgctctgcgatgagccggagccggaggcagcgatatcagcatggacagaggcagagttggctcgaaaagaagcttcgtcggccggagcctggccgggccgtccactggcgggaccgacgccggagtcgggttgccgagaccatgagccgggctgatgtcctcgggggacagctggctgaggctacggagtggctggtcgagccgtctgctcgggccgggcgcggtgctgacatctttcttcgaggtggagatccttcgaccgtgtcgccgtccgaggctgggtcggactccatcgaaggtggagttgacgccgagggtgctgctgctccccctattgatgacttatttctcggtaacagaattgtttatccgagcaagagttacttttcacggaaggtgatgagtgaggagtccctcggctcggtcggccttgccgcttacgtgtactccgtcgttttcaggatcccactatcgaagcagtag

SEQ ID NO: 2316 - DNA, 120 bp, Zea mays
  Peptide Sequence Number=SeqID_45691
atggcggcggccggccggaattggctcgtcggggtgcggcgagggctgatcctcgtcgtagaccttgatctgcgaagaaatagaagtttaaggacctatccatcaaatagggaattttag

SEQ ID NO: 2317 - DNA, 66 bp, Zea mays
  Peptide Sequence Number=SeqID_45692
atggagattcagcaagggctctggagtcacaaactcactgtcaagaagtgcaggatatctggttag

SEQ ID NO: 2318 - DNA, 423 bp, Zea mays
  Peptide Sequence Number=SeqID_45693
atggaggaggcggcatcgaaggtggatgatcacgcgcccaaggaggatgcgacgccggcgtcggtggtggaggtggatgcggtggagctggaggtggccggcattctgaccaacatgaaaaggctcatgcggtcgcgggaccggcgggaccggcgacaggagcgacgggaacgtcgggagaggcggcgcgagcgcaagcaagcaagcgccgcggccgaggccgcagccgccgtccctagagttgacaccccgctcgcatacccgcggagcggcggggacgacgcgccgacgaaggacgccgccgatcgcccacgggaccaggcgagcttgggccagcacccggcgaagatgatagtttggagactgaaattccctcccggatccaaagtgattaagggaaaacttagttcgtttatctcctag

SEQ ID NO: 2319 - DNA, 1338 bp, Zea mays
  Peptide Sequence Number=SeqID_45694
atggctcttctgatgaacgacaacaagaagacaacgcaggcggtggtcctagccgtgccccaggtgttgctgttggcgcccgcgtcagccgcgatgacctgcgtgcaggtggggtcggcgctgtcgctcggcatcccgtgcgcgagcgcgacggggagggccagcgcgctcccctccgggtgctgcagcggcgtgcacagcctctcaacatggccaccatcgtcagcatccctgccaatcacttctaccgccacaaaacccaccgccgccgttccgtcgaaatcgccgccgcccgcccagcttcggcccggctcgccgccggccgcccgccccgctccggccggagtgccgccgagctccctgccgcccggagctcgccggcgcccggagttccccgccgcccggagctccgccgagctcgccgccgagctcgccgccgcccgcttggctccggccaacgctcggccactgcgcgctagggaccggcgctcgccaccgcgctacggtcggccaccgcccgctccggccccggcagctcccgcccccactgtcgccaggtgttcgtccgacttgaccttctccaccgttagctggactcgtacgcgttctcagatggacagcctagtaacactataccatggaggaagggtggagatagatgcttatgggagtgttacttttgatggttcgacagacagagacagaagaaggtcacggacttcgagacccaccatcgtgattacattgatgaatgggaacagcaggggggatcttaactatgagaacgaccaggcgcacacaaactacaacttccggaggtgcaagctgaaaggacagtggacagctgcagactacgccgagcaagaatcgtcagacgacgaagacacagctttcgacatagctgctcggcacgggtcccaaattgaggctgctccaatccttgatagagtgagggtatcacgtcgtcttcgtcgtgcagcggctcggtgtggatgccggtctctagcgggcgttgacgtgcagctgcctgtgcctcgtatgcagcaggacgttcagcctcccatttgtgcagttggaccatctacagcaggactgagctcgtcgcgatcgacgcgggacacgtttgaggacgtggcccacgacgacaaggacgacgacgacgctggcgctggcgctggcgccgcaggtcaggtggagattggaccatctcagttgcaggatgctcctacaactcagccatcacagctgacaccacgtagaaggcgtccacgagaaccttacactccaggcaccgatgctcttggggccaagggcaagggtaagactaggaggaaatga

SEQ ID NO: 2320 - DNA, 153 bp, Zea mays
  Peptide Sequence Number=SeqID_45695
atggccgataaagacaaaggcaagggcatcgtcatcagcaatcctcgcatatcacaaaaggagattgctcgaaaggctttggacgagaaggctaaaaggcgccgccggcaatcttccgccgcccctgcgcacgcgcggaccgtccggccctag

SEQ ID NO: 2321 - DNA, 1380 bp, Zea mays
  Peptide Sequence Number=SeqID_45696
atgcagacggcatgcaatcgcgccaggcggacgcgcttctccgactcccaacacgccagcattgaggcccaggcccacgcgtcacgcaaccggcgcgccagatgctgcatgcaagcaactgcaccgccacttgcgccaccaccgcgcctcttcggttgcggaaccaataccgcgactcgaggcggcccagcgcacgacccagcagcgccagcctggcgcgacggtcaatacagccgaaaggcgcccgtgatccgttcctcgaacggctcgcgcacgcgcaacggccgccctgccaacaactcaccccgtcgcattaactccgcggcgggacaggcggcgcttctggcagaagaagcgggcgacgcttcgccttcgccggaccgggaaagggggataccccgaaaaggatccttccctgtgaaggagccgggctccgagcccccccctactgatcagaggttcgaaggctggccctccgaggggttcaacagtcgcctcagatcgcgtgggccctacacccactactggtcagaggttcgaaggccggcctcccgaagggctccacggccgcctcaggctactcgggctccgcgcccattactgatcaggggttcgaaggctggcccccgaagggttcacagccgcctcagacgccgagcgagggatgaccaggggtacgttcgatacataaccaaggctcgggctgcgctcccgagggctcggactcgggctcagccccagaagacgacgaactccgcttcgcccgaccctagggctcggactccgccctggcctctgccgaacgacctccgcctcgcccgacccaggagctcgggctcggcctcggccatggaagacagactcgacctcggcttcggaggagcctccacgtcgcccgacctagggcacaggcccgccacgtcaacaggaagcgccatcatcaccctaccccgagccaactcgggccgcagagaacaagaccggctccgttgctcctccgacagccacgacatcacaccagcagggtgccaagatctctccggctgccacattggcatggccttcttagagaaggttggccgcgcggggacgaggacgggacaggcgctctcttggggccactcgcttccctcacccgcgtggacgcttgtaaccccctactgcaagcgcacccgacctggacgcgggacgaacacgaaggccgcgggatttccacctctctcacgcccgtctccggccacctcgcttccccccttcgcgctcgcccatgcgctcgacccatctgggctggggcacgcggcacactcactcgtcggcttagggaccccccggtctcgaaacgccgacaaaaatgtcaacgtaaaaggaatattgcactaa

SEQ ID NO: 2322 - DNA, 999 bp, Zea mays
  Peptide Sequence Number=SeqID_45697
atgtcttcttcctcccttgtgcgtcgcgtctttccaccttccaagcccccggatggggggtacccgccgtcttttcgcctcatcgttggaggaacgcaactccgtgggagttggtacctttcaaccatcgttcggcttcaaggattttcatcatgcagcccgactgtatccccccgccggtggtcacccaagatggtgacctccagcttgatggtgggggaaagcgagccgggctgcgatcttggtcccaccctcagcttcaaggatgttcatcatcctcgctggggtgggggccgggctgagccggcgctctacctcccgcgcgggttcgcgggtcaccctctcccgcggcgttcgggggagggggcgctcactggccctgcgggcggcccggacttcgacaacgcggggccggtcgatggcgggcgttgtcacctccagcgtgtcgggctcgtcggcttggctcccggcggcccctcccgccggagggcggctgccgcgccgtgtgcacgggagggccacccaagatgtcgcgcgccgctagggcggcgttcgtgttctggggtggtcctgcctttgcaccgggatggcgccctcgcgcggaggccggtgccccactcgcccgtgcttcgggcctccggttcttcgtacttgtcctcgcccctcgagcgtcggtgtgggcaagggcaagattgcagcagcgcccaccctgaggcctgcgctgctgcagctcgaccatccggagcgggggtcgttgtcgtcgtagtcagagcgggcggcggcgagtcgctcgtcagtcttctgttgctccacaggcccacccccatggagtggggttgttcgtacctgcggagggggaaccagagttccgtttgtaatggcaccttgaatgtcagtgtctttgttcattgtggctgtcgaggcctgaacatcttagttaaagagaccccttggccgctcttcgacgagccgaggctaggggtagcgatatcagcatga

SEQ ID NO: 2323 - DNA, 324 bp, Zea mays
  Peptide Sequence Number=SeqID_45698
atgaatgctgtgtgttgcaggaaggaaggtgaatcgtcaggatttttacaccaagcaaacgattgctcgcacccgctgaacggtggaccacaaaaaccagaagtgaacccgcatggtggaatcactacgcgctcgaaaattgtatcgtttctcgacaacgagctcagggaagatgtttttcggaccttcggcttcctgaagcctaagagactttttttcacggatcaagctcgttacaaaaaacgatctagcaccgtgaaggggctactgttgggaccacgcttcgtcgccgaaggtcctgcagaaagaaacaacttcggctga

SEQ ID NO: 2324 - DNA, 1209 bp, Zea mays
  Peptide Sequence Number=SeqID_45699
atgggccggaacgcacgtgggcctctgagctggacgaggccgcactgtgggatgacttcgtcgccggtcttcgtctggtgccgatcaagcgaagggtgtccctacctgctctgtccctgtcggaccagcggttatcagcgaagacttcgagcgaggggtggcgcctttgccttcgccccaacacgtgtctttccaccttccgagcccccggatgggggatacccgccgtctttttgcctcatcgttggaggaacgcaactccgtgggagttggtacctttcagccatcgttcggcttcaaggattttcatcacacagcccggttgctcccctccgctggtggtcacccaagacggtgacctccagctcctggatggggagaggcaagccgggctgtggtcccgatcccgccctcagcatcgagggtgttcgtcatcctcgctggggcggggagcgaggcgagccggggctctacctcctgcgcgggtcggcgggccacctcttcttccagcttctggtggtggcaatcgccctccagccctgcggcggagacgtcctccagccatgccggggaaggcgaactgttgctgcccagctaggatgcaacattccgccctctccctcgcattcgcggcgaggacggcagcgaggacctgccggtgcgcttgggagcagcccgctctttggctttaatagctggttcgtgtcccttgagcgggaacgcgaacgagagccctccggtggccgcgtccacccgggaccatggctgctgttgcagaggtcgctggcaggtcccccgacgttcgtcgccccacaggctcgagactcgcttgttgattgtctgaactgcttcaccaagcgtgagtcgccccgtgtcaaggtgacgagtgagccgggtcgtccgttagcgggactgacgccggagttgaccagccgaggcctcgggtcgggctggcgcccttggaagatggttggccgaggccccaggggtgaccggccgagccgcctgctcgggccggattcccggagaagaccctggcggcgatggccagggcgtggtgatgacgtcgtccttcggagtggagatcttcggaccgcgtcgctgtccgaggctaggtcgaaccttgccaaaggtgtcatcgatgccgagggtgctgctgcccccttccagcgtcaaaacccgagcctgcaggatcagattgtcttgtag

SEQ ID NO: 2325 - DNA, 2883 bp, Zea mays
  Peptide Sequence Number=SeqID_45700
atgtgctctcattattactcagcgtatccgccctttgaagtggcagaggaggatgcggacgaaggggcccttcggtgcgccgccggtcagagcagtgggcgtgatttagttgaagagttcgtggcgtacggggtgtggcccttggcgcatggctgggcgttgggcgaagtgtgccctcgccagatgccttttcacggaggaagggtggtgcgaagtcctgccttcgcactgaatctacgaaaccgcgacccggccgcctttgtgcgtgatgcggaggatggggcggtgcggctcatgggacgttacgtgccgaggacggaaggccaacgcaactttgatatccgcgggtcaaatgaccgtttgaacagggttttcgaattaaatcaattgccgtacgatggctatcctggtcaagacgaagcggaccgccgtggaaagaagccggtggtggagactggagacgaccctgcgccgacggccgccccttcctcaaaaaagagaaaattaggtactacgatgggaggacttggggtgtctgatagttttgctagagagttgatgaggacgtgcgcggccccgggggaaaggatgtcttcgcccgagctccgggagtcttcggctcggatgctgagggttaccgggggttgctggcctaggaatgttcctatcccctgcgcggttgacgaggactgttttacatctcgcatggttcgtcaatggagagtttttccttatgggcggaatatcgctgctgttgtgtcggcagtgatggacaaggatcgccaaggggcggcgcaaaaacgccaggcggctgtcaggctgcatgaagctaggccgaagaggcagcggggggctacgaaggctgcggcctccggcggaggcaagccgccgctggcggcgaagtcgggcgcctctgcacctagcaaggcgccgcaggcaacggcgggcgccggaggctccaaatcgacgaaggtggtgccgccggccagcggagtggcggaggcttcgaaggcggcccgagcgttgccgttgtcgggcaaacgtgttgccgacttcggcaccgatattaatgtggacgactatcttggtgggtcggacgagggccagcttgctatagttgcgcctgccgcggcgatcgcgacggctgccataatgccgaaggcgaggggcgaggcccttggcgccggaggcgaggtgtcggccctcgcggttgtcagggacgaggcgggcgcagcgacccgccggctgaaggaggtgacggaggcgctgagtcaggtggccgacttcgccagtcgtactgcatcgggggccctcacggcagctgtgtctgccgaagtccagagactttggacgcaacatgctgacgctttccgtgaaaaatcggcctccgacagcaagtgccgtaaactgacggacaaggtggccgcactggagagggagaaggctgacctccggcgccaactggcaggggagaggagggaggccaacgaggccatcgccaaggagcaggctgcgcaggcggaggccaaactggcgcgggcggaaggcaatcttgccaaggagctcgccgaacatctgcaggagcggctcaccgccctggagagccgcgtgaagggggccgaggtcgcgatgcgtgcggaggccgaacggacgcgcacacagcttatggatacatatcgtgagctgggtgcgcggaccggtgacttcgaggtgccggaccgagagcccgggcttcgctgtctggaatgggtgcaggaggagctgcaggaactccccactgtcatgggggggtttatgtcgtacgcctccctggtcacctgcgagggggagatgaacgcactctcccgcgaagggtgccggcacttcaaggtcttcgaccaggcagatgaagattttgagcgagatgtctataaggtcgaagaccccgtcgtgaaggaatccgtcggggccctctatgaccggatgtggggtccgcacggtcgtgaggtggtcagggagcgggccgagactgcgagggctcaggcggcgcgtggcgagcgggtggacgacttcggggcgttgaacagcgcgctgcctgacccggagccgacccctgcggaggccgtgtctggggtcgccctggagccaaccccggagaccgcggcgatcgcgacggctgcccccacatctgctgtggccggcgaagacctgccctcaaaggtggccaaaggcgcccctgatgcccctgcagctgctgtgccgagtgctgaagatcccgcggcggtggcggcggaaacaacggcggaagcagcggcggagccaacggcggaggctcccgcagcgtcagggccttcgcaggttcaagattttgggcctgcgcacgcaaccgctactactgaatttttggcggcttcgaccgcggaaggtggtaatgaatatggtggatctgcatctgcgttttttgattttactgactctgggagctcggttgagtggactgaggagtcgtcggaggaggacttggattattttgcggccttggacgtggctgcggcggaggctttgccacacgccgcggacgcgccagatgtgccaggtcctagcaccgggcgccgacgacgaagggcggttgcaaagcgtagggttagtacggaggaaggggctcggcttcgtgttgtcgatgttccaggagtgctccaggtcctcgccgtttggcgttgtgagcctgtaagcgctgggggaagcttttgtcttgactataaaggggccctctcacttgggctccagcttgcccctggactccgtccgagctgttcggatgagtacgaggtccccttcgctgaactccctcaggatgaccgcgtggtcgcgccatgctttggtctggacttggtatttgtttag

SEQ ID NO: 2326 - DNA, 759 bp, Zea mays
  Peptide Sequence Number=SeqID_45701
atggaggtcacaatagcagagaagaagcctcgggccgccgatgacggcggcggcctggttgagaggctccccgaggcgctcctggtggaggtgctggcccgtgtcgatgtcgatggtgcctgctccgccgccgcgtcctgccgctcgctctactccgccgccaacgtcgttctcctcgccctcacctccatcgacctctccgcctttgccccgtcgaacgccatcctcagcaggattctcgcggggaatggcgcgatccacagcctcaccgtcaactgcagcctcctcgatgactccgccgcctccgtcatcgccaggggtagcctccgcgacctcttgctgctcaagtgctccttctcgatgagcttctttgtggctcttggtggggcatgccacgatttaagatcgttgaagctggagatggcggtttgtccgtacactctatatccttgcctagcacctgtctacgtgggatgtgttcacttggagttacaaggctcttccctctgcccctccatcccaactcctgccatcaaagtgcacagctttgctggccccaacgtggctctgtcggctcaggcggcaacaacaatgagaattccagcgaaagaaaaagtaaaacttgtgcatgttattgatgttcctggtcatgctaggctcaaacccaaacttgatgaagtcctgcctaaagttgctacagttgtctttgttgttgatgctcaagatttcttgtctagcatgcaagctgctgcagagtaa

SEQ ID NO: 2327 - DNA, 147 bp, Zea mays
  Peptide Sequence Number=SeqID_45702
atggggagtagctctctccgggcagaatgggaatcacggcttgtgggtggttatgagattgatggttttggttatgactatggtgctggagaagacgaagctgtggaaggagacttccaggagttccaagactacgacgagttctag

SEQ ID NO: 2328 - DNA, 918 bp, Zea mays
  Peptide Sequence Number=SeqID_45703
atgaggtcgccaccgaccagaggcggccataatggtaatgatctgatccttgaggacttgaagaaccaaaggctcaccctcatggctagaggggcttacccttgctgtgattttgaaggtgtacttctcaacataattcaccagccgcttccttcgcacacaagcgtgcgcgctcggaatactccgaggaaggagctccaggcgaaccgcgggcgaccgaaccgccgtcggagaaggtacgcgtcgatccgccgtcgcccgcgaatcgtttgtcttcgtccggccgacgagcagcagtgggggtcgtccacgcgaatccgccgtcaagcttcgcggaccggcgacccggccgatccgtgcgaagacgccggcgcggcgccgctcgtctctgtccgccggcacgtcagctgcggggtggaggtcaaagggaggtcatccattcgccgacagatctacgctcagccgatctgcgtcattcgagcttcaaggtccaagccaaggaggtactggttgaggatacgaatcaagatgagcagccatgatgccaaagtgctgcaacacttggtcctcaatcttgcatcctcagtggaaactggtgctttcaatattagaagctttctagaagaggctttccgtcatttgggtgacgagcattaccttatgaatgctctacttgcaattcgaaaggaggtagacctgatggagcaggatgcacttgagagcaaagcaaggtctgacctagagaaggagaggatggaggaacaaattaaccttgcggagcctgtgaagccagtgcctagacaaattactttcaccccccttcctcaccagaattgtatgaggccagtgacaatgactcgtacgactcggacaggtccactaggtataacatttggaacctgtaattgtggtacgtag

SEQ ID NO: 2329 - DNA, 84 bp, Zea mays
  Peptide Sequence Number=SeqID_45704
atggctactaatcgtctaacggcgttgcagaatctagacaggcacttgaaactcaacgagatcagaagatataggattgcttga

SEQ ID NO: 2330 - DNA, 255 bp, Zea mays
  Peptide Sequence Number=SeqID_45705
atggctaatccaatagcagattccgcagctgccactgttggaactaatggattgagaaagcaagatcaaacctactctactgtcgattcaaaaggaatctacttgttgcataatgcacatgccacaaacgataaagtggaagcacactcagatgaagaggatggtgaattgatcaataatcccatgtctttttttgctgagaaatcttggatcaagacatacaaggcagcattggtcaaacataggactacctag

SEQ ID NO: 2331 - DNA, 696 bp, Zea mays
  Peptide Sequence Number=SeqID_45706
atggtcgtcatattcaagagcaagatcacttttagccccggagcagttttctactgcgggaccatctcctgcatggcggacgtagaaggaactctacaccgcatagcaactccacctgagaagagatcctccttgagatcaccaaaagaagctgcggcgaaatcacgaaccgcaccagcaaccccgctaatggcgcgatggggtgtgatcacccgacagaagaaggtgagcattctgaactggggcagagaagcgcatcggatgaccaccctgattcctccaccctcaaaggaggacaggaagaagcacaccactgcacctactcctttcttcctagacatcctctcattcaggggagactggagtcttcgcccatctctgactacgaacccaccgtgctgggggaagagcctccctagcgcgatgcacgatgacaaagaaacaggcgccgaaacatgcaacgacaccatgaggccggagaatgggacttggcttagcccgtctctcgggacgaggcttcagagatgggggagacccctgatgaaagaacacatcgagaacgacgcaactcccgccaccgtgaccgtcgccatgctcaggaacgtgagcgggagcaagatgaacaagatgctaggctccaacgggagaacccgctcctcgcccaaaacctgtaccccgacttcgctcgagcgctga

SEQ ID NO: 2332 - DNA, 726 bp, Zea mays
  Peptide Sequence Number=SeqID_45707
atggaattaccactagacgcgcagagcagcggaagacgtctcgatgtagacgaacgcgtcgagcagtgccgtgcagtcgccggcgtccttcacgtcctcgcacgtggggaggagagagtttgcagccctggtagtgcttgtcgtaagcggacatgccgagtaggttctctgtctgtgtcgatcgagacaaagaggaggaaaagaaagcttcggcactcatccggcttagaactagaggttgactctgctgctccagaccttggtggtgaccggcgagtgtcgatctcaaagatgacattgagagctagtcggcgtgtttcaggggaggaggaagtggaggaggaggatgaggaagatgttcctcctttggtttgcaggaatcgtcgtagcaaagccagcaacgatgtcccaattcaagctctatcggggctagttagcctccgtgggatgacaatgtctgctattgaccatgcactgaaggaaatcattccaaagggcctcttattggaactttctgaagctagaggtgttgacatccgtgtagaggtcccggatggtgctccttctgctagtcttctggctgggcaagaaataacccaggcagtttcccatgcatcttcaacctttgagggtggtctgattggtaaggatactctggcccctgaggttacacatgatgggtatctagccttggagggtatgactgaagataacccaacaccctag

SEQ ID NO: 2333 - DNA, 354 bp, Zea mays
  Peptide Sequence Number=SeqID_45708
atggggttgtcgactgtggagcgggtgtacattcgatccatcgagcacgcagggctcggcgggtcggatgactcagaggtggaggtctcctcagaggaggaggactcctcggactccgaggagggcagcgatggcgagggagacgacgatgacgacgagggcgatgacagcagcaacgagggtggtgacggcgaaggcgacagtgatggcagtagtgatggcgacaacgacaaaggcggagtgtctggtgcaccaggcccgtacaacctcaaacaagccactctcggggttttgccaggcgcgctccactataattcatcggaatgtccggtgtgccaccagactgtccggtga

SEQ ID NO: 2334 - DNA, 822 bp, Zea mays
  Peptide Sequence Number=SeqID_45709
atgggcagcaagcaacaagaggtgaagaggccatggaggacctttgcacactgctcctgtgaccttgacgcgctcaagaagtgtcctgatcacccagcctccattgatctggcatatgggagctgcaacaatgagcagaaccccaagtggcaacctgtagaggctgctctgttctgtatacaagcaattgcgagatcagtctcaattgaggagagggaaattttaccacaggttatgtcactgcttccctgccttcctcaccatgagcagttgctacaaacagtttgttcaaccattggagcattttcaaaatggattgatgctgcaccagctgaattatctattctaccacctttagttgatattctcaataagggtatgagtacatcggaggatacagctgcggctgcttctatggcctttaagtacatatgtgaagaacgcgcaggagaactgcgcatcttatatattagagaggagatgttgctgagcaaatctcccaaaaacccacataaacccgaagactgtaggagaaagttctcagggtccctggatggcctcttccagatataccatattgcaatcagtggagttggtggttataaagtttcttcagaggactcgttgcatttggttgaagccctaagcaatgtgaaacaaccagaagtagttgctgaagctgtatatagatattggccgacactcaagagtatctttgatcaacgagcatgggatacccgtaccatggagtcaatatgccgatcttgcaaatttgcttgcggaaatgccattgagaatgcattatggaactattattgttag

SEQ ID NO: 2335 - DNA, 327 bp, Zea mays
  Peptide Sequence Number=SeqID_45710
atggccgagacgacgatgtcaagtggtggaggtggagaccaggacagaaggtggagacgtgccgatggaggaaggtcgttgcatgtagaggggccccgagctatcacagcaggcgaagggggtcctggtggccagatccttcatagaaaaaacagaggggtcaaactcaatggaacaagagttgtcgatggtgaaccgacgaacataacgaagattgtgggtgatgtgaggggctacgagaacttcgttgagatgaaacggcccaaggagaaccaaggcacctacggaggtgattggaagagcggtgttgtttccaacgacgattga

SEQ ID NO: 2336 - DNA, 861 bp, Zea mays
  Peptide Sequence Number=SeqID_45711
atggccatggcgacaatggaggccaccacgctgacagcgctgctcaaggaggcggtcgccgccttcccgacccgtcgcgtagttgtcgtaccgggcaggctggagctcacgcacgccgccctcgacgctctcatcgacgcggcggccgcacaactcgccgccgacgccagatttctcccgggccacgttgtcgcgctctccttcccaacaccgtcgaggagtcgggacctgacgcgcgtgcgaacgcggtctgtatgtacacagctggtggtcatgttcgtggcggaggagttcgagttctacctccccgactcggagccgcgcctcctcgtcaccaacgcggagggcaacgtggcggtgcaggcgggcgctgccaagctcaggctcgcccacgccgccaccagcctccacgacgcggccgaccctgtccacctcgccgacctcccggtcccggctctggagaacgggtctcacatcggtggtgcggcgggctctctctcccccggcgctatcgcgctcgcctgctccctctacgccccatctgctgcgagaccctcggcgcgctccttgaccccaatgacatcgccttcctcaccaatcgcgccaccgcctacctccacatgggcaaggtctctcccgaccatcaaggaagcgaagaacagaatactttcctccacaagctaccacaggtgcagagccaagcagtggacatgctacaatctgctgaaggagcacagggacattcaggttctctaccatgatggagtgaaagacaacccctctacaaatggcagattggcagcaaagagcaacagggaagaaggccagcgctggattgcaaacgggctcggttcgctatga

SEQ ID NO: 2337 - DNA, 468 bp, Zea mays
  Peptide Sequence Number=SeqID_45712
atggagggggtgcagctgacgctcgagcagactggagagggccaccggagcacagcagggtggcaggagaggagggcgatggagaagcccacgagttccgacgtcaaggagggtcgaagtagagatggggctcccgcggagcctgtagaaggtcaggtactagagggcgtcggccaggctccggtaggacgtcgcgtcgacaatcgggggcctgtcgtcctcagagagcttcgcctgagtgtcaacaggcgtggagtagggcttgcagtcgaacatgccagcccgctccagaatgtcaagagcgtattgtcgctagtggaggaagagacccttagaccgatgctcggcggtgatgccgaggaagtgatgaacagggacgcgtccgacttggcctcgacgaagctgagggagtccaaatatgaggcgaagcgactataccaggcctacggcgcctgcttgaggccataa

SEQ ID NO: 2338 - DNA, 765 bp, Zea mays
  Peptide Sequence Number=SeqID_45713
atggcccatattagatgcattgcacataagtcggtgatccctttcttgccctctcgccttgcggagcgtccactatgccgcacggtgacaggacagtcgagtcacctggagagactgcatagtcgcctgcatgaggagcaggagcgccaacgacaggagcaagactcttccccctcgcctcagcaggaggtggagtctaggaggcagccctcctctatgcctcagctagaggtacccctgcaccaccacagggcaccccagctgctagaggagaccaggatggagacaacgacgacggtgacaattcgagccacaacatggagccttcgaaggagcaggagctggaaggatgggtcgctcgacccctcactcatgacatcgctcgcgattgtcatttccacgacgctctcgacaccttgctgcatcgggccttcgaccgacacacttggtccatcgaaggcctactcagagcattattctatcattgagcgggacactgccaaggcagcaatgcaggatgctacacggcgtgcactttcatacatggtcaacctagtcaccgtgctcaacaccgagctagaccacgaccttgacgagtctaacaaggctcgggcggagattgcggaactggacaaatttctgcaactatctcgctatgcacccgaggatgtcaacaatgataccaagaggaagtacagatcaataatgaccgagaggaagcgccaggagatggaagaccagaagcgcaagatcggtggaccttag

SEQ ID NO: 2339 - DNA, 606 bp, Zea mays
  Peptide Sequence Number=SeqID_45714
atgacgtcggttgctctcaaccccctacggaagcaaggaaacgtcagcaggatccatgccgcaccgccagctatgcttctacagggctcaaggaacttctccgacagccatgaggcaagataccacacacctccacattacattgtgcagttgttcaaggaacatggagtgcctcgttgtaaggtgtggataaccttagagccccaccccttgcagccagggtggcgttcattggactccgagacccttggtttcctaacccacgacaccacggaggccatagccatgctcgcactaactaccttctgtggatatcactcgttggagatggcaactcaccccatcggtctattccccactgaaaagggggatgacccgatgtggagggaccaggttgaccacgccaagaacgtgtgggaaatctaccctggggccactactcgactgacggttcggtgcatgagtgcactataccgcctgcaagtcctacaacgcaaggccatgtcacacatgataggcttggctcaggatgcaaaggtcaccatcatcgatcgggaagatcttgtggtggatttatctactgagttggtggagaaggatctctaa

SEQ ID NO: 2340 - DNA, 480 bp, Zea mays
  Peptide Sequence Number=SeqID_45715
atgtggcctgagactgggtctcccatgctagctatggtgggtacaagtgcggtcactgcacggcggcagccggggtcagtggagcattgtatcgttcaagaaatggttgatggtgtgacttggcctaccaccctgccaccgggttggacggtcgagtgggatgctgctccgatgaattcacccacccccgccagtggaggagacactcgtttcagttctgacttcctttcttgcgatggctttccttccatcttgtgggaagtgcttaactccgccgattaccctacgcctcccttgtacacggtgcagttgtatgaggagcatcggctgggttggcgttctcttgattccgagacaattggacttaggacggacgacaccgttgaagcggcagccatgaagactctgacgactttttgtggctaccatctgaaagggaaatgtgcccttgggccatttctaagtataaatggtgattga

SEQ ID NO: 2341 - DNA, 210 bp, Zea mays
  Peptide Sequence Number=SeqID_45716
atgcaggcggcatgcaaccacaccaagggggtgcaccctttcgactccgatgcgtctagcctggaggcccaggcccacacgtcatgtaaccagcgcgccggttactacgtgcgagaaactgcaccgccacttgcgccaggaccgggaaaggggatactccaaaagggatccttctccgcgaaggaagcgggccccgagcccccctactga

SEQ ID NO: 2342 - DNA, 423 bp, Zea mays
  Peptide Sequence Number=SeqID_45717
atgcctatcctaactcgttggaaagattacaaggacgaccataaatactacaaaagctttgtgtcacagctaaatgacaaggcaagaaaggaagcttgcaccaatattctacgctctgcggtaaaaaaccagcgttatcggctcaagcacaaatacttcaatggtgtacctgcaaatgagattaggacaacttctcatgtattttacatgacggatgaacagtggagggcattagttgcaaagtggtctgatccaaagaatatggaaataagtgaaaagaacaagcagaaccgcagtaaagtcaagtttcatcaggctacgggttctcgctgctatgtggcacacttacatgcatattctgatatgcaggctttgagggctgaacctattgctgaaggtgagatgccagcatccagtgtgtag

SEQ ID NO: 2343 - DNA, 303 bp, Zea mays
  Peptide Sequence Number=SeqID_45718
atggccggcgcaggccaggaagaagaaaaggtggagcacgagggagaagaaatggtggccggccggcagcaaggatcgtcgcgcggcgccgtggagcaatgcggcggccaagcacagcctgccgtcaccgctccatgctcgtccaagaacccgccggacgcgaggaagccttacgcgactccggaggggtgctccgtccacccggggccgccgcgggatcaacggcccaacgcgtcgccgaaccaccgcgtgtccctggagaacgacgtgaggacatcaagaacaccccctcgccgtctctga

SEQ ID NO: 2344 - DNA, 258 bp, Zea mays
  Peptide Sequence Number=SeqID_45719
atggccgcatgcaccgctgtgttcgacaagctccggcgcagccaccgtttggacgcggcaccgcatccgatgacggcgccgtcacgccgtccagctcattatccacctgaagctcaacctgccacccaagagtcatcggtactcgccatgtcgtgcgcgttcaacgattactatatcaaggactgtggcgtcatcttggtgccagaggtgacgcagaggaggatcgacaacaatgaccactcgccatcgtcggggtag

SEQ ID NO: 2345 - DNA, 1125 bp, Zea mays
  Peptide Sequence Number=SeqID_45720
agatactttggtacaggtggctatgagatcgatggttttggttatgactatgatgctggtaagtggtattctttccgtttggaaagggcgaagatgaagctgtggaaggagacttccaggagttccaagactacgacgagttctaggtgtgggttagcggcaacccccagttggctgcctgtgaaggccgcgatggctcgacttagacacactgcacgaaagtccgtcatccccttcttaccctcccgccttgctgagcgtccgcttcgccgtcccgtggccggacagtccagccacttggagagactacaccaccgcctgcatgaggagcaggaacgtcgacgacaggagcagcagggctcttccttctcgctccaccaggagatagagtctgtgaggagctgctcccccgtgcttcccctggaggcgccccctgcaccatcactgggcgccccagcttctggagtagctgctggaggagacccagacgacggaggtggcgacgacagctcgagccacgacaccgacctttctgctaaccatgagccggaaggatgggttgctcgacccatcactcgcgacgctgctcgtgggtgtcacttccacgatgcgctcgacaccctgctacgtcgggcacttaaccggcatacttggtccatcgagtatcgttgtgtggtctaccagcatagtcgtggggtctacccggaccgctgggaggcaacctgcttggtgcgccgtccggagaacagtctccagggtgcggaggcctgctcagagcactattctatctctgagcgggactcagctgaggcagccatgcaagatgctgcacgacgtgcgctttcgcactactgctcggttttcggtggggtagctgacggccttgacctgaacacagtcaacctaaccgccgtgctaaacacggagctggaccatgcactagacgagctgagtagggctcgtgctgagatcgccctgctgcgggctgagcgcgcggaacgtcgtcacctggatggtggttcccccgctcccgtcgggactcagcacccgtactgctcacctcggcgtggacaccagtcttatggcaatcccgactgcaagaccaagataactctagaaccatag

SEQ ID NO: 2346 - DNA, 483 bp, Zea mays
  Peptide Sequence Number=SeqID_45721
atggcacccaaaagagctaactcgaaggcagccccattcatcgacgaagcagcgaaggcagccctgctagctgagaaaaagggcaaggccctcgccgacaacacccaccaaggagctggtgaagatgaagcacacagcaagagacagcgcaatgaccaacacactccagaaggcacccttcgcacctgcagctccgaagggcagccacaagtgccacccccaggcttcacaccaccagtgggcgaggacgcagcagaggacagcgaggtccttggcgtctccgcagaagagcagctacagctacgggccctgcgtctcagaaaccgcaatcttcagaagcagaaggaaatcctcgaggccaaacgccaacgcgtcactgtgcaggccaagctgcgccaaatgatacgagatgaagagcagagggcccaggagcttgagcaagagattgcgctcttgcagcgcgaaggccaacacgatctgtag

SEQ ID NO: 2347 - DNA, 657 bp, Zea mays
  Peptide Sequence Number=SeqID_45722
atgtctgtggcgctttcctcacccgacacagcgctacggcggcgccgcccacaaaacacggcgggggttcgccggagtaagcccaaccttcaattagggtgctaccttctaccgaacaaggtgttacacgacgcgaagagtacaaggaataggatggtgtggtttttaccggttggtagtgtcccgatgcaggtcgaccgtggagggttacgctgcggcgatgttatggcggagcagcgtgtcaccgcggaagtccctgtcgtcgatgagcaatcccgagcgcccactccaccgcctgcgctcgatgaggtccccagcaacccaaagcgcgcccgggtggagtccctaggctcgagctcgcgcagagaccagtacgtcgccacggaagaagattggggtaaccagtcgtatcaggtgaatgtccaaaggtgtggcatagaaaacaagggtatatcatattttagctatctggaactaaaatttatccttggcgccagaaagttgactgggaaacgccacctagatcaagtcgaaagcctcggtgttaggcggctcctcttcgacaacctgttcttctcctgtggggggtgtgagacagcaagagtgagctcacatacgatcatagctcaacaagtcatggggaataatgtggcatga

SEQ ID NO: 2348 - DNA, 489 bp, Zea mays
  Peptide Sequence Number=SeqID_45723
atgtccgcggcgctttcctcacccgacacagcgctacggcggcgacgcccacaaaacacggcgggggttccccggagtaagcccaaccttcaattagggtgctaccttctatcgaacaaggcgttacacgacgcgaagagtacaaggaataggatggtgtggtttttaccagctggtagtgtcccgatgcaggtcgaccgtggagggttacgccgcggcgatgttatggcggagcagcgtgtcaccgcggaagtccctgtcgtcgatgagcaatcccgagtgcccactccaccgcctgcgctcgatgaggtccctagcaacccaaagcgcgcctgggtggagtccctaggctcgagctcgcgcagagaccagtacgtcgccacggaagaagattttgggccttacatgcttgttgaagaatttgtgaaaattcttcatgagaagggcttcattctgtgttccaaggttgaggatctgcaagcctcctag

SEQ ID NO: 2349 - DNA, 234 bp, Zea mays
  Peptide Sequence Number=SeqID_45724
atgggtgatagatgtgattggatgtatgaaggtttcaagaagggtgggtgtcacacaagtgaatggtttgccaagacgcagatgtttctggaccatgcagttgctttgtcacaaatagcagaagtagaagttgatgacggtgaagatgatgttgataggatggaccagatgcttgaggatctgcagcctgaactggcacccgttcatcatgattcacctacaccggaggtttag

SEQ ID NO: 2350 - DNA, 789 bp, Zea mays
  Peptide Sequence Number=SeqID_45725
atggttacttttatgatgatgattaacaatggtgattataatcctgatctctggtatttcctcttgcagggagtgcctctgggaggtgaagctggcaacatggatgactttgaggagttccaggactacgacgagttctattctactcttactcttgtgcttacgatgtcttttgtagatggcccgtatcaggagcaagaccaagagcaggaggactcttcccccttgcctcagcaggaggttgagtctgagaggcatccttcccctgcacctcagccagagatgccccctgtaccacgtcagggcatcctggctgctggaggagaccttgacggagatggagacgacgatgacgctggtggaagttcgagccacgacatagagctctcggaggagccggagccggagggatggatcgctagacccatcactcgtgacaccgctcacggcgtggtagctgatggccttgacctgaagtactacccttgccgttcgaccggcagtgctggaggtgtaattgtctcgcctgttggtgagggaaatcccaggctgagcagcatggtcaacttggtcgccgtgctcaacacagagttggaccacgcccttgacgagttgggcaaggttcgggcggaggttgcagaattacgtgctgaatgcgcggcacgccactatcttgatggtggttctcccacccctgttgggattcagcacccctaccgttcaccgccctgtggtcgcttcaactgtggtaccccagactgtaggacccgcatagatttagatccatag

SEQ ID NO: 2351 - DNA, 888 bp, Zea mays
  Peptide Sequence Number=SeqID_45726
atggtgtctccggtgagctgcaagcgggtaatccgagtggacgtccgtgccccgttcgttgggggtcggctaggggaccagaggcacgcccaaaagtacctgcggcatctggcgcgccggttgcgtgacgcgtgggcctgggcccccatgctggcgtgttgggagtcggagaagcgtgtccacttggcgcggttgcatgccgcctgcatggctgcccactccttccacccgttggtctgggcaaaacccggtcgctcccccccgctggcggtcacccaagatggtgacctccagcttgatggtgggggaaagcgagtcgggctacggcctctgcccctccctcagcctcaaggatcttcatcacaagggctggggaggggagtgtgccgagttgaggtcggcccccgcgtgggcggcggcccgctccttcactcagtgatcggagggaagggcagtcgtcgtccgtggcgctggcagctgcaccgtgcctggctctcgggcgcgagtagcttcagagccgctcgcggcaccggcgtccgccacggcagcttgaagaggttcttctgccggcgagattgccaaggccggccacggaccgaccttcaattctacgaccttcaattctacggccttcaattcgggggcctcctggcagcagcatccgccctgaggtcagtgctgccgctgttcggccccccggagcagaagtcgtcgtcgtcgccgctgctggagcaggtgacggcgcgccgttcgtcggtcttccgctgctccgcaggcccacccccatggagtggggttgttcgtacctgcggagggggaaccggagttccgtttgtaatggcaccttggatgccagtgtgtttgttcatcgtggctgtcgaggcctga

SEQ ID NO: 2352 - DNA, 285 bp, Zea mays
  Peptide Sequence Number=SeqID_45727
atggaggagaatcgtcgatggatgtatgaaggttggaagaaaagaggtgctctatcaagtgagtgggtggccaagactgatgcttttctcgaccatgcttttgctcggtcagagactggaaccgatgttaggatgtcaaagaaaatgaagtctttagctcgtagtttgcttgggtcgaggagtagctcgaggagcagctcgaggggtgaggattcagtttttcagggcacaggttctaccatgagcagacggagagcgctggcagaacatttgcctccacaagat

SEQ ID NO: 2353 - DNA, 2922 bp, Zea mays
  Peptide Sequence Number=SeqID_45728
atgtcacttgacacgaagctcatcctcggcgctatcgccaaactgttcgatgacttcgacgctcgttgggagcgccgtcttcccaagttattgaccgcacaggaggcctctccggtcatctccgttctaaccccgactatggcggttggggccgcagtcatcgccgataactggggcgggggcttcaacggaggcgagtactcattcgagctgtactgcaaggcaccatccatcgtcgccgacaaatggggcggattcttcggtggcgaggacacggctgccaacgtcgagttcgccatcgatccgccagacgaccccgagaggttcgtcctccccaacgtctccaccgacgagcccagcatcgaccccgcgctggaccgcaccaactccggagcggcggacaactccgtcaatgcgctcgtcacctccaccgacgccatccccgcggacacgcttgcgtccttcactcgccctgaggaaggccgcgctcccttcttccacaacgagatctcgggcgtcgttcccgcgcttgcccgcctcacctatttcgcccaccgtgacctcgccgccctccaggagttcgagttcacgcgcagcggaagcgtggtgggccaccgcagccccaccatccgcgacgctgccagcagggcccccgcgctcgacgactggctgctgaagcccctcgcccatcaccgtcttctggggcgcgcctactgcgcggaggatgaggtcttccacaccttgcccaccaagtgttcgacgacggtcctcaactacgacgcttactccgttcccaaccctgccacttcactgacaaccagtacgttcaccaggcccgtcttcaatgactacagctccatggagcggaatagtacaaacaacggaacagtgctggtggcgcagttcgtgggggtgttgcgcggcctacgcgctaccgacgacgaggacctgctccggatgctgcacctcaacccacgcctgcgcagcgactggagcgaccggcccatgctagagatgaacacttgcttccaattagccaagggttcgatcagcaggtggttctctgaaccgttagtgccgagtgagatgaagctatggccgtgcaaggtcattccaggccccggtgacaaacccatgatagtagtcaacttcaagggtgaggagaaacaactcgctgctgaggagatctccttcatggtactcctgaagatggaggacgcagctaacaattttgcccgtggctactacactgttggaaaagggattatgctggtcaagtattgttggacacagtgggaaattccttggtcactcgctacactagtatgttggtgtggagacagactatcagttttcatatatttgcagaaatttccattgtcaaggatggttgctcaaatttccattaatagggaacatgcagttttgattgcattgcaaagttcagttctactggtcactaggatggcaactgggagtgaagcggcgaagccagttgaggttgttgacacggtgttcaaggtgttcaacaactgcaaatcagctagcttcacagctgaatccatcagcaaccatgagatatcaagctttgtgattcctgtgcatgacagcgcaagcgaacaccaagtggtcaacaaaaggacgggtcctgaaattagtgtgctagcatttccgtacaatgcagaacctatgctattatcatcattggcatctatagcgcttggtccccccactgcgaacttcaacacttcgatcccagcatcatgtgtgactgtcagcctaggcgcccatcatatctttgatgaaatgacaaaggggtcatggtgtcttccacagctgcgacatcaacactacaggcctggcaatgtttggaaattcctccacagttattcttcatgcatcattgactatcatggcactaagcataacaatgtttttaggagagcactcgtctggtgctgcaagttctccgttcatgaattgttgggtcattttgagtatttgttgctggatataaccaaggagcacaccatcagctgcattaactcaggtggcctagagaggacatttattctgtggctatcgtggcctacgccagttaagatttttcatgcaagtggtgagcttcggccaaggtcatggccatccctatattgccatcagtctatagttgcttttggatttgatgaatcgacctatactagagtttgccagtattacatctatctcttgaagtctccatggccacccccattaaaacaaaatttcaaatacatgtatgctaaactgtcgaaaatcatgctggcgatggcaatgagtctaaaatgtgcacatactcctgtagttgctgggcaaatgtacattcagagaagtagatgcatggtggattgttttcatagggatcaaatctctaaatgctggaagcatcaatttgaattggcagaaagtgcatttcaactgaacctctggtttgagtttgagctgcatggcacccaacagaaacctccttggttatctattgtttacagtctgttgtttctgctaaaactgctctgtatacagctgaatagtccaattgatacgctagtaaagatcaaagacagtggatctcccgaaattccagtaccagggctatccttcatatggagcggaaaggccttaataacttctgttcttactgaatgggttgtgctaaagcatttggatctcctgcacaagaactaccacatggactatatattcatattcacagattacacactgaacagagctgcaactatttttcgaagcaaaaggagaaatgaagcaatctttagtgcaatacaaactcaactaaagaacaatcatctagaagttcagaccttttctatcgacttgagggcaagtcgagttttaaggaggggagaatgtcaagtatgttga

SEQ ID NO: 2354 - DNA, 153 bp, Zea mays
  Peptide Sequence Number=SeqID_45729
atggcgatgtttgctgctctgaacatggtgtgcccggattcgtggccacctacagtcgtatgttgtgctctattgaccgaagctactcagcgtggtaaagcgatggtgactgacagcgaaggcatggccaaggacgacgagggacctcgatga

SEQ ID NO: 2355 - DNA, 420 bp, Zea mays
  Peptide Sequence Number=SeqID_45730
gcagagtaccatcaatcagtcttgagggaacaattggagtaccagaggcaacaatctgaataccagagacaacaagccgagtaccagaagaagagggacgagtattatgcaagcctccaggcccaaaatcaagctcttctctcgcaactagcccaacaagcgggcgtcccgatgccgacatatgggatgccgcctccggactttgcactgccaatgccaatgttggcgcctccacctccgcctccgcctacgtcacaattccctatgggatttcagacaccacccgcttcagttgccgcacctggagatgggtctgggcaagacgacacaacacattcgtgggtcaacaacctattcaacacgcagagtccagccggaggaggtggctactcgaaccatccagacgatggatatgattga

SEQ ID NO: 2356 - DNA, 648 bp, Zea mays
  Peptide Sequence Number=SeqID_45731
atgcggcacctttggcaggcgaagcaggcgatgcttcacctccgccatgatgaccgcgtcaaaaaaggtgcgccacatcgttcgatttcgtatcctttcccacttcctctttctctctcttgccatagggaccgggaaaggggatactccgaaagggatccttctcctcgaaggaagcgggccccgagccccctactgatgagaggttcgaaggttggcccctcggaagggttcaaaagtcgcctcagagcactcgggctccgcgcccactactggtcagaggttcgaaggctggccccttggaagggttcaacggccgcctcaggccactcgggctccgcgcccactactgatcaagggttcgtaggccggctcccgaagggttcgatagccgcctcagacgcagagcgagggatgaccctggtcaaggctcagtccactcaagggacacgatctcgcctcgcccgagcccagcctcgggcaagggcagccaaccccggaggattcacgtctcgcccgagggccccctcaagcaacggacacaccttcggctcgcccgaggaccagtcttcgccgagaagcaaccttggccagatcgccacgccgaccgaccgtatcgcaggagcatttaatgcaaggatcgcctga

SEQ ID NO: 2357 - DNA, 270 bp, Zea mays
  Peptide Sequence Number=SeqID_45732
atggggcagaatttggtcaccggctacgctagcgaacgaacatatatgacaattaccattgatgcactggttaaaaagagaagcctgaggaattctcaccgaggaaaaaggaaggtcgacggtgagacacagaacgtttcacccgtcttgcagacattacagaacatcggagataaagaaatgcggaagcgattacataacttacatttatttaaaaaggtttcaaggaaggtaatcaagttcaaggaaggtaatgcaggaattatttga

SEQ ID NO: 2358 - DNA, 390 bp, Zea mays
  Peptide Sequence Number=SeqID_45733
atggtgagagaacgaagaacacaaacaaccacaatgagcaagaacacaagagacacaagatttatcccgaggttcggtcacaccaccaaggtgccctacttcctcgttgaggcgcccccaaagagccgggtctctttcaaccctaatcctccctttgccgaccacaaaggtcaagctcacacactaatctttgctcaaacgagcggagtgtgggaggtgtatataaaggtgcccacaaaagcaggtggccgttggggaaagttggctaaaaaccggttgaaccggtttgtaaaccggttgaaccgggtttccaccaggaagaactcgggttcactgactactcagcggagagtcaccgggactcaaacgattttgagaaaacagaagtga

SEQ ID NO: 2359 - DNA, 600 bp, Zea mays
  Peptide Sequence Number=SeqID_45734
atggcatggctacgtaccgtcggcggcggcgcgcggtttgcttcactcgagccagaacgacggcgagcaaagggagcagcggaggaaaaggagcagcaaggcggcgggcggctagggttttacggagcgcggaaagcagaattcaaacagcgccgcccccgccccccttttataggcagggcgcggctccttgggaacccacaacccgacaggccgcgacgcttcgggaaacccgcaatccaacagtacgccgtccatcaacggtcacatcaaaaacccccgcggaaccacttcgagcgagggcagcgtctccgccatctagcgacgtcttcggcaccaggtgactttgtcgaactggtccctcggagggcaaatgttggggcgaaggcaaagacgccacccttcgctccaggccttcgctgcagccgctggtccgacggaggcaaagcgggcagggacacccttcgcaggactcgacactttgacgaagacctgcggcgacgtcctcacacggcgcggcctcattcagccccaaggcccacgtgtgatctggcccattgtaacgggccccgcgtggccgcctctgtcttacgggcctga

SEQ ID NO: 2360 - DNA, 1266 bp, Zea mays
  Peptide Sequence Number=SeqID_45735
atgagtagtgatagtgatttatttgttgatgttcatgatctatggactagaattaaaataaaatattctgagtccaattgtactacttctactccctatgttgcttgtggtactaacctttcaaagggagaagaaaaacgatggcaaccaaacgatgaatccacctcaccgataggtttgtcttccactagttataaatgtcttattgctaacaatgatagtggagacaaaagcgatgatgaggaggaatatgaggatgatagcgaggatgagtcttcatcaccacaaggtacattttcctgtattgcttccactgataataatgacagggaaaatgagaccgacgatgtggaagaagaggagattcaccagttctacacccatctcaacaaagaagacaaagtgctcttggttaagctgttgaggaggaacaagaaacaaggcgagacgcttctcaggctagaggagactctcatcaaaaccaacgacaacctggagaagatgaccaaagaacatgaggagctaaagtgctctcatgataatttggtccaacgtgatcaattagttaaaatatcatcatgtgctgacctctactgccccaagaaaggccaatttttgattgagcaacaagttgtagggtcaaaaagaaaattgcttaggaataagaaacaaagactattgaggagtagacgccatgctcgacttcctcaagatatttacaaacatgtggtgaataagcttgaggaaggaggaaccgcagcaagggtcaaactccgtgacaaagaagctcccaagacaatcaacatgaacaaagaaaaagagcaaaaagagaagaggaaaaggaggtgcttcaagtgcaatgagttaggccacctcattgcgtcttgtccatacaaagacaaggatgaagggatgaggagatgttttggatgcaatgacaaggatcatatgatcactgcatgtccgctcatgaagaatcaaacacgtgcaccctccaggatgaccctcactaagaaaaaagacaaacaacaagcgtcatgtcaggttgagcaacgcttcagctacatgtgtggtgagcatggtcatctacctaaggtgcatgagcataaggagccctcaattggtgacaacaggtgctctcactccacactacctaaaaataatgaatctcatggcattcagggggagaatttgtgcattaaagcttacctcgacctgagaggaaagcttatcctaagtgtaaagagggtgaagattaaagattaa

SEQ ID NO: 2361 - DNA, 1131 bp, Zea mays
  Peptide Sequence Number=SeqID_45736
atgaagctgtcgccgtcgaagaaggcaagaagaagaacaagtccttgctgcgagctcgaaacccacatcggcgtcggcgacaaggtgctggccgagttcatcaccgagctcggccgcgactccaaaaccgtccccgagttcgacgccaagctcaaggagaagggcgccgacttccccgactacttcgtccgtacgctcctcaccatcatccacgccatcctccagcctactgcttccaaccctagctctgccaccgtcgccgagggctctactggcgcggagtcggccaaattccccgggctcgcccgccccgacgaccccgaccatgcccgcaacctccgccttgagctcgagcgggatgctgatgcggcccctcctgctccgatgagggacgaccgcgaccgccgctgggatgggagagttctgttttctttatcagaagttcatcataatgtttctgtggcattttattactgctatgttgtgattgatgtttcaaatcttctattcaagttttttgatatgtgcactgttattttgtttgattctgaagtggagggtggttctggaagtaagaggttaaagggtcttggtattggttctcctgatggtcctgtttcactagatgatgtccgaagactagaaaaatctaatgttgatctcagggaacaacttgaggcacatgttgtgacaattgagactttgagggctgaaataaaaacagcccaagtgcagcatggaaagagattgcaggaagttgggaaatatatcaccttagacaaatttgataaaacggctcgcccatttgcaatactagctgaagattttcctccaactgctcctcaacccttgcatgttcgcttctgcaaagatattgaattacaaggaggaaaactgcctggcagaggtggtggcgacggggagcaaccactgtcgaggatcgccatggagagggtcgtcgatgacgcagcacatcaaggtcccatccctctccctatctcacactcatgcttctactcgacccctcgatgccccaacgatccctctctgccccttcgcccaagcggccagctgcggctcctcaccgaacgccaacagcccccaacggttgtattttcatcccagcagtag

SEQ ID NO: 2362 - DNA, 834 bp, Zea mays
  Peptide Sequence Number=SeqID_45737
atggcgctccctgttgatgtggcgggtctgtgccctaggcagggtgacgtgggggctcctccgaagccgaggttgagtctgtcttctgttgccgaggccgagtccgagccatggggtcgggcgaggcagaggtcgttcggccgaggccagggcggagtccgagccctggggtcgggcgaggcggagtttcgtcgtcttccgggcggagcggagttcgccgtcttccgggtcttagcccgagtccgagccctggggtcgggcggagcggagttcgccgtcttccgggtcttagcccgagtccgagccctggggtcgggcggagcggagttcgccgtcttccgggtcttagcccgagtccgagccctggggtcgggcggagcggagttcgccgtcttccgggtcttagcccgagtccgagccctggggtcgggcagagcggagttcgctgtggcgcctttggcaaggcctgactgcctgtcagactcactctgtcgagtggcaccgcagtcagagtggcgcaggcggcgctgtccttctgtcagactgctttatgctgatgggggttaccagctgagaattaggcgtcttgatgaccaaatgacacagcgcgcgtcagattcaagggctgcaactgcattttactcgcagacaaaccccatccaaaacgagagccagaagaacaacaaaacagaagcatcgcatacatcattccattcttactctgagaaagcactcggcagaagggaacaaccaagggcaaccaacctgttggacaccaaaatgagcggactgttcggcctttgggcccagacggtccgcgtgtcccgagattag

SEQ ID NO: 2363 - DNA, 783 bp, Zea mays
  Peptide Sequence Number=SeqID_45738
atggctgccaccgatggcaggggtgcgccgctgtccagctcccgcgtggcggtggcgaggggactcgtgcacgcggcgcaggtcgctgcaggcttggccgtgctcctctgcgccttcgccgacttgccctgggctgccgccgcggccgccgcctgcatcctccgcgtcgccgcctccttcctcgccccgccgcgcctctgcttcctcgccgcgcacgtcatcctgatcgccctcgccacgctcttccgccgcgacgcagcctcgtcctcgccgccgtccgcggaccctcccggctccagcggcgacgcccaggcccagcacccgttcctcgcgctcctgggcccgccgctgccgccggtcaccgaggcggcggagccctccggggaggaggaggcgccgccggatgaggcgctcgacggcaaggaggcggcgcaccacgcgaggacggtgtgcgcccagccgccgcggcgggccatgtcggagaagaccggcggcagcggcggcgcagcgggcggcacggcgagggcggcgtcggcggagctgcggcgtgccaagtcggagagcggcaggcgccggcaacgacgttcggcggcggcggcggcggcggcgccggtggagctggggatggacgacgcggaggcgttccggctggcggtggaggcgttcatcgcgaagcagcagacctggttccaccgcgaggagtcgctgatcgcccgtaccgccgacgacgccggcggggaagacggcacggcgatcgccggcgctgcggtggctgtgaagtga

SEQ ID NO: 2364 - DNA, 165 bp, Zea mays
  Peptide Sequence Number=SeqID_45739
atgcccccgccaacatgtcttccttccccgcagccgacatgccgcacgcatgcgcggcgcgcccgccagccatcgccgccgataggggtggatatcgagccagctcggctcgttttgactcggctcgttactgtaacgagccagatttataaacccttattataa

SEQ ID NO: 2365 - DNA, 174 bp, Zea mays
  Peptide Sequence Number=SeqID_45740
atgagcgagaacccatactacgcatcgcggacggtccggtgcccaggcgcggacggaaggctggcccaagcgaccggccaccaaagggacctcgcttacccacccaggtatggtagactgtccggctataaaagccggatcatctgcacaggacgcggaccatccgacccctga

SEQ ID NO: 2366 - DNA, 693 bp, Zea mays
  Peptide Sequence Number=SeqID_45741
atgtccggtgtacaccggactgtctggtgtaacggcggggcaacggctacttcaggcgccaacagctacctgcagggcattaaattagcggcagcgcgcgcagaggtcagggacgcccatgctggcgcaccggacaccctacagttcatgtccgtttcgccctattcacccccctctaggcgactttcacctgtgtcatgcgcggccccgtcgatcctgcctgcgccacgcgcggccccgtcgaccccgcctgcgccacgcgcgaccctgtcgaccacgcctgcgccacacgtggcctcgtcgaccacgcctgcaccacgcgcggccccgtcgatcctgcctacgccacgcgtggctccgtcgaccccgactgcgccacgcgcggccccgtcgaccccggctcgcttcgccaacaccacgctcgtctaccaccgccacggccacgccactacctcctcgccccccgactcgggcccgtcgacgagcgcgacgcgcttcgccgaacccaccgtcatctatcaccgccgcgagccggccacacccgccgctctcgacgttccggcggtccactccgagccgtccgtataccacccggtcgccatccaccacgaccccggacatgtccacccgatggtgactcggcgcgccgctggcgttcttcgcccccgtcgaccggctgatcctggcagctga

SEQ ID NO: 2367 - DNA, 453 bp, Zea mays
  Peptide Sequence Number=SeqID_45742
atggcgaaggtgacagacaagaagaagattaagaagaagtcactggggacaatatacgaggaggagagtcctgagcctgccaatggcgacgacgatggagctttggcactgccagagataggattggggcttagcttgaatactaacggggtgctcaaggcgtggtgtggcagaggctctgcgtttgctgatggcaatgggcctgacttgccattgtcccctgctcatgtggtaggtcttagactattcaacattgatatgattagggagcacgaaacaagagaccagttttatgtcatagacatgaactactttcctgggaagggtgctcccagcccccgtcgtgccccttggcccctcccaaccctcgtcgtcgtaacggagggtgctacgacaagccagcggatgagcgtggcgatcccgctggagcagtccatcacgccggtgctttag

SEQ ID NO: 2368 - DNA, 381 bp, Zea mays
  Peptide Sequence Number=SeqID_45743
atgagagctccagctccagctgctcctattcccgcgctgctctcccgctgctcctcgcctccctcctcggccccgcgccgcctcctctcctcctcccgcacgccagccgcctgctgcccgcctccggcagtcgtccgctctgtctccgtcgatttgctggcggtcgccggggagccggctgtcgcaggcgccccctccgcaacgccgtgccgtcgcctcatcctcctccgtcacggggacagcgccaccgggggccgcttcaccagaggcgtgcagtcaccgttcttcctcctcgcgataaaggcggtcctgagctcaactaactgtgccctcctcctgggcatcgcgcgtccactcaccgaatccgtcgaccctatatag

SEQ ID NO: 2369 - DNA, 141 bp, Zea mays
  Peptide Sequence Number=SeqID_45744
atggccatgatgggttcgacatcggaaaagatgtacctctgccaggtgaggaagcagcaaatttttgttgcttttgttccaaggtggtgcctaaggaagaaaagcaagactgaatcctcgggaggaagtgtcctcctttaa

SEQ ID NO: 2370 - DNA, 315 bp, Zea mays
  Peptide Sequence Number=SeqID_45745
atggagagtcatgatctccgggcagaaaggggatcacggcttgtgggtggcaatgagaatgatggttttggtattgactctggtgatggtaagtggtattctttccgtttggaaagggttgttagcattgcaaccactgctcaggagaagatgaagcgatggaaggagacttccaggagttccaagattacgacgagttctaggcgtgggttagcggcaacccccagtcggctgcctgtgaaggccgcgtgtatctacgtttcttttacgcactttgattattgtaaagactatgtggatgtcacagacatatga

SEQ ID NO: 2371 - DNA, 480 bp, Zea mays
  Peptide Sequence Number=SeqID_45746
atgccccctgcaccaccacagggcatcacgactgctggaggagaccctgatggagacggagacaacgacgacgccggtggtagttcgagccacggcacggagctctcagaggagccagagccggagggatggatcgctagacccatcactcgtgacgccgctcgcgggtgtcacttccacgacgttctcgacaccctactacgtcaggccttcgaccaacacacttggtccatcgagtaccgttgtgtagtctaccagcatcgtcgcgggttatacccggaccagtgggaggctacttgcttgccagttggtgagggcaatcccaggctgaacaacatggtcaatctggctgccgtgctcaacacagagttggagcacacccttgacgagttgggcaagcacccttaccattcaccgccccgtggtcgcttcgactatggtacccaagactgcaggacccggatagatttggatccctag

SEQ ID NO: 2372 - DNA, 384 bp, Zea mays
  Peptide Sequence Number=SeqID_45747
atggagcccctggcgaaggtggagttagagttgtcaagtcgatcaagtattgctttaactcttcgaaagccctttgctgagctagaccccactgaaagacttcggctgacttcagtatttcaaagaatgaccagcttgcctgaaattggcaaatgtctcctgcaagtcagcaatatgattctcttgcttcgtgctctttactatgatgtcatcaacataaatcagcacattcctgcctatttgagagtgaaggaccttggctgtcattctgctgaagcttcctccagcattcttgagcccctcaggcatccgaaggtagcaataagtaccactgggagtatgaagctagtctttggctcatcttccttcttcatccaaatttga

SEQ ID NO: 2373 - DNA, 510 bp, Zea mays
  Peptide Sequence Number=SeqID_45748
atgcgccctagcgtcggtgcccagcgcgatggaggagctcggccgccggagaggtttgccatgggacagggagacacggcgtcgagtgccgaggagaaaagaggggcgcctgacttaaatgcacgcgaggttgatgcagcaattggggtgcaagggcatccgcttcccagggtctacgggttcggctccgtggccaccggaggtccgttcagcccatggagcgcggatggcggaaaagtcgttggggaagaaggagactcggccacaggaatctatggtggcgaccattggttgatctcgggattcagttgcgcttacgatccgattctgatgccgaggtgggagaacgagctgcgcaagggcaggcgcagttgctatcgatcccgatcatggtgggggttgttgaggcaaactgcgagaatcgcggcggaagaacggcgcccagcagaattggtgccgcacgaggaagaggagattcccccctggcatcctgggcccgcgcaccggtga

SEQ ID NO: 2374 - DNA, 156 bp, Zea mays
  Peptide Sequence Number=SeqID_45749
atggttaagctggaatccttcctgccgacgagcttccccgcctgcgcacgagattttaaatttaaattaggaaactacccaaaccaaattaatacagagaaaaataaaaatacttctatactggacttaagaaaatttggtgagatactcacctag

SEQ ID NO: 2375 - DNA, 477 bp, Zea mays
  Peptide Sequence Number=SeqID_45750
atgggcaagagtaagaaaggtagcggttcttcgcctcgctctggtgacaagcgcaaatgtgagccgactcctccctcaaaggacttcggcaactcggagtactcggaggaggagttctcctccgtgtccgagggatctccggctcccatctctcccccggcgtcgtctgatgattcagacgactcccaggggattgtcgcggaggtctggacctacattcgggccgtcgagtgctccgggctcgagggctcggatgagtcagagtactcctcggacgaggaggactcctcggacgaggaggactcctcggactcgtccgaggagggcagcaacgacgatggtggtgatgacgacgacgatggaggcgacggtgatggcggcggcaacagcggcaggggtggtgacggcggcagcaagggcggtaatggcggcggccgcaagggcagcagcaagggcagcaacaaggccagtggctag

SEQ ID NO: 2376 - DNA, 549 bp, Zea mays
  Peptide Sequence Number=SeqID_45751
atggttcatcgccatggccctcacttcgactggcgacatgaaccggtggatccctcggtggtgtacgcaagtggtggtggaaagcgcatggatgtaatcacaatttttgaatcacttatagatatgcactcttcgacggatttattgactcgtcgtcgctcgtgctctcgtcgactgaacaagcaggagttggagattatgaggatgcatgaggagatgagacaacaacaaggatttatggaggcttgcaatgcacataaccaagcgatgtatcaattaatgcagcaacagggcatgacaccaaatattccaccgccacaacaatggagccagtttgcatccacaccagctccgggattagggactcaacagttcaacacccatccgacacatatacctgcacctggagatagggttacgcccgaagcgggtggtagtgggtctgatcccacagcagggactggatttgttgactccctcttcacgttccctcctccttgtggtggcagcggtcaaagctctaaccacccaagtggtggttatctctaa

SEQ ID NO: 2377 - DNA, 291 bp, Zea mays
  Peptide Sequence Number=SeqID_45752
atgcagggactaaggacgagctggagatctgcgctctgtgcccgggagccgcgcagggagccagggacccggaccggtagcgggcagcggcagcgggagtctgggggaggtgagatggagtgggcggcggcggtaggagtggccgagtgggagaggacagaggaggagagaatgagagatggaggccgactagcggagcgagggcttcgctggattgctggaagcctggagaacgcttgtggcgttgtgggctgtggcgatgtggcccgtgggtctatgggacgggtgtaa

SEQ ID NO: 2378 - DNA, 477 bp, Zea mays
  Peptide Sequence Number=SeqID_45753
atggggcgcactgaggaggtcgacatctcttgcatcgaagatagtgggggggtaggtgttggtttggatgctgaggcggtggaggtggcagcgctagcatttcttggtgttgaaggtgttgttgctgtggaaagaggttggggttttgctgctaggggtaataggggtgttcgttttggaattgatgctggttgtattgttggggctgatagtctctggatggatgtgtcgagtcttcgtcgtggaacaggcaatagaatcttctctgttgttgaggtctccgacccctgcctctgcctctggtcgtgttgccaccgcggcctagttatggagggtaatcttgacatcgaggggggttctctcctagttgctgctggtttgcaatattgtgtacctggagctgggcacagtcttgccgggctgagtcctgctgtgaaggccctatccatgttctgctggattgcggggtctccttag

SEQ ID NO: 2379 - DNA, 486 bp, Zea mays
  Peptide Sequence Number=SeqID_45754
atggcgcttcctgttgacgtggcgggcccgcgcccgaggtcgggcgacgtgggggctcctccgaagtcggggttgagtctgtcttccgtggctgaggccgagcccgggcccctggcggagttcgccgtcttctggggcttagcccgagttcgagccctgggtcgggcggagcggagttcgtcgtctgctggggctgagcccgagtccgagccctgggtcgggcggagcggagttcacgggcttccggggacttaccccgagtccgagccctgggtcgggcggagcggagttcgccgtcttccgggacttagcccgagtccgagccctgggtcgggcggagcggagttcgccgtcttccgggacttagcccgaatccgagccctgggtcgggcggagcggagttcgccgtcttccggggctgagcccgagtccgagccctgggtcgggcgaagcggagcttcctatggtgccttcggcagggcctga

SEQ ID NO: 2380 - DNA, 702 bp, Zea mays
  Peptide Sequence Number=SeqID_45755
atggcggcggcgccttcgcgaagtcatgaggagcccccctcgaagccttcgacgcttcttggacagagacctcatgtatctgtgatagaacctgtccagtaccctatctgtgataacctccctgcattcaacatcatgaacaggggagaacggcgcgcattgaatgcctgtactgagcgggtctcccctccgagtgtggaggctgattctgatgcccagatgagggtgttcaggggcacgtccggctccgttgcagtgggtaatgaggagaccccttcagagagcgtgtcggctgttctgtggccgccacgtcgcgttgtcggatggactaatgagatggaaagagctttggatgatctccgacatgctgttgtgatcaggatcgtcagtgatcggcaggaggtctctactacagaggttgcatcagcgatcacgtcgaaacttcttgtggaggtgctctcattagtgttgagaaagttgtccaagtccagtttcttgcttgtgctcccaaatgcagcccgggtagatgacttagttggaagatgggtgattatcaggtctggtgccatgtctccgttctctaagggatggtccaagttggtcaattcctcaggatcgagtttgcctttcttggttgattttgagtttaaaggggttgcatgtccatgcttgggaagtgtctttcgtggagcacctgcttaa

SEQ ID NO: 2381 - DNA, 1068 bp, Zea mays
  Peptide Sequence Number=SeqID_45756
atgagtaaggaaggagcgagaggcattgttgtcgaactcgtcgccattatcacactagagggcacggaccaggcgacggaactgggtggagacccaagcgaagaagtgggtgaggatgtcacgaagaacagggttcatggccggattgaatgccatgaaagtgtcgcgaacaagttggtcgtcgtgaagaaggacacgcacagcgagtgccgcggaactgaacggagcctggaaggaggtagcgccaacggccaaggcaagagggaggggccccccggtggtgggaggagacatgccacgaagagtcctcgtgggcgagcccgtccacacgaaggggtgcccgaaccaagtgacgaggagagccacatccggcgcggtgtacgtggggagaaggctgggatgtccgctacagccacagtggagaaagtggccatggcggttgcatctgggtccgtgtggcgtcctagaagcactcgcacgcatcccagcgatggcatcccaagcctccttggcaatccgattctgagaaagcgaaaactgcatctcgggcgggactgcagcgatgagggcatccagcacccatcgatcctcgtagtagtcgacgccatcgtaccgaagtgtttcccacatgtggcgaacctagaggcgtaccctcatcaccacgacccacttgatctatttggtcttggtgaggataggccacccaccgccgggaccgatgtccctgatagcagcctggaccccgcggtgaccatgcctgatcgacgaggacggctagggggcataacccagccggcgacaacggaccacgactacgatctccgtagtcggggacctgctcacttgggcattacagcccttgacacgatccgaggagggagagtcgcgccgcctatagaggccacgatctccgtcgacccgggcgccgccaccgagagcaccgtcggcgcgtccgtgtctgtctggcttgccgccaccgagagcatcattgccgcgtctgtgcccgtctgggctgccgccgtgtgcgttctcgcctggagcaccgtcgacgcgtctgcgccaatctag

SEQ ID NO: 2382 - DNA, 789 bp, Zea mays
  Peptide Sequence Number=SeqID_45757
atgtcttcgcgctcccttatgcatcgtgtctttccaccttccaagcccccggatgggggatacccaccgtctttccgcctcatcgttggaggaaagcaactccgcgggagttggtacctttcagccatcgttcggcttcaaggattttcatcatgcagcccggctgtacccctccgccggcggtcacccaagatgggctggggaggggagtgtgccgagttggggtcggcccctgcatggggcggtggcccgctccttcactcagtgatcggagggaagggccggtcgtcgtccgtggtgcccggcagctgcaccgtgcctggctctcggacgcgagtggcttcggagccgctcgcggcgccggcgtctaccacggcagctggaagaggttcttccgccgacgagatagccagggccgcccacggaccgacctccaactctacggccttctgcccgtccttgcctcacgagtttgggcatgggcgggggcctcttggcagcagcatccgccctgaggtcagtgctgccgttgttcggccccccggagcagaagtcgtcgtcgtcgctgctgctggagcgggcgacggcgcgccgttcgtcggtcttctgttgctccgcaggccctcccccatcgagtggggttgttcgtacctgcggaggtggaaccggagttccgtttgtaatggcactctgaatgccagtgtttttgttcattgtggctgtcgaggcctgaacatgtatgtaactttggcacggagccgtgtttttttcctcattttcgagcactaa

SEQ ID NO: 2383 - DNA, 671 bp, Zea mays
  Peptide Sequence Number=SeqID_45758
atgcaggtggcgtgcaaccgcaccacggagacgcaccccttcgacttcgacgcatccagcatggaggcccaggcccacacgtcatccgcgggaggaggcgtgacggtcgatatggccaaaagtgggccggcagtaatggcggcagcaggcgagcggaagcagcagtcaaatcgtctggaggctcacgtcccctccaggagcagcaggggagccctctcccacggcgcgaagacgacgcacccatgttccgtctctcgaacggctcgcacaacggctgccccgcgaaccacccgtcctgtctcattaacttcacggcagggcaagcgacacctttggcaggcgaagcgggcgacgtttcacctccgccatgatgaccgcgtcaaaaaagggaccgagaaaggggatatttcgaaagggatccttctccgcgaaggaagcgggccccgagccctcctactgatcaggggttcgaaggctggcccctcggaagggctggcccctcggaagggttcgacagccgcctcagagcactcgggctccgcgcccactactgatcaggggttcgaaggctggcccctcgaagggttcgacagccgccccagagcacgcagagcgagggatgactctgggtacgtccgatacatggccgaggctcgggctacgctgtcgag

SEQ ID NO: 2384 - DNA, 312 bp, Zea mays
  Peptide Sequence Number=SeqID_45759
atggtgaccaccagttcgatggtggggagaagcaagccgggctgcggcctctgccccgccctcagctttaaggatcttcatcatccttgctgtggcggggggcgagctgagctggggttccacctcccgcatgggccggcgggccacctcctccttcagcattcaggggagagggcgctcaccggcctagcggagggggcgaactttggcaacgcggggccgttcggccgcaagcgtcgtcagctccaacgtgcctggcttgctggctcagctggctctagcgctgcttccggtgccacctcccaccgctag

SEQ ID NO: 2385 - DNA, 442 bp, Zea mays
  Peptide Sequence Number=SeqID_45760
ggatgcagggctggccgcggctcgccatggctggggcacggccgcagagggctggccatggctggagcacgaccaccatgctccgcgtcgctgccgcgcaaggaagatggcatcgcaaggcgggatgcagtcggggcatgtggggcacaacggctgggagccaggccgcaacgcaggctgccgcgccataaagaaaacgaagaaaggatgtgccagacttctcacctcacgacacagcctgacggagagagctcgtggatgcctcctggtgaagctccggcacgcggtgctcaacgacggcctggccgacgacaactttgcggtagggaccaacacggggcgtgcggctttcaggtggtgctacaacgctgacgaggggaggaggaaaggcaagcgggacccacggcctgatgtagagcgaggaaggctcttgtgcggctga

SEQ ID NO: 2386 - DNA, 384 bp, Zea mays
  Peptide Sequence Number=SeqID_45761
atgggttttggtgacactatgaagtgtactagagttccagaactggtttcaagggagatgcatgctgatatgaaaaggaacttgaaggttgtggtccttgatgctgatggtgaaggtggtgaacagggaggacagcaagatgttgaaggtccagaatcaagttctgggacaaagtataagcaagcaaagaggaaagttgtgcaagctgcgatgacctcatttgtggtttctgctcctctgaaaccaagcactcaaaaggcaagcaaatcagtcagtgcaatgttttgcaaaacaccagaagaagtttcagagaggcacaagaacaaaatatctcaatccattcttgagcactgcaccaagaaaggaagcaaagcaaattgttga

SEQ ID NO: 2387 - DNA, 567 bp, Zea mays
  Peptide Sequence Number=SeqID_45762
atgaccgatcgcggaacggagcaagaaggccctaaggaaagctttgcagcagatgatgcagctgtttctggcatgccttctggccaaaaaataagttcacatgacagtgccggttcttccgaaagaaataatgacagaacacactctgttggtcctttgaaagatatgctccctttgacttttcggctcatgcatgtccaaggtcttccatcatggactaacacttcatcagttaccattcaagatgtcatacagggtgaagtactgcttgctgtactttcaaattacatggtggacattgattggttgcttactggtgtaaagaaacaacagatacctatctggaaaaacaagagacagaatcagctagaagtcaagaaagacagctggatagtggagttaggaacttgcccctgtccatatctggggtcaggacagttgcagatgtggcaagatgacaacagagggaagtctagcaccgtcactgtagtgcttgataatgaggatagcaaactggccagaaagcgagtggctagaaagtcggtcacatcaactggctgtcagtga

SEQ ID NO: 2388 - DNA, 285 bp, Zea mays
  Peptide Sequence Number=SeqID_45763
atggcatgcaaacgaaaaagaaggggtatgtccaagggccagataggtaatcaccactctcaaattgaggtgaaagagagaggatttttaagaagtaggaacaaagatgagtatcaaggcaagatcgatggactgcaaggtaccttcggacttatatcaaagagggagaacctcaaaagatacgaaggttggcacagtgccgaagctgtgaagcaggaaagcttcggcatgttcgcagaaaagggaaccgacttaaagatgaaaaggccatttagacctcgatag

SEQ ID NO: 2389 - DNA, 207 bp, Zea mays
  Peptide Sequence Number=SeqID_45764
atgacgaggatagccgacgcgggcagcatgctgttcgcgagaagacgtgattcggtgatctcgcgaaaaagatgcttgagaccgatggatgcaattcttgaggatctcttggacctgtgggttaggacccacacacgctttcgctgtgccacttcaatcttgtcggttgatgttgatcgcattgtcgtcattggggttatcggctaa

SEQ ID NO: 2390 - DNA, 714 bp, Zea mays
  Peptide Sequence Number=SeqID_45765
atgcggcaaacgattttatcaaagcgtctgatagcaatgagtcatcgcgacgcgagcgaacagtgtgattccaagtacccaagtgaaacaaccctgcggcacgcgcgaaggagcacacggacagcgcacacggcaacacgtgagcatgtgattaacgacgcgcgcgaacagcgcgcgacaacacgtgaaccatacgcatggcgcgaacgcacgaaggcaacggagctgcgcaaagggtcacatgggttacggtcacaaaagatcctgcagggagaagggagagggaagaagtgggagaggggcggctggatcttgagggggcactgcgagagggaggttggggcgttccctgtcgctgggcgggccaggcttggccgcgtcgcttgcagggatgcagggctggccgcggctcgccatggctggggcacggccgcagagggctggccatggctggagcacgaccacccatgctccgcgtcgctgccgcgcaaggaagatggcatcgcaaggcgggatgcagtcggggcatgtggggcacaacggctgggagccaggccgcaacgcaggctgccgcgccataaagaaaacgaagaaggatgtgccagacttctcacctcacgacacagcctgacggagagagctcgtggatgcctcctggtgaagctccggcacgcggtgctcaacgacggcctggccgacgacaacttgcggtag

SEQ ID NO: 2391 - DNA, 1551 bp, Zea mays
  Peptide Sequence Number=SeqID_45766
atgaagcacaacgagttcactacaagaacggagctcaaatcactaacacggtcgatcaagtgcgcagagacggagtgtagaagacttagaatgctcaaagtatgcttgggtggctcctccatgcgcctaggggtcccttttatagccccaaggcagctaggagccgttggaggcattcttggaagtcttatcttgccttctgtcgggtggcgcaccggacagtccggtgtgccaccggacagccactgttcatgtccggtgcgcgatttccttccattcctggcgcagccgaccgttgcaacttcgggctgctgtccagcatctattatgggcaacaagccaaatgaaaaagctgatgatactctggagcaggagaggtcgagaggagatcaagagctgcagatgctagtcttggaaataggagcgtcaatttgtatccagggcaacaggggcggcagcataaagctgaagcctgcaaattggatccttcacaggcctccactcccaatttcatttggaacacaccattctaaggctatgttgcttgtgtatcctcaaggaattcgaattgttgtgcacacagcaaatttgatacatgttgactggaattacaaaagtcagggactatggatgcaagattttccctggaaagacacagtcgatatgaataaaaaaacagcctttgagaatgatctagttgattatctaagtgcacttaagtggcctgagttcagggtgaatctcccaggggttggtgatgtcaacatcaatgcggcattctttaggaagtttgactatagtaattcaatggtcaggttgattggatcggttcctggttatcatgtgggctccaatattaggaagtggggccatatgaaacttaggaatgttctggatgaaatcatgttcaataaacaattttgcaaatcccctctgatttaccagttttcttccctggggtcacttgatgagaaatggatgagtgaatttgcatgctcgctgtcagctggtaaatcagatgatggatcacagctaggaatcgggaaaccactgattgtctggcctacggtggaggatgttcggtgctcgatagagggttatgcagctggtagttgcattccaagtcctcaaaagaatgttgagagagacttcttgaagaaatattggtccaggtggaaagcggatcatgtaggtcgttgtcgggctatgcctcacataaaaacctttactcgttacagtggccaaaacattgcatggtttctgcttacctcagcaaatttaagcaaagctgcttggggcgcgctacagaagaacaacacacagctaatgatacgttcatatgaggatggcgtcgcccttggcaagacgatcaagaccaagctggtcactctttgctggaaaggtgacgaagaggatccatctattgtgagattgcctgtgccataccagcttcctccacaaccttatggcacacaagatgtcccttggtcgtgggatcggaggtacacaaagaaggatgtgtatggttccgtctggccacgatatggctag

SEQ ID NO: 2392 - DNA, 945 bp, Zea mays
  Peptide Sequence Number=SeqID_45767
atggatcctggcacacatatgatggttcgcactctccaaactacccgcatcaacaccagctacgcccctcagccccggcagatcccggtctacctagtggtagtcgaggaagctccagcgaatctcccttccgtccgagtggagaacgtgatcaacctggaggacagctcggaggagcagctgccgacccccaccccgttggccgagtccctagccttcgcagctgggtcatcgacgtcagcatcgtcggcaccagcctttcaagcacctgcacctggaggcgacgaccccgacgactccagagacggcgatgacgaggatgacgacgacgaagacgatggagaagacgttcacatcaacgaggaagctgactacgcccagcaggaccacttcatggggattggtccagttgtcgaacattacacctcaatgttcgagacagggcacttccccaacctgctgcaagaagtgctgcatgcgctaggcgcctacgtccgccccctgtacgagacgaggcgagtgagcgagcctccccgggcttgctattacatcactcgcatccacgtcaggcgatgctcccgtcggaccctgtggtcgctcagccacacctaccggcagcagctgcagaacacaaggttcaggcaccttcctcagcgtctgcgtggagaaagccagaccaacattgtcccaggtgaacctggtgaggatcgcctcaacaccctagctggtgtagtggccggtctcaacaccgacctggacagtgccaccctggacctctacagggtgcacttggagctggagaatgcccacgccaggattgcagccctggaagcccaactgcaaggactggatccgcccgaagctcaggtccccgtagtggcgctgtctcctccccgcaagaggctgcgctatggagagcccggatcagtcactaggctgctttag

SEQ ID NO: 2393 - DNA, 147 bp, Zea mays
  Peptide Sequence Number=SeqID_45768
atgagactgaggtccgtcctctggtttcggatcctcgtctgtttgatcttcagcgtgctactgcagcacgggtacgtcggttcagatagcgctgcgagtgcaccgcctattggatcttccagcttttttgctagcagccggtgctga

SEQ ID NO: 2394 - DNA, 447 bp, Zea mays
  Peptide Sequence Number=SeqID_45769
atggcacccaccaaggttacccagcggaaggcgaccagacctcagggtgtacctcggcaccagttggctcctcgacatgaggggagcagtagaggcagtaatgatcccataggggatctggaggccatagttgaacgcctaacgatggaactgttccatggaagcagggagcgtgcacgtgatagccgcctcattgctgagttgtcagcagaggttgattgtttgcagcgagagattgtggagcgggataggactattgactgggctctacatctaaacgtgccaccggaggttgcggcaatgggagctggtgcatcagaagcagctggcggaggaccttatggggagttggatctctttggagcccctccttccatgaacatcgcggatgatcgttctcccaaagctgggagtggagcgggagcagccaaggacgcggataactag

SEQ ID NO: 2395 - DNA, 1026 bp, Zea mays
  Peptide Sequence Number=SeqID_45770
atggcgcggcctgtggcgtggctcgacgcgtccccgggactcgagcggtttctcgagtgcctcttcataaggactggttcgttggatgaccacccgggaaaacagtacaaccatgagggtgatgatgatgaggataatgctggtttctattgtgattatgattatgattatgattatgattatggtttctgtttgccttctaaaaccgggtgtgacataagtggtataaaaaccgtgctaaatgcgccccctgcaccaccactgggcgtcccaaccgctggagtagctgttggaggagaccccgacaacggaggcgatgacgatagcagctcgagtgatagcaccgacctcttagaggagcaggagccagaggaatgggttgctcgacccatcactcatgacgccgctcgtgggtgtcacttccacgatgcgctcgacaccttgctgcgccaggcactcgataggcgcacttgttccattgagtatcgttgtgttgtcttccagcacagacgtggggcttacccggaccgctgggaggcgacttgtttggtgcgtcgtccagaggatagtctccaaggtgcggaggtctcctcgaagcattattctatctctaagcgggactcagctgaggcggccatgcaagatgtcgcacggcgtgcgctttctcactactgctcagtgctcattggggtggccgatggtcttgacctaaggtattacccccaccatccacctggcagcacaggaggcgtgattgcctcacctattggtgaggacaatcctaggtggagtagcacagtcaacctagtcgtcgtgctaaacacagagctggaccacgctttagacgagctgagtagggctcatgctgagatcgcccagttgcgggctgagcgcgtggagctccgtcacctagcagatggctctcctgcccccgtcgggactgagcacccatatctctcacctcagcatggacaccatgcctacggcaaccccgactgcaagaccaagataaatttaggaccatag

SEQ ID NO: 2396 - DNA, 123 bp, Zea mays
  Peptide Sequence Number=SeqID_45771
atggcgggcaaaaaagagctcgccggagctaaggaggggcgtctggccggtgaaggatttgagctagggatcaaggtgaacacgcttgatctttggcccaaggtctggaattcagaattctga

SEQ ID NO: 2397 - DNA, 384 bp, Zea mays
  Peptide Sequence Number=SeqID_45772
atggcggaagaaagggcggaggggcttaccggcggcaagactgctccagcggaggagctcgtcggcggcgaggagtccggcctatccagggcacaattgatcaatcaaacgggtcagagagcttcaccagggatcaaggaaggcgggcggccgaagtccggtgagggcgatcttggccttccggtgaagttctgccgggtccgagggctgggaaagcttcacaagctaatggcaaagttaaccgagcggctggcgcggcttggaagtgactggagtgggctggccacggtggccgaggctctggcggcaatggtgggcggaaaagagctcgccggagctaaggaggggcgtctggccgacgaaggtgagcacggggtgaggtga

SEQ ID NO: 2398 - DNA, 126 bp, Zea mays
  Peptide Sequence Number=SeqID_45773
atggcgccgccgcgcctgccgtctgcgccaccgtgtgggatcgaagagcccgtgcctgaggatcctggtgagcagcatatagaagtagctgagcaggagctcattgaaggcaagttgtgcccttga

SEQ ID NO: 2399 - DNA, 714 bp, Zea mays
  Peptide Sequence Number=SeqID_45774
atgaacgcgctctctcgcgaagggtgtcggcactttgaggtcttcgaccaagctgatgaggatttcgagcgtgatatctacaaggttgaggactctatagtgatagaatccgccggagccctctacgaccggatgtgggggccctacggtcgagaggtggtcagggagcgggccgagacgacgaggggtcaggttcaagatttttggcctgcgcacgcaaccgctactactaattttttggcggcttcgaccgtggatgatggtaataaatcggatgggtctgcatctaagttttctgattttggtgactctgggagctcgattgagtggactgaggagtcgtcggatgaggacttggactactttgcggccttggatgtggcagcgacggaggcttcgccgcacgctgcggatgctgaagttgtgcctggtccgagtactgggcgtaggcggcgaagggcggttgcgaagcgtagattgtgtgcccttgcacattcggctatgctcgcgaaggcgttacgtacttggtcaggtgtatttgttatgctggactggtgcgcatgtagtcggtctttgcgcggacagtttggtgtagtcgttttcgcttttgttacgcttcgtccggctgcgcctttgggcaactgttgcacggatagtctttgcggaggacttcgatttttcgcacttgttgcgctagcccggctgcacccgtag

SEQ ID NO: 2400 - DNA, 327 bp, Zea mays
  Peptide Sequence Number=SeqID_45775
atgcccatcgcctcacttcgcacagcttcaccctctctcgcgctctgcccacgccggagacccgtgtccacgttcccggccatccagctcgccggagaccgctccaagcctccccgagctccgccccgagacaacgagcagtctgaggttcctaagtgtgttgttggagacctccctgagcaaccacctggtgaagggggctcaggcctttttcttgagtacctctccgtaccttcggacatagatcaaaaccacagtgtgaagatgcgcaaagaatatgatggatggcgcagagccgaagctatgcgcaggggagcttcggcgtga

SEQ ID NO: 2401 - DNA, 693 bp, Zea mays
  Peptide Sequence Number=SeqID_45776
atgaacgtatgtgagctcactcttgctgtctcacaccccccacaggtcaagaacaggtaccacaggatgaggcgcgtggaggatgctgcgataaccacttacgagtggggcccgcgcgtcgaccctttccgcggcgcactggatgtcttagccgacaggtgggacccacgtctgggcgcttcttccccgcagatctcgccaacggaagcaagtccgtccaaccttggccgccacgatttccgggtctcggggtatataacccaccctagacacgcccagttctccgtcgaatcagggcatcaccgcctcatccaaatcaccattagcgcactggtcgggatgaaggttaccaccgcgggcatattggtaggggcgccatcgttcgagttacgcgtgcggccgggaggctcggtctatcctggcggaagcgtccgtggcttcaccgcgttcgcggggccgatggctgccgcggtctcactggtgccacgctcgctgtcctcgctacgcggcatggggaaactcgggtcgatgccaactgttcaacgaagatcaacatcgctgcggatccactgcgcgccgtggccatctcaccccaacgtccctaaccattggatgttgaggacagtagcatggggtcgtaaggatgaagacaacgcgtgcaccgttgagtctctaaccagcggccacgattag

SEQ ID NO: 2402 - DNA, 324 bp, Zea mays
  Peptide Sequence Number=SeqID_45777
atggcaagcatccactctcgggaaaacgcagacgcgctccgctataattcaccggactgtccggaaaacagcgccgctcgccccgctccgactgctatgccacccgccagagtgaggctggcaacagccaagttcagcctcaggcgcaacaggaagctctgcctcgcccaaccccaaggctcggcctcagcctcggcctcggagggtggtctccgcctcgcccgaccccagggctcggcctcaatctcgacctcgggaggaatcgcgtgctcgcctgaccccggcctcggcctcaggaggagtctccgcctcgcccgaccttag

SEQ ID NO: 2403 - DNA, 507 bp, Zea mays
  Peptide Sequence Number=SeqID_45778
atggcgctccgcatactctgtgacgacggcggctctcagcccccttacggaagcaagaggacgtcagcaaggactcaacagctccgacagctgtccctccgccaggctccagcgctcctccgacggccacgacaccacaccagctgggtgccaaaatctctccggctgccacaacggcatggccctcttagagagggttggccgcgcggggacgaggacgagacaggcgctcgcttggagccgctcgctccctctcccgcgtggacgattgtaaccccctactgcaagcgcacccgacctaggcgcgagacgaacacgaaggccgcgggatttccacctctctcacgcctgctcccggccacctcacttccccccttcgcgctcgacctcgcgtcgacccatctgggctggggcacgcggcgacattcgctcgtcggcttagggaccccccggtctcgaaacgccgacagttataaaatcataacttttacatatgatatcggatga

SEQ ID NO: 2404 - DNA, 660 bp, Zea mays
  Peptide Sequence Number=SeqID_45779
atgtcttcacgctcccttatgcatcgtgtctttccaccttccgagcccccagatgggggacacccgcaatccttccgcctcgtcgttggaggaacgcaactttgtggaagttggtacctttcagccatcgttcggcttcaaggattttcatcagtcagcccggttgcatcccctcgccggtggtcacccaagacggtgaccaccagcccctgggtggggagaagcaaaccgggctgcgatcttggtcccaccctcatcttcaaggatgttcatcatcctcgctggggcggaggccgggttgagccggagctctacctcccgcacgggttcgtgggtcagcctctccttcagcattcgagggagagggcgctcactggccctgcgagaggggcggtcttcgacaacgtggggctggtcgacggcgggcgtcgtcagcttcagcgcgttgggctcgccggcttggctcctggtgccccctcctgccgcaagggcggttgtcgcgccgcgcgcacgggaggaccgcccaagacgtcgcgcgctgctagggcggcgttcgtgttctggggctgtcctgcctttgcaccggtacggcgcctccgcgtggaggtcggtactccactcgtccgggaggatttgagtggggatctgccggagggctga

SEQ ID NO: 2405 - DNA, 420 bp, Zea mays
  Peptide Sequence Number=SeqID_45780
atgacggtggcagacgcgcgggagcagcgggcacgtcgacagccaagctcacatcccatccgggggcagcgagagagccccctctcacggtgtgaagacaacgcgcccgtgatccgttcctcgaacggctcgcgcacgcccaacggctgccccgccaactactcgccccgtcgcattaactccgcggctggacagggaccgggaaagggggataccccgaaagggatccttccccttgaaggaaccaggctccgagcctccttactgatcaggggttcgaaggctagccccccgaagggttcaacagccgcctcagatcgcgtgggccctacacccactactggtcagaggttcgaaggccggccccccgaagggtcccacggccgcctcaggctactcgggctccgtgcccattactga

SEQ ID NO: 2406 - DNA, 798 bp, Zea mays
  Peptide Sequence Number=SeqID_45781
atgggggaaaccgccgtcttttcgcctcatcgttggaggaacgcaactccgtgggagttggtacctttcagccatcgttcggcttcaaggattttcatcagccagcctggccgcacccctccaccggcggtcacccaggatggtgacctccggcttgatggtgggggaaaacgaaccgggctgcggcctctgcccctccctcagcctcaaggattttcatcaccagggctggggaggggagtatgccgagttgaggtcggcccccgcgtgggcggcagcccgctccttcactcagtgactggagggaggagcggttgtcgtccgcggcgctggcatctgcagcgtgcctggctttcggacgcgagcggcttcggagccactcgcggcgccggcgtctgccacggcaactggaagagggcatggggcgggggcctcagcagcatccgccctgaggtcatcactgctgctgttcggccccccggggcagaagtcttcatcgtcgccgctgctggggcgggcgacgacgagccgctcgtcggtcttctgtcgctccgcaggcctacccccatggagtggggttgttcgtacccgcggaggagggaaccggagttccgttttgtaatggcacttcgaatgccaggccgcttcaccaagcatgagtcgccccgtgtcaaggtgacgagtgaggagttcctcggctcggtcggccttgctgtccgaggctcctctagctcagttaaagggacccctcggccgctcttcgatgagccgaggccaggggtagcgatatcagtatga

SEQ ID NO: 2407 - DNA, 1818 bp, Zea mays
  Peptide Sequence Number=SeqID_45782
atggaggtagctgttggccgcgctgggtctttgtccggccgcaactgcgggcctgcggctcgcgattggcgtcgcctcgccggcggattgctggtttcgtctcgtgatgcctcagtggtactacttgttagggtttgctctatggggaactggcctgtatcattgtgctcttttcgtccaatgggaattgtcaagataggaagccgtgagcctgcagcgaggagtggttacagttgtggaggtgaggaccttacacgagaggacagaatgcttctccagagctttcctgatccagaatctcttggctctgaccaggcggaggtggactgtgagcttgcatcgtcgagaggccagatgtgcaatatcccctatgggatttatgacctgcatggtggcttggccgaggttctttctttggagacatggaattcatgcctgacggaagatgatagactccgtctagcagcctacctcccggacatggagcaacaggactttgtcacaaccatgaaagagctgttcagtggggatgctatgttctttggaagtccagttaaaagtttttttcatggattgagtggtgggctctattctccacaagtttctcaggcaagggagttactgatgatgtttcaaagacgaaggcattatcactttctcaagtggtaccacgatgatatggttgctaagtttgcatccatgagcaatctgttgaggagttctgatacgagtgcaactcttggagagaagcttcccatctcgcgcaggcacgtatacgagaagcgtttcccatgtgttagtcttagcagtaccattccaccagttactatcaaggatgaaactgccactgtttcatcaccaatggaatgcgctaaacttgcgggtgggccattaagcactcattgttcaaccagacatgatgaaagagcccatgcagccaaatcagtagaaatgaactcattggaaagtcaaatcctccgtcctctcagtgaccccatgcaaaattgtagtaaactgcccaaaggtgtgctgaaaataaggactggttgtgcttctgttgccgatggcagtgaagggacgcgtcatagacctggaccggttctagcagatcaaccaggagcacagagctccagaatttgcactccacctcttgtttttagacatggtgttcatggcttttctgagaatccatcttctcacaccaacagaatcaacagcacgtctgacagctcacaccgtactcccttacaacgggagggtacactagaaccgtacgcaccaatgggcaaaatcccacctcgagtccaaatgacagttccacaggagcacagtgcggtttacccttccatgacaggcttctaccaaccagcagctaaccatagcttagcatattccagtgaagcatacggcaccagagaacgtgcccacatggaagaccttctgaagaacttcggctgcggtcaaaacatcgtagcccatcagatttctcctgatccatatgcgagagccatggatggccttcaaacaaacggatactccagttcgaaaaacgctgagagtatctcagacatgctgagccttggtacaaggacatacccgcttcatagcagtgcctcggagctgctggaaaccgtgtgcaaccaccgtgaaggcgcaccatctgccaatgctgttgctgaagctgaagagtctcgtcagttcacttacacctacgcgaggaggaagccgcacaagagatcgactatggcggagcgtacagtgccaccaagtgcggtagacggcatggccatcatgaaagcgaaggcaatcagactctga

SEQ ID NO: 2408 - DNA, 174 bp, Zea mays
  Peptide Sequence Number=SeqID_45783
atggagagttatgatctccgggcagaaagggaatcacgacttatgggtggcaatgagattgatggtcttggtattgactctggtgatggttgtttgcattgcaaccactgctcaagagaagatgaagccatggaaggagacttccaggagttccaagattacgacgagttctag

SEQ ID NO: 2409 - DNA, 1425 bp, Zea mays
  Peptide Sequence Number=SeqID_45784
atgggccaggcccaatacactgagggtgagatgcatcagtctcagatggccatgggccagatgggaggagtgaacatggccaacctggctgctatggagcaatcccgaatgcttgcacaaactttagcaagtaataatgatcccaagtttcagttagtatattgtgtcatatccgaaccatttattgtttcaaattctaagttcttccagtttgtttcaaagatgagccggggtgaacttattatagaagataatcaggtaaaagaaggtttagcatcccaatccagtggctgggctgatgaatttcaaacacagtacaaagctaatgcaaactcatgggcggatcagtttgcacgtgaagagctttcacaaggggcggataagtgggttagtgagttctctagtcaacataatcaaggtgcgctaaatgagagctgggttgatgagttctcgaaattaaatgtcactgatgaatgggcagaggaattcagtggaggtggttttggcgaaagctctgctgatccgtgggtagatgagttccaagaacacttgtcatctttcaaacaaagttcaggcgcctctcgaggggtttatgtttattctgagaacaacccgtatgttggtcaccctaatccaatgcaagaaggacaggagctcttccgcaagggcctcttaagtgaagctgttcttgctttagaggctgaagttttgaagaatcctgataatgctgaaggttggaggttgttaggcataacacatgcagaaaatgatgatgaccaacaggccattgcagcaatgatgcgtgcgttggaagctaatccgacaaaccttgaagttcttcttgctcttggtgttagtcacacaaatgaattggagcagggagaagcattaaggtatctttataggtggcttcagaatcatccaaaatatggtggccttgtccctccgcagtcaactgattcaccttatggtcctgatgttgttagattgtttaatgacgctgctcagatgtcacctgaagatgcagatgttcatgtagttctgggagtcttatacaacctatcaagagagtatgataaagctataacttcatttaagacagcagtacagctcaaaccacaggactactcactctggaacaagcttggtgcaacccaagcaaacagcatccagagtgctgatgcaatattggcgtatcagcagatgccttacatggctgctgatctggcactagacttgaaacccaactacgtgcgtgcatgggcgaacatgggaatcagctatgccaaccagggtctgtatgaggattccattcgatactatgtaagggcagttacaatgaacccaaaagctgacaacgcttggcagtacttgaggatttctcttgggtatgccctgctcgcttgtgatttacctaccatgtga

SEQ ID NO: 2410 - DNA, 390 bp, Zea mays
  Peptide Sequence Number=SeqID_45785
atgcaagatgctgcacgatgtccgctttcgcagtactgcttgttgttcagcggggtagctgacggccttgacctgaagtactaccctcgccgctcagccgacagtgctggaggtgtgattgtctcaccagttggtgagggcaatcccaggctgagcagcatggtcaacttggctgccgtgctcaacaccgaaatggaccacacccttgacgagttgggcaaggcttgggcggagattgcagaactacgtgctgagcgcacggcgcgccactatcagggtggtggttcccctgctcccatcgggattcagcacccttaccgctcgccaccccgtggtcgttatgattatgtcacccctgactgtaggacacagatagatttggagccatag

SEQ ID NO: 2411 - DNA, 300 bp, Zea mays
  Peptide Sequence Number=SeqID_45786
atggcggggacgcagggaggccttgggttgatggtgaatgagctccggctgcacggggagaaggccgaaaagggctcggtgcctgggggagtggccgggaaatgcgcgtccacggcggagagcgcgggcgagaggttagggaagggggtagtggctgacaagtgtgcagaagagcgctactgggcgaggggagtgagtgagtgggtgcgggctcaaaaggaggtcgggcgcgtggggggagtggccgagaatcacgagacgtgggcgcgtccacggcggggtgcacgggcgggaggttag

SEQ ID NO: 2412 - DNA, 285 bp, Zea mays
  Peptide Sequence Number=SeqID_45787
atggaggccaatgaggccggaagcgagggagaagaggctcccgaagagttaggaccagcccctggtgctaatgtgactacctccgtgatggccccttcacctgccttcaacgacttgtgcaagtacacagggtatcatgctgattctgatgagaaggagagagaccgcttccgcaggggtctcaacaccaagttgcgtgagcatctcaacactgttcgggcggatagcttcaatgagttggtcaacctggccatctcccaggaggattgtattgtagctcactga

SEQ ID NO: 2413 - DNA, 429 bp, Zea mays
  Peptide Sequence Number=SeqID_45788
atgaacaaaaacagaaacttgcagaatggaattgggattcagatgggtcagattcaagcgatagaaatcaaggagaccgcggaagaaaggagaaatgggaagagcaagtccgcggataagaaaaggaacgtaaatgacggatttgtgggtgtcttctgtcggaacattgaccccacgggagatccgccacgaatagagctccttcggaggaagaactccgatagaaatgagatgaagaaggtcggattcagagacaacagacatatggttacctgcgaaaggcaactgactgttggggtcgatgggggaaatgactgcgacgaacgaactcgaagctttccgcttgggcgccatctcaaccttgctggtaggcgaggcggaagcaataccacaagagagcagagaaggcctagatgcagaaaagcatga

SEQ ID NO: 2414 - DNA, 468 bp, Zea mays
  Peptide Sequence Number=SeqID_45789
atgggaaagagcaagaaaggcggtggctcttctcatcactccggcgacaagcgcaagcgtgagtcgactcctccctcggaggacttcggtgacttggagtactcggaggaggagttctcctccgagtccgagggctctccggctcctgcctctcccccggcgtcgtctgatgattcagacgactcccaggggatcgccgcagaggtatggacttacatccgggccgtcgagcgcgccgggctcgaaggcccggatgagtcggagtactcctcgaacgaggaggattcctccgacccgtccgaggagggcggtggcagcgacggcggcgacggcgacgacgatggaggcgacggtgacggtggcggcgacagtggcaagggcggtgacggcagcggcatgggtggcagcggcgacggcggtggcggcagcaagggcagcagcaagggcagcaacaaggcaagtggctag

SEQ ID NO: 2415 - DNA, 102 bp, Zea mays
  Peptide Sequence Number=SeqID_45790
atggagcagaggcgtcgcgccatggcaagcttggagaggccgctggctactgctggccatggagcaggggaggacaagccagggggagaagggaggagataa

SEQ ID NO: 2416 - DNA, 147 bp, Zea mays
  Peptide Sequence Number=SeqID_45791
atgaataaggacgttggaagtcagaatcaagtttacaggaaaagcagtccctcgagaagccacccaggcacagaagtcaccatgcccagctatgacttcgtcgagctcgtcaatctccccctcaatgtgttcgaaggtttttggtag

SEQ ID NO: 2417 - DNA, 237 bp, Zea mays
  Peptide Sequence Number=SeqID_45792
atggcggcccggcgcctgcgcccggccccggctcccccttccctgcggctcggccgcgcccgcccgtccccagctcgcctgccctgccccgacgcggcgccctcgcccggcgtccccgccctcgcccatccccgggggctcgagcggtttctcgagtgcctctccgtaaggacctgttcgttggatgaccgcccaggaaaacagtgcaaccatgagggtggaatggggtgcccttag

SEQ ID NO: 2418 - DNA, 255 bp, Zea mays
  Peptide Sequence Number=SeqID_45793
atgtcgcgtgcgttcgatgactactatatcgaggattgtggcgtcatcttggcgccggaggtgacacagaggaggatcgacaacagtgaccagttcgtcatcctcgccaccgtcaggggctacgtggtgtgtcacgacgatgggaggcagcgcgacagcaggggtgtacagcgtggggcgtgcaatgcgtggcacgagcactgcagggtgggtgaggagcagggcggggcacgattcgtggtggatgacgtctga

SEQ ID NO: 2419 - DNA, 1032 bp, Zea mays
  Peptide Sequence Number=SeqID_45794
atggaggtccgctgccaaaccagcttgtgccagaatgaagatggtttccccaagttgctgagagcatgcacagttcgccttggaatcaggagccagccagagtatgatggtcgtgaattcgttgagcatggcactgagaagtatgtcgtggctatatacattggatccagtccgcaccatgtggaatggagtgtcactgctgctgggcacagattcaaagacacctgccaagtcgtcgcccgcaaggcattgagggccctgtgtcagatctatgaaaaagaagtggctgacaccccgctcagattctttccgctctttcagagagaccgtccagtttggatggccaggatgcgtgcattggaagggaagcaggtgcttgaggatgaccccacagtcgtgtacctcactgcatatctgctcaccctggatgcgcagtataatttcttggcttggcaccaccgtcagatgattgcccgagcagaagatgcagagaagctcaaccgtaaactccatgtggacctcaccacagctcaagctcgtgtagctgccttggaaagtcgtgaagccattgctgttgaagccctgaagcaagccaaggatgagcacgtccagaagttgatggaggcctacttagtaacccataaccaacctgaagaccctcagattcttgaaggtcacccggtctctatcagaggagagaagaaggcttgggaactaccggaaggagccatagtcttggaaggaattccagtctcccctaaggctatggataagcaagagtaccccgagtcctcccaagatcccctgctagagatgtttgaacccctcaccatgaagaagattccagcaccctcccttgaggtcaaagaagaagccgcaagcaccccaccagcatcgccgccctctgaggagctacaagagccaatcccgcttgaagaagagttcgaccccgtcttgccatctcagtctccgcaagaagaagtcatcaacatcagctccctcttgacccatccaggagatgtctcagattga

SEQ ID NO: 2420 - DNA, 630 bp, Zea mays
  Peptide Sequence Number=SeqID_45795
atggatcaaagatctatggccgcgcgagttattcaaacgaaggggtatgatcttctaatcgcagccgttcgttacaggatcgacgggcgagggcactcctatgccagatctaatcctagacgctcatcaacaaacggacggaccacgaacgtcttccccaccacagtcgagcagagcggccgggctcgtgcaacagtgacggcgacgccattgccggcgagatggaacctcaacaaaggcgcactaacttcgaataaaacagttctacccgttgcggaactgaaggcgaatatgggcaagggactcataccgagaatcgagctcgcaggcgtgcagttcacggcgaagcgcggtccgcggcggcggtgtaacaacggcgaaaaatccacgccgctccgcagcttccatcgcccaattacgcccctgtacacgatccacacttgcttccgaacccttgggatcgcatcacgggcgttgggagaggacactggtgacgaacgacgacggcggatctctcagcttgaagtgggtctcgatggtagcgacccagatgtaatcgtggacattactccacaacccatcacactcaatcaaagatccaaatcagacatgtatcacaagaacaaataa

SEQ ID NO: 2421 - DNA, 681 bp, Zea mays
  Peptide Sequence Number=SeqID_45796
atgagcatcatcctgcagtacctggtcttgacctgtggtgtatgtgagacagcaagaaggtggtaccctttacccacaagtcatgttacccatctgccaagagatcgcgacttcccatacacctctaccgaggaggcgaggcagggtaacactacgaggcctttacaaagttccactagcttcagaaaacccgctacagtttataggaagctccaacgcaggaatcccttgcaggaccgccatcacagcaaaatcctcccgagggcctccccaggaatcccttgcaggactgccatcacagcaaaatcctcccgagggccttcccaggaatcccttgcaggaccgccatcacagcaaaatcctcccgagggcctccctacactgaccactcccctactgcccttgcccctttcggaacatgagtgggtaaaagaagtgatcaagggcacaacttgcctggcacttgagattccagttggctggactgggcgtcaattactagaaaaatcagggctcttggcgcaagatgtccaagacacagggaacatggagagggatggcgggttggtttctactttctacaggggcttaagtgttaaattgacaggccgaagaggtatcttgcaatctcggccgcacgatccaaaacggacggtgtggattagatcccggccgcggtaa

SEQ ID NO: 2422 - DNA, 867 bp, Zea mays
  Peptide Sequence Number=SeqID_45797
atggtgtctccggtgagctgcaagcgggtaatccgagtggacgtccatgccccgttcgttgggggtcggctaggggcccagaggcacacccaaaagtacctgcagcatctggcgcgccggttgcgtgacgcgtgggcctgggcctccatgctggcgcgttgggagtcggagaagcgcgtccgcctggcgcggttgcatgccgcctgcatgactgcccgccccttccgcccgttggtctgggcaaaagtggggggtcgcttcccggctgcacccctccaccggcggtcacccaagatggtgacctccggcttgatggtggaggaaagcgagccgggctgcggcctctgcccctccctcagcctcaaggattttcatcaccagggctggggagaggactgcagcgtgcccggctttcggacgcgagtggctttggaaccgctcgcggcgccagcgtctgccacggcagctggaagaggttcttccgccggcgtgatagccaaggctggccatggaccaacctccaactctacggccttctgcccgtccttgcttcacgagttttggcatgggcgggggcctcctggcagcagcatccgccctgaggtcagtgctgccgctgttcggccccccggagcagaagtcgtcgtcgtcgccgctgctggagcaggtgacggcgcgccgttcgtcggtcttccgttgctccgcaggccttcccccatggagtgggactcgcctgttgattatctgaaccgcttcaccaagcatgagtcgccccgtgtcaaggtgacgaagaccccttggctgctcttcgacgagccgaagccaggggtagcgatatcagcacgaacagaggcggagttggcttga

SEQ ID NO: 2423 - DNA, 309 bp, Zea mays
  Peptide Sequence Number=SeqID_45798
atggctcagtggtttacccggtccacgcactccggcagggttgagagctccggcgaccgtggactggcctctccggcgaagcaggcttcgattcctcgctcggggagcttcaccgaggacagggcgccggctgaccgttggcgcgacgcggggcgcacgcgggcgtgctctggcaagctcagggcgcgtcgaacacgtggagcttacaatctgcccgtgttccacagctcacccaagtcgcaaacatatggcctaggtagggagatctctggtcgccaaatcgggtgtgtcacactgcccacctcgtga

SEQ ID NO: 2424 - DNA, 933 bp, Zea mays
  Peptide Sequence Number=SeqID_45799
atggcgcttcctgttgacgtggcgggcctgtgccctaggcagggtgacgtgggggctcctccgaagccgaggttgagtctgtcttctgttgccgaggccgagtccgagccatggggtcgggcgaggcggaggtcgttcggccgaggccagggcggagtccgagccctcgggtcgggcgaggcggagtttcgtcgtcttccgggtcttagcccgagtccgagccctggggtcgggcggagcggagttcgccgtcttccgggtcttagcccgagtccgagccctggggtcgggcggagcggagttcgccgtcttccgggtcttagcccgagtccgagccctggggtcgggcggagcggagttcgccgtcttccgggtcttagcccgagtccgagccctggggtcgggcggagcggagttcgccatcttccgggtcttagcccccgagtccgagccctggggtcgggcggagcggagttcgccgtcttccgggtcttagcccgagtccgagccctggggtcgggcggagcggagttcgccgtggcgcctttggcaaggcctgactgcctgtcagactcactctgtcgagtggcaccgcagtcggagtggcgcaggaggcgctgtccttctgtcagactgctttacgctgatgggggttaccagctgagaattaggcgtcttgagggtacccctaattatggtccccgacagcgggggtgtacggtcgaggccggggttggctttatagttgcgggcgcgggcatgacgcggcgcagcgtggcgcgcgcggggccgagcgccggggcgtgctctggcgttgccagggcgcgtcaaacacgtggtcgtgttattctgcccaagttcttgcgcctactgagcacccaaatgtgcaaatcttgtcacaagacttgtgtaagatttcttccctgcacctag

SEQ ID NO: 2425 - DNA, 453 bp, Zea mays
  Peptide Sequence Number=SeqID_45800
atggaggcccaggcccacacatcatgcaatcggcgcgccggatgcttcgtgcgagcaactgcactgccactcgcgccactaccgcgcctcctcgactgcggaaccaataccgtgactcgaggcgacccagcgcacgacccagcagcgccagcctggcgcgacgggaccgggaaaggggataccccggaaaggatccttccccgtgaaggaaccaggctccgagcctccctactgatcagaggttcgaaggctgacccctcggaggggttcaacagccgcctcagagcgcgtgggctccacacccactactggtcagaggttcgaaggccggccccccggaagggttcaacgaccgcctcaggctactcgggctccgcgcccactactgatcaggggttcgaaggctggccctcgaagggttcacagctgcctcagacgcagagcgagggatga

SEQ ID NO: 2426 - DNA, 573 bp, Zea mays
  Peptide Sequence Number=SeqID_45801
atgggggggcctgcggagcaacagaagaccgatgaacggcgcgccgtcacccgctccagcagcggcgatgacgacgacttctgttccggggggccaaacagcggcaacgatgacctcagggcggatgctgctgtcaggaggcccccgcccatgcccaaactcgtgaggcaaggacgggcagaaggccgtagagttggaggtcggtccgtaggcggccctagctatctcgtcggcggaagaacctcttccagctgtcgtggcagaagctggcgccgagagcggctccgaagccactcgggtccgagagccaggcacgcggcagctgccagcgccacggacagcaaccgcccttccccccgatcactgagggaaggagcgggccaccgcccacgcaggggccgaccccaactcggcacactcccctccccagccctggtgatgaaaatccttgaggctgagggagggcagaggccacagcctggcttgctttcccccaccatcgaactggaggtcaccgtcttgggtgaccgccggcggaggggtgcagccgggctgcatgatgaaaatccttga

SEQ ID NO: 2427 - DNA, 441 bp, Zea mays
  Peptide Sequence Number=SeqID_45802
atggcggggatggccggaatcgctcggtccacgcgcgcaggcgggtgttctcgtcggcggcgagtgtaccggccaaaccacggcgatctgagggttggatggggttggggaaagctggactggctggtctacgacggcagtggctcgggtggccgcggacacgccgcgcacgggcaaacggcggtgaactgggctccggtgaggtttgagcgtgcgcggaagagtgtaaccgacgcttgggagggctttataggcgcgggcgcgggacagggcgccggctggccgttggcgcgacgtggggcgcgcgcgggcgtgctctggcaagctcagggcgcgtcgaacacgtggagcttacaatctgcccgtgttccacagctcacccaagtcgcaaacgtgcgaatcttggcaaaaatccggcgcgagtcttttcctggcacctag

SEQ ID NO: 2428 - DNA, 396 bp, Zea mays
  Peptide Sequence Number=SeqID_45803
atgacaagtaataagatgtataatgctcagatgggatctcaaatgggaccccagttcacccgtccgtcacaatctggacagacccccaacaccaacgaaacacagggttctgagaccggtcaaggaaactcacagatggacatgcagtggtcgatgcctcctagaggacagattcttcctcctccacaaccagatatgcgatattggccgccagcaccatggggatatcctacacatccaatggggccttggggatgccccccatggccaacacagccacttccatcaccagcggattctggctctcatcaagtgactcctccccctcacactgactttgcggacagatgtctcaattctagtggcgcagttacgaacaacaacccgatgtcctga

SEQ ID NO: 2429 - DNA, 1104 bp, Zea mays
  Peptide Sequence Number=SeqID_45804
atggaggagtgcttgatcttcatcatccttgctggggaggagggtgaggcgagccagggcctgccttcgcgtgggctggcgtcccgctttcccctccggcatctgggggtggaaaccatcctccaactctacggaggaggcgtcctccagccatgcgggggaaggcgaactgctgctgcctggccagggtgcagcattccgtcctctgcctgggcgacggtggccggccgcaccgggggggtctcacaacacgtcgtacgccgcgagggaggtactcgtgttctgggacggtcccgttctcgttttcgtggcgaggacgggagtgaggacctgccggtgcgctttggggcggctggcgctcgcaggtgcggtgttggtgggcaggtggacgccgccgtcggtgctgagttggtggcagccggagaaggtttctccgccgacgagatcgtcagcgtcacctgcgctccgggcctctggctctttggctttaatggctggttctcgtcccccgtgaggggacacgaacgagagccttccagcggtagcgttcgccctggggccatcgctgctgctgcagaggtcgccggcgagccacccggagtttgtcgtctcgcaggccctccgatgtggaggagtccctcggctcggtcggccttgccactcaaggcttctcttgctcagttaaggaaccctcagctgctctgcgatgagccggagccggaggcagcggtgtcagcatggacagaggcggagtcggctcgaaaaggggcttcgtcggcccaggagcaggtggcttcccaggccgaggaggtgcagcagcggcggccggagcctggctgggtcatccgtgagcgagaccatcttcggagttatgctgccgaggccgtgagtcgggctgatgtcctcaggggacagctggctgaggctacggagcggccggtcgaggtgtttgcctgggtcgggaccctggaggagaccctggcggtgatggcccaggcgtggtgccgacatcttccttcgaggtggagatccttccacccgtgtcgccgtccgaggccgggccagatcccactgagggctgatttggtgattagggatccctag

SEQ ID NO: 2430 - DNA, 147 bp, Zea mays
  Peptide Sequence Number=SeqID_45805
atggagagtcatgatctccgggcagaaagggaatcacggcttgtgggtggtgatgaggatgatggatttggttgtgactctggtaatggagatgatgaagccgtggaaggagacttccaggagtttcaagattacgacgagttctag

SEQ ID NO: 2431 - DNA, 255 bp, Zea mays
  Peptide Sequence Number=SeqID_45806
atggcggccatgtcgcaagctccacatacgattttgggtcttacacccgaccccagggctcagcctcaacctcggcctcggaggatggtctccgcctcgcccgaccccagggctcggcctcaacctcgacctcggaaggaatcgcgtcctcaccccaccccggcctcggcctcaggaggagtctccgcctcacccgaccttgggctcgggccgaccatgccacagggggtacatcattaccctacccctagctag

SEQ ID NO: 2432 - DNA, 504 bp, Zea mays
  Peptide Sequence Number=SeqID_45807
atgaacgtttcatgcattgttggacaagcgcagaagcaggagctcgcacgacaggtggatctcagcgccaggcaggtggaagtgtggttccggaacacacatattcagataacacacattttcatgctcatgctgacccacacaggttcttgggcagctcagacaccagctcatcgtcgagctcctcgaggcttgccacccgcgttgttgtggcatggcgactgcagtgccaaggacgatggtgtgcaagatcctatggccgaaattgtgagactgaccagttgcaatgtcaatgagttagagtatttaagagcagaagatatgaaggagcaaccctatgaggcaaaacgtgagttgacaaaagaccctgaactctattgcactgattctgtgtcacccctgctgggcttagttccaacaaatttttgtcgactaacaaccatgaagatagcactcctaactataactataattccacctgatcaacaatgtgccgagtcctag

SEQ ID NO: 2433 - DNA, 642 bp, Zea mays
  Peptide Sequence Number=SeqID_45808
atggccgaatctggctgccatctccggggaggcccgctcggagtcgagctcctgccgcagcccccgcacggcgtcctctgcgtcctccttctcccgacgcagccgcgccgccgctggctccttgggagggaggttgaggagagactgcgggctagggtggcggcgaggggagggtggatttcacgaagcgcggtggggaacgtgcccatgcacgaagggatcttgcggcggatgcgaaggcagctgccacagcggggaggcgggatgggcatcacgagcgggctctgccaaggctccatgagggcgcacgggtgtggaagagttcgtaggaagaaagaaacgaaccctgggctatcgtctcagacggagttgagtagatcagcgtgctccctcatggagccctggcagagcccgagcgccctccccactgcctcctcgctggcgccagcagcagcccccggcatcgtctgcgcgaaggacccgatggtggctcggtggcaggggtggaggctgggggagggcatcgcacggtgggacaacgagcagtccgaggttctcgagtgtgttgctggagacctccttgagcaacaacccgatgaaggcaagtgtcctctgaactattatgtcctatatactttatga

SEQ ID NO: 2434 - DNA, 507 bp, Zea mays
  Peptide Sequence Number=SeqID_45809
atgccccctgcaccaccacagggcatcccggctgctggaggagaccctgacggagacggagactacgacgacgctggtggcagttcgagccacgtcacggagctctcggaggagccggagtcggagggatggatcgctagacccatcactcgtgacgccactcgcggcggggtagctgatggcctcgacctgaagtactaccctcgccgttcgaccggaagtgctggaggtgtgattgtctcgccggttggtgagggcaatcccaggctgaacagcatggtcaacctggctgtcgtgctcaacacagagttggaccacgcccttgacgagttgggcaaggttcgggcggaggttgcggaattgcgtgctgagtgcgcggcacgtcactatctggatggtggttctcccatccctatcgggattcagcacccttaccgttcaccaccccgtggtcgcttcgactatggtaccccagacaacaggacccgaatagatttggatccatag

SEQ ID NO: 2435 - DNA, 486 bp, Zea mays
  Peptide Sequence Number=SeqID_45810
atgcagtcacaaaagaatgcgttgctccagcatcaaataacacatttgcagaatggtactcgactgaaaacatacctagtgccactcctggagtctcctggactgtgtcagcctccaagtgattcacctttccatactaggcacgaggcggcccatggttgttgcctccttgctgcattgcattctgccttactggggcattgggagctggttgctactgagctgctttctttggacaatgattcacccagtggccatgttccccatagtggaaacatgcatgacttcctccttgcgctggcgctacttggctgttctggttggttgctggggcaggaagacgaggtgcctggttgctctgacgctgatattgatttcctccctgctggttattctgacggtactgctgttgctactgaggaaactgcctctggtactgctgctgctagttctaacactggtgctggtgctggtggccctgcttga

SEQ ID NO: 2436 - DNA, 774 bp, Zea mays
  Peptide Sequence Number=SeqID_45811
atgactcttgaatttgcattagattttgtcccagaatttgatctacactggattatgtatagtattcaaattcttaaaatctgtgtggacaccaccctaatcatcaccgagcagatgcatgagaggaagggaacaatgaagcgtcaggcgatgatgggaaaagatactgggaatttgcttcggccatggtattttttgttaggaatggaaatggggtgcatgatctatttagtccttgctctcgggtgggaggttgcttcaattgtcagaaaaggggttataaagaacatgaggcgcaacattgtagatggaaacagttttgcatttctttgtgacaacatagatgagcttgagcactctgttcaggagaatttacctagagtctctgtagtcatgcctttgaagggctttggcgaacataatttgcaaaattggcgaactcagattacatcactttatggtgggccactggaattcttgtttatcgtcgagagcaaatatgatcctgcttatcatgttgtttcccgtttgatcacagagtacaagatgtggcattttaatggaagggtagcttatagtttgacaaacaacaatatcctgcatatacattatagggctgatgtaccttctttccataccaagtttagcgaacgtcgctacgagcaggccctcgaggtgatcaggaccctgaagcttgaggtgatcaggaccctgaagcttggtatacgaggtttaaacagcctggctgttctgttattgacagcattgatgtag

SEQ ID NO: 2437 - DNA, 693 bp, Zea mays
  Peptide Sequence Number=SeqID_45812
atggcgcacgttctgccgcgcgcgcatccgcatcccgcagccgccatcaacgcccgcggacccctcaccctcctccccaccgtcgcgatctgccagaccaccgccccccccccccccccgcacccgctgcagatctcgccatggcggcgcgcacgcactccaggtcgcagccccgtcaccttcctcccccaccccgaactccgtccccgccgtagatctcgccatcggcaacacacctctcattcccatctggcgcgagcagttgggttctcccgcgcgagcggccggcgggtgcgacggaggtgtcttgtggaggccatcgacaacacacctctcattcgcatcaacagcctctccgacgctacaggatgcgagacagccgcctggacgtacacccagccgcctcctccaccgcccacctacaccgtcgagattgtcgtcatcctcgcgtccgcctacccaccctgttccgcctcctcctccgccgccgccggccggggcgacctcgagatgcacagcaccaatgacgctccagagaacaggtcgtatctgatgaacaaggcgcgggcgttcctggagctcttcttcgcgatgtggttcgtgatgggcaacgtgtgggtgttcgacgcgcggctggggtcattccagcgtgcgccgaggctgtacgcgctctgcgtcagcctgctggcctag

SEQ ID NO: 2438 - DNA, 282 bp, Zea mays
  Peptide Sequence Number=SeqID_45813
atgaaggtgcactttcatgctgtcataacgtggatttgttttccttgctcatggaccgtgcctttgtgtgtttgtgtctactgtgcggctacaggcaaggaaataggatctgtcacggaagaagatggtgaattgtgtgaatacttccctagccctttttgctacatccaggtcttcaggaggaaccttgcttttgacaccaggaatgttgtattcctttttgccaactcgaaatgtaagcgctacttccacaactacctgaagcctacaaagcttgcctag

SEQ ID NO: 2439 - DNA, 459 bp, Zea mays
  Peptide Sequence Number=SeqID_45814
atgtacagcaaattcactgaaatctgcgcttcggaaaatgtctacggtccactgccaacggtcgatcttttcctcagtgtctacggagatatgatgcagtggaaggacatcgccgagtctgtggcatctgcagagctatcagctactgagtattgggtcagtggtggtgatcgtcctgtcgtccacaagctgaggtttgccaaacgcaccgaagacaaagaacacgacgaaggagacggcggctcaggttgccaaggacttgtgcggcgagatgcaaagatggttcctggcttttgtggaggacgcactgcatgtggatggcaagtggaagcacagtatcaacacaccgacgcttgtctcacagttgaacaagatcagcggctggttggaggaggtagagcacgagattgtggaggaggaatggatgaagaagatcggggtctagaagctgttagctag

SEQ ID NO: 2440 - DNA, 336 bp, Zea mays
  Peptide Sequence Number=SeqID_45815
atgcagaaatgcaaaagaagggaagaatatggagaaaatgcaggagcttcaggggtataccagtcagagtgtaaaaatgctctaagtggtgctgtgctaacggattccaaattcattgaaaagcatgggtttggtcaagatgtcagcaagctgtcgatgggtatcaacgtgtcgcaaatcgatgtcacctttctcataatgatcacgaagaaagtgaaagcgaacctcaatgtgcttggtcctcgaatgcagcacaggattcttggcaacacttatggcactcgtgctatcgcaaagcagaggcacatgatgaaaatccaagccaaaaccccgtaa

SEQ ID NO: 2441 - DNA, 142 bp, Zea mays
  Peptide Sequence Number=SeqID_45816
atcaagcgacccagacaccacccatgcccccccggcggcgcaggccactacgccagacccaccccggcggcggccatggccggagttcgccattaacgcccaccaggcttcaaagcgtgatccggatggcttatatgcgtag

SEQ ID NO: 2442 - DNA, 354 bp, Zea mays
  Peptide Sequence Number=SeqID_45817
atgtctggcagagaagtgcctgagccctgtgtacatgccaatgtggctgtcggagaagtgcttgagccctgtgtacgcgataacgtggccatcggagaagtgcctgatccctgtagaagcacagctggcatccgagcccaaggtcgggtgaggtggagacttctactgaggccgaggccggggtcgggcgaggacgcgattcctcccgaggccgaggctgaggccgagtcttggggtcggccttacccgggtgggtggcacagcagtcggagcggggcgagcggcgctgttttcctgtcaggtcggtcagtgaaagggcgaagtgaccgcggtcacttcgaccttgccgactga

SEQ ID NO: 2443 - DNA, 219 bp, Zea mays
  Peptide Sequence Number=SeqID_45818
atgtcgtcaatgccatctgatgatgcccacatgtaccagtcatgcaaccttttaataccagtcgggaccttcttcagtttcttaaaaggtggtagagggaacttagatttctttgatggctgtggatcccttgatggctgtggagaaggtggatcccttgctggtggtgtagacaacggtctccaagaggatgaggaggagaaggtggtggagccctaa

SEQ ID NO: 2444 - DNA, 468 bp, Zea mays
  Peptide Sequence Number=SeqID_45819
atggggatttatccccgtgggacggggacggggaagaaatgtcccccgcaagcgttcgtggggatccccgtggggaatttttttcatcgcggggacggacgcgatccagatgagcttctcaatctcctcacatcccggtcttcaccgccagtggtcgtgggcgtgatagatgagaagtgcctgagccctgtgtacatgccaacgtggctgtcggagaagtgcttgagccctgtgtacgcgataacgtggctgttggagaagtgcctgagccctgtagaagcacagctggcgggtaatgatgtatcccctgtggcgcagtcagtccgagcccaaggtcgtgcgaggcggagacttctcctgaggccgaggccggggtcgggcaaggacgcgattcctcccgaggctgaggctgaggccgagtcttggggtcgggcgaggcggagacctcctcccgaggccgaggcctaa

SEQ ID NO: 2445 - DNA, 1638 bp, Zea mays
  Peptide Sequence Number=SeqID_45820
atggaatctctatttgtaggcttgtctcataacaagccaaaaaaatcggtggcaaccgcaatagttcgagaagttttatctcatgactggttgctcctagactatatttgcacgcaaggtgatcttgctctcatcgattttatcaaggaaatcccttgtgaaccaagggtagaagtcgttcttattgatgatgcctttgttgaaaggaagtggatggagtgtttatttcagccgagcgcatatttaggtgacgaggtgtttattctgataaacatccgagagacgcattggtatcttgctgtgatccatgcaagaaatatggagatacaagtgctcgattcgcttggtacttcacaagaccgcaaagacctcactgactctattaaaggactgcaaagacaaatagatatgatatctcaacataaggagttaaaagaccacaggtggccagacctccaagttgcttcttggccgctcagagaaatagacatgggatatgcaaagcagacagatagctcttcatgtggcctctttcttttgaactatatcgaatactggacaggggatgaactgtctgacagttttacccaggaaaaaatggctgctatattactatcttcagacctgaataagagaagggggtgtctgttatacaaaaatgaaaaagaagttgactctggaagcccatctgatgttgagatattagaaaacccaacagattctaataagaggaaactactccacgtgcttgatgatagcaaagtagtgtatgaagatgaggaaggccctattactcaagcagacttgcaaaggtggtttgttgatgattgggataaaagagctcctgtaaaagtctctaacgatggttgcaccaatgactttttaatggttggtctttccacaaaggacatgccagtgaccaaagccgattcaatagatgttttatgtgattatatcatggcaatagaagacgatacgacactagagagaacatgggtgcgaaatttcaatccttttaagatagaaatatctgtcaaagacctgcaaaacatattaacgacaactcaagatatgattctaagatgttttgatatggctgttcggctgcttgccaataaagagtcacgtagaccgaaagaagaaatcataaataatagaaagcattatatggacatgcgtttttgggttctcatgccatggaaattcaatggatgtcacgcccttttcgtaatagatcatgttaaaaagcatgcgacttttatcgattttacaccgactcaagattggtgtaaacacatgccatacaagaggttcgcggaagcgaatatcatggcctcaaaaaaatataagattgcttacagcaagaaacgttctggatgggcggaggatatttttaagtgggaacatacaattcagactggtgttccaattgacttaagagggtttaataccagctacctcgttctacaagctatggccatatgggggaatgacagacgactgaaatttgttggggatgcaaagactcttcgaaggaactttgtgattgatctgttaagttatgaggacaattcgtgccgatatgccatccctgcaaacatacaacagagactcatcgatatcgctaaaaaggattag

SEQ ID NO: 2446 - DNA, 66 bp, Zea mays
  Peptide Sequence Number=SeqID_45821
atggcgcccaagagaaaaactgcgaactcgtctgctgcagaacgaatcaagctgatatcatcagaa

SEQ ID NO: 2447 - DNA, 621 bp, Zea mays
  Peptide Sequence Number=SeqID_45822
atgatgaccaccagtttggtggtggggagaagcaagtcgggctgtagcctctgccctgccctcagcttcaaggatcttcatcatccgtgctggggaggagggcggggcgagtcggggcctgcctccgtgtgggccggcgatccgcttcttcctccgtcattcgggggagaaaggcatcctcaagctctgcagaggaggcgtcctccagccatgcgggggaaggcgaactactgctgccgggccagggtgcagctgtccgtcctccacccaagctacggccgtgccgcgcgtgggccggctacgtccaggtcctccctgcgccatcggctgcacaacacgtcgtacgctgcgagggtggtactcgtgttctgggacggtcctgttctcgttctcgtggcgagaatgggagtgaggacctgccggtgcgctttggggcagccgccgcttgccggtgcagtgttggtggacaggtggccgctgtcgtcggtgctaaggtggtggttgccgctggagaggcttcccaccgcagcggtggttgcttccgccggcgagaccgtcagtgccacctgcgctccgggcctccggctctttggctttaatggctggttctcatccccgtga

SEQ ID NO: 2448 - DNA, 234 bp, Zea mays
  Peptide Sequence Number=SeqID_45823
atgcaggtggcgtgcaatcgcaccgcggtggcgcaccccttcggcttcgtcgcatccggcatggaggcccagtcccacacgtcatggaccgggaaaggggatattttgaaagggatccttctccgcgaaggaagcgggccccgagccctcctactgatcaggggttcgaaggctggcccctcagaagggttcgacagccgccccagagcgcccgggctccgcgcccactactga

SEQ ID NO: 2449 - DNA, 333 bp, Zea mays
  Peptide Sequence Number=SeqID_45824
atggccgaagccatcatggataaagttgttgatcagctactaaacgaagctgcagaagtagttctaagggaagattatatgttatttctcgttggtgttgaatatgctgactcccttctggctgctggcctcgttgcattggtggtggaggtggatgctgttgccaagatgcctgagattgacttgccgaagcaacagaagctacagggtggttacccacatactctgggatataaggcgagtggtatgaagcacttctgctatttctttttgtttctggatcgtgacatggcacaccctggttgtgtggcccttgtcctcaccacagaataa

SEQ ID NO: 2450 - DNA, 297 bp, Zea mays
  Peptide Sequence Number=SeqID_45825
atggatttagatccgagcgccgaggaggaggagcgaagacttgaagatcataacgaggcgaaggataccgtgtgcttcatcatccgtggcactccacctgatgttgatgccgccgcgtgcggcagatgttggaactggggactcagactcaaactcgccaccttcgggaatttccgaggcgactccgctataattcaccggactgtccggtgtacaccggacagtgtccggtgcgccaaggaaggtcggcctcaggaactcgtcagcctcgggttcgcgcggcagccgctccgctaa

SEQ ID NO: 2451 - DNA, 1770 bp, Zea mays
  Peptide Sequence Number=SeqID_45826
atggaggctgcggcggcggcgccgcatctactgcactgcggcggcttcggccgcgtagcgcacctcccagcgctccaccgccgaggacagttcccacgcgtccgcgccgtcgccacggagcccaagctgtccacctccacctcctcctcctcccgcggcaggaccaggagccgtaatgacctctctgacaccaggttcggagaggtgtccaaggagatccagcgcgtgcgtaagcagatggagcaggacgagcagcttgccacgctcatgcgcggtctccgcggccagaacctccgcgacgagcagttcgccgacgacaacgtccgcctccgcctcgtcgaggtagaatccgcggacaacaatgagggcctgcctcttgtgtatagccctgaaatcatatcagcctactggggcaagcgtcctagggccgtcgccacccgggttgtgcagctgctgtctgtcgctggtggtttcatctcccatctcgtatccgatcttattaacaagaagctcaaggaggagatttccacagatgagtgggctgctcgattttttgaagaacttgattatgtaaatgaaggggaaaatggcacttactttgctgacgtgatgaaagaagatcttccacagttgcttgatactgggttcttccacgctgatccacatcctggcaatatgattagaacacctgatggaaagctggctattcttgattttgggcttgtaacaaaactgacagatgatcaaaagtatggaatgatcgaagcaatagctcaccttattcatcgtgattatgatgcaattgttaaggactttgtgaagcttggttttattcctgaaggggttaacttggatcctatcttgcctgtactggccaaggtttttgatcaggcactagaaggaggcggtgccaagaatattaacttccaagaattggcagcagatctagcacagataacttttgattatccattcaggatacctccgtattttgctttgattattagagccatcggagtattagaaggcatagctttggtgggagatcctgaatttgccattgtggatgaagcatacccatacatcgcacagaggctactaacggacgaatcgcctcggctaaggagcgccttgcgttacaccatatatggcaaaaccggtgttttcgacgcggaaaggttcattgatgttatgcaagctttcgagaattttatccgtgcagcgaagagcggtggtggggagaacttgaagggaaacatggctgagctggctgagttgggaggtcaacctagcaccagtctggttcctgtatttgcaatggccgtagcgcagcctgagcagccagttaaagcccgtgcggctcttgcttttctactctctgagagggggaacttctttcgggagtttattcttgacgagattgtgaaagccatcgatgcgatttcaagggagcagttgatccagatcgccgcgtcttttgggataggaaacgcggccccagtttttagcatggttcctgtcagggccagggcattgcttccgacgatcacagaggaagacagggtcatcctgaacaacgtcgagaaggttgtgaagttcctgacatccgggactgcaactccaacagtgggcggggacgtgaacgtggtgtctgtggtgcaagagcttctacctgtgttgccaggcatctcgtcgaagatcctacctgatgtcttgagccggttgtcgtcacgggtatttgcacggataatccgggagacatttttgtag

SEQ ID NO: 2452 - DNA, 420 bp, Zea mays
  Peptide Sequence Number=SeqID_45827
atgggcaagaacaacaagcacaagcgtgagccaactcctccatcggaggattttggtgactcggagtactcagaggaggagttctcctctgagtctgaggggtctccggctcccatccccctgcgtgagtcgtctgacgactcagacgactcccaggggctcgcggcggaggtctggacgtacatccgggccgtcgagcgctctgggctcgagggctcggatgagtcggagtactcctcggatgaggaggactcggacggtggcggcgacggcgaggacggcggcggcgacgacgacgacgaaggcagtggcggcggtgacggtgacggcagcggcaggggcggcagcaaggacggcggcgacggcagcaggggcggcagcggcaagggcggcggcggcagcaacagggccagtggctag

SEQ ID NO: 2453 - DNA, 459 bp, Zea mays
  Peptide Sequence Number=SeqID_45828
atgagagtacacataagcggcaaggccgaccgagccgagggactcctacgcctccaggatacggatacctcactcatcaccttccgcgaaaagttcagacaaaggcagggggagcagcggcaccctcggcgacgtttccaccctcggcggaacctggcccggcctcagacggcgacacaggcggaaggatctccacctcgaaggatgacaccggcaccgcgcttgggctctcacggccaggttctccgcaagggttctggcccgagcggacgcctcggctggccgctccgtagcctcagccagctgtcccccgaggacatcagcccagctcacggcctcggcagcgtgactccgagggactcctacgcctctgggatacagatacctcactcgtcaccttccgcgcaaggcaactcacactcagttaagtggttccgctatctgacaggcaagtcctag

SEQ ID NO: 2454 - DNA, 921 bp, Zea mays
  Peptide Sequence Number=SeqID_45829
atgaagccgaaagggtgcacaactgtggtgcggttgcacgcctcctgcatggagtggtttggcttcttccgtttctggtcagcccgcatgacgtgtgggacccaacccccgcgccggagggtgggaaccctggagctcgtcggtggagactttgctcgtgtcgcttggggatacgagcgaggagagccgcctttaaaaagggatcgatcccctgggcagtggacatgcctctgcactccccttatgcattgcgcccttccaccttccgagcccccggatgggcccggctgcagtccctcaccaatggtcatccgtagggatgatcaccagccttgtggtggggagaagcaagccgggctgcggcctctacccgccctcagcttcaaggatgttcatcatccgggatggggagggggcgcaccgagttggggcctgcctccgcgtgggctggtgacccgcttcttcctctggcattcgagggagaagggcatcctccagctctgcggaggaggcgtcctccagccatgcgggggaaggcgaactgctgctgccacgacaggcgggagtgaggacctaccggtgcgctttggggtggccgccactcgctggtgcggtgttggtgggcaggtggccgccgtcgtcggtgctgaggtggtggtcgccataggtgaggctgcctctgccgaagcggttgcttccaccgacgagaccgtcagtgccacctgcgctccggacctccggctctttggctctaatggctggttctcgtcccccgtgaggggacgtgaacgagggcctttcagtagcagcgtttgccctgaggccatcgctgcagctgtcttgccgcccaagacggaggttgttgccgcgctgttggtgcagcggccgtcggcgagccacctggagtttgttgtcccgtag

SEQ ID NO: 2455 - DNA, 726 bp, Zea mays
  Peptide Sequence Number=SeqID_45830
atggcctacttgagcaaatatgaaattagattgttgagattagataatctgttaaacaaatacgaagtagtgaagagtttagctaaagacttgccctacacaaaatctactcgaatggataatatgaaccaaccaacgaatttaaagcgattaacaagaacacacaagaacacgcaatataacccgaggttcgacaaccaccacaaaggtgtcctactcctcgttgaggagcccacaaagggccgggtcttttccaaccctaatcctccacaagccgaccacaaaggagatgcgattgcgggtgtgaaaggtgaaatgaatgcacttgttgggagtttggtcagccaagatttcgtgggagaggcagaagtaaatgagagagagagtgtgagggggtatacaaaggatcccccaaaagctggcagtcgttgggagaaaaggagtaaaaaccggttgaaccggttttcagaccggttgaaccggtttctaccagagagatcccggttcactaatctactcagccggagactcgaccggattcaaaaccggttgagtagggggaaaatccggttgaaccggttttcccaaaagatctgcaacgacttttttgacagctctgactgtcagacaggtcagagcagggatggcagaggagcagtcccaaaaccggttgaaccggttttaggaccggttgaaccggtttccagggctgaaaccaaattttga

SEQ ID NO: 2456 - DNA, 822 bp, Zea mays
  Peptide Sequence Number=SeqID_45831
atggagaaccgctgcacacgaagcatgcaactgccccgcggcttcgtcgcaactggtggtccaacatggaggcccgggcccacatgtcatgtgaccgacgcgccggggagccctttcccacggcataaagacgatgcacccgtgttccgttcctcgaacgacttgcgcacgcgcaacagatgccctgcgaatcgcccgtcccatcgcattaactccttggcagggcaagcgacacctctggcagtcaaaggatcgggaaaggggatattccggaaaaggatccttctcagcgaagaaaacgggccccgagccctcctactgatcaggggttcggaggttgcgccctacggggttcggcaaccgccccagagcactcgggctccgagccctttactgatcaggggttcgaaggctggcccctcagaagggttcgacagctgccccagagcacgcagagttagggatgacctgggtacgttcgttacatggccgagactcgggctacgctcccgaggtaccctaggacatttccgagaccagcgggaacgatttgtaatggaatcccaccggagggaggcaccgagccctcggaccctatcaaatgggtccgggaaaacagcactgttcgccccgctccggctactgtgccaaccaccaggcctcggcctcgggggaagttctccgcctcgcccgacctcggcctcgggaggagccacatccacgcccgacctcagcctcagcctcgggaggagtcgccgcctcgcccgacctcggcctcggaccgactacgctacaggggatacatcattaccctacctctag

SEQ ID NO: 2457 - DNA, 435 bp, Zea mays
  Peptide Sequence Number=SeqID_45832
atggcggcaaatgagactctagcttggggattcgtgcccacccctagcattgcggccggaacctccatcagtattgttgcttcggacccgacatcggatgaagacgtgccctaccctagcctttcgtctgctctagaggaggaggaccatcaactttcacttgggatactggccccatgggaggatcgcaccttgccattttcgcacatcgatgtggtccatgtcttcacttcgcagttgttcctacaaggattcatcgaaagcctagacccatgggcttgggacaccaaatctgtagacaatcgatttgaggaagggaatgatagcaccttgggtaatgctaaccataggggtagcctctggccactttgtgaatttgtcgatggtgacgaagaggaaacagtacccgctgatggccctggggaagggtcctaa

SEQ ID NO: 2458 - DNA, 903 bp, Zea mays
  Peptide Sequence Number=SeqID_45833
atggcttgtttagcctctttggtccatgagaatgggtcgaacttcctcaatagcttgaagaagggtagcaccctctctgccagcctcaagatgaaacggctgagggcgtccaattatcccgtcagcttctggacatctttgatgcgggcgagaggcctcattgcctcgattgccatgatcttctctaggttcacttcaatgcctaggtgtcaaaccaggaaccctagcaatttcccaaatgagacaccaaagacgcacttttcaggattcagctttgtgcgcattgcgtgtagtctatcaaagactagggtcaccgaaggtcttactcatggccgtccgaatgttggcaaggcatttttcagacccctcacgttggcaatgacaggggcggtgacgagcggtagtatgctagcccctgccatgttatcgtggcagttggatgcctcaaaggagatgctggatgaacagggcgcaactcagtgtagtcacctactagcgtgggggcttgccacgtgtataccggcctccagccgcagttgcggtgatcggagcaccggagaacagcttcttgccaccatgatttttcttctttttcttgccactattctaagcagcggcacccaagtcgctcgtctgagcaaccccggtttgttgtgtcaagtgtcatgctcggtccttggcggccttggcacattagtcggccagagcgaagagcgtgctgacactttctacatcatgtggcttttccaacatcttctcatcacgtaccccctgttggaaaccagtggtaatggaagcatcgaaaatacaaggtatggttcctcataccttggtgaagtgggagatgaaggcccagagggtttcctcgggttcctgcctcactgcatggagctgggcctctaa

SEQ ID NO: 2459 - DNA, 432 bp, Zea mays
  Peptide Sequence Number=SeqID_45834
atggcgaggaagatgtcggagccactgcagcacatcctaaccaagaacaatgggcaagtacgctgttatgatgtcctctattgccccggcggcctgggcgatggatcgtatagatggccaaccagccgcctagatctttctgggctcggctcgagcgaagtcgggcagcagaaattggggaaggagtgggttttcgcgtcggagcttggcatcatgctccgcttgttcccactcgctcttctagggaaacaggctaagcaggatcccattccccttcctcatggttacgccgcatgttacggcgcctgttccaacgttagtgtgcctcagtctgcggggatcctccccttgtatagtgggctagtcgtcggagatgggagcatcctcaactcttccttggataaagaggacatccaggaagaaagagcttag

SEQ ID NO: 2460 - DNA, 294 bp, Zea mays
  Peptide Sequence Number=SeqID_45835
atgactaagcaggaggcccaccaggcagaggaatttggccagcgcacgatagtgactgatcggtggggtctccaagtcagcagacgcgcggctggagtactgctggatcgcactggtgatgcggttctgggccggaatgtaggtttcggcccagacaagttattagtgggtcccggtgcggctcctaattcctctgctgcactgcagggcaaggctggccgtcggttctattcttgctgctgcagcgccaatgctgcattccagatgggcgtcgttcctgctgattcagagtag

SEQ ID NO: 2461 - DNA, 255 bp, Zea mays
  Peptide Sequence Number=SeqID_45836
atgtcagatgtcaccaattcatcgggtgtcgctgcagtgatgagaggattcatcgctggagctccagatcacgccaagagggagatcgtcacgggcgacaaggccataggctcgggaaggactccgtcaagggagtccggcgacaaatacaaggaggaatcctcttcctccatcaagtcacataggaagggtgacaagaagaaaaagaaaatgaagaaggtggttgtcggcgtttcgagacaggggggtccctaa

SEQ ID NO: 2462 - DNA, 630 bp, Zea mays
  Peptide Sequence Number=SeqID_45837
atgcgggtgctcggggtggtccctacggcgctcctcatcgccgccgtcgccgcgctcgccgatgtcggcgctggcatcatgtcgatcctggcagcgagcatcgtcgatgctagcatcatgtcgatcccggcagcgatgcgggtgctcggggtggtccctgcggcgctcctcatcgccgccgtcgccgcgctcgccgacgtctccgtggagttcatgctgcggtacacggggtgggcggccggtggcggcaaggaggcggccacgtcgtacgcggggaccatgggcaacgccttcggccgcgccgacgccgcattgctcaacgtcttcgtcgtcctcaccaccacgggcacgctcgtcgtctacctcatcatcatcggggacgtgatgtctaggagcgtcagtggaggcgatgagcagccggggtgctgcaggagctgtttggtgcgcggtggtggacggggagggagtttgtgctgctcgtcaccgccgtcttcgttctgctgccgctcgtgctccgccgccatgtcgaaatcaaaggttaacggttcttgcgacactggttgctcacttatgagcttcgagttactatatgcccgtgtacatatttctcattgtgctaatgcatcttga

SEQ ID NO: 2463 - DNA, 246 bp, Zea mays
  Peptide Sequence Number=SeqID_45838
atggggtcttctataattacaaggtcgtctaatcaggcaaagaagagacaaagcgaccatggtgggcacttgccgcatggagaggtgtgtgtgatacaccatgtgaggaagaaggaagagcccttcaaaccaactagcatccatggcacattcaacaacacatgcaatatggtggtcaagaaaaagatggctatcacatacaaccattggaagctagtcctagaacacctcaaggattttgtctag

SEQ ID NO: 2464 - DNA, 291 bp, Zea mays
  Peptide Sequence Number=SeqID_45839
atggccagtcggggtcagtggggcattgtacgccaaggcgaaactcagctagtgcttttggcaaccaaacccccacagccaaacagctgcatgtctagaggtagaggagtagactcctcacaccgggttctcttggagggagaatggttgctggggattaacttgggccgaccacacctgcccacccgggttggactgttcgaggtgggacccccgccttcggctgagggaggaggcatgaaggaagtgatgggacaggcttccccatctctctgttttatttaccgttag

SEQ ID NO: 2465 - DNA, 666 bp, Zea mays
  Peptide Sequence Number=SeqID_45840
atggagttatttagtattatcattcagatcctctcgtggctccacatgaggtccttctctgggcttccaaataaccaggcgaagccctggtccaatgttgtcatctggttcagcgacaccaggtcccgcacgcctggtggtggatcccaagctcacgcgtgtggcagtggccccctaaggctcgcgcagaggcggatcccgagggatggcacgaagattcttcaaaggctgagcaacacgaagttatgggccttgaaaaaggcgaagcttctttatatgttgtttggaccaaagatggttaggattcggaccaccgcaaaggtgatcacacttacctcttcggaggtacgacaaggtaccttgcctatctctaaatccatgagggatccatcatcatcaaagcctgctccgaagatgccgaaggacaaaccttcgaagccaagctatattgaaattggtcattccactttgagggagaaggatctgcaatctatgaagagacttggttactttaccagtaaagtaaatgtgggcctccctagggatgaggagaccccgatgccaggaaaggatgaagttgttagagatcgtagagatgctgatgctttctgcatggtgcatgatttgcactatcaaacaaaggccaagggtcagaagattaaatga

SEQ ID NO: 2466 - DNA, 475 bp, Zea mays
  Peptide Sequence Number=SeqID_45841
taaccgcggcggaagaaagggcggaggggcttaccggcggcgagattgctcctgtgaagtggtcgaggacgtaggggaggtctcggggatcacaacgagaggttcacgggatgccagagaagatatgggtgcaaggaattggtcggagactcactggagaggtcggtccacgcgcggcggcggaagaccaaagtccggtgaggtcgatctcgggcctctggtgaagtctggccgggtccgagggcttggcaagcttcacgggctactggcggagctagccgaagcactggctcgacttgaggatggctggagtgggctggccacggtggccgaagctctggcgacaatggcgggcggaattaagctcgctggagctaagggaaagtggccggccggtgaggagatatggagccaggaaatccggtctgtctccctgcccaaacccgaggcaaatccaaggttttgtcgtgtctag

SEQ ID NO: 2467 - DNA, 147 bp, Zea mays
  Peptide Sequence Number=SeqID_45842
atgacgtggcagggggcaccggactgtccggtgtgcaccggactgtccggcataaacaggaatatcatcgaattacaagtgtaccttcaactggaaggagatgatagtacaagcgtgacgcaaaaagcgaatgccaagtcagcgtga

SEQ ID NO: 2468 - DNA, 788 bp, Zea mays
  Peptide Sequence Number=SeqID_45843
gcggggccaggcgggcagcgcgggcgcgggcggctgacaggcggggccaggcgggcagcgcggggcggcgagctgacaggtggggcccaaatggcaggaaggcggggcgcgggggaaacggctctgggctgttggatctcaggcgaacggctagggttgggctcggcctaattgaaacggggccgtgcgatctgggatggacggcggggatcgggtggccggccttgtcctctcctacggctagcaggggcggcggcgctcgttcccgcggcggagaattcgccggagacgaggggcgcgggggctctgcgggtcccaggggcgacctgagcggccggggaggttgggggagggcgcggggaaccgtccggtggggactgggtcggggcaggggcaccggaggggggcggtccacggcgaagcggcttggcggcggcgctaaagggctccggcgagcaattaaacgcgacagggggcaatacaaaggtcaggagggggtgggagaggttccttacctcaaggcgaactccggggacccctcgatggcgacggagatgcggcggcagcccgagtcgacggtggcggacctcggcggctgcgcagagaacggcggtgagcgcggacagagtgattcggggagggggaggggaaattggagcgcgtctcgggttgcggacgtcggggcagagctcaccgtggcagagggcacggcggggctccaacggcgacggaagaacgggctcgggcggcggcggtttaatggcggcggcgctctggcgtgtgcgtag

SEQ ID NO: 2469 - DNA, 426 bp, Zea mays
  Peptide Sequence Number=SeqID_45844
atgagggcctcggactcggcgagggcctcagcgttactcacgcactccacgtcgcattcgtgcgcatgtcggtacgtggatccgatggtgatgacccccattggggctcggcatcttgagcttgaggtaggtgtagttggggacggccatgaacttggcgtagcatggtctccccagcactgcgtggtaggttcctcggaacccaaccacctcgaacttgagggtttcctttcggaagttggagggagtcccgaagcagacggacagatcgagttgtccaaggggctggacgcgcttcccggggatgatcccgtgaaagggcgtcgcaccggtcgggatcgtggacagatcgatctacaagagcccgagggtctcggcgtagatgatgttgaggctgcttgtaacaccctgaatttgggggtataa

SEQ ID NO: 2470 - DNA, 471 bp, Zea mays
  Peptide Sequence Number=SeqID_45845
atgacgcctccacgcagaggtcggtgcctgcccgtccgggaggacttgagtggggatctgccggtgggcaggtggctaccgtcgtcgggtgctgaggcggtggcagccggagaaggcttctccgtcgacgagaccgtcagcgccacccgcggaccgacctccggctctttggctttgatagcttgtcctcacccctcgagtggggacgcaggcgagggccttgtcacagcagcgtctgccctgaggtcatcgctgctgctgtttagccgcccggagcggaggtcgttgtcactgctgatggagtgggcggcggcgagccacctggaatttgtcgtcccgcgggccctccgatgtggaggttattcatacccgcaggagtggaaccggagttccgtttgtaatggcaccttgagtgccggtgtatgttcattgcggctgtcagggcctgaacatatgtgtatttgggcgtga

SEQ ID NO: 2471 - DNA, 186 bp, Zea mays
  Peptide Sequence Number=SeqID_45846
atggggctcgatgtatgtggctcgctctaccgagggtggtttgccccttggggaggagtacgctatgatgatgatgatgatgataatgatgtttcctcgatgagaaaatggttcacaggtaaagatgaagaaggcgtcgaggcggatctccagaagttccacgacgtcaatgagttcgaggattag

SEQ ID NO: 2472 - DNA, 690 bp, Zea mays
  Peptide Sequence Number=SeqID_45847
atgccccacctcgccgccgccgcggcagtccccgcggcgcgtcccacggaagcgggccgcgtcgcgttccggcgccattggagcacgccactgccggagcctccgcgcctgcgcctgcgcctgcgcacgcgcgcgcggggcgtccggcgtgaggacggtggcggcgtgcgcacggaggagcaggagcagagtcagactcagacggcaccgcggacgttctacgaactgctcgggatctcgtcgcgggggagccccgatgatgtccgggcggcctacaggaggatggctctgatgtaccacccggacgtgtccccgccgggcgccgcggccgagaacacccgccgcttcatcgaggtgcaggaggcctacgagacgctctccgacccaagccgccgcgccagctacgaccgtgcgctcgcccgcggcgtctgccgcatcggcttctccgggcgccgttcccagtcccaccgcgcctactgccaccaccaggtgtggatcactgatctcctcacctgttgcttagtaggagcaggaagacaaatcttgctggagaaggtcttgggaagaccaggtcgcagagctgcagaggaggagcatggcagaggattcggaagagaacctgtcgtggggcgctcgtatgcggagaagaagggcggaggcatcatcagcagcagagtagctattccgtga

SEQ ID NO: 2473 - DNA, 2187 bp, Zea mays
  Peptide Sequence Number=SeqID_45848
atgccgggccatccaacccctgccgacgcgctcctcggcggcggcacatcccgccaccacgcggagcttctcctccatagcggcgatgacggcgtctctgtcaaggatctccgcctccgccgcgtcgtcccgcccgccgccggctccctcgataccttccccgagtgcgccgcacccgtgaagcccggatttgtcgagatcacgcctctagaggccgtgtcggctgctactgcggcggcggccggggactttgaccggaagttggcgcccccgcggtccaagctcgtccgcgatccgcgttcgtttgggtaccggcgtctgctgcctttcctgaacgagctgacgaagaacggtaacatcctctccgtctccaccagattcgtcgtttggtcaggcttgtatttcatgttcttacgctatctctctgcacgcccgtgtcttggtggttcagatagctcaatcggcaaggaggtgttcccgcaagacacagctgcgcactcaaaggatgtgctcggcggatctgattctcggctggctgatgaagctataggcgttagccactgcgaacctgaagccatggtggttaacaccggaggagacaccgatgtgaaagatgcctgcaacaatgtctcggaagagatcaagattgcccctcatgacctaaccaacaaaccgttgcttgccggatgcacaaggtcgaggtttgttcatcatccgagctcgttcagctacaagaggatgctgccatttctcatggagaatgacatttctgctcaggaatgtaacagggtcaaaattcgaaaaattgcagaggaaaggcagctagcatcaaatgagaatgatgtctcagccagtgggcagcattgtcttgctgcatctgatgactcttctcaggaatgcaatagaggtcaagttgaaacaatggaagaagaaaagccagcaaaagcagatgagaataatgtccttggtggcagacagcttcagcctcctgttctagaagcgcctcctcctgatttcagtgtagttgaaatgcaaaatgtcatgcagcatgaagcttcggcttcaagtcaagttcccctaacttcttttgagggtgaattaacatcagctggggacagtgtccaggctgttggagaacatcagcttgttgcatcagaagagtctctagacgaacacaaaagagatgaagtcaaaagaagcatacatgatgcagtaaaatcagatgggggctatgctttggatagcagagaatttcagcttgctgcatcagaagtctctccagaaaacagcatggctgaagtgcaaggagctgcacaagaagaatcgttacctttagatggagttgaggaaaggtcagacaagggtgactttgtttccacagagcaggctcagctctgtgtcacaaatgaatctttggctgcacagctgcaaggtaatgttgaattcgctgaagtaccacagtgccaaaacttggacccaggatgtcatgatgttggttttggtagccgtaccaagagagtgataccattgttgcatcggcattgtgcacaacaacctcaggattccgtggtttctcttgatgatcagcttcttgacgatgacatacaaatgatctgcagacctgattcccgtgctgttgacagatacttatcagtcgaggaaatgtctggatgcattatgttaactgagtcagcatcaaacaaagcagggatatcgcggccaagaggtgcccattcaatggaaaaaggatctctgtctcctaagaaaccttctccaaagaaaggaatactcaagaggaatacaagggggtgtaagggtatctgcatgtgcttagactgctgcacattccgactacatgctgaccgagcttttgagttctctaggaagcagatgaaagaagcagatgatataataactaacttactgaaggaggtggccagtcttaggagtctgctggagaagcctgctggccaatatgacgagttttacactgacttgtggcgatcatctaatctgaatactcaaggtcaggatcaggagtcagcaggaatcaacgcaagcagcttgcagacatgcttctcgggtggaggaggtggccagaaacagttgccagcagatgttcgtggatctaaattcccactgcagaatccctgcaggcaaatcatagctgatgctcatggaagctaa

SEQ ID NO: 2474 - DNA, 420 bp, Zea mays
  Peptide Sequence Number=SeqID_45849
atgagtgaggaagaaagagcgagaggcgttgttatcaaactcgcggccattgtcacactgcagagcgcggaccgagcgacgaaactgagtggatacccaggtgaagaagtgtgtgagggtggtgagatggccgagacgacgatgccaggtggtggaggaggtggtggagaccaggacagggggtggagacacgccggcggtggagggctggagcgtgtagagcggccccgagctatcacagcgggcgagaagggtcctggtggccagatccttcacagaaaaaccagaggggtcaaactcaatggaataggagttgtcagtggtgaatcgacgaacggaaagaagattgtgagtgatgtggggagctacgagaacatcgttgaggtaaaacggcccagggagaaccgaggcacctactga

SEQ ID NO: 2475 - DNA, 1344 bp, Zea mays
  Peptide Sequence Number=SeqID_45850
atggcatccacctcgccggaacccgccgccgccgacgaaactatcgacaccatccacatccgtcgcctagagtgttccgaccacgagaggggcttcgtcgcccttctctcccagctctccccctgcccggacctcaccacatccgtgttcgccacgcgcttcgccgagctcgcggcgcagggcgacgaccacatcatcctcgtggccgaggacccctccgcctcggaccggcggatcctcgcgacagggtgcctcttcgtggagcgtaagttcctgcgaggctgcggcaaggtggggcacgtggaggacgtggtggtcgatgccgccgcgcgcggcaggggtctcgggctccgcatcgtgcgccgcctcgtggagatctccagggacgccggctgctacaaggtcatcctcgactgcacccccgagctgcgtgcctactatgccaagtgcggattcgtggagaaggctacagccgccaggggcttctcccagccctgcagccgccgccggcctccctgcccagccgccggagctcccctgcgccgccgcccagccccccagccgtcggcctctcctccccctccctccctgcttcccacctcttcccggccgcgccccccaccatctccggcgtgcacctcccgccggatccgcgcgcgccctgccagtgccagccgccggcggccctccttcccgcgcgcccggccgcctcaggcccgcgccccgacgcaactccgcgccgtctccctctgctcccaccggaccgcgcacctgcgccgtctcctccagccgccggtgccgcgcgcggcttgtctccttccgcgccagcgccgccggatccgccccggctcgcttcttccccttctccgtcggccggcgtccagccgcctctcctcccctgccggtcgcgccccagcctgcgcgcccttcgccaccgccgcctgcagctctctgctgcccgccgccgcgcctgcagccctctgctgcccgccgccgcgccctctgcccatggcggacctccccccggacgcgcacaccgccggcctggcgcacccgcccctgaccgcgggcctgggcgcggccaccgcctccctggccgccggcgtcgcctccctgggcctccctgctgtcggccagacccaccccatgggccccggccgctccgtgaccgatgccgaggctccctacatcgtcgacctccggcccctccgcgacgtctcttccccggcccaccgtcgaggctctccaccggggttccctgccctcgcggcaccccccggcaccgactccactctcggcgacaccctcgctacgattcaggcggctgtgatggcctcgccgtga

SEQ ID NO: 2476 - DNA, 162 bp, Zea mays
  Peptide Sequence Number=SeqID_45851
atggtgggtacaagtgcggtcactgcacggcggcagccggggtcagtggagcattgtaccatgcaggatttggttgatggtgtgatttggcctaccaccctgccaccgggttggacggtcgagtgggatgtggctctggcaggagaggagcatgaggagtag

SEQ ID NO: 2477 - DNA, 714 bp, Zea mays
  Peptide Sequence Number=SeqID_45852
atggggtgcacctgtgttgccttcctcttgctgctgttggagaagcgcgacctcgtgggggttggcgctcttcagtcatcgctcggcttcaaggattttcatcatgcagcccggctgcagtcccccgccggcgcttcaaggatgttcatcatccatgctggggaggaggcgagccgagttgggtcccgcctccgcgtgggcagcggcccgctccttcccttagtgttcgggggagaagggcgttcgctgtccgtggcgctgtcagttgccgcgtgtctggctcctcggcctaagcggctctggtgctgcttccggtgccgcctcctaccgctggggcggagcgtggctgcccgtccgccgcacgagtgtcggtcgcgccgtgcacgggccggccacgtccaggacgggagtgaggacctgccggtgcgcactggggcagcggccgttcgctggtgcggtgctggtgggcaggtggccgctgtcgtcggtgctggggtggtggtcgccatagagggagttccctcctcttctagacctaaggcgaccgcttgggccgggacccttgtggagggcctggtcgtggacgtcgagtctggctggtccgcccaagccatgacctcacagcagcgtgcccgggccgaagggttcgagacggctcttaatgagtccgtcaagaactgcaagacgcttgccaaggcggctgagcagaagtag

SEQ ID NO: 2478 - DNA, 75 bp, Zea mays
  Peptide Sequence Number=SeqID_45853
atggcgggcggaattaagctcgccggagctaagggaaaggggctggccggtgaggagaacacagatgagctttga

SEQ ID NO: 2479 - DNA, 345 bp, Zea mays
  Peptide Sequence Number=SeqID_45854
atggcaacgactgctatgcaagcagtccttctgtacaagtgtgcaaggaaaccatccgatccattaggtattagtccaaccagagatgctcgcctgctacggcgcgtggagctaagctcggttaaaaacgcctatgggtatttagcacggcaaatatttcgtcgtcctctatttttggtcaccaacgcacctgtacaggacatcggaccttggtctgcagaaagctgcagcaatccaaacagctgcaacagtgtcggcttgcagccagccgaacacgcccacagatcgcaacggccaccagggacagggacacaaccacacacaccccatcaccgctacttctag

SEQ ID NO: 2480 - DNA, 489 bp, Zea mays
  Peptide Sequence Number=SeqID_45855
atggtcgccgctgctcgcatcgccctgcggcccccacctctctctccctttctcctcgcaacgccgcccccgtttgtccaccaagtcaccacgcgcctgggagatggatcaaggggcgcgcagcagtccggtcaagacacgctcaacgaaagcttcaagatagcacgggagatggaagccccaccatcggctaggaatcgttgcatcacgtcatccgattcctctcccttccgttcctttgctttcgtggtggatgagaagaaagcggcgaagggcgcatcggaaaagagagcctggaggaggaggcacaccatccttcctcttgcacacggagtcctcaagctttctcctcaccttgctggaattccgggcacatggtcttattctacgggctacctgctatgggatttgactaaaacacacatttaccttgcttgtggtgagctctttggtgggaaacgtttgatgaagccatgtttccatgtttag

SEQ ID NO: 2481 - DNA, 318 bp, Zea mays
  Peptide Sequence Number=SeqID_45856
atgcagaacgtgctgtccatcaggaatcctaaacctcctaatagagaagcctgcagcagcgtcagtcccggtcatgaaaacttgcataactccattgacgaagctatcatgttgaaggtattgatcaagatcatatcactgtaccatgcactatggaggatgcttagtgggtcaactgtagggatctttccttctacatacgacctgtgggactcgctttttgaaaaatggtccccaatagcttatggtttacttgaaaagttcatgaatactccggcaacagaattcaaggtgatattccagaacaatcatatctaa

SEQ ID NO: 2482 - DNA, 282 bp, Zea mays
  Peptide Sequence Number=SeqID_45857
atggtgcaccggacagtgtccggtgcaccatgcccgtacaactccaaaccagacactctcgggaattccagggtgcgctccgctataattcaccggattgtccggtgtgccaccggactgtccgctaccgaccttgccaaccacgtcgccttcatcaccgccgtcatacccgtcgtcgtgctcctcctcctcggactcatccgagccatcaaggatgacccgatcgatgcctcggagggagccaggggacggcggaggagtcctctcatcggagagctttga

SEQ ID NO: 2483 - DNA, 75 bp, Zea mays
  Peptide Sequence Number=SeqID_45858
atgacggctcggacgtcgacaaccgaagggggcagcagcaccctcggcatcaactacaccttcggaggggtctga

SEQ ID NO: 2484 - DNA, 176 bp, Zea mays
  Peptide Sequence Number=SeqID_45859
atggctgaagatcatgcatggatgtatcacggctggagtaggaatggacgtcattctgatgattgggtagccaagaccaaagattttgtggacaatgtattctccttgccattaaccggcactgtcagatgtccttgtaggcggcatgaaaacagtatattccttaataaggaaag

SEQ ID NO: 2485 - DNA, 513 bp, Zea mays
  Peptide Sequence Number=SeqID_45860
atggtggagaaaggccacgggtcgcgcggcgggcacccggtcggctatccccgagcagaagaggtggcggcggaggaactaggggtcggaaaaggggatactccgaaagggatccttctccgcgaaggaagcgggccccaagcccccctactgatcagaggttcaaaagcaggcccctcggaagggttcaacagccacctcatagcgctcaggctccacgcccacaactggtcagaggttcgaaggccggcccctcgaaagggttcaacggccgcctcaggccactcgggctccgcgcccactactgatcaggggttcgaaggctggcccccgaagggttcgacagctgcctcagacgcagagcgagggatgaccctggacccggctccggccaaaccgttgacagcgtcaacataccagcccgagaacttgagactcgactgttcgcccgggctacggccagttcgcatgagggagcagctagaccggccgaaacattacgaaacgtactaa

SEQ ID NO: 2486 - DNA, 1065 bp, Zea mays
  Peptide Sequence Number=SeqID_45861
atggacatggacagggacagcgtggagtgcctctccctcccagacgctgccatggacgtggacaacgtcgacggccacccgcaccacggccatctcggtctcccgctccaccccgcccacctcccatcctctggtgccgggcgcgcgttccccaaggtgaatgccgggggcggcggagcgggcccggctgtagcgggagcggcgggcgcagcaggagcaggcggagggccgccggcgaccagcgtgcacgagctgctcgagtgccccgtctgcactaactccatgttcccgcccatccatcagttatctccattgagtccagtggtcaagaaatatgctgagctaatgaaagggctctcctgtgaaaatttgaagaaaaagtgtcaaaatggacatactttgtgttcgacatgcaaggccagggtgcacaaccggtgccctacatgcagacaagagcttggtgatatcaggtgcttagcattggaaaaagtagcagagtcacttgagcttccatcacagtgcagcttcaggccatataactgcccctatgctggctctgaatgtgctgtggctggtgatattccattccttgttgcacatttgagggatgatcacaaagttgatatgcacagtggctgcacgttcaaccatagatacgtcaaatccaacccgcgagaggttgaaaatgccacctggatgctaacagtattccattgttttgggcagtacttctgcctgcacttcgaggcattccagctcggaatggctccagtctatatggctttcctccgattcatgggtgatgagaatgaagcaaggaactatacatatagcctagaggttggtggtaatgggaggaaaatggtatgggaaggtactcctagaagcatccgtgacagccaccgcaaggtccgtgacagccatgatggcctcatcatccagaggaatatggcgctgttcttctctggtggtgacaggaaggagctgaagctgagggtgactgggcggatctggaaagagcagacgaaccccgatggagcctgcattcctaacctttgcagctga

SEQ ID NO: 2487 - DNA, 210 bp, Zea mays
  Peptide Sequence Number=SeqID_45862
atgggcacgattcaggccaaggctccgcttaagggacacgatcccgcctcgcccgagcccgacctcgggcaaagacagccgaccccggaagattcacgcctcgcccgaggtcacttcgccgctccactgaccgacctgacaggaatacagcgccgcctgccctgctccgactgccgtgccactcgccagagtgaggtcgacagcggctaa

SEQ ID NO: 2488 - DNA, 348 bp, Zea mays
  Peptide Sequence Number=SeqID_45863
atggcgacccaggcggcggtggcaagcccacgcatggtggcgggctcgtcggcgtggcctgcacacaagcatggtgtagtgcaaaatcacgctgaccctatggcgaaacagcaggggagagtcttaccacgatgcagatggtggaaggggtcgaccacggcgctgctgcgaccagaggaaaggagcgaggagcggggcgcgacggagggacttggccgttggagggagctcgccctggggaacagggagagctggtcgtgcagccctggcagggagcccccaccgtggatgaacgacgcccgcccagccatgggagaggctgttgggggaagctctgggattatgtag

SEQ ID NO: 2489 - DNA, 1257 bp, Zea mays
  Peptide Sequence Number=SeqID_45864
atgccagttctcccaccttgcgccggcaagggaggggatgtaggcgccagccgaatccggccttgtctagaagtagtaggtgggcgaagatggccgcctggaggatggagtgggggtgaggtgctgaagctggaggctgaactccaacaacatcaggaagcaaggcgagattggcagcgccaacccacaggagatgtaggaggtgaacaaaacgaactccccggcgaggaggtcgccgagggggacggcaccagcgcggatcctcccggcgagcgctggcgcaccccatccaagcaagttgtgcaccacatcgagcgtcgcctcggtctggaagcggtcgggttggccaagcgaagccatggcgtcggcggtggcacaggtgtggagcaggagagcacgaatgcaaagcggcacagaaagctcgaaaggcgaaagggcgtagcaagaaagagagaatgcgaaagagtaactgctgcatgcggggagaatcccttttcaaggaagactctcccgctcgcgcccatctcgccccgcgtgcaccaaagcgacccagcctctgacacggggacccagggccacaagtcatacagctggtgtgcgggtctccgagtactgagaaggcgaaccgccacgcgagaagcgaactgccgcccgcggtattgcgcctctccatcttcaccggaagcaacgacccagtctctaacacggggggccgggcccacgagccatactccctgggcgtcggtttctgagtacagaaagagcgaaccgtcactcgcgccagtactgcgcctcctcggggccgtcgcagaagacggagaaggtaatttttttcaaaccaatgcagcggtatcgaggcgcctcgcgcatggcccggcgagaccatcatgcgtgggggccacgggtcagtcagccgcggggacagacgtggcagttggcgtgtccgaaggcggactggcagtgagtacatcagcaaacgcacgaaagcggtgcgccaatcgccagtcaagctttggccccacctgcaggctcatatcctcccctgaggcggtcctgggggccactgtcagtaccctagaacagggggtccgggccactcacagcaaggtcccgggattccgggataaagagtacccaggccttgatcaaggtcaggcggggtccggagccgacacgtgtccggaccataccgcggcgggtgcgttccaccacccggccagagatttcctctccgacaaacttatagttaaactttag

SEQ ID NO: 2490 - DNA, 354 bp, Zea mays
  Peptide Sequence Number=SeqID_45865
atgacggtggagaaaggccacgggtcgcgcggcgaaacaacggttacccggtcggccatcaccaagcagaagaggtggcggcggggcggacaaggtgcgcggttttctttctctggctattccctcagggaccgggaaaggggatactccgaaagggatccttctccgcgaaggaagcgggccccgagcccccctactgatcagaggttcgaaggctggcccctcggaagggttcaacagccgcctcagagcactcgggctccgtgcccactactggtcagaggttcaaaggctggcccctcggaagggttcaacggccgcctcaggccattcgggctccgcgcccactactga

SEQ ID NO: 2491 - DNA, 2544 bp, Zea mays
  Peptide Sequence Number=SeqID_45866
atggaggcgttcggcgggttcttcgtggacgagaaggcagcgcgggtggagaacatcttcctcgagttcctgaagcgattcaaggagtctgatggcgcgggggagccgttctacgaggcggagatggaggtgatgcggtcgcgggagtccactaccatgtacgtagactttgcgcacgtcatgcgcttcaacgacgtcctccagaaggccatctctgaggagtacctcaggtttgaaccgtacttgaggaatgcatgcaagaggtttgcgttggagcaccgggctggcgagaaccgtgccccgctcatctcagatgatagccccaacaaagatatcaacattgctttctataacatcccgatgctgaaaaaactgagagagcttgggacagccgaaattggtaagctcacatcagtaatgggtgttgtgacacggacaagtgaagtgcggcctgaactattgcaaggaaccttcaaatgtctcgactgtgggaatgttgtgaagaatgtggagcagcagttcaagtacactgagccgataatatgcgttaatgcaacatgccagaacagaacaaaatgggcccttcttcgtcaggaaagcaaattcacagattggcagcgggtcagaatgcaggagacatcaaaagagatacccgctgggtcacttcctcgttcccttgatgtcattctgcggcatgagattgttgagaaggccagagctggggacacggttatatttactggaactgttgttgcagttcctgatgttatggcactaacttcacctggcgaacgagcagagtgtcgcagggaagctcctcagcgaaaaaacggaggtgttcaagaaggtgtaaagggcttgaagtcccttggagttagggatctgtcttatcgccttgcctttgtagcaaattcagtgcaggtcgcagatggtaggagagaagtggacatcagggaacgggacacagatggtgatgacagtgagagacagaaattcacagaagaagaggaagatgaagttgttaggatgaggaacactcctgatttctttaataagatagttgatagcatatgtcctaccgtatttggtcatcaagaaattaagagggccgtgcttcttatgcttttgggtggtgttcataagataacacatgaagggatcaaccttagaggtgacatcaatgtctgtattgttggtgacccaagctgtgcaaagtctcagttcctaaaatatactgctggtattgttccaagatctgtttacacgtcagggaagtcatcatcagctgctggtctgacagcaactgttgctaaagaaccagagactggtgaattctgtattgaggctggtgccctgatgctagctgataatggtgtttgttgtatcgatgaatttgataaaatggacattaaggatcaggtcgctatacatgaagcaatggaacagcaaacaattagcattaccaaagcaggaatacaggcaactttgaatgcacgaacatcaattttagctgcagcaaatccgaccggaggccgttatgacaagtcaaaaccacttaagtacaatgttgcattgcccccagctattctttcaagatttgatctggtctacatcatgatcgatgaacctgatgaaaacactgactaccacattgctcatcacattgtaagagtccatcagaaacgtgaagaagcacttgcccctgcatttagcaccgcacaactgaagcgttatatttcttttgcaaaatctttgaaacctcagcttagttcagaagcaaagaaagttctggtggagtcgtatgttacgcttcgtaggggggacagtactcctggaactagggttgcttataggatgacagttcggcaattggaagcattgattcggctgtcagaagctattgctcgaagccatttagaaagagttgttctcccagctcatgtccgcctggcagttaaattgctcaagacatccatcatcagtgttgagtcaagtgaagttgatctctctgacttccaagatgctgaagatggaacaaatgtaccttctgagagtgacgccggacagccagctgaagaagatgctgctcctcagcagcagggtgcagaaaatgaccaagcagcggataatggtaagaagaaattggtaataactgaagaacacttccagagagttactcaagctttggttatgagactaaggcagcatgaagagtcagtcaagaaagatgttatccgccatttgtcgctgttgcttattggaccccgtggtgatgcaggagatggtttagctggcatgaagcaaggggatcttatcatctggtatgttgagcagcagaatgccaaaggggcatatagttctactgcagaggtgaaggaagaagtgaagtgtatcaaggccattatagagagacttatacagcgggaaggccatcttatagtcattgacgaaggtactgcagccgcagccgaagatggcagtggcgcaaggagaacatcagagagtagaatactggcagttaacccgaactatgttattgattag

SEQ ID NO: 2492 - DNA, 1206 bp, Zea mays
  Peptide Sequence Number=SeqID_45867
atggcgcgtacagtttggccccctggcgcagacagtccggtccctgatagaaagttccactttctttctctatgttgtggcattatcaactattcaccagtggctatttctcatatatattgctgtggtctgggtgatcttaggaagaagcttgtcagtcgtttcaagtcgaagcgcccttgtgcagatgatgcagattataatccagctacagactctgaggctcaatcctcagctgggggcatcatctctatggacacagaggatgttccacatgctcatccagattatccaatcgacatcacaggatggacttatccaaagagaagattctctatggatgagtactgctcgaggaggacagttaatcagtatgatctgccctcagacaccaacattcaattttttcatactcagcttcagtttgatgtcttctggggaacactaatggatacaaactttcataagcatcaatcatggagtgatggattccaaaatttgaggcatgtggtctctatcactttatgggccagaggacaaacttcagtgagatgggtgaaaccgttcctggccactgctgagatcgacattgatgagcaatccatcacttggatgactggcattaagaggaattctgcaacctttgctgaatttgctactgcaaatagtttggactatgatacaatttcagctgggattgatttgtacactgaggataactttgaagaatttgtgcaattctatgagccagcgaggctaggcattcctaggaggtttggggagactccaggactgaggcatgatcctgctattattaacaagattgctcgagtaacagttcttccaaggagtggagataagagcaagatcagagataaattctggaacatcatccaccatatcatgaatggtgagaatttggcctatgctccatacatcatggctctcatcaaagctaagaccatatttgaggggcgttgtgagatagctcacactccctttaggcctttcaagaatgcgattggatacctcatcatgcctcttactcctttcccagatgatgaggaagaagctagcgatgatgaaggagttgctcctgaagctgatgcagctgagcagatgcctcctcctccacctcctcctcagcctcagcaattctggcagcctggtctaggatattttgatccttacttccagaacctgtag

SEQ ID NO: 2493 - DNA, 702 bp, Zea mays
  Peptide Sequence Number=SeqID_45868
atgaagttgatcaagacaaggaagatgatcagggtcaaagaccgccacacccaagagtccaccaagcgatacaacgagatcaccccggtggaagatgcattaagagattcagatttgttggcaatgcaagaggaaatcaacaacttcacaaggaatgaggaaaagaacaattggaaatgccttggctcgagcagccaagactctgctcagtctgggtgcaccggactgtccggtggtgcaccggacagtgtccggtgcgccaggctggctcgagcgaactgggcgctctcgggaattcatcgacgacgtacggctataattcaccggactgtctggtgtgcaccggactgtccggtgagccaacggtcggccgggccaacggttggctgcgcgatctgcgcaagacacgtggccgagccaacggtcaggaaggagcaccggactgtccggtgtgcaccggatagtgtccggtgcgccaacggctcccaggcgccaacggtcggcttcgccaggaaaggaaacaaatctgcaccggacagtgtctggtgtgcaccggactgtccggtgcgccaggcgatagaaggcaagatttgccttccaggaatgctctcaatggctcctagctgccttggggctataaaagggacccctaggcgcatggaggagtacaccaagcatcctctaagcattcctaagcactaa

SEQ ID NO: 2494 - DNA, 75 bp, Zea mays
  Peptide Sequence Number=SeqID_45869
atggccgcgcctaggctgctcccgcgccgccgcgcgctggtcgatgtggtgggcgaaaacataacacataattaa

SEQ ID NO: 2495 - DNA, 126 bp, Zea mays
  Peptide Sequence Number=SeqID_45870
atgccgacagtgtcgaactcgatcttcgccaccgttagtttcactcatccgcgagccgtccgtcgcagccgcagcgagcccgcctcgcctcccagcccgacaggttttagaaacatcactttatag

SEQ ID NO: 2496 - DNA, 591 bp, Zea mays
  Peptide Sequence Number=SeqID_45871
atgcaggaagcatacaaccgcaccacggttgtgcaccctttcggcttcgtcgcatccgacggtccaccatggaggcccgggcccacttgtcatgtaaccggcgcgccgggcaagcgacacctccggcaggagaagcgggcaccgtttcacctccgtcatgatggccgcgtcaaaaaagggaacgggaaaggggatattccgaaaaggatccttcccagcgaaggaaacgggccccgagccctcctactgatcaggggttcgaaggttgcgccctccggagttcggcaaccgccccagagcactcaagctccgagccctttactgatcaggggttcgaaggctggcccctcggaagggttcaacagccaccccagagcacgcagagtcagggatgaccctgggtacgtccgttacatggccgaggctcgggctacgctcccgaggtaccctaggacatttccgagaccagcgggaacgattttgtacggaatcccacctgagggaggcatcgagccctgggaccctatcgaatgggtccgggtccggcaaatcacttgtaggtacttttggagtgcgcctctgggccactag

SEQ ID NO: 2497 - DNA, 864 bp, Zea mays
  Peptide Sequence Number=SeqID_45872
atgtcgctgttcctcgcctctgtcgatggccgggatctagggaataggggcggagcttcgactgggcatggggaagctatcccgaccgacaatttgatgaacggccggtcggaactcgggcaatgtctcaccgaagctgtggcatccatcgcgagttgcgttccatcgtgggcgttcgtctccgcgcccgaatccgtggaaaatagggcgccgggcgtactggccgtcggcggcgccgccgtgcggaatgttgggcgccgccacgggcgctgcgtgccgctgtctgtggccgtcgggggtagaagacagggaacctatcgttggatcctcgatgaagggtggagcacacctggtgattatgttcatgcccgggtcttggtgcccctaaaacccgggtgtgacagaagcgagcacgacgaaggcctgcctaacgccatggtgcagcgccccgcggagtctattgcgcacatggctgcccaaggcccgcagatgactctgggggagctacccgaggggacgccgtcgaggccaaaggcctggcagaaagtcgagatggcctcggacatggccacatgctcggcctccttctgcccaaccgcctgggcaagcgccttgcagttcttgacggcctcgtcaagagccgtctcgaaccctgcagacagcaggacaacattcttcagacgcaagaagaagaatggagacaaaaacaaagtcacagagcgggcaaaacataccttcggaccggtcacgctgctgaatgaacaatctccacaccagaaggcctgcgggataacaaattccaggtggctcgccggcgaccactacaccagcagctcgacaacgacctccgtctcgggcggctag

SEQ ID NO: 2498 - DNA, 135 bp, Zea mays
  Peptide Sequence Number=SeqID_45873
atggatctattcggcccaatcgcttacataagcatcggcgggagaaaactcacaaacccaagagactttaaagatattcttaagatgggctcaaaacgagttcggattgagaatcaaaaagataagaagcgataa

SEQ ID NO: 2499 - DNA, 357 bp, Zea mays
  Peptide Sequence Number=SeqID_45874
atgccgaatgatatttctttgtctgatttcgtgcttaatcgcccccctacgcgcggtgtcccggcccccggcggcgcgactccctggcccccttgcgcccggcccctcggtcctgctgtcccagccccggtgcgtggcctctgccttcggcagcatggaccctcggcgcggttcctgcgcgcgtcccagcgcggctcgcgtggcctcggcgcggcctgcgcggcctcgcgcccccattcacccaatgcgttcccacgtggtgacaaggatgatggttatgattatgcctatggtaatggtgaagatgaagtcgtggaggaggacttccaggagttccaagagtacgatgagttctag

SEQ ID NO: 2500 - DNA, 939 bp, Zea mays
  Peptide Sequence Number=SeqID_45875
atggagcctggcggagggacagctgtcggagctgttgagtccttgctgacgtcctcttgcttccgtaagggggctgagagccgccgtcgtcacagagtatgcggggcgccatcatcgcctatctggcggagcgagccagatgggacgccggtcttgtccccatggcccgagtcagctcggggtagggtgatgatggtgcctcctgttgacgtggctggtctgcgccctaggttgggcgacgtggaagctcctccgaagccgaggtcgagtctgtcttccgtggccgaggtcgagtccgagcccccgggtcgggcgaggcggagaccgtcggctgaggtccgagccctgggtcgggcggagcggagttcgtcgtcttctggggctgagcccaagtccgagccctgggtcgggcggagcggagttcgccgtcttccggggcttagcccaagtccgagccctgggtcgggcggagcggagttcgccatcttccggggcctagcccgagtccgagccctgggtcaggcggagcggagtttcctatggtgcctacggccgggcctgactgcctgtcagcctcactctatcaagtggcaccacagtcggagcagcgcaggcggcgctgtctctcagtcaggccggtcagtggagcggcgaagtgacggcggtcacttcggctctgtcggctggggggtgcgcgtcaggataaaggcgttaggccacctttgcattaaacgctcctgcgacttggtcggtcggtgcggcgatttggtcagggttgcttcttggcgaagacagggcctcgggcgagccgggaacacgttcgccgctggaggggggcctcgggcgagacggagatcctccgggctttatgctgatgggggttaccagctgagaattaggagccttgagggtacccctaattatggtccccgacagtag

SEQ ID NO: 2501 - DNA, 414 bp, Zea mays
  Peptide Sequence Number=SeqID_45876
atgacggtcttcggtgagcggcggtggagcttcctggttgcgtgcgcagagcgagagagggggcgagagggtttggctgagggcgcaagtgagcgggggaaagtaggcgagcggagcgcggggctcaaaagaggcgaggacgtgcggaggtggccggagaacgcgcggtcgtgggcgcgtccacggcgagggacgtggggtggggaggttggggacgggctgacaggtgggctccgcggaacagagagagagagcgggcatgtaggcgcgaagaaaggtgtcgacaggactggcccacggggcaacaggagggagagagggagcgcgcgggctgacgccgacaggcgggacccccctatgagacaccaagggcgcgcgggcgcgaggctgggcctgctgggtcgactgggctga

SEQ ID NO: 2502 - DNA, 255 bp, Zea mays
  Peptide Sequence Number=SeqID_45877
atggtggtgcagggggcatctctggctgaagtacagggaaaggcggcctcccagactccacctcctgctgaggcgagggggaagagtcctactgctgctgctcctgctcctagcattggcgctcctgctcctcgtgcaggcgatgatgcagtctctccaggtgattgtactgacctggcaccgtgcgacgcagtggacgcaccgtcaggcgagaaggcaaaaaggggatcactgacttacgtgcagtgcgcctaa

SEQ ID NO: 2503 - DNA, 252 bp, Zea mays
  Peptide Sequence Number=SeqID_45878
atggtgctggcggtcgtggtgctgctgggcgtcgtggccgtccttgtggtggtgctgctgctgcagccccgcgcgccgtacgtggcggtgcgagcggcgagcctgtacgcgctagtgtacgggcagacgggggcgctggacaacgtgctggtcacggtcctacccgttctgcgtgcccgccaggggcgtcctcccgctggcttgttaaccgccgccaatatcacagatacgaacgtggacgagcggctgtaa

SEQ ID NO: 2504 - DNA, 588 bp, Zea mays
  Peptide Sequence Number=SeqID_45879
atggtggcgctccacagggagctcgcccgcctcgccgccaggtccgtcgcgcgcctgcctgctggggctgggctcggcgggagcggaaccgccgaggaggccgagatgaccgccgcgctcatggacgtcgcggccgccagtgccgccgcctccgccgccgtgttctcggccgtcgcgtccgtgcgaccgacggtggcgctccaccaggaacgagcgacggtggcgctccatagggagctcgcccgcctcgccgccaggtccatcgcgcgcctgcctgctggggctgggctcggcgggagcggaaccgccgaggaggccgagatggccgccgcgctcatggacgtcgcggccgccagcgccgccgcctccgccgccgtgttcttggccgtcgcgtccgtgtctgccgccgcgtcgtcgtgctcgaacaagaaggccccgacgaccttcgtggctgctgccttcgccaagaagccggagacgccgatgacagccgatgtcgcgcaggagaagcacgaggagcttgagcgatgcatcgacgagtgcgagagcggcagcgaggtggtgttcaggagcattgttcggaaatag

SEQ ID NO: 2505 - DNA, 924 bp, Zea mays
  Peptide Sequence Number=SeqID_45880
atgaccattgtcacccaaccctatatgtttagggttgctgttgtcaccggagggaacaaagggattgggctggaagtatgcaggcagctggcctccaggggtgtcgcggtgatcctaacggcgagggacgagaaaaagggaacagaagcagtggctacgcttcgtggatccggactaccggatgtacagtttcaccgcctggatgtcagtaatccaactggcactgcccgtcttgctgaatttatcaaggagaagtttggcaggctagatatcctgctcgtaggcaagaacgccatggagaggctacaatggttggtgcagcactccacggagagttacgaggaagcaagagaatgcctgaaaataaactacttcggcaccaaatatgtgaccgaagcactcctcccaatccttatatcctcctctgacggacggctcatcaacgtgtcatccaactatggactactccaggcactaatcctcagatggaatggaactacaattttcgttatccaattcttcgtctttgttttccagcatttcagtggcgaagatcttaagcaagagctaaacgatattgacaacctgacggttgagaggctagatgagatgccggagttgttcctgaaagactacaggagtgggcagctgaaatctcatgggtggcctgccgactctgagtacctggcctacaaggtatccaaggctctgaccaatggctacaccaggatactggcgaaggcgcacccagagttgcgcatcaactgcgtgcaccctggcttctgcaagaccgacatcaactttgacaccggcgaatacaccgcggaagacggtgccagttgcattgttgcggtggcgctattgccggaaggaggcccaactggcgtgttcttcttccgcagagaagaagtaccctttgtgtaa

SEQ ID NO: 2506 - DNA, 564 bp, Zea mays
  Peptide Sequence Number=SeqID_45881
atgcaagatgctgcatggcgtgcgctttcgcactactgctcagttctcagcggggtagccgacggtctcaacctgaagtattacccccgccgtccatctggcagcacaggaggcgtgattgtttcacctgtcggtgaggacaatcctaggttgagcagcacagtcaacctagccaccgtgctaaacacagagctggaccatgcattagacgagctaagtagggctcgtgctgagatcgccctgctgcgggctgagcgagcggagcgtcatcacctggatcatggttcccccgctcccgtcgggactcagcacccatgtcagaaaacaggcagaggaggaaggcgtgctcagcaggcagctcagcaggatgaggtacctcagcaacagcaactgccgcccccgcccccgatgtccatcgagcagatgttcctgatgcagactcaggcagttcaagccatcggtaagactctggccgctattcagcagcagcaacaacaacagccaccaccttatcctcagatgcctcagatgcctagggacaagcgtgctgaattcatgagatga

SEQ ID NO: 2507 - DNA, 738 bp, Zea mays
  Peptide Sequence Number=SeqID_45882
cctccaagtggttcagtctcccatggttataacgtggctgagagcggttgcctgctccaggctgagacacattctgctttgttggggcattggggcctgactgctgctgggctgccttcttcggacattgcatcacccagtggcattgctatccacattggaaacatgctctatttccaacctgagctggtgctgcctgattgttctgctagtttgcgggggcaggaagacgaggtgcctactgattctgcctctggaactgacctcctcctgactgattgttctggcgattctaatattggtgctgaggatactgcctttggaactgctgctgctgaggtggacgctggttctgccagaactactgagacctgcgggaacatggtactgacgaaagctacctctgaattcttcctaggtgatggtgtcggggttggcatgggtggcgagataagactcccaccaagactgagctgctcctctcaacagacggggaaaatactggactttctccctgtcatcacactgagcgagtcttaccgatggcttgaactgcctgagtctgcatcaggaacatctgctcgatggacatcgggggcgggggcggcagttgctgttgctgaggtacctcatcctgctgagctgcctgctgagcacgccttcctcctctgcctgttttctgacatctgcagaatgcaaccacacatcagaactgatcttgcaaatcttgcagcataa

SEQ ID NO: 2508 - DNA, 378 bp, Zea mays
  Peptide Sequence Number=SeqID_45883
atggtgggcggtgggacgaggacgaggagggggagggggagggggaggaggagcacccgtaggacagaggaggaggtgcagcaggacaacgccgtacagcagcaggtggagcagcaagccgctatcgatgcggcgcagcaggacgacgacgatgtggcgcagcaggacgatgacgacgacgccgctcagcaggacatctcaggttctggctcctcaggtcttgatggttttggagagtgcagggggtcacgaccgcaaccccaatgggcattctcgggccttctatgcaaggaacacttccctgggacttgtcgagtacgccggagtgacgagcccagcttacacttcgaccactacaccgtcgccccgatgcagtag

SEQ ID NO: 2509 - DNA, 228 bp, Zea mays
  Peptide Sequence Number=SeqID_45884
atgggcgcgattctggccaaggctccgctcaagggacacgatcccgcctcgcccgagcccgacctcgggcaaagacagccgaccccggaagattcacgcctcgtccaagggtcccctcaagcaacggatgcaccatcgactcgcccgaggctcggctcgggaaaacagcgccgcctgccccgctccgactgccgtgccactcgccagattaaggtcgacagcggctaa

SEQ ID NO: 2510 - DNA, 456 bp, Zea mays
  Peptide Sequence Number=SeqID_45885
atggcccccaagagagcaacctcgaaggtcgccgcgtccatcgacgatgcggcgaaggcagcactcctggcggagaagaaaggcaaagccctcgcggacaacaaccctcaggaggccttcgaagatgacaccatcaacagcaagagacagcgccaggataaccccacccccgacggcactgcgcgcacttgcagttccaaggttgacgatcacatagtaatccattacgccatcaacggtctttgggctagtgtcctatacagtcattgtatcaaggacccacccaagcatctacgggagctctaccaagtgtttgagaagtatgccaggtctgaggagctccctccgcgcaaagtcgaatctcataggaagcccaaggaccctccgcagtccagcagaatttgggttaggtcggcgcagtcagacttcggtagggacaatcgcaaccagcaatag

SEQ ID NO: 2511 - DNA, 708 bp, Zea mays
  Peptide Sequence Number=SeqID_45886
atgttgaggcaaggtgcaagatttggccccacctgcaggctcgcatcctcccctgaggtgggcccgggggccattgtcggaaccctgaaactagggtaccccttactgctgtacaaaagcacagtaccccacgcggctactcttagtcgtgtggttaaagagttgtatgtgggaccaggccatgactcgccccagcctcgggcgactactctgggccagcaacagcgcctgaccccaccaaatgggcgggtccggggccgccacgcctccaagtttggtccaggacctccacgtgcgcgaaccggacccctagaatggggtccggaccccccgtatggggtccgggccgcccacagtggggtccaagggttccaggatagaacgcggagacccgatgctgccacgcggcctattgcgcgcggcgtaagccaacgggcggagcctgacataaagcctctgggctacacttcggcgccccccaccgctgcctcagcagtgcgtggtggcgtgggaggccttagctcatgtgtgggcacggcaggcggaggcatgctggcgctaggggaggcaggcttcgcgctcgcccacaccatcttcgcctcgcgcctcgggtccgccaacctggcgaacgcctggcgtttccgtggtgcgtcttggcgatccttctccatcactatcgatacaacagcagcaacattccctccgtaa

SEQ ID NO: 2512 - DNA, 345 bp, Zea mays
  Peptide Sequence Number=SeqID_45887
atgcccagagggtacgtacccatgcggctcgtcggcggcagcaaggagcaacagaggatcctcgtgccggtggcgctgctcaaggagcctcgcatggtggagctgctggagatggccgagcggctgtatgggtacgggcagcccggcgtgctgcggatcccctgcgacgcccgccgcttccagcactacagtaaaactataatattccgacggtcgtattatgtccgacggccctataggcaaccgtcggacataaggttaatcatagtgtatcgtagtgtgaacaaacgaaacctaggcgtcacccgtttcggcccaacactcctttcaagcgacgcatgtgag

SEQ ID NO: 2513 - DNA, 156 bp, Zea mays
  Peptide Sequence Number=SeqID_45888
atggatgacgacgacaacaacagtcggtaccttagaaccatcaacgacgagctcgttgagttagggcagcttcccaatgacgtcgacaacatgggagatgctgctgctgccttgtttggtgtcgatagcactcgtaatgtcgggtcgcactggtaa

SEQ ID NO: 2514 - DNA, 1044 bp, Zea mays
  Peptide Sequence Number=SeqID_45889
atggtggcctcgcgaaccgcctgccccgtcgcattaactccgcggcgggacaggcggcgcctctggcaggagaagcgagcgacgcttcgccttcgccataatgaccgcatcagaaaagggaccgagaaaggggataccccgaaaaggatccgtctccgtgaaggaaacaggctccgagcctcactactgatcagaggttcgaaggctggcccctcgaaggggttcaacagccgcctcagagcgcttgggttctgcgcccactactggtcagaggttcgaaggccggccccccagaagggttcaacggccgcctcaggccactcgggctccgcgcccactactgatcagggcgggaatgatcttgtaacagaatcccatcagagggaggcatcgagccctcggaccccgtcgaaaggggaccgggtccggcagatcacccgcagctcactggagacaccatgttcggcgccctccgagggcaacatggcgctttccccccctcctccttgtggaaaggcgacacaggggcgctcagccccggaagacggcgaactccgctccgcccgaccccagggctcggactcgggctcagtcccggaagacgacgaactccgctctgcccgaccccagggctcggactcgggcttagcccaagaagacggcgaactccgctccgcccgaccccagggctcggactcgggctcagccccggaagacgacaaactccgctccgcccgaccccagggctcggactcgggctcaggcccgaagaacgacgaactccgcttcgcccgacctcagggctcggactcagccctggcctcagccgacggtctccgcctcgcccgacccgggggctcggacttgacctcggcctcggaagacagactcgaccacgacctcggagaagcctccacatcgcccaacccagggcacggaccgaccacgtcaacaggaggcgccatcattatcctaccccaagctgactcaggctacggggaacaagaccggcgtcccatctggctcgctccgccagacaagtaa

SEQ ID NO: 2515 - DNA, 189 bp, Zea mays
  Peptide Sequence Number=SeqID_45890
atgaccctcggacagaaccaatgcaaaaatcaaagtctacactacggaccatccggaggaaaagcaagcaccgtccgagaccacgcgcggaccgtccggtcggtgaaaaaccgaaaaacccgaaggggtggaccgtccggaccagaggcgcggaccgtccgcgtttggcaaaattggaacaacggctag

SEQ ID NO: 2516 - DNA, 507 bp, Zea mays
  Peptide Sequence Number=SeqID_45891
gtcggccagcccgagcctagacaccacctaggatctctactccccgacggggtccctcccgggagcgagatccaggcgccgtcggcgatcttccgccgcccctgcgtacgcgcggaccgtccggccccagggcgcggaccgtccggccgtcaggcagggaacccgagctccagcaccaggccgcggaccgtccgacccctggccgcggacagtccgcccctgcgcagagaataccaccgcgcctcgcaccaggccgcggaccgtccggccccgcgcgcggaccgtccgcccctgtgcagagggcaccgccacgcaacgcctcgcctgctcctgtcgttcacggacacggccgcccctgcccttgacgagctgtacaggaggagcggcgaccagccggagaccgagcagcaggccgacgaggaagacgaagaggtcgaggtcgtggagaacgcgacggtctccagcgtagtcgtccatcccgacctgacactcatgctagaagcctag

SEQ ID NO: 2517 - DNA, 570 bp, Zea mays
  Peptide Sequence Number=SeqID_45892
atgtgcacattggaaattggaaaagacgtgtgcgatgattttgggaaggaaaatgcggaagcgaaggtagatccccaatctgaagaggatgaaaatttagattcgtggggcgagggtgagggtaatgacaatctcaaactcacgccgtcatatttccgttaccatatacgtgaggcctgctgctcgcgcctgctgcttgctcttgctgccgtccacggacatggcactgacagtgttggagaccaccgagcagcagctcctctcgtggcagcagtccgtcgagcagggaccgctcgtgcccgggctgcggcgacgacgagcgcgggggaaggaggaggtggccccgcacgcggccccgcccagggcgttcccgccgccgctggcgcggcgcaggtggagcccaccaccatggagatctccaccacacatggatttctccggcggcggcggcggccgcagccgcgccgagccggcccggtggctcgagatcgcccggaagctactcgtcgcgcgagacctggtcggctgcaagcgactgcccaacttattatactgaacagttattcctga

SEQ ID NO: 2518 - DNA, 897 bp, Zea mays
  Peptide Sequence Number=SeqID_45893
atgcatgtggtcggcgacttcctgaagcgccgggtcatgccgctgcagaataggtcgcgcctatgctactggttcactggcccgaatgatatcgacaggatccagtgcgggccgggtaccgatctgtcctgggaggagctggaactcctggtgaaggggattactgggctgcgaacggtggtcctggccatgttgccgaccctcgacgacagtggcgtggcagttcgtcagaccggaggtcgggaccctctccgcgggatccagatccctggtgtatcggctgggcgtccccagctcgccggtctggccccttatgccggtcctatcgtggcccccagctccttggacaagagcaaaggggctgcaagcagtgcctccacgccaggtagttccagggggtcggaggaggagaggaggcgcaggctacgtcgggctgatgggtcgcttgtttcggaccccctagaagcgtcaaaggactgctggtggggccacggagtaggaatctactgggagcagtcccaactcaagcgggaccgcaaggagtacaagaaggacctccaaaaggtgtatgccagggagctggaggtgcaccagagggagaagaaggtggccaagagggaggaggccctgagccagagggaggccctcacaatagagctccgagccaagctgaatgccctggaccagaccttggaagtgcagcgggtccagcaggtcaaggcagtggagaggctgcaacagtggcaggaggagctcgagggcaaggccagcgatgccgccctcaccgaggagaacctcaaagcaaagggagagtccttggacaggcaggagacggaccttgccaggtgggagacggatctcgccttcagggaggaaatgctcactcggcggggctag

SEQ ID NO: 2519 - DNA, 732 bp, Zea mays
  Peptide Sequence Number=SeqID_45894
atgaccaccagtttggtggtgggtagaagcaagcctggctgcggcctctgccccgccctcagcttcaaggatcttcatcacctgggctgggaaggagggcagggcgagttggggcctacctccgcgtgggtcgacgacccgcctcttcctccagcattcgggggagaagggcatcctccagctgtgcggaggaggcgtactccagccatgcgggggaaggcgaactgctgctgccgggacagggtgcagctgtccgtcctccacccgggcgacggccgtgccgcgcgcgggccggctacatccaggtcctccctacgccgtcggctgcacaacacgtcgcacgccacgagggcgaaccttcggccgctctgcgatgagctggagccggaggcagcggtgttggcatggacagaggcggagtcggctcgaaaagaggcttcgtcggcccaggagcaggtggcttcccaggccgaggaggtgcagcagcggtggctggagcttggccaggtcatccgcgagcgggaccaacctcggagtcacgctgccgaggccgtgagccgggctgaggtcctcgggggacagctggctgtggctacggagcggccagccgaggtgtctgctcgggccgggaccctaccggggaccctggctatgagggcccaagcacggtgttggcgtcctccttcgaggtggagatccttccgcccgtgtcgccgtccgaggctgggctag

SEQ ID NO: 2520 - DNA, 357 bp, Zea mays
  Peptide Sequence Number=SeqID_45895
atgtcgacaatgtcgaacgtgacttgctcacttcacgcgttgggtgctacaccgaatgacagggatagctctatcttgccgacgaggaatatcctagcctgctaccctgtagttgattaccatggcgtctacgtgtggagcactgtgcaagtcgacatccctggcgtcgaaggtggtgcggaggcggtggcggtagaacctgcacctcttgatggtgctgccctatgggttggtgctggatttgctcgttatggtagggttgttggtggtgtcttcaccgtgaaacaagcaatagaatcgtcacggctgctaggtccatcctcggccccgcctcttgtgccgttaatgtggccttga

SEQ ID NO: 2521 - DNA, 1560 bp, Zea mays
  Peptide Sequence Number=SeqID_45896
atggggggaaaagagtttgtaatgctaacacggggtgtcaaagccacaataatctctctctgcgctttggcacagtatggggaggtcctgtggtcttcggcagggccttcgtctcgtctcgccgaagcgaagggggccgaacaggcctccgtctgggcagcgcccttggtctatccggtgggtcctgcggatgcggtcttcgtccgcgcagcacgaagtagaaatcatcgagcgaagggtggcgtgtttgccttcgccccaacatttgcccttcgagggaccagtttgaccaagtcagctggtgtcgaagaccatcgtgagatggtgaagacgctgcctcgctcgaagtggtcccgcagggttttttcaagtgtgaccgttgatgaacgtgttactgttggactgcagttgctcgcctgccctccttgctcattctgtgccggaaatctggcctatatcaagcagaccgcgcgccgccgccgatggtacgttgcaatgtcttcttcctcgtctgctgcgagcgcatcgccggtcgtgccgtcgtctgaggagaccttgagtgacttggcggtgtttgagttgcagctcggccacaccgtggagtttgggacctcaaggattttctcgggccgcgtgatggagatgcagcggcttggttactttggtaacggtgtcgggcgggccccgggtgcagagcaggtccccgagcctgagggcgagttgatagtttttgatgccttttttgctgtcggtcttcgcctcccgacgcatcgattcatggtggaggtgttgcgaaggtttgagccgtctgtggaggacttcgccaaaaattattgcctgcattggcagaagaggaagatagggaataagatagcccaatttggaccgtgcaccttcacgccgaggactgggaagacttcggctgaggttgtggagatagtcccctgcgctaggaacaagtggggtaactggtgggatttttggttctatgtggctcctggtgatgtcgaaggcttgccaagtctgcctccggccatcctgtgctcacattgttatgtggcattccctcgattcaaggtggtggaggaagacgaagacgaaggggcccttcgacatgcttcccgcctgagtagcgggcgtgacctggtggaggagtttattgcctatggggtgtggcccttggcacatggttgggtattgggcgaagtgaccccccgtcggatgcctaccttgggtggccagatggtgcgaagtccacccttcgtagtggatttacgcggtcgcgatgcggccgcgtttgtgcgtgaagtggaggccgaggccgtgaaaagtgtaggaaaatatgtgccgaagacggagactctaaggagttgggacattcgcagttcaaatgttaggttgagccatgtttttgagttaaaccgcttgccgtatggtggttacccgggggatgactatgcctactttgctgtccgccgagggaaacaggcgatgtcaacggccgatgagggccctcactggataaggctccgggcgcagccgccaagaaaaggaaattag

SEQ ID NO: 2522 - DNA, 1782 bp, Zea mays
  Peptide Sequence Number=SeqID_45897
atggcgggcgccgaagtctccatggagctctctgtggacgattaccttgtgggcggggtcgctattttcagcacccacacgggactggctcctgctggggcggagtctgggcaactggctgttgtcccgacaacggtgttagctgacccagtggccgcggcgatcgtggtgaggggtgatgtggggtcctcggaggacccatggtccaagttctgcgccgacggcgagattgcctcggccgccgctgcgaagtgcgtggccgcctcagagttttctgccgagaggcggcgacttgaggggaggatcgagtgcctccggacgcaacatacggaggcggtcagagacaagtcggcggcggagaacaggagccgcaacttgcttgagaagctgacgacagcggaggcggagaaagaggacctcagtcgtcggcttgcggaggagagcgagggcgcggaaaaggcccgtgcagatgccaaagctgcccgagctgaggccagccttgccctcaagcatgcctctgatgtggagtcggggctgaagagcttgcgcagctataccgagaggatggaggcctccaccagcgctggggttgaacaggcgcacacgctgttcgtggacgtgtaccacgagctcggcgcgcgaatcgccccttttcataagttcggcgaagaggtgggccttcgcttcctcaggtggctacaggaggagctggagtcgctcccttctatcacgaccggcctcatgtcctacgcctcgctcatcacctgcgagggggcagcgaatgccttgtcccgtgaggggtgtaggcatttcgaagtcttcgattgggtaaccgaggacttcgaccatggaatcttccaggtcggggacgaggtgctcaagcggtccgctggggcgctttacgacaggatgtggggccctcatagccgcgacactgtccgggagagggctggccgagcattggcgcatatgatgaatgatgaagaagtcgaggactttggtggccttgaaagctcgatgacccggacagagggcgcggagacgggggttgaagggcactcagcgcctcaagccggccctggcgaagaccctactacgacggctgctccggctggcgaagactctgcagcggcggttgctccttcacaggtttcgacgtccgggcctgcgcaagcaacccccgctaatgttgatactagttttttggcggctacgaatgcaattgcctttaatggaaatgcatctggttctgaaactgagtcgtggtcatcgaacgggaatgattttgggagcccgctttcatggactgaggagtcttctgaggaagatttagactattttgttgcgttggatttggtcgcagcggagtcctcgtcgcaacctgaagcgcgtgaagagtctgctcccctggctagggcgatagccgaagaccaccgcagattgtctcgatttgtaatcgtgttggcatggcactttggtgggatggggacttcgcttcccgcggtcggtgtcgtgcgcttcttgcgtgtgcccggcttcacccttaggcggcttttgctcggacgtgtcttatggaaaagacttcgcacactttgggtgatgtcgcgcacttattgtgcatgctcggctgcacccttaggcggctttttgctcgggtgtcttatagtaaaaacttcgtaccctgtgggtgatgttgcacacttattgtgcatgtccggctgcacccttaggcggctttttgctcgggtgtcttatagtaaagactttgcaccctgtgggtga

SEQ ID NO: 2523 - DNA, 318 bp, Zea mays
  Peptide Sequence Number=SeqID_45898
atgtattcttcctcgtctgctgagcgcatcgccggccgcgccatcgtcaaggagaccttgagtgacttggcgatggttgagttgcagcccggccacaccgtggagtttaggacctcaaggattttctcgggccacatgctggagatgcagcggcttggttactttagtaacggtgtcgggcaggccctgggtgcagaagaggtccccgagcctgagggtgcatttgattccgcactgaaacagctccaacctcggcaatcttgtgacatccagagccaggcttctactattgtgagccttgttcgtgctaaattctag

SEQ ID NO: 2524 - DNA, 318 bp, Zea mays
  Peptide Sequence Number=SeqID_45899
atgaagctgtggaaggagacttccaggagttccaagactacgacgagttctaggtgtgggttagcggcaacccccagtcggctgcctgtgaaggtcgcgtttatctacgtttcttttccacactttgatttatttcttcgccatgaaacaagcaatagaatcgtcacggctgctgggtccgtcctctgccccttcctcttgcgctgttgctgcggccttgagggggtattcctgatggcgtgtgggcgcttcggctgggtgctgattggctatggtgtgcacctattgctggttgcgattgtccctgccggagtttga

SEQ ID NO: 2525 - DNA, 273 bp, Zea mays
  Peptide Sequence Number=SeqID_45900
atggagcacaaaaaccgtagctctcaagctcactcaaagattcctctccaaagatttgaaatgggagaggcaagagactgttggtcagaggtcagaggggtcagagaccagctgaactgccccttaggaccagttcaactggtcttgaccagagagtttaggagagaaaaccccagctcaactgcccggaggcaagttcagctggtgtatggtcaaagaggttcacaactgaagttgagttcagctgaagttgagaaagctcaactcagctga

SEQ ID NO: 2526 - DNA, 153 bp, Zea mays
  Peptide Sequence Number=SeqID_45901
atgatgaatgaagtgcaaatcaacaagaagccaagactcagcacagtctggcacactgaactgtccggtggtgcaccagacagtgtccggtgcaccaggctggtctccggcgaactggccactctcgagaaaacttcggcggtgtacgactaa

SEQ ID NO: 2527 - DNA, 684 bp, Zea mays
  Peptide Sequence Number=SeqID_45902
atggcgaacgacacgaacgcgcacggggaaaatctacggcacggctgcggccaacggccaggtagcgcacgcggggcctcggcgttcgcacgcaggggggtggcggctgcgctcggggagctcgccggcgaggacagagctcagcgaaactacggcgaggactccgggcgtggcgagacacggcacggctccctgctcgatggcgagaaggcgaaggtgccggcgatggcgagtgcacgggcgcatcacgcgtcgaggccggggctgcgctcgacgaggcgggcgacggcgcgcgacgaggttctgggcacggcgggggaagagagagaacggggaaggagagagagggtggggcgagctcacctcgacggcgagaaacaggcaccctgcacggcgacggcggcgctccggtcggcggttcggcgtggcggagagcgcgaccgaggcgaagcagtggtgggcgagaactgcgcagggatcgcgagcggttcgtttttctttttggaggcgtcgtgggcggtcgtttctctgaaaaatcgcacggttggtttggagaagatgcacagcgggcgtcctagcgtgtggggccggttgacagcggcggcggcgggcgctccctgcgcggtcgcggttgcgtgcgcgcaacgcgcgctggccactgggccgcggcgctggacgcagtag

SEQ ID NO: 2528 - DNA, 714 bp, Zea mays
  Peptide Sequence Number=SeqID_45903
atggggtcgggcgaggcggaggtcgtttggctgaggccagggcggagtccgagccctggggtcgggcggagcggagttcgctgtcttccgggtcttagcccgagtccgagccctggggtcgggcgaggcggaggtcgttcggccgaggccagggcggagtccgagccctggggtcgggcgaggcggagtttcgtcgtcttccgggtcttagcccgagtccgagccctggggtcgggcggagcggagttcgccgtcttccgggtcttagcccgagtccgagccctggggtcgggcggagcggagttcgccgtcttccgggtcttagcccgagtccgagccctagggtcgggcggagcggagttcgccgtggcgcctttggcaaggcctgactgtctgtcagactcactctgtcgagtggcaccgcagtcggagtggcgcaggcggcgctatccttctgtcagactgctttatgctgatgggggttaccagctgagaattaggcgtcttgaggcccccgagcctctgcacagggcgagaggacgatcagggacagactcgactttttacatacgcccctacgtcgcctttccgcaaggaggagggggggagtgcgccatgttaccctcgatgggcaccgaacatggtgtctccggtgagctgcaagcggaagaagagtggttattttcaagtgcaaatgcaagtattattgaatag

SEQ ID NO: 2529 - DNA, 486 bp, Zea mays
  Peptide Sequence Number=SeqID_45904
atggggtcgggcgaggcggaggtcgtttggctgaggcaagggcggagtccgaaccctggggtcgggcggagcggagttcgccgtcttccgggtcttagcccgagtccgagccctggggtcgggcgaggcggaggtcgttcggccgaggccagggcggagtccgagccctggggtcaggcgaggcggagtttcatcgtcttccgggtcttagcccgagtccgagccctggggtcgggcggagcggagttcgccgtcttccgggtcttagcccgagtccgagccctggggtcgggcggagcggagttcgccgtcttccgggtcttagcccgagtccgagccctggggtcgggcggagcggagttcgccgtggcgcctttggcaaggcctgactgtctgtcagactcactctgtcgagtggcaccgcagtcggagtggcgcaggcggcgctgtccttctgtcagactggtcagtggagcggtggagtga

SEQ ID NO: 2530 - DNA, 552 bp, Zea mays
  Peptide Sequence Number=SeqID_45905
atggagaacaagaccggcgtcccatccggccagctccgccggatgggcaatgatggcgctccacaagccctgctccgtcgcacctccgacagccacgacatcacgccagcaaggtgccaagacctctccggctgccacattggcatggccttcttagagagggttggccgcgcgggaccgaggacgggacaggcgctctcttggggccgctcgcttccctcacccgcgtggacgcttgtaacccccctactgcaagcgcacccgacctgggcgcgggacgaacacgaaggccgcgggacttccacctctctcacgctcggctccggccacctcgcctctccccccttcgcgctcgcccacgcgctcgatccatctgggctggggcacgcagcacactcactcgtcggcttagggaccccctgtctcgaaacgccgacagcggatcacctattcaccccccctctaggttctctcaccctcgcagccaaggcgccccttcgcaatttaccaaactcatcgcctacacctggctgcttcagcgatgggggctag

SEQ ID NO: 2531 - DNA, 1086 bp, Zea mays
  Peptide Sequence Number=SeqID_45906
atggagctctccgtggacgattacctagtgggcggggtcgctatgttcgacgcccaaacagggttggctcctgctgagttcgggcaactggctgttgttccagcggaggtgtcagccggcccgatggccgcgacgaccatggcaaagggtgatgtgggggccccggaggacccgtggtccaagttctgcgccggcggagagattgcctcggcctccgctgcgaagggcgtggccacatcagcgtctgcctttgctgaacgcattgcttcgggggcgttgaccttggagttttctgccgagaggcagcgacttgaggggagaattgagcgcctccggacgcaacatacggaggaggtcagggacaagtcgacgacggagaacaagagccgcaacctgcttgagaagctggcagcgacggagacggagaaagaagacctcagccgtcggcttgcggaggagagggagggcgcggaaaaggcccgcgcaaaggcccaggctgtccgtgctgagactgacgccgcgaacgttgaggccagccttgcccttaaacacgccgccgacgcagagtcagggctgaagagcttgcgcagctacaccgagaggacggaggcctccacccgcactggggttgaacgggcgcacacgctgttcgtggatgcgtaccgtgagctcggaggagctggagtcgctcccgtctaccacgacgggcctcatgtcctatgcctcactcgttacctgcgaggggcggcaaatgccttgtcccgtgagggatgtaggcatttcgaagtcttcgatcgggtaaccgaggacttcgactgtggaatcttccaggttggagacgaggtgttaaagtggtccactggggcgctttacgacaggatgtggggccctcacgcccgtgacactgtccgggagagggctgaccgagcattggtgcagatgatgaatgatgaagaagtcgaggacttcggtggccttgaaagcttgatgacccagacagagggcgtggagacgggggttgaagggcactcagtgcctcaagccggccctgacgaaaactctatagcggcggctgctcgggcgtag

SEQ ID NO: 2532 - DNA, 564 bp, Zea mays
  Peptide Sequence Number=SeqID_45907
atgtcttcttcctcgtctgatgcgagcgcatcgccggccgcgccgtcgtccaaggagaccttgagtgacttggcggtggttgagttgcagcccggccacaccgtggagtttaggacctcaaggattttcttgggccacatgctggagatgcagcggcttggttactttggtaacagtgtcgggcgagccttgggtgcagaagaggtccccgagcctgagggcgagttgatagtttttgaggccttttttgctgctggtctttgcctcccgacacatcgattcgtggtggaggtgttgaagaagaggaagataggggataagatagcacaatttggatcgtgcaccttcacgtcgatgattgggaagacttcggctgaggttgtggagatagtcccctgtgctaggaacaagtggggtaactggtgggacttttggttctatgtggcgcccaaggatgatgaaggcttgtcgagtctgcctccggccatcctgtgctcacattgttatgtggcatttcctcgattcaaggtggcggaagaagacgaagatgaagggcccccctga

SEQ ID NO: 2533 - DNA, 222 bp, Zea mays
  Peptide Sequence Number=SeqID_45908
atgagggtatggatcctcaagaagcagttcatgcagcttaaaacaaacaattatgctcacatgaaaaagcgctacgaactggacctcagacagagggcgggaaggatggggtacaaggtgcaaacatcggtcaagaattttcaggtatcttcggactcgaatcggtaccacagtgggagaagcccaaagaatacgaaggtcgacacagcaccgaagctgtga

SEQ ID NO: 2534 - DNA, 507 bp, Zea mays
  Peptide Sequence Number=SeqID_45909
atgccccctgcaccgccacaaggcatcccagctgctggaggagaccctaacggagacggagacgatgatgacgccggtggcagttcgagccacggcacggagctctcgaaagagccggagccggaggggtggatcgctagacccatcactcgcgacgccgctcgcggcggggtagctgatggcctcgacctgaagtactaccctcgccgttcgaccggcagtgctagagttgtgattgtctcgccagttggtgagggaaatcccaggctgaacagcatggtcaacctggccaccgtgctcaacaccgagctggaccacgcccttgacgagttgggcaaggtttgggcggaggttgcagaattgcgtgttgagtgtgcagcacgccactatctagatggtggttctcccgcccctatcgggattcagcacccttaccactcatcaccccgtggtcgcttcgactatggtacctcagactgtaggacccagatagatttggatccatag

SEQ ID NO: 2535 - DNA, 265 bp, Zea mays
  Peptide Sequence Number=SeqID_45910
atggccgaggtcgagtccgagcccctgggtcgggcgaggcggagaccgacggctgaggccagggcggagtccgagccccgggggtcgggcgaagcggagttcgccgtcttccagggcttagcccgagtccgagccctgggtcgggcggagcggatcggagcggcgcaggcggcgctgtcttttcgtcaggccggccagtggagcggcgaagtgacggcgctttatgctgatgggggttaccagctgagaattaggagccttgagg

SEQ ID NO: 2536 - DNA, 345 bp, Zea mays
  Peptide Sequence Number=SeqID_45911
atgacaaagtacaaccactcgagactgtatgggcagtcactcaatctgaactcgtacagtccaaaccccagggttatgatggctggggagcacggggaggataaggagggggaaggtcttctttggacatggcggtggcctgactccttaaagaaaaccattaagaaaaggagatcgctgatcaggagactcttaggaaacatagtaagaagtgggaaggaagtttgcgggcatgacgatgtgggagggggaggacatggatgggggacgatgtgggagaagggggaggatgcaacaacgatagattggcgtgggagggggaatgatgcaacaatggaggcttag

SEQ ID NO: 2537 - DNA, 474 bp, Zea mays
  Peptide Sequence Number=SeqID_45912
atgaaggccaagtcacaccatcaacaagaacaaggaggtacctgcaaaaattatgccacaagcaaggctgagtatactaatactcagctagacttacccgtcacctcatttccacttattactcaatgcagtacaatggatcaagcagtctcattagctgcgagaagcagacgattcgaatcgagttttatccttgcaaggcctcaccgccttggcatacaatgctccactgaccccgaccgccgtcgtgcagtggccgcacttgtacccaccatatctagaatgagagacccagtctcaggtcgcgtgagggataaagttcgcgcccggcttcactcagacaacgcatccccatggatccgtgtccatagaccatcatcataccgttatcaaaagtggatacaaccaattcctgacctcgcgcgagtgctagaaaaatcactcgacttctaccgagatcctgatttagcatag

SEQ ID NO: 2538 - DNA, 204 bp, Zea mays
  Peptide Sequence Number=SeqID_45913
atgggcggtactggattgccgacggggcaatcgactcgtcgtccactcccactctgtctcaagtgcgagcaaggtgcacgagctcgagcccagccatacgacctcgggacaatttggggcatcatccaacaacccttatggatcgcgcagcccatcgccgcaccagtccagccgcccacctcgttgagatattatctttgttag

SEQ ID NO: 2539 - DNA, 351 bp, Zea mays
  Peptide Sequence Number=SeqID_45914
atggctcatcggagttgctctggcccgctcgagactctctcaccgccattctcccctctctgcccgtggattcatggcctcttccccgccattgagttctccgtggcgccctcttcccctctacccaactccggtgaccccggagccaccctagctcgcgcctgtctcaactccggcgacttcaccaccgtggagaggagcggcgccgcttcgcgcactcagctggagagactgcatcgtcgcctgcacgaggagcaggagcgccgacgccaggagcaggagcagcaggactcttcccctttgcctcagcaagaggtggagtctaagaggcctccttcccctgcaccttag

SEQ ID NO: 2540 - DNA, 549 bp, Zea mays
  Peptide Sequence Number=SeqID_45915
atgtcaaaaaaagggagccaaagattaaatcgaagaaaggcgggggctggtggcgatgggtgggcagcggcgttagatacggaggtggaggaggaggcggtggtggcgtgggcgtcgtggtggccgcggcggcaagagccggaggagccatcgtcggaggagtcagaggaggatggggatggaggtgagagcacggcggacggaggcgacgaaggggccttgcttctggcggcggaactccgggtgcaaagaggtttgccgagtgccagggagcactcggcaaagaaaagcggtcgttacggcgacggggtgacggagacggcttctttgctgagtgtcaagggatctttgtcgagtgcccctgggacactcggcaaagagcccgccagggagggtccctatgccaggttctttgccgagtgctctgcgcggcacttggcaaagcgtgcctctttgtcgagtgtcagggacataacactcggcaaagtccctaaaccggtgcccaggtctttgctctttgccgagtgttatgacactgacactcggtaa

SEQ ID NO: 2541 - DNA, 732 bp, Zea mays
  Peptide Sequence Number=SeqID_45916
atggctgccccgcgaaccactcgtcccgtcgcattaactccacggcaaggcaggcgacacctctggcaggcgaagcgggcgacgcttctcctccgccatgatgaccgcgtcaaaaaagggaccaggaaaggggatactccgaaagggatccttccccacgaaggaagcgggccccgagccctcctactaatcaggggttcgaaggctggctcctcggaaggaggttcgaaggctggcccctcggaagggttcgacaaccgcctcagagcactcgggctccacgcccactactggtcagaggttcgaaggctggcccctcggaagggttcgacagccgcctcaggccactcgggctccgcgcccactactgatcaggggttcgaaggctggccccccgaagggttcgacagccgcctcagaacacgcagagcgagggatgactctgggtacgtccgatacatggccgaggctcgggctacactcccgaggaacagtagacccaggcagattcacgcctcgcccgagggcctcctcaagcaatgggcgcaccttcgactcgtccgaggcccagctcgggcaggcttcgcggtgaagcaaccttggccggatcgccacgccaaccgaccatatcgcaggagcattcaatgcaaggatcacctgacaccttatcctgacgtgcgctactcagtcgacagggccgaagtgaccgcagtcatttcgcccctccactaa

SEQ ID NO: 2542 - DNA, 684 bp, Zea mays
  Peptide Sequence Number=SeqID_45917
atgacgggtctcatgtcctatgcttccattgttacctgcgtaggtgctgcgaatgctctttcccgcgagggctgtaggcactttgaggccttcaaccagagtactgaggacttcaaccgaaaagtgttccaacttgaagacgtcacactaaagcgtttggctggggcattgtacgatcgaatctggggccacacggtcgtgttgtcgtccgggagagggcaggatgttggtgttgagacaggcacagaggagcagtcgtctcgggcagaggtcagccacgccgacctcgacgcggcggggacttcgcagccttctaccgcagagcaggtgttagccttccgtattattgaaaacggtgggaagagggacctcaccgaaatgttctggcaccaacgactgaagggcttcaaagagcaggatcttgatagaggaaaatgcctgatcttccatgagctcaccattgcagccgtggtccccttggcacaccagatagtccggtgcggcctagtgaccattggctctggccacgcatggtccattgattgcgcgctgatcccactgccgaccattggcgcggacgttgttggctcaccagacagtccggtgaattttagtcgcagcgtcctcggtgattctcgagagcagcaagttcgtcgccacgctagcctgggcaccagacaatag

SEQ ID NO: 2543 - DNA, 456 bp, Zea mays
  Peptide Sequence Number=SeqID_45918
atggagaagggcgttcttgatgtccagctagtggacaggccaagaccgcgagacaaaaccatgcagacagtggtcgatctcatcatagccaacgcccgaacactgagtgaacccccgaaggacccactaagccttgtatcggtcaaaggagtcgtcaatgtgcctcttgtgagtgagcacccacttgccaatcacaacgttgccacggctggggtacataaccaagtcccagacaagacgatcaacaagccgaaggacctcaatggcgtggtgagtcaccatcgcatggatgtgacgaggatcctgacggagaggagggtggcatcggagtcaaccacccagtcggtgatggccgcaggaggggtcaaggtcatcgtgttaaacgagttagcaagagactgttggtcccacgccctagcccgcgacatccaagacgtgtggggcgacaatggttag

SEQ ID NO: 2544 - DNA, 180 bp, Zea mays
  Peptide Sequence Number=SeqID_45919
atgggccggatcacacgcgggcctccattctggacgaggtcgcaggatgagacgacctcgtcacaggtcttcgtccggcggcgtatgagacgaaggcgagtacggcgaaggcctcgagcgaaagggtggcgtcttcgccttcgccccaacatttgccctccgagggaccagttcgactaa

SEQ ID NO: 2545 - DNA, 729 bp, Zea mays
  Peptide Sequence Number=SeqID_45920
atgccgacgccgctcaatgctaaacgccgagcagctcccagagctcccgttcgaacgctcgcacgcgcccccgcggtcccgcccaacagcagagagcaggcacgaagaagctcgggggatggcggcgcgttgaagtccctcggcggcggcgggctcggcactggtagcggcggtggttctggtgagccaaactcgcgcgaggaggtagaagaaggagcagaggaaaaagggaacgagtggaataagtcgacggccgaggcttttatgcatcctcagcgtggtccgcgtggtccggttctggcgggggagatccgccgagttcgccaggttgttgcgcctaacagcgcgaggaagacggagccgagctgctcgggcccaccagccggcgacagaacgacgcgcaaaggaacaaggccgtctgacgagcgggcccaaacgagcagagatcgaagcgtgcgggtaaccgacgcaaggggtccacgtgtcggcgccatggcgcgcagggatgtgggcgccgcctgcgtcgctccgactgctgtgccactcgatagagtgaggctgacagcagccaagtccggcctcgggtgccataggaaactccgcctcgcccgaccccagggctcggcccccgtctcggcctcggacgatgaactccgccttgtccgaccccagggctcggactcagcctcggctctggaagacgacgaactccgcctcgcccgaccctag

SEQ ID NO: 2546 - DNA, 483 bp, Zea mays
  Peptide Sequence Number=SeqID_45921
atggccattgactgggccgtaaactcacgctctttctcttgggactgtgaagccaaagctctagctcgagtagcagaacttagcacatccctcgaaagtctgcaagcgtactgcaacaccttgcatgaagaagtgcatgtattgtatgatcggctgcacccgaacgtgccacctgatgtggcagcaatgggagctggaccatctggaacaactcgtgctcatgatggggcaggtacatcccgcggcagggaggacactcccaatctgccacatgtacctcctaccctggccgaggctattgctgccttggtcaacgccatcgccgataacacacgctttttgcgcgaaatggcgggcaaccaatttcaacaacacgaaggaagagttccccctcaaggaccccgagatactacctatctggagttctccgaaacccgaccaccgctcttcgtcaaggcagaggaacccttggaagatgactag

SEQ ID NO: 2547 - DNA, 363 bp, Zea mays
  Peptide Sequence Number=SeqID_45922
atggacaggactgagcgccgtggcgagctggaagggcgcgtggccaccagagaagaagctgcgcacggcgatgggagctccggcgcgacgagcaaaggaacaccgagcaggacgcgaactagacgggaaattccggccgggcgccatggctgcaggagattgcgcatggggaaactcgacggctgggcgagcaaaggggagctgcgcgctgccatggaaccgagctggttgagcagggaaggaggggagggagcggctgagcaggaacgaagaacagaggggctgaggccggggacgcgcagggaggtcgacgccgaggggaaaagccttggcaagcagaatatcctagagacacagcggtga

SEQ ID NO: 2548 - DNA, 1110 bp, Zea mays
  Peptide Sequence Number=SeqID_45923
atggcgggcggaaaagagctcgccggagctaaggaggggtggcagaccagtgatggtggcatgagattgatggtttttggtattgactctggtaatgcaaacccccccccccatccccaggttgtcagcattgcaacccctgctcaggagaggatgaagccgtggaaggagaccaccaggagttccaagattacgatgagttttaggtgtgggttagcggcaacccccaatcggctgcctatggcttgtcttagacacactgcacggaagtctgtcatccccttcttaccttctcgtctcgtggagcgtccgtttcaccgtccagtgaccggtcagtccagccacttggagagactgcaccaccgcctgcatgaggagcagaagcgtcaacgacaggagctagagcagcagggctcttctttctcgctccaacaggagatagagtctgagttggaaggatgggttgctcgacctgtcactcgtgacgctgctcgcgggtgtcacttccacgatgcgctcgacacccttctacgtcgggcacttgaccggcgtacttggtctattgagtatcgctgtgtggtcttcaagcacagtcgcggggtctacccggaccgctgggaggcgacctgcttggtgcgccgtccggagaacaatctctggggtgctgaggtctgctcagagcactattccatctctgagcgggactcagctgaggcggccatgcaagatgccgcacggcgtgcgctttcgcactactgctcagtgctcggtggggtagctgacggtctcaacctgaagtattacccctgccgtccatctggtagcacaagaggcgtgattgtctcacctgttggtgaggacaatcctaggttgagcagcacagtcaacctagccgctgtgctaaacacggagttggaccatgcgctagacgagctgagtagggctcgtgctgagatcgcccacctgcgggttgagcgcgcggaacgtcgtcacctggatgatggttcccccgctcccatcgggactcagcactcgtaccgctcacctcggcgtggacaccagtcttatggcaaccccgactgcaagaccaagataaatttagaaccatag

SEQ ID NO: 2549 - DNA, 1557 bp, Zea mays
  Peptide Sequence Number=SeqID_45924
atgaacgtatgtgagctcactcttgctgtctcacacccccccacaggtcaagaacaggtaccgcaggatgaggcacatggaggatgttgtgatgagttcgtgagagaacccttattatatagtaaagatgtgacattcgtttctgtaccactattcatcatatgtgtgagacttggtcccagcacacctggtgattattttgcgcccgagttttggacccttaaaacccgggggtcagacgtaggttcccaacgcgtgcagaacatcctgcagcaggttagggaagtgcctgtttcgaacattgagagtcgtctgggtcgtcgcctccgggagcagggtcttggactgctggtgctggcgatgatgaagaatgactccgttctccacccgaatgtgagggagacccacacggatttcctcgactaccactgggtagacaggaacttgccgtggcggagggatgaagttggtgttgatccgagtggtttgaatgtggtagtcgaagtccctatggatctccctcgcattcgtgtggagatccgagtcattctagaggatagctcagaagagtttctgcctacacccatcccgttggcagaatcactagccttcgcagctggatcgtcatcttcagcaccgccaacaccagcagtccaagcccctgctcccagaggcaatgacccggacgactctcgtgatgatgatgaagacaacgaaagtgaagaagaagaagaagaagatgagaacatcaaggaggaagccaacggtaaacaacaggatcacttcgtggggatatggcctgtcaccgaacattatacatcaatgttcgagatggggcacttccctaacctgctgcaggatgttctacatgcgttgggaacctactccgacccctgtgatagagggttcaggactctatcagctcatgagtctctgacgccgctattcacctacgctccttcggtcagcgatgctgctaggcgaactctgtggtccctcatccacacctactggcagcaactgcacaacatgaagtacaggcatcttcctttgcgtcttcgtggagaaagccagaccaacattgttctaggtggagctgaagaagatcgcctcaacaccctagttggtgtggtggtaggtattaacaccgacctggacagtgctaccctggacctctccagggtacacttggagctagaggatgcacacacaaggattgcagccctggaagctcaactagaaggaagggatctctctgaagcccaagaccctaccatggcattgtccctccccgcaagaggatccgctatgaagaaccaggatccatcactaggctgctatagatttttagttacattaattgaaggtgccgcgtcggattggtgggatgccttcaccgcggcacatgctaatgctgacgccatatctgggcaggaatttcagctttcacgttacgccctagaagaagtggacactgacgagaagcgccaagaacgattcttagttccgctccggaaatcagagtgggaacaacaactaccaagtacaatgctctag

SEQ ID NO: 2550 - DNA, 60 bp, Zea mays
  Peptide Sequence Number=SeqID_45925
atggcttcaaggctgccattgatggcgtccatcaatggggagagaggaaatgatatttaa

SEQ ID NO: 2551 - DNA, 327 bp, Zea mays
  Peptide Sequence Number=SeqID_45926
atggccagcccaccccagtcattccgagtccttgaagctttgccagaacccgtgaagctccccaaaccctcagatccagcagaacctcgccggagacctcgaatcacccgccggacttctttcgctcaccggcgaacgtggaccggctatattgtagttcaagcctactttaaaaagcataaatggaaaaaggggaaagagagaattaacaaagattgcaacctcgctgacggagagtacgtgctcattcccgagcaaggagctgtccaagaggaagttcaggagcgagccaggagcctgccaccgaggatctccccgcagccttag

SEQ ID NO: 2552 - DNA, 999 bp, Zea mays
  Peptide Sequence Number=SeqID_45927
atgggcatggctttctccaaccaaattgttgagcagatacgaaattgttgggtacaaattgctgagccggggatgcgatcgtacccgacgtggatggggcacgcggacgagattgtttcggccgggcacgcgggatgtcgtctgcaatttcgcatgcgagcccgcgccgatgggaatagggtaaagaagatttgccaatccgcgcgagaaggtgcttatccttaccagagagaaggtcgtcgccggcgtgtggtgagggtcgcaccgtcgcgtgctgaaggtcgcgctgtcgcccgcgggagaggaacgtgcgggtcgcgctgtcgcccgcgggagaagaacgtgcggcctcgtgcgtgggtatcgtttcagaggcagctggttgggcctcaggtggttgggccacaatcttgtttggacgcgggaagaggcacgtatttgcgccaaaatcagttttctgcgcggggagagctggattcaatgtttaacgaccacagagtgctagtggcccgtgaagctttccaagccctcggacccggcagaacttcaccggaagcccgagatcgacctcaccggacttcggtcgctcgcctgcacgcgtggaccgagctctccgattgtaatctcgtcgacggagtgtacgtgctcatccccgagcaaggaactattcaagaggaggaccaggagcaagcttctgaggctgctatcgaggatctccccgcagccccagctattgaaggcaagccccgctatggtgggtacaagtgtggtcactgcacggcggcagccggggtcagtggagcattgtatgccaaggcggtgaggcctggacacgaacaaagaatcgatggggacggttgtcatgtgagggttcggagtaccctgacatgccgtgcacttcaggaaatggttgatggtgtgacttggcctaccaccctgccaccgggttggacggtcgagtgggatgctgctccggcaggagaggagcacgatgagtag

SEQ ID NO: 2553 - DNA, 1374 bp, Zea mays
  Peptide Sequence Number=SeqID_45928
atgccgcgcacgaagaatccgtcggcgtcagggggtggtgatgatgaggaccctcgtcgccccttcaggcaggtgaagggcaagactgtctttttggagcagcaggaaggccgcaagaagcggcgttcggacagagaggctcgtgcagcagcagcagctgcagcagccgctgcgcaggcagcacttggagatcagccggatgttccatccgatcagattgcattccgtgctcgtcgtctcgcctcccggtctcgctcctccactcacacctccgcttccactccgccacccaccctgcctactcccgtcactcctattgctccatccacctccacagccatacccactaccagcactacgccagcttccactgctacccctgctcccgcccccgcttcagctcctcctgttcctccacctcgattccgggagcgtgatgagactgaggtccgtcctctggtttcggatcctcgtctgtttgatcttcagcgtgctactgtagcacgggtacgtcggttcaggtacgtacccgtggagtcttggctacctgctcagagagacccagcagcaggtgttcttttcagcacacggattcaggagtcattcttcagagctcagatgtctgctcagatagcgctgcgagtgcaccgcctattggatcttccagcttttttgctagcagccggtgctgagtctgaggcgcatctcacctatctgcctggcctcctgacccttctgactatcagcggcagatatgttgaggagtgggtccgcgtcttctacgcctccgtttggattgacccggatcatcattggatgaggttccgctttgagcgcgaggatgtcacgatcactgccacctctactacggcacttctgatcctcctcgtcgccctcacggcggtgtggctccagggacagctcacgtcgcggctctgttccgcccgcctttctcagatgggtcgcgacgttctccagcagactttactacagcagcgaagtacttatatgagctcatcagacggacactcctaccgaggatgggatacagggaggctaccacacatatttagctttggcttcttgatcgaggacaccgttctggatgggattcgtgctcgtcggcagctaccttacgctcactacttgtgccacatctttgcgcagctgatccagccacctcgatttcagagcacccttgaggcctcacgccttgtatttggatcttaccgtcctgctcctgagattccagtgccagcttctgcttctgtgtttgacactcaggccgaggatgcagctcttcgacagtttgacactcagggtacagcagctgatgatgatgatgatgatgattttggggttcctcctccgtga

SEQ ID NO: 2554 - DNA, 657 bp, Zea mays
  Peptide Sequence Number=SeqID_45929
atggcgcaccggacagtccggtggcccaccggtgcgccaacggtgcgccaccggtgcgccaacggtcacttccaacggctagttctgacagctagccgttggactcatggcgcaccggacagtgaacagtccactgtccggtgcacaccggacagtccggtgcggtgtccggtaaaaacactgccgcggaccagcctggccccacctggcagagggtgcaccggacagtccggtgcacaccggaccgtccggtgccccaaagccagaaacagaggaggcggcgggggcgcatccggtcgaggtcgaggtagcagagcaaacgccggcggagggtcagagtcagtctcggatccaggatctgcggtagaagctggagctggtactgactcggacggaggccgcgctgcaggagctaccggaacagaagcggtcacagatactgccacaacggtagtggtaacagcagatgctggtggcactggcggctgcggacaaacagagctgagaaccggagaggtgaacgccaaagtgaccggccagagcggagaggtagcaacagggggtccagacaaatcgaaggcaccattggagcgtgaagcggaggaggcggagctgactgaaccggaggtgctgagataccagaatgctgaagcatga

SEQ ID NO: 2555 - DNA, 882 bp, Zea mays
  Peptide Sequence Number=SeqID_45930
atgcagcatccggtgcgctggttgcgtgacgcgtgggcctgggcctccaagctggcgtgtcagaagtcggagaagcgcgtccacctggcgcggttgcatgccgcctgcatggctgcccgcccccttccgcccgttggtctgggcaaaagtggggggtcgcttcccggctgcacccctccaccggcggtcacccaagatggtgacctccagcttgatggtgggggaaagcgagccgggctgcagcctctgcccctccctcagcctcaaggattttcatcaccaaggctggggaggggagagtgccgagttggggtcggcccctgcgcgggcggtggcccgctccttcactcaggcgctggcagctgcagcgtacccggtcttcagacgcgagtggcttcggagccgctcgcggcgccggcgtctgccacggcagctggaagaggttcttccgcaggcgcgatagccggggctggccacgggctgacctccaactcctcggccttctgcccgtccttgtctcacaagttttggcatgggcgggggcctcctggcagcagcatctgccctgaggtcagtgctgccgctgttcaaccccccggagcagaagtcgtcgtcgtcgtcactgctggagcagcggggccgacgccggagtcgatcagccgaggcctcgggtcgggctggcgcccttggaagatggtcggccgaggtcccaggggtaaccggtcgagtcgcctgctcgggccggattcccggagaagtccctggaccgcgtcgccgtccgaggctgggtcggatctcgctgaaggcatcgtcgatgccgagggtgctatagcccccttccagcgtgaagacccgatcctgcaggatcagattaccttgtag

SEQ ID NO: 2556 - DNA, 369 bp, Zea mays
  Peptide Sequence Number=SeqID_45931
atggcgcttcctgttgacgtggctggcctgtgccctaggtcgggcgacgtggaggctcctccgaagccgaggtcgagtctgtcttccatggccgaggccgagcccgagcccctgggtcgggcgaggcggaggttgttcggcagaggccagggcggagtccgagccctggggtcgggcggagcggagttcgccgtcttccggggcttagcccgagtccgagccctgggtcgggcggagcggatcagagtggcgcaggcggcgctgtccttctgtcagaccggtcagtggagcggcgaagtgacggcggtcacttcggctctgccggggggcgcgcgtcaggataaaggtgtcaggctacctttgcgttaa

SEQ ID NO: 2557 - DNA, 1215 bp, Zea mays
  Peptide Sequence Number=SeqID_45932
atggcggagaacgtggaagcagtcgggtcggcggagagcgaaggagcagaaccgtcgcgcggagaaggtagggttttcgccggtcgccgaatgcagcggcgcgaatattggagcgacgattggggaaaccgagggcgcgccgctcaaatgccgcttgcgactggatcgacagcgagcggcgaggggttggaagagtcgtcggaaaggggagcggagtcgccgggatggaagaatcgccggagattcctggagtcgtgcgggggttggggttttgcggttatggaaactgagccgggagcaaaggagctaatcgcgggatcacgtaggtatttatatggaaaccgaaagcggatatccattggccatggcgataccttgcgttgtagcctcgatgacctgcttgctgatcgcggcaggcagccacgcacgggggagccggcgaccggcgtcgtcccgtgccgccctcgaaagcgggagcggcgtagcgatccgatcactctggaagccaaggccaacagagcagaacagctgtcgggcacgtgcgggcgaggacaaccagacgagacgtgccgtccacgcccgggcccccaccctaccgccaaaccaaaccaccgctcgtcgtccgtccactccatgtctcgatcggtccaatcgcccgccggcaccagagcccggcctcgcctcgacccttttttcctcggtagcgggcgcccttttcatccacgtccgcgcaaaagcgcgctccccggcccgtaccgtcacatgacccccccgccgagcgccgcgccgcgacgagatgcgttggcagcctcggctggccggccggcctatttattcccaccaggccgggactcgccctctccgcgcccgccacgtaggaacagctcgctagctagcaggctagctggtgcggctgcctcttcgttcgtgagcgccatggaggagaggcggaggccccgcgggagcgccagcggctggaggcgcccgtcgtcgcgcgcggccggtgctgcgctgcgccgaaaggtgcgggagctgcgccgtctcgtgcccggcggggaggaggcgcccgcgggggccctgcttgtccgcacggccgactacatcgtggggctgcgggctagggtggatcttctcagggcactcgcggccgtctacggagtcggcgtgggcgccgtcgtcgccgacgccgccgacgctgatgcgtgcgcttcatga

SEQ ID NO: 2558 - DNA, 111 bp, Zea mays
  Peptide Sequence Number=SeqID_45933
atggccgttggaagtgtgctgtcgcatggcgcaccggacagtccgtgctcaggaggagaagctggcaacatggatgacttcgaggagttccaggaatatgacgagttctag

SEQ ID NO: 2559 - DNA, 402 bp, Zea mays
  Peptide Sequence Number=SeqID_45934
atgatctccggggtgcagaggccttctcatagcactattctatcactgagagggatactgccgaggcagccatacaagatgcagcacgacgagcactttcctagtattgctcgttgttcagcgggtgctggaggtgtgattgtctcaccagttggtgagggcaatcccaggctgagcagcatggtcaacttggtcaccatgctcaacacagagttggaccacacccttgacgagttgggcgagatgtctaagaataggcgcagaggtgcgaggcgtgctcagcctgaacagcaggcaccccaagaagaagcagccccgcaacagcttttgccaccgccacccccgatgaccattgagcagatgttcttgatgcagacccaagcagtccaggcaattggttag

SEQ ID NO: 2560 - DNA, 900 bp, Zea mays
  Peptide Sequence Number=SeqID_45935
atggccgctttgcgctatggagttggggttgaagttatgcagctccaccccgtagtagtgcgggagcgcccgcatgaagcggctcgctggcatcccaaacccccgctcatggaaggggatgagactgaccatgtaccccggcggcggagtcgggtcggcctcgctcctgggggccatccactcaggctgcggcccgccggagagaggacggagcaaaccatcggtgacaagggcctccagctcctccacagtaacggtggagaaaggccacgggttgcgcggcggaacgacggtcgccttatcggccatcgccgagcggaagcggtggaggcagaggggatgagggatcgagaaaagggggatatttcaaaaggatccttctcagcgaaggaaacaggccccgagccctttactgatcaggggttcgaaggttgcgccctgcggggttcggcaaccgccccagagcactcgggctccgagccctttactgatcaggggttcgaaggtccagcaaatcacctgcagatacttttggagcgcgcctctgggccactagccgacccttatcgaacggggctcgggcgtccactcggatcacctgatagcaactcactggaaacaccatgttcggcgcccaccgagggtaacatggcgctttcccccccttcctccttgcggaaaggcgacgaaggggcatacaataaaaagccgagacagtcctcgatcgtcctctcgctccgtgcagaggctcggaggctgctctcgcaccaggctacggccaaattatcgaccacgtcgacaagccagcttaaaaactcggagcctaaccatgcacccgggctgcggccaggccgcatgagagaacaacaaggtcgaccgaggcatcacaaaaagaattaa

SEQ ID NO: 2561 - DNA, 1128 bp, Zea mays
  Peptide Sequence Number=SeqID_45936
atggaggaaggatgtgaggggtgtggtggatgggagtggaataatgaactagttgtgggagtggtgtggaaggaggccctagagtcgaccacccaatcggtgggagagggagacagtggggaggccgtagggggagggagggaacgagggctcaatggccagggaggcgatcactacacgggggaagacaaggggtccggacatgtgatggccggcctgggggtggagttcgacgcagtcacaaaggacagggctcatggtgggatcgaagtgcacgaaggtgcctcggacaagctggccatcgttgagaaggacgcgcacaaccattccgacggaaacgacccactgcggcagggcaggagggcgcgcagggggagcaggctgcttcggcgaggccaacccacttgtggcacggcttgggaagagcgggcacggcgccggggccagcgcagcgggataggggccagacggcggccgacggtggacgacgaagatccgacgggtagggaccgatgcaggagggccgcgacgctgctagggacggggcgcggtcagccggtgcagggaggtgcggcttggacagccgccgaagcacgcattgcggcactgcagcaggaagggcacggccgggtgcgcggcgtcgggcgcagcacagcacaggcgaggcaggggcgcgggcctcctggcgggtgctcctggcgacgcctgggatccgcgagcgccgaatccgctcgacgccgggtcggagggaaggaggcagggagcgcggcctgcagtggggcggcgcgagccctgtcagagcaggggcgccggaactctggcggcgcatctgggcggcgccctggggcgggcgggcgcggcagagggcggcggccggccggctggcgagggtgggggagaggcagggagcgcggcctgcagggggcggcgcaaggcaagtccgtcgggggagtggcggcgcagggcgcggctatcgggggagggggcgcgacctgcagtggggcggcgcgagccctgtcggagcaggggcaccggaactctggcggctgggaggagggagggagagagaggcagccggcggctgggaggaaaaaaaactgccggctgggaggctctggtaccatgtag

SEQ ID NO: 2562 - DNA, 1980 bp, Zea mays
  Peptide Sequence Number=SeqID_45937
atggacagtccggtccgagggtgcgaactagacaatagatgggttgtcccttataacccatacctccttcgtctcttcaactatcacatcaatgttgaggcatgtgggagcttcaaggctgttaaatacctgttcaagtacatatacaaaggccatgatcgtgcgtctgctgttatgggagatgcaagcaaggcagatgatgatgttgatgagatcaagcagtatagagatgcaaggtgggtgactcctttagaagccttgtggaggatatacgactttgagcttagtcagatatctccacctgtgatgcagttgcaactccatcttccaaacatgcacatggtggcgtttcacgagcgacaaatggtcgagcgagtcgtcaaccgtccaggtgttgataggtcgatgctcacagcatattttgaggcgaataagctacacgaggaggctcgtggcatcctatattgtgacttccctgagtggtacacttggcagagtggtaaggacaaagtatggcaatggaggaaacgagatacaggtggacaagtcggtagaatagtctctgctcatccggccgagggggagcgctactatcttcgtgttctcctaaaccacgtgactggcaccgcctcctatgtggatctaaggacaattgatggtgtcaccctactgacttttcgtgaggcaacagaaagaaggggactgcttgagttggacaacacactagatgagtgtctcactgaacgtgctcttttccagatgccatcggcgctgcgatggctttttgccacaatattggtgtactgtgagccaaacgatgtggctgtactctggcagaaacacaaagattctatgtccgaggactatcaacacaggagtcagaacaaaactcatgttgagcagatggtattgattgacattaggaagatgctgcagtcaatgggaaaggacataaagacattccctctacctcctatcatcgacgcgtatgacgatgctattggtactgctagggaggtttacgaggaggaaagtatccaaccgacagcgggagatgtggctcttaaagactctcttaacgaggaacagagggccgtctatgataagattatgtctgccgttgacaccgatcagggcggattgttctttgtggatggacctggtggcaccgggaagacttatctatacagagtgctgctcacgacgctacacaaccagggcaagattgcagtggaaacaactacatctggtgttgcggcttccataatgcctggaggaagaaccgcccattcacgcttcaagataccactcactattgacgatggcgctgcttctatgactaagagacaagtcgtggaggcactcgacaatagcatgcgcgatataatgggtcgccccgcactgccattttggtgtgggagtgacagtgatcttgacaacctaatagactttgctttcccaaatctcaacaaaaatatgtctggttccacctacatcacttcaagggcgatactgtcaacacggaacgatagggtggatatgataaatgttaagatgatcgattgttttcaaggggagcatatgagaaatagcattgacacagagattgtactgggtcaacacgttggaaaacggattttcctaccgcatatacctctgtgtcccttcgatgaagagatgttccctttccagttcaaaagaaagcagtttcctgtacggcttagctttgcaatgacggttaacaaagcacaaggtcagactattcccaatgttggtgtatacttgcttgaaccagtgttctctcatgaccaactatatgttgctctatctagagcgacagcccgatcgaacataaagattcttgtcatcccagccgtcgatgggatgaaaatgtcaaggaagggtgtaaagaaaaaccccaccatagattgtgggacatataccaagaacatcgtctacaaggaggtcctaacaaactag

SEQ ID NO: 2563 - DNA, 666 bp, Zea mays
  Peptide Sequence Number=SeqID_45938
atgtcggcgctacagaaagttgtagcagcggtagtccacgatgtcaacgctgagggctgggatcgaggattggagggttcctccagggataacggtggtccagcatttgaaactgattttgcagaccaattgaaaaacttcagtaagatgggtcatggtgttagcagtgggggtgttttgcttaagtcttctggatggcacactcctgtcgtaccacaaatcagaaccaatgcgtcaataggcaccgtagttgataataatatctgccacccaacagaatttgatttcttcctgtgcatccatgctggggccaaggataggcttcaagagaggctaagaaagtctaagtgtttaggacttgaagaggctgcaaagaacaaaggttttgaccttggtaacgtcgatgccatgcagacggacatggaggttgtgttcgaggtgctgaagagcctagaggacgttgaggagctggaccccgagtggctgcatgatcctcacaagctgcacacgtgcgtggagaaggacacctccttgtcggactcgtgcggcgtcgacccattcgggctggtggtgatggcgcccgaaggcatgcagagcaggagcagatcaccgtattcttcagggagtgaccaggatctcagcttctcgatctatgcttctttgtga

SEQ ID NO: 2564 - DNA, 492 bp, Zea mays
  Peptide Sequence Number=SeqID_45939
atgaagctgtggaaggagacttccaggagttccaagattacgacgagttctaggtgtgggttagcggcaacccccagtcggctgcctgtgaaggccgcgttatctacgtttcttttccgcactttgatttattatggctcgacttacacacactgcacgaaagcgccccctgcaccaccactgggcgtcccagcttctggagtagctgctggaggagacccagacgacggagatggcgacgacagctcgagccacgacaccgacttctctgctaaccttgagccggaaggatgggttgctcgacccatcactcgcgacgctgctcgcgggtgtcacttccacgatgcgctcgacaccctgctacgtcgggcatttgaccgacatacttggtctgtcgagtatcgctgtgtggtctaccagcacagtcgcggggtctacccggaccgctgggaggcaacttgcttggtgcgctgcccggagaacagtctctag

SEQ ID NO: 2565 - DNA, 318 bp, Zea mays
  Peptide Sequence Number=SeqID_45940
atggggaattccgcctattcacccccctctaggcgactttcaattggtatcgtagcctggtacttcattagcctaaccgctcgaagtgatgtcgggagatcacgcctagaaggagatcgtgatcggcgagaagcccgccacaagccatggaaagactccatcgggagagtccggcaacaagatgaagggatccccttcacacaacaaatcgcatcggaacagcgaaaagaaaaagaagatgaagaaggtggtctactacgagaccgattcttcgtcgccatcaacatccggctccgacgcgtcgtccgtcacttctaa

SEQ ID NO: 2566 - DNA, 537 bp, Zea mays
  Peptide Sequence Number=SeqID_45941
atggcattagcctatgcaccagccaggctagtccacccatgcattggcatgggcatggtgtccaagcagcacccaagaacactgccgccgtcctcctgctgcctacacctccaccacatcctctaccttaggcccatcgccagcagccaccacttggcgcgccactccgtcgatgtcaccaaggacgacaagccgcttgagccgccgccaccggcggctgcagagacagagagcacgcagcagcaggaggacgaggacggcgggccaaagctggacccgaggcggttcgaggagaagttcgtgatgctgaacacgggggtccatgagtgccggtcctgcgggtaccgctacgaccaggaggcgggggacccatcgtacctggtgccgccgggcctccccttcgcgcagctgcccgacgactggctgtgccccacctgcggcaccgcgcagtccttcgagagcaagagcgtggagatcgccgggttcgcgcagaaccagcagttcgggctgggcgacaactccctcacctccggctag

SEQ ID NO: 2567 - DNA, 684 bp, Zea mays
  Peptide Sequence Number=SeqID_45942
atggtgtttatttcgataaacatccgagagacgtactggtatcttgccatgatccatgcaagaaatatggagatacaagtgctcgattcacttggtacttcacaagaccgcaaagacgtcactgactctattaaaggattgcaaagacaaattgatatgatatctcaacgtaaggagttaaaagaccacaggtggccagacctccaagttgcttcttggccgctcagagaaatagacatgggatatgcaaagcagacagataggatgacatgtcacactttagagcaaaaaatggctgctatattactatcttcagacctgaataagagaagggggtgtctgttatacaaaaatgaaaaagaagttgactctagaagtccatcagatgttgagatattagaaaacccaacagattctaaaaagaggaaactactccacgtgcttgatgatagcgaagtagtgtatgaagatgagaaaggccctattactcaagcagacttgcaaatgtggtttgttgatgattgggataaaagtgctcttgtaaaagtctctactgatgggtgcaccaatgactttttaatggttggtctttccacaaaggacatgccagtgaccaaagccgattcaatagatgttttatgtgattatatcatgacaatagaagacgatacgacactagagtaa

SEQ ID NO: 2568 - DNA, 1329 bp, Zea mays
  Peptide Sequence Number=SeqID_45943
atggacgatgagctggacgacatgatggcgccgtcgttggatgtgcatgcctgcaggacggcctggtcgctgcccgtcagcggagtggacagggctcatttaatgctaaggtggcacatcacctgccagcagggtggacagggctcatttaatgctgaggcggggtctggcactttcccgtgggggtccggacccattgttgataccttggagtatattgcctcctctggtcacgtggtgaccccggagctgcccacgtggtggggtcgggcgctttttaccgcacgactaaagatagccgcatggacatcgtgcccccatactgtagtaaggggtacccctgattcatggtacctacagtggcccccaagcctgcctcaggggaggaaacgagcctgcaggtgggaccaaagcttgattggcagttggcacgctgcttccgtgtgcttgctgacgaaccggcacccatggaggatgactcatgggcccgggcccccgtgcagtgactgggttgttggtttcagcggaggtgaagaggtgcactaccgcaggcggtggcgtgctcctcacgcggcggttcgccttctccgcacacggaggccgacgcccaaggagtatgactcgtgggcccaggcccccgtgtcagagactggtccgctactagtttcggcggaggtgaagaggcgcactaccgcaggcggtggcgtgctcttcacgcggtggttcgccttctccgcacacggaggccgaagcccaaggagtatgactcgtggaccccggggccccgcgccagaggctgggtcaccctggcacgtgtcaggcgagatcttctgcggcatctcagggcgtcagtgggggaatctttctttaaaaagggactccctcgagcgtgtcgccatggccttgctagaccttcccgagtgcttccagtccgaggtggcactcgacttggtgcgcaacctgcttggatggggtgcaccggcgttcgctggaaggatccgtgtcggcgcctctcctcacggcgaccttgccgccagggagttcgtgcttttcgtctccaacctctcctgcaggttggcgctgtcgatcccgtctttcttcgtgctgctgctggaggagctcggcctccaacctcagcacttcacgccctgcttcatccttcaggcggccatcatcgcctacctctgtaggatgtctgtgggggcgacgctccttcccgcttcttcctccagcattcggagggaaggatacgccgcctgggaggtcgtacaagatgtcgcagagatggtggccgcgtgctaccagcatgaccctactgatgtcgagtag

SEQ ID NO: 2569 - DNA, 387 bp, Zea mays
  Peptide Sequence Number=SeqID_45944
atgggtccggacccccacgggaaagtgccagacccctggatacacagaccggacctacgggcgaggttcaagacctccacagcgaccaggccgtcctgcaggcatgctgcgacatacactatgctcatcatcactcgtgcgttgccagggaagcttccgctgcacgccaatactacaaagaccgcggatatcaaggtgtactatcttgctgaagagcccgaggtgcacttcgtctggcagcccagccaagagtcatcgatactcgacatgtcgcgcgcgttcgacgacaactatattatggactgtggcgtcatctcggcgtcggaggtgacacagaggaggaccgacaacaatgatcagttcgtcatcctccccaccgtcgggtag

SEQ ID NO: 2570 - DNA, 612 bp, Zea mays
  Peptide Sequence Number=SeqID_45945
atggcgttagccgttgcagcagccaggctagtccacccatgcattggcatgggcatggtgtccaagcagcacccaagaacaccgctgccgtcctcctgctgcctacacctccaccacatcgtctaccttaggctcgtcgccagcagccaccacttggctcgccactccgtcgacgtcaccaaggacgacaagccgcttgagccgccgccgccggcggctgcagagacagagagcacgcagcagcaggaggacgaggatggcgggctaaagctggacccgaggcggttcgaggagaagttcgcggtgctgaacacgggggtccacgagtgccggtcctgcgggtaccgctacgaccaggcggcgggggacccgtcgtacccggtgctgccgggcatccccttcgcgcagctgcccgacgactggcggtgccccaactgtggcgtcgcgcagtgcttcttcgagagaaagagcgtggagatcgccgggttcgcgcagaaccagcagttcgggatgggcggcaactccctcacctctggtcagaagggactgctcatctacggcagcctcctcatcggcttcctcttcttcatctccggctacttcctgcaatga

SEQ ID NO: 2571 - DNA, 612 bp, Zea mays
  Peptide Sequence Number=SeqID_45946
atggcgttagcctatgcagcagccaggctagtccacccatgcattggcatgggcatggtgtccaagcagcacccaagaacaccgccatcgtcctcctgctgcctacacctccaccacatcctctaccttaggcccgtcgtcagcagccaccacttggcgcgccactccgtcgacgtcaccaagaacgacaagccgcttgagccgccgccgccgccggctgcagggacagagagcacacatcagcaggaggacgaggacggcgggccaaagctggacctgatgaggttcgaggagaagttcgcggtgctgaacacgggggtccacgagtgccggtcctgcgggtaccgctacgaccaggcggcaggggacccgtcgtacccggtgccgccgggcctccccttcgcgcagctgcccgacgactggtggtgccccacctgcggcgccacgcagtcctccttcgagagcaagagcgtggagatcgtcgggttcgcgcagaaccaacagttcgggctgggcgacaactccctcaccttcggccagaagggcctgctcatctacgacaacctcctcatcggcttcctcttcttcatctctcgctacttcctgcaatga

SEQ ID NO: 2572 - DNA, 516 bp, Zea mays
  Peptide Sequence Number=SeqID_45947
atggcgttagcatgtgcagcagccaggctagtccacctatgcattggcatgggcatggtgtccaagcagcacccaagaacaccgctgtcgtcctcctgctgcctacacctccaccacatcctctaccttaggcccgtcgccagcagccaccacatggcgcgccactccgtctacgtcacaaaggacgacaagccgcttgagtcgccgccggcagcggctgcagagatagagagcacgcagcaggaggaggacgaggacggtgggccaaagctggacccgaggcggttcgaggagaagttcgcggtgctgaacacgggggtccacgagtgccggtcctgcgggtaccgctacgaccaggcggcgggggactcgtcgtacccggtgctgccgggcctccccttcgcgcagctgcccgacgactggcggtgccccacatgcggcgccgcgcagtccttcttcgagagcaagagcgtggagatcgtcgggttcgcgcagagccaccagaaatcattgtga

SEQ ID NO: 2573 - DNA, 3747 bp, Zea mays
  Peptide Sequence Number=SeqID_45948
atgctgatggaccctcctgttatgcaaatggactgcaagttgaaaaatgctatggataaaacaccacaaatcgcctatgataggaagctgaccgtctcacatgatgattatgggtgggcaggctctgatgtccacctaaaagatgatacaatagggacagaactaagagagaagaatagcgacagttcttactccgatgtaaaacttcagttaaatttaagtgctggaaattataatggcttgcaaactgatgattatagctttaataaacagagttttggtaagaaggatatgcatcatcctcaggaagagatacattcttctcccaatacaatgtcattaccaagtccatgcagactcaatggagacgtcacaccttgtgaagcggagaaaatagcagaggatcgtggcaaagtagatgggattgtagatgctgtaagtaaggaagtcaaaactgacttggtaggatgccatgcacggcaggaagaattgcaatgcacgctccaagatctatcagaaatagcctgcagtattgatttagtacgtaataaatcttctccacaagaagagaagaagtctgtttcccctttgaatgacatgggccataatgtggataacaatagttgtaatggtgataccaattataaagggcaggagctcaatatggggaatgttggagatgaggatcatgctgtagcactttgggtgaaggaacttcgacagtccattcttgggaacaagcttaaggaattgcgggatgcatcagtgcagcctgaattagtccctgagtggaagacgtggaaacaagaattgctgaaacagtacttttcattacatcctgctggtaatgttggcaacttcgagaaaactaattgttacgacgatccagctttagatcaacaaggtagtagaaagcgtccaaaacttgaggttcgaagaggagagatccaaattttacacatgggtgaagctgactacaggactccaactgaggacccaaaccaaaataagcttcctagtaactctgtcatgcatgaaaatataggggcattaggagcaacaagtcaaaaaaatgctgtcatgttccctggaagttctggcaccaatgagaatacaatatctggtagttccaatgcagctttacagaatgctagacttgatttagattcattcaagagctctcggcagtgttctgcgtacattgaagcaaaggggaggcagtgtggtaggtgggcaaatgatggtgatatttactgttgtgtgcatcaaagtatgcattttcttgatcattcttcaagggaggataagacacttaccattgaagctccattgtgtagtggaaatttgttggatccatctgaggtactccatatgggcgaagaacctccgaataagtgggtggaaggaatttctaagtcgcaagcattgtatagcatagacttagaaacagacaaaaatgtccaggctgttgtacaagtgaaactgatgcccactgtggctatagagaactctggtgaaaaaggttgtgcaatggagaaaactgatatgtgtgctgcgtcaacgtccatgacaaatactgatgatacttctctttgtattggaattcgctctcatgacagtattgttgaatgccaggattatgccaaacgacatactctttattgtgagaagcaccttccaaagttccttaaacgtgccaggaatggaaagagtcgactcgtttctaaagatgtctttgtcaatctgttgaagggctgctcatcaagaaaagataagatatgtttacaccaggcttgcgaatttctttattggttcttgagaaacaacctttctcatcaacgcaccggtcttgctagtgaacatatgccccagatactggctgaagtgtcgaaaaatccagattttggagaatttttgttaaagttgatatctactgagagagagaaactagcaaatatctggggatttggtacagatagatctaagcaaatatattctgaaaacaaagaaggatctgtagcgttgcaggaagagaaaactaatctttcatctggtcctaagtgcaaaatctgtggtcaccagttctctgatgatcaagctcttggattacattggacaactgtccacaaaaaggaagcccggtggctgtttagaggttactcttgtgctgcatgcatggaatcatttaccaacaaaaaagtccttgaaagacatgtacaggatgtacatggggctcaatacctccagtattcaattctcattcgatgtatgtcatgtaacagcaattttttgaacactgatctgctataccctcacattgtttccgaccatgcccaacagttcaggcttcttgatgtccctcagcgaccaagtggtcaatctgctcaacaaacagaagggatgagtggtctgcccctttatgatagccacaacgttgaggatgaaaatggctcacagaagtttgtctgcagattatgtgggctcaaatttgatcttctgccagatcttggccgccaccataaagtcgctcatatggtctcaggtgctgttggccacattccactgggccgtgggaagtaccagcttaaccgcggccgacactactattccgctttcaagaaaagtttgcgaccaacaagtacattaaagaagagcagtagctctggaatcgataaaaatttgaagtttcagatctctggcttaacatctcaaatagttgaatctgaaacatccagccttggtaagttacaggatttccaatgcttagatgttgcacaaactttattttccaagattcaaaagacaagaccccatccaagcaactttgatgttttatcggttgcccgctctgtatgctgtaagacaagtcttcttgctgcgttggaagttaaatacggacctttacctgagaacatatttgtgaaagctgcaaagctttgcagtgacaatggcatccaaattgattggcatcaagagggattcatatgccctaaagggtgcaagtctagatataattcaaatgctctgcttcctatgcaactcacggcagttgattttcttgaagctcctgttgattcccgtaatgatgatgaaatgtggggaatggaagaataccattatgttcttgattcaaagcacttcggatggaagcctaaaaatgagagtgttgttctctgtgaagacataagctttggcagggagaaagttccaattgtctgtgtcattgatgtggatgcaaaagattctttaggtatgaagcctgaagaacttttgccacatggcagttctttgccttgggaaggatttcactatatcacaaaccgtgtgatggattcatctcttattgattcagagggttgggctattagggctgctgaacctattctacagggtacctttgtctgcgagtatattggtgaagttgtgaaggctgacaaggctatgaaaaatgcagaaagtgtgtcatcaaagggtgggtgcagttacttgtttagcattgcttcccagattgatagggaaagagttcggactgtaggggctattgaatactttattgatgccacaaggtctggaaatgtttcccgttatattagtcacagttgttccccgaatctcagtacccggttggttttggtagagagcaaagattgccagcttgctcacattggattgtttgctaatcaagatgaatacactaactgttcaatgctcggttgcagaactccagagatttcaacagttgtgtag

SEQ ID NO: 2574 - DNA, 999 bp, Zea mays
  Peptide Sequence Number=SeqID_45949
atgccgcggctgcccctcctcctcaaggtagccgcggcggcggctgccggggcgctggcgctcattgtcgcggcgcgcctccgcagggaggacgccgtggcctcgctccgccgggagatccgcgaggcactcacggcacttgtcgcagacgacgaggacagcgacgacgccgaggagaactcttcctccccgccgccgccgtccgtgctgatcacggggttccgcgcccacggcaagagctcgctggtcaacacggcgtgccgggcgctggcggccgaggacggccctctgctgctgcgggcggaggcttcaccgcccggcggcgggagcgaagggctgaggaagctccggatggtcaaggccgtggtggccgggtccgacgtcgacggcgcgggggcgggggagggcgacgtggtggagctgctggacgcgccgccgctcgccgagaccggtaagctgacgagggaggacatcgacgccgccatcagcagcggggaccctgagtgcgttgtgttcattctgcgctgcaacgcgcccaccaaggaacggaacgccgccatcaagcgcctcccggagatttctgccgccgtcagaaacaaagggcttaatttgatcatcgtgttgacttttaagaaggccatgagatccattaggcaggctgaagagcttctacgggaggtgtcgttcagggccagaactgattgtgtctacttcatcgagaactacacctggagcaacaacggccccaacctccaccatccccccgtcatcaggaacgacttcgagactcatttcacggtgctgacaatcattcgccagtgtcttgagttcatcaagctaaacaggagccagtccaagagcaagaaaaagacgaacggcgagcaggaaaaagcacccgagcctaaacttaagaataatccacctgcagaaactaacaaacagcgccagaaactcaacgagtccattgtaaaacctttcctcagcagttcagaaacttga

SEQ ID NO: 2575 - DNA, 576 bp, Zea mays
  Peptide Sequence Number=SeqID_45950
atggcggcgcgaagggcaggaagggcggttctctcttctctggctagatctctcgggttgcgaaaacctaaggggcaggcaggaagcggagcaaagaaccgtcaccggaccctctccggggtatataaagaccaaggcgaagacggttccaacgttccgcctggatcggacgcgggattcaaaaacgcgaagcgaaacggccgttcctcgaacggctcgcgcacgcgcaacggccgccccgccaactactcgccccgtcgcattaactccgcggctggacaggcagcgcttctggcaggagcagcgggtgacgcttcgccttcgccgaaacaaccgcgccaaaaagaaaagggaccaggaaagggggataccccgaaagggatccttccccgtgaaggaaccaggctccgagcctccttactgatcaggggttcgaaggctagccccccgaagggttcaacagccgcctcagatcgcgtgggccctacacccactactggtcagaggttcgaaggccggccccccgaagggttccacggccgcctcaggctactcgggctccgcgcccattactga

SEQ ID NO: 2576 - DNA, 1863 bp, Zea mays
  Peptide Sequence Number=SeqID_45951
atggcgcttcctgttgacgtggcgggtctgtgccctaggcagggtgacgtgggggctcctccgaagccgaggttgagtctgtcttctgttgccgaggccgagtccgagccatggggtcgggcgaggcggaggtcgttcggccgaggccagggcggagtccgagccctggggtcgggcgaggcggagtttcgtcgtcttccgggtcttagcccgagtccgagccctggggtcgggcggagcggagttcgccgtcttccgggtcttagcccgagtccgagccctggggtcgggcgaggcggaggtcgttcggccgaggccagggcggagtccgagccctggggtcgggcgaggcggagtttcgtcgtcttccgggtcttagcccgagtccgagccctggggtcgggcggagcggagttcgccgtcttccgggtcttagcccgagtccgagccctggggtcgggcggagcggagttcgccgtcttccgggtcttagcccgagtccgagccctggggtcgggcggagcggagttcgccgtcttccgggtcttagcccgagtccgagccctggggtcgggcggagcggagttcgccgtctttcgggtcttagcccgagtccgagccctggggtcgggcggagcggagttcgccgtggcgcctttggcaaggcctgactgtctgtcagactcactctatcgagtggcaccgcagtcggagtggcgcaggcggcgctatccttctgtcagactgcaactggcgcgccggttgcttgacgcgtgggcctgggcttccaagctggcgtgtcagaagtcggagaagcgcgtccacctggcgcggttgcatgccgtctgcatggctgcccgccccttccgcccgttggtctgggcaaaagtggggggtcgcttgggagggccttggagcgtgttggagaagactcagcccgcggcgtctgggggcgcacatggggggtatccgcctcctttccgcctcctcgttggaggaacgcaaccccatgggagttggtacctctcagccatcgttcggcttcaaggattttcatcagccggcccggccgcacccctacgccggcgatcacccaggatggtgaccaccagtttctgggtggggaagagcaagccgggctgcgatcttggtcccaccctcagcttcaaggatgttcatcatcctcgctggggtgggggccacgctgagccggcgctctgccttccgcgcgggtccgcggggtggtcctgcttttgcactgggacggcgccctcgcgcagaggccggtgccccactcgcctgggaggattcgagtggggatctgccggggggctggtgtcccctgccatcggcgccgaggcggaggcggctcgagaagtcctcgtcgccgacgggatcactgccaccacccgcgccccgggccaccgcgccggcgtgcttgtcctcgcccctcgagcgtcggcgggggcgagggcaagatcgcagcagcgccggcccactgtcgccgtagtcagaacgggcggcggcgagccgctcgtcagtcttctgctgctccgcaatccttccccatggagtggggtcgttcgtacccgcggagggggaaccggagttccgtacgtaatggcacttcgaatgccagtctcgcctgttgattatctgaaccgctttaccaagcatgagttgccccgtgtcaaggtgacgagtgagtatgaacagaggcagagttggctcgagaatgggaacctggttggccggagcctagccgtgttgtccgtcagcggagccgacgccaaagtcgatccgccgaggcctcgggtcgggctggcgcccttggaagccggttggccgaggccccaggggtaa

SEQ ID NO: 2577 - DNA, 2268 bp, Zea mays
  Peptide Sequence Number=SeqID_45952
atgtgttcgcattgttactctgcgttcccgcagtttgaagtagcggaggaggatgcagacgaaggggcgctgcagtgcgcggccggcctaagtagcggacgcgatctggttgaggagttcgtcgcatatggggtgtggcccttggcgcgtggctgggcgctgagcgaagtatgccctcgccagatgccttcccgtggtgggatgctggtgcaaagtcccgccttcgcactggatttgcatagccgcgatcccgccgcattcgtgcgtgaggcgaaggatggggcagtgcggattgttggtcggtacgtgccaaggacggagggccagcgtagttgggatattcgcgggtccaacgatcgcttgaacagggtcttcgagttgaaccgtctgtcgtatggcggttatcccggacaggacgatgtcgaccgtcgcgggaagaaaccggcggcagggaccggagatgaccccgcgccggcggccgccccatcctctaagaagaggaagctaggtactgctatgggaggactgggggtctccgatagctttgctatggagttgatggggacatgcgcggcccccgggggaaggatgtcttcgcccgagctccgggagtcttcggcgcggatgctgaaggttaccgggggttggtggcctaagaacgttccgatcccccgcgcggccgccgaagacttttttacatctcgcatggttcgtgacttcagagtgtttccttatggacgaaatattgctgctgttgtgtcagcagtgatggataaggatcgtcaggaagctgtgcaaaagcgtcgagcagtcgtcaggctgcccgaggctaggccgaagagggcgcgggggaccgcgaaggctgccgcccccgacggtagccagccgacgctggcggcgaagtcggccggccctgggtccagcaaggtgccggatgtcgtgaaggcagctggcgctggcggagccaagtctacctcggccgaagccgcgaaggcccgagaattgcctccgccgggaaagcgcattgccgatttcggcactgatattagtgtagatgattatctcactggatcgggcgaggggcaactggttgttgttccgcctgcggcggcgacaacggtgtctgccacagtgcctgtggcgaagggtggcgctctcagcgttggcagtgagatttcgacgctcgctgctgtcaaggacgaggcgggcgctgtgccccgccggctgaaggaggcgtcgcagcggctaagtcaggcggctgacttcgctgaccgcgtggcgtcgggggccctcacggcagttgtgtctgccgaagtcgagagacttcgggcgcaatatgctgaggccgtccgggaaaagtcggccgccgatagcaagtgccgcaaactggcggagaaggtggccatgctggagggcaagaggactgagctccggcgccagctggcggaggagaggagggaagctaatcaggccctcgccaaggcgcagtctgcgcaggcggaggccaatgtggcgcgggtggagggtagcctcgccaggcaacgcgctgaggaattggaggagcggttcaacgctttgcaggcccgcgtggagagggccgaggcgtcgacgcgctcggaggctgagcggacgcgcaagcagcttatggactcataccacgagctgggcgcacggaccgctcacttcgaagtgcctgaccgagagtcaggccttcgttgcctcgagtggctgcaagaggagttgttggcgctcccgaccattgtggagggatttatgtcctatgcctccctggtcacctgcgaaggggcgatgaacgcgctgtcccgcgaagggtgccgtcactatgaggtcttcgaccgatctgatgaggatttcgaacgcgagatttacaaggttgaggaccctgtggtgaaggaatccgcgggagccctctttgaccggatgtggggcccccacggtcgggaggtggtcagggagcggtccgacacggcgaggggtcaggcggcgcgtgacgagaaagtggatgactttggggctttgaacagcatgcggcctgaggcggagtcgaacccggtggcggctgggcccgaggtcgctccggcgccgcccctagaaaccgtcgaaggctcccttgatgcccccgcagccactgcgaccggcggtggctcgtcgccaactgctgcaccgacggttgaggatcccccgaagacggcggcagagccggcagcggaggatcccgcgacagctgggtcttcgcaggtggcttag

SEQ ID NO: 2578 - DNA, 390 bp, Zea mays
  Peptide Sequence Number=SeqID_45953
atgcaaccgcgccaggtggacgcgcttctccgacttctgacacgccagcttggaagcccaggcccacgcgtcaagcaaccggcgcgccagttgctgcatgcaagcaaccgcaccgccacttgtgccaccgtgacgcctcttcggttgcggagcctatgccgcgacttgaggcgacccaacagcgccagcctggcgcgtcggtcaaagcgaccgaaaggaccgggaaagggggataccccgaaagggatccttctctgcgaaggaaccgggctccgagccccccctactgatcaggggttcgaagactggccctccgaagggttcaacagtcgcctcagatcgcgtgggcccgacacccactactcgggctccgcgcccattactgattag

SEQ ID NO: 2579 - DNA, 2502 bp, Zea mays
  Peptide Sequence Number=SeqID_45954
atgagctaccggaaggggttgaaggtttgggtggaggagaagggggaagggtgggtggaggcggaggtggtggaagcgaaggagcgcgccgtcgtcgtgttctcgagccagcggaaaaagattacagtttcaccagaaaaattgttgcccagggatacagatgaagatctgggtgggggtcatgtggatgacatgaccaaattgacatatctaaatgaaccaggtgttctttacaatctgaagaaaagatatgcattgaatgagatatatacgtacaccggaagcatcttgattgccgttaatccttttacaaggctgcctcacctgtacaatgaatacatgatggaacaatacaagggcatccgattaggggagctgagtccgcatgtttttgcggtggcggatgcatcatacagggctatggtgaatgattctcgaagccaatccatcctggttagtggtgaaagtggtgctggcaaaaccgaaacaacgaagcttattatgcagtatctcacctttgttggcggtagagccgctcttgatgaccggacggttgaacaacaggttctagaatctaaccctcttttggaggcatttggcaatgcaaaaacagtacgcaatgacaattcaagtcgatttggaaaattcgtagagatacagtttgattcaagtggtagaatatctggagctgctattaggacctatcttttggaaaggtcccgtgttgtgcaaattactgatcctgaaaggaattttcattgcttctaccaattgtgtgcctctggaaaggacgcagagctgtacaaacttgggcatataagcagttttcattacttgaatcaaagcaatacacatgatttggaagggacaaacaatgaagatgagtactggaagacaaaaagggcaatggatattgttgggattagcagagaagatcaggacgctatatttcggacattggcagccattcttcatcttggcaatattgagtttgtcccaggaaaagatgctgattcttcaaaaattaaggattcaacctcaaattttcatctccaaacagcagctaaattatttatgtgtgattcagatctattggtctcaacgctatgtagccgatctatacatactcgtgaaggaataattgttaaagcattggattgtgctgctgccgcagctaatcgtgatgctttagcgaagactgtatatgcaagattatttgactggcttgttgagaatattaataagtctattggtcaagatgtggattccaagctacaaattggtgtgctggatatctacggctttgaaagcttcaaaaacaacagctttgagcagttctgcattaactttgcaaatgaaaaacttcagcaacactttaatgagcatgtattcaagatggaacaggaggagtacaaaagtgaggaaattaattggagctacattgagttcattgacaatcaggatgtgctggatttgattgaaaagaaaccaattggaattattgcactgctggatgaagcctgtatgtttcccaaatctacgcatgagacctttgcgacaaagatgttcagaaacttctcttcccatcttaggctcgagaggacaaaattctcagaaacagattttaccatctcacactatgctgggaaggtcacgtatcaaacagattcttttctggaaaagaatcgagattatattgttgcagaacactgcaatcttctatcatcttcaaggtgcccatttgtttctggacttttcacttcattgcctgaagaatctataagatcttcatacaagttctcatcagttgcttccagattcaagctacaattgcaagccctgatggaaaccctaaactcgactgaacctcactatgtacgctgtgtgaagcccaactctgctaatcgacctcagctttttgaaaatcaaagtgtattgcatcaacttcgttgtgggggtgtcttagaggctgtccgtattagtcttgctggctatcctaccagaaggacttatgctgaatttgttgaccggtttgctgttcttgtgccagaattgatgattggaagttacgatgaaaaaatgatgacaaagggtattctcgaaaagatgaagcttgaaaattttcaaacgtcaaggagccccgccagggaggccgacggcagcgcacgcgtctgcgcctgtcatggtgtccgcgcccgcgacagaatagaaggggaaatgacagatccggccgggaaggccacgacagcgacggatccggccgggaagacgcgatccagccaaagggacggcggatcgagccgaaaaggtcgcagcaacgtggatccggccgggaaggccgcgacagcgacggatccaatgaaggcgatgaaggggtgggcggcgaggcgggtccagtcgggcaggggcctgcgccggacctggcaaggggtgttgacggcactggggacgggagaagctcgaagtgggaggcgctgctggggcgtcagcgcgagcaattag

SEQ ID NO: 2580 - DNA, 672 bp, Zea mays
  Peptide Sequence Number=SeqID_45955
atgcaggcggcatgcaactgcaccacggggatgcaccctttcgacttcgacgcatccagcatgaaggcccaggcccacatgtcatgtgaccggcgcgtcggttactacgtgcgaaaaactgcaccgccacttacgccaatgttgcgccttctcgactgcggaaccggtgccgcaactcgaggcaaccctgcgcatggcccaacagtgccaaccaagcacatcgatcacaggtcagtcagccgtgggagaaggcgcgatggtcgatatggccaaaagtgggccggcaggaccgggaaaggagatacaccgaaagggatccttctctgcgaaggaagcgggccccgagccctcctactaatcagaggttcgaaggttggcccctcggaagggttcgacagcagcctcagagcactcgggctccgcgcccactactggtcagaggttcaaaggctagcccctcggaagggttcgatagctgcctcaggccactcggactccgcgcccactactgatcaggggttcgaaggctggccccccgaagggttcgacagccacctcagaacacgcagagcgagggatgactctaggtacgtccgatacatggccgaggctcgggctacgctcccgaggtaccctaggacatttccgagaccagcaggagcgattctgtaa

SEQ ID NO: 2581 - DNA, 393 bp, Zea mays
  Peptide Sequence Number=SeqID_45956
atgtccgatgtaccagaggactccaactcaaactcgtcacctttgggaaattccagaggcaactccgctataattcaccggactgtccggtgtacaccggacagtgtccggtgctccaaggaagagcggcctcaggaactcgccagcttcaagaattcacttcagctgctccgctataattcaccggactgtccggtgcatctgcggagcaacggctatttcggcgccaatggctacctgcagcgcatttattgcgcgccagcacgcgcagaagtcaggcacgcccatgctggcgcaccggacactccacagtacatgtccggtgcgccaccggacatccaggcgggcccagaagtcagagctccaacggtcagaacccaacggctttggtga

SEQ ID NO: 2582 - DNA, 540 bp, Zea mays
  Peptide Sequence Number=SeqID_45957
atgcccgcgatcccaacggcccccgccccctgccccgtgcgcttcctcctcgcccgccgccacagcctccacgtctcctacccgtcgccttgctctaaccaccagcggctcccaccccgcctcctgcgcctgcccgctcgcccccgggccgctcccatgtcgaccgtggcgcgggcacccgcgtctccagtggcgccgccggcgcaccccacctacgacctcagggccgtcatcgcgctcgccctcacagaggacgccggcgaccgaggggacataactcctccaactgggattaggcaggctatggagatgcaggctgaagtagaaaggagaaaatgcgctcaagtccttgaatcagaagggaagaaacaagcccaaatccttgaattagaagggaagaaaactgcccagatctttgaatctgaagatgaggatataatcttatactgccagtctgttggaagtggtccaaccattgatcttgcttcacaattgccagacttgcgagccgtggttttgcaactattttatctggactaa

SEQ ID NO: 2583 - DNA, 255 bp, Zea mays
  Peptide Sequence Number=SeqID_45958
atgtacgttgatcttcccttcccctcggggtgcattgactccgaggaagaggacggtccaagccccgacctggacttctctaggcttcgcggcccaaaggccatgctacagttcctattcgcatgcgatgaactactcttcgatggctcaaacgactataacaccaacgaggagggttacatctccactcgggagtgctttcacgtggggcacgaagatcatgacgaaggggaccaactcggcatgcttagataa

SEQ ID NO: 2584 - DNA, 90 bp, Zea mays
  Peptide Sequence Number=SeqID_45959
atggcgcagaagccgcgttccaggacttcccgcccggtcacgggaggcacccagtcaaagatgagattggatgtagattggaggggatag

SEQ ID NO: 2585 - DNA, 2427 bp, Zea mays
  Peptide Sequence Number=SeqID_45960
atggaaggccgcgcgcgcctctccctcgtccacgccgccgccgcgctggtggtcctgctgcagctgcatggcggcgccgtcgtggttgcgtctgagccgccctacacctgcggcgccggagcgccgcccaacatcccgttctgcgacgcggggctgcccatcgaccggcgcgtcgacgacctcgtctcgcggatgacggtggcggagaagatctcgcagctcggggaccagtccccggccatcccgcggctcggcgtgccggcgtacaagtggtggtccgaggcgctgcacgggatctccaaccagggccgcggcatccacctcgacggcccgctccgcgccgccaccagcttcccgcaggtcatcctcaccgccgcgtccttcaacccgcacctctggtaccgcatcggccaggtgatcggcgtcgaggcgagggcggtgtacaacaacgggcaggcggaggggctcaccttctgggcgcccaacatcaacgtgttccgggacccgcggtggggccgcgggcaggagacccccggcgaggacccgacgatgaccggcaagtacgccgccgtcttcgtccgcggcgtgcagggctacggcctcgccggccccgtcaactccacgggcctcgaggcctccgcctgctgcaagcacttcaccgcctacgacctcgagaactggaagggcgtcacccgatacgtgttcgacgccaaggtgacggcgcaggatctggcggacacgtacaaccctccgttcaagagctgcgtggaggacggccatgccagcggcatcatgtgctcctacaaccgcgtcaatggcgtgccgacgtgcgccgactacaacctgctctccacgacggcgaggcaggactgggggttttacgggtatatcacctcggactgcgacgctgtggccatcatccatgatgcgcaaggctacgccaagacggcagaagatgcagttgcagatgtgctcaaagctggaatggacgtgaactgcggcagctacgtgcaggaccacggtgcctctgcgctgcagcaagggaagatcacggagcaggacatcaacagggcgctgcacaacctgttcgccgtcaggatgaggctggggctcttcaacggcgaccccaggcgcaacctgtacggcgacatcgggcccgatcaggtgtgcacgcaggagcaccaggacctcgccctggaagcggcgcaggacggcatcgtcttgctcaagaacgacggcggcgccggcgcgctcccgctgtccaagcccaacgtcgcgtccctcgccgtgatcgggttcaacgcgaacgacgccatcaggctgcgcggcaactacttcggcccgccgtgcgtgacggtgacgccgctccaggtgctgcagggctacgtgaaggacacgagcttcgtcgccggctgcaactcggccgcctgcaacgtcacgacgatccccgaggcggtccaggcggcgagctcggcggactccgtcgtcttgttcatggggctggaccaggaccaggagagggaggaggttgaccggctggacctgacgctcccgggacagcagcagaccctcatcgagagcgtcgcgaacgcggcgaagaagccggtgatcctggtgctgctctgcggtgggcccgtggatgtgagctttgcgaagaccaaccccaagattggggccatcctgtgggctggctaccccggcgaggccggcggcattgccatcgcacaggtcctcttcggagagcacaaccctggtgaggtttcgtccattcactctgaacgaacaactctggcatggcaaacacagatcatcttaatttcttcttcggcttcggcaggtggaaggctgcccgtgacatggtatccccaagatttcacgagagtgcctatgacggacatgcggatgcgcgccgacccggccacgggctaccccggccggacgtaccggttctaccgcggcccgacagtgttcaacttcggctacggcctcagctactccaagtactcccaccgcttcgccacgaagccgcctcccacgagcaacgtcgccggccttaaggcggtggaggcaacggcgggcggcatggcgagctacgacgtggaggcgatcgggtcggagacgtgcgaccggctcaagttcccggcggtggtgcgggtgcagaaccacgggcccatggacgggaagcactcggtgctggtgttcatgcgctggcccaacgcgacggacggcagcggccggccggccagccagctgatcgggttccagagcctgcacctgagggcgacgcagacggcgcacgtggagttcgaggtgagcccctgcaagcacttcagccgggcgacggaggatggcaggaaggtgatcgatcagggctcgcacttcgtgatggtcggcgaggatgagttcgagatgagcttcatggcgtga

SEQ ID NO: 2586 - DNA, 864 bp, Zea mays
  Peptide Sequence Number=SeqID_45961
atgcccgctgccgccgccgcgcgcggctgtgatcaacgtgaggacgtcaaacagagacgcgacggaaccaacctcgggcacggcgaggatatggaggcagcgaggggagaggaagatgacttggatggcttctgggtgtcgtacgggcggcggtgcccgcggcgccggctgcccccgctcatcccgtcgctggtcgcccgcggcgcgctcaggcggacttgcaccgacgacgggaggctcgtcatccggatagtgcccatcgtgcacgaggacgattcttcggtgccgccgccgccgccgcttcgggagctaccggccgctgcgcgagatgctagtgccaggaggactaacgttgcacggccggacgacgacagaaccaaccttgggcacggcgaggatgtcgaggcagtagtaaagcaggaagagaaagacgaagaggatgataatatgaaagcaaagcagacgcaagaggaagatgacttgttggatggcttctgggtgtcgtacgggcggcggtgcccgcggcgctggctgcccccgctcatctcgtcgctggtcgcccgaggcacgctcaggcggacacgcaccgacgacgggaggcttgtcatccggatactcaccggcaccatgcgtgagcgtgatccatcatacgttgcagttcaaccagagattcaaacttcaattggcatgaaagcatttggacggccgctggacgatcagcgcggccggttttataggcctccgtacctcggcgccaagatctatggcgccgagctacgaggccgcgtcggcgccacgcgtcaatgccaggtcagccctaggcgcagggagccattagtgccacgtcacaactcggcgctatag

SEQ ID NO: 2587 - DNA, 1632 bp, Zea mays
  Peptide Sequence Number=SeqID_45962
atgtcaaatcacaacgcgccctgtgacatccccaagccggcctccgtcgacgagttcctcgccaagaatggcaagaagaagaagtccttcatgtcgggcctcttccgcaagaaagggaggggcgcggacaagaagctgctctcgcggcgggacatcgtcttcggtgaatttggaaggcagaagcggcgacaggatggacctcttggagacgtccgccgctgtccgcaagagcttctcagatcggcactgcacgacgcggatcgagaacctgacgctgagctgcctggattctcccaggagacccaatgtcgatacccgggagtaccggagatcgtgcctctgaacgcgggcaacgtgctggtcgtggaggacaacgagccggcgggcaagtggatggacctcatctaccaggccctgaacaggccgccgccccaccaggacggccagtcctccggcgacgagctctcgccgccgccgtccacctcctcctcccactaccggagccggccgcaaggtgccgcccgcgaccccagcaacgccgccgccatccccaagacctccagcggcggcatgctctgcgcgcagaagccgccgccgccgctcaagatggtcagcaagtgctaccgcgtcgacaacgcgctggtgaagacgtgcacctgcatgtccgacccgtccaccatgcagctccgggcacgtgagatgcgcgagttcctctgccgcgtcgaggccgccgccgcctcgccgggccgcggcgccggcgccgacgacgacgcgctggcctccatcgaaggcggcgaccagaggggcggcggcggcatgaactactgcctcgtcgcgaggaagcagatggtcgggatcttcctgtcggtgtgggtgcgccgggagctggtgcagtacgtcggccacctccgggtcgactgcgtcggccggggcatcatgggccgcctcgggaacaagggatgcatcgccatgagcatgacgctgcaccacacgagcatctgcttcgtgtgctgccacctggcgtccggcgagaaggaaggcgacgaggtgcggaggaactccgacgtcgccgagatcctcaagaacgcgcagttcccgcgcatctgcaaggtgcccggccagcgcgtccccgagaagatcattgaccacgaccggatcatctggcttggggatttgaattaccgagtctcgttgagctacgaggaaactaagacgctcctggaggataatgagtgggacatcttattggagaaagatcagctcgcgatggagagacaagccgggagagtgttcaaagggtggaaggagggcaagatctacttcgcccctacatacaagtacaagcagaactccgactcgtatctatgggagaccgccaaatcgaagaagaaacgacgaacgcccgcatggtgtgaccggatactgtggcacggccaaggcatcgagcagctgcagtacatcaggggcgagttcaggctctccgaccacaggccggtctgcagcgtgttcgtgatcgaagccgatgtagatagcgggagcaagatcaggaagggctactcaacgctggacgctaggatccactgcgagtcccccgagatacccaagagacacagcttctatgatgacttctga

SEQ ID NO: 2588 - DNA, 1576 bp, Zea mays
  Peptide Sequence Number=SeqID_45963
atggccggcgggaaggagccgatcgaggtcaggttccggctcttcgacggcacggacatcgggcccaccaagtacgatccctccaccacggtctcctcgctcaaggagttcatcctcgctcggtggccgcaagtaaatctgaataaagatccggatccagttaagttgggaaccacgttgaatcgcacccacacgtttctttgccctaacagcgaaggcacactgcccgacagccgccgccgtttcttcctcttcatcttcctcgcagcgccggccttccatcttccgctccctccccgactcgcccttggcacgcaggcgacagcggcggcgctcaggttcgggctctcagcgacggcggggcaaccccagactcgctgccgtcgtcagcggctcttcctcccgcctctcgccaatcgactcgcaccctcgcctccggtcctcgtcccccccgcataccggccggcgaccctgcatgcgcgcctcccgctccccttccgcctccggtggaccgtcgacagcgcccggccccggcggctgcactgcgcgccgcgtgcggccggcgggcagtgggagccagcagccgctgctccagcaaggcggccgtgccgctttggtagcgcttgcccgaaacgaagcgttacctgtccgcttacgtttcagcgcgagcttagtgcctccttttggaaccctggtaatcatcttagcactaacaacccgatgaggccaaatgattcgttggaggctcaagacatggttcctgctgagggaaaccacagttgcttctcaagtgttcagtccactccagaaattgagaagaagtatgtgcatcgtgtctatgatgccatagctccccatttcagtgcaacaagatttgctaaatggcccaaggttgcaggattcttgaattccttgaggccagggtcggttgtactggatgctggctgtggtaatggcaagtatttgggtttcaaccctgattgtttattcataggatgtgatataagcccaccgcttattgagatatgtgctgggagagggcatgaggtgttggttgctgatgctgtcaacctcccatacaggaatgattttggcgatgcagcaatttcaattgctgtgttgcatcatttgagtactgatgataggcggaggagggccatagaagagctaatccgtgttgttcgaagaggtggtctggtgcttataacagtctgggctagggagcaggaagacaagtctttgctcaacaagtggactcccctctgcgagaaatatactgaagagtgggttgaacagagcagtcctccagtacgcagtaaatctggaactcttctggaaagcattgcagaaactgatgaagatgctggtttcacgaagcaaacagatgaccgattgaaaagctgtcatggtgaggtggaggacaagaccattgactgtagtaattcaaagactgatgaaaatgagaaaaaccagcaggagtactttgttccatggcatctaccatttcaccgagctgaaattggtggtgcatctgctgctctggaaaatggatttgcaaagaaagatgagaagaagg

SEQ ID NO: 2589 - DNA, 639 bp, Zea mays
  Peptide Sequence Number=SeqID_45964
atggcgccacccatcacgtccctgtcgtctctgatggcgtccagcccaatcccgacgccgccgccgccgctcccgaagaccagcggcagagcgctctccgtcgcgccctgcggctccgcgtcgtcctcgtcgccgtccacttcctcgactcctcatccggtggcggcgtcggcgtcggcgggcaggagggggctgctggcgctgggcgccgggttcctggcctcggccgcgctgctgtccccggcgggcgacgccggcgccacgcgcatcgagtactacgcgacggtcggggacaagatgtgcgacctgagcctcgtcaagtccggcctcgcgtactgcgacgtcgaggtgcactacaccgcgagatttcccgacggtacgctgttcgacagcagctacaagcgcgggaggccactgacgatgcgcataggcgcaggcaagatcctccgagggcttgaacaggggatcagtggcggcggcggtgtgccgcccatgcttgttggtggaaagcgcaagctgatgatacctgcgtcactggcgtacgggcctgaaccggcaggctgcttctcaggagactgcaacatccccggaaactccacacttctatatgaccttttcctcgtcgggatctacaagtga

SEQ ID NO: 2590 - DNA, 1482 bp, Zea mays
  Peptide Sequence Number=SeqID_45965
atgcgcctcccggtccttttcgccctgcagctggtcgccttggcggcggcagcttcggcggccgaggccgcggcgacgttctcctcgaggatggtgcaccgtctgtccgacgaggcccggctggaagcgggcccgcgcatggggttgtggccgcagcgcggaagcgggggctactaccgcgcgctgctgaggagcgatctccagcggcagaagcggcggctcgcgggcaagaaccagctcctctcgctctcaaagggcggcagcaccttctcccccggcaacgacttaggctggttatactacgcttgggtggatgttgggacgcctactacctcctttttggttgcattggatactggaagtgacctgttctgggtaccctgtgactgtattcagtgtgcccctttgtctagctaccgtggaaatctgtgtaagctgaacaagcacaactacaattcattgccgattttagctattacctgtgtgactggcttgcaagtttcatattcatactggctagtttttgacttaggagtacaagtggcaagtacaagtggtggtgtcattgtgcccttctggaatagctgtggtcgaaagcaaagtggtgactatctggatggcattgcaccggatggactccttggccttggaatggcagacatttcagttcccagtttccttgcaagagctggactagttcggaattccttctcgatgtgcttcaaggaagatagttctgggagaattttctttggagatcaaggagtgtcctctcaacaatccacaccgtttgttcctctgtatggcaaacttcaaacttatgctgttaatgtcgacaaatcttgtattggacataaatgtcttgagggttctagcttccaggctttagtcgatagtggaacatcatttacttctcttcctcctgatgtttacaaggctttcacaacggagtttgacaaacaaattaatgcttcaagggtgccttacgaagacagtacctggaaatattgttacagtgctagtcctcttgagatgcctgatgtgccaaccataatcctggcattcgctgcaaacaagagcttccaggctgttaatcctatcttgccatttaatgacgaacagggagcgcttgccaggttctgcttagctgtactgccatcaacggaacctattggaattattggccagaatttcctggttggataccacgttgtcttcgacagagagagcatgaagttgggctggtaccgctctgaatgtcgcgacgttgacaacagcacgaccgtgccgctgggcccatcgcagcacggcagttcagaggacccgttgccgtcgaacgagcagcagacttccccgcccgtgacgcctgcaacgacaggcacggctcctccctccagtgcaacgacgaaccgacagatgctctttgctagctcttacccgttgctgtttctgacaatgtccactgtgttcttcatctcatga

SEQ ID NO: 2591 - DNA, 837 bp, Zea mays
  Peptide Sequence Number=SeqID_45966
atggaagtgttgatggtccgtggccgcccacgcaatcaacgctatggtggatggcaggatcggcttgaggtcgacgcgggatttggacgaggcgctgctgctttgggagcacaaccagaaactagcggaagcgtcgtcatcagcaattcagcatcggcgccactgctgtccgccgcaggggtgcccgatggtggcgcccgtcgagcggctgctggaccggctgtcctggagcggaagccgaacgccatcgtggccgacaccttcctagcttggggcattggggttggatttgcgcgggggataccagtgtgctcgctgtggacgcaaccggccacgttcttcttggcgctctggcacctggaccgatggccgccggtggatggtcaggccgtccgcctcgccaccatccccaacgtcatcccctccgagagggtccgcggcaccgacttcgcaggcttcttcgaggccgtgcatatcaagatggtggcgcccgtcgagcggctgttggactggttgtccctggagcagaagccggacgccatcgtggccgacaccttcctggcttggggcattggggttggatctgcgcgggggataccggtgtgctcgctgtggacgcaaccggccacgttcttcttggcgctctggcacctggaccgatggccgacagtggatggtcaggatgtggatcaagtgcatcatgccttaggggaagccccttggaggcttggacaagcctcggcgggcgtggcatgctcttctttgttcatcatggacactgaggctacgccaatggattcgagaaggtcaagcactggaaaccaatggcgaaggtag

SEQ ID NO: 2592 - DNA, 60 bp, Zea mays
  Peptide Sequence Number=SeqID_45967
atggcggctgcaagtagcaactgcaaagcagagatgatgcggctggcagccgcctggtga

SEQ ID NO: 2593 - DNA, 429 bp, Zea mays
  Peptide Sequence Number=SeqID_45968
atggtgcacgccacagtgtcagcgaggctcccctcgaggttccctgagagcaaggagggaccctcaatcggcgagatcacgaggcatcctcaggtcgaaacatgggtagtcccactcaataggaaatcaggttcccaaccgcccagtgccgggcactgctgctgtgcacgctgcacggcagcagacaactgcgcagacatctcagactccgtcgagggcggctctgggagcattgtcagcagtcagggagttgctgcgtcaccctccaagctccacggcctcaccggggccatgaagcagtggcgggacgacgtcgaccgactgctcggcatggcacattctacctcgaccaggtcgaggccacggtcatcccggcaccaacatgaggtgtcggtgtctgtgcgctcaccctcagtgaggggtgcatag

SEQ ID NO: 2594 - DNA, 861 bp, Zea mays
  Peptide Sequence Number=SeqID_45969
atggaggccaaagtggcacgggcggagagcagtctcgccatccaacgcgccaaagagctggaggcgaggtacaacgccctgcgcagccgcgtggacaaggccgaggcctcgatgcgcttggaagtcgagcggacgcacacgcagtttgtggacacataccgcgagatgggtgcgcggactgctgacttcgaagtgcccggccaagaagcaggccttcggttcctcgaatggttgcaggaggagttgctggtgctcccgaccattgtgacgggtttcatgtccttcgcctccctcgtcacctgcgagggggtgatgaatgcactgtcccgcgaggggtgcaggcactacgaggtcttcgaccaagcagacgagaactttgaacgtgaaatcttcaaggccgaagaccctgtggtgaagcagtcagcgggggcactcttcgataggatgtggggtccgcacggtcgggagtcggtcagggagcgatccgaccgggcgatagagcagatggcgcatgccgaggacgtcaaggaccttgttggtctggacggcgcgctgcccgaagccgcggaggttcttgggtctgggcctgcgcacgcaaccgctactgacaatgatatttttgtggcggcttcgaccatggctgctgatgacgattcatttggctctgtgtctaagtgttttgagtctgatgattctgggagttcgattgcatggacagaggagtcttcagatgaggacttgaattattttgcggtgttggatgtggctgcagtggagctttcgccgcacgcggagggttccgaggaccttccgggtgtgagtactgcgtataagcggtggagggcggtggcgaagcagaga

SEQ ID NO: 2595 - DNA, 576 bp, Zea mays
  Peptide Sequence Number=SeqID_45970
atgcaccatgccatggatcgccaccaggacgagaccccgcctaaagcggttgaggtccctccgtggggaagcgagtattgcctcaacgacaaacggtattctagagctggcttcccgaggcggaagtcccgaatgaacatgaggcctaaatgggaacctgaaacccgctccacctcgccacgcgactgggaggacatagagagagccatcgccggtcgtctcaaacggaggactgggcgtgacagggggtcggatgaagatgtcgacgacagcctccacgcgaaaaggagaagaggccgacaacaacgagccgattcatcggtgactacggtcatggaattaccacaagacgcgcagggcagcggaagacgtcttgatgtagacgaacgcgtcgagcagtgccgtgtagtcgccagcatccttcacgtcctcgcgtggttcatcctagtgctccagatgcaacacctccaagctcaccgggcgccattgctcgaccatcgaggaaagcgtggttcagctcctctcccctcatcactacagaagggatgtgtgagggagagtaaaacaaaaagatag

SEQ ID NO: 2596 - DNA, 102 bp, Zea mays
  Peptide Sequence Number=SeqID_45971
atggccttcggcggacggcgtgctaagcgcggcaaggcgccaatggcaagaggagggcgcggaagggaggtgcgagattacatgaacgcacaaccagaataa

SEQ ID NO: 2597 - DNA, 213 bp, Zea mays
  Peptide Sequence Number=SeqID_45972
atggcggctctcggcccccttacggaagcaagaggacgtcagaaaggactcgacagccccgacagctgtccttccgccaagcttcagcgctcctccgaccgccacgacaccacacgaaccgggtgccaaaacctctccggctgccactatggcatggccctcttagagagggttggccgcgcggggaagaggacggggcaggcgctcgcgtga

SEQ ID NO: 2598 - DNA, 480 bp, Zea mays
  Peptide Sequence Number=SeqID_45973
atggcagcagcatccaccctgaggtcatcgctgctgctgttcggccccccggggcagaagtcatcgtcgtcgccgctactggagcaggcgacggcgagccgttcgtcggtcttccgttgctccgcaggcccctcaatcgagtggggttgttcgtacctgcggaggtggaaccggagttccgtttgtaatggcaccttgaatgccagtgtttttgttcattgtggctgtcgaggcctgaacatctggccgaggcctcagggtgaccagccgagccgcctgctcgagccggattcttggagtagaccctggcggcgatggcccgggcgagatgatgacgtcgtccttcagagtggagatcctcggaccgcgtcgccgtccgaggctaggtcggacctcgccgaaggtgtagtcgacgccgagggtgctgctgctcccttcagccgtcaagatccgagcctgcaggatcagattatcttgtag

SEQ ID NO: 2599 - DNA, 214 bp, Zea mays
  Peptide Sequence Number=SeqID_45974
tcgatgcgagacagtgaccccttccgacattgacccgtcacgagtcgcgcgcagattccgcggcctgaccgttggcccggccgaccgttggctcaccggacagtccggttctctggaggacatggttgttggagtgacttggccgtccatcttgccaccgggttggactgtcgagtgggaccccgcctcggctgaggaggagcatgaggagtga

SEQ ID NO: 2600 - DNA, 276 bp, Zea mays
  Peptide Sequence Number=SeqID_45975
atgaacaagaacacaagagacacaagatttatcccgaggttcggtcacaccaccaaggtgccctacttcctcgttgaggcgcccacaaagagccgggtctctttcaaccctaatcctccctttgccgaccacaaaggtcaagctcacacactaatctttgctcaaacgagcgggagagaaaaccccagctcaactgcccggaggcaagttcagctggtgtatggtcaaagaggttcacagctgaagttgagttcagctgaagttcagcccagctga

SEQ ID NO: 2601 - DNA, 903 bp, Zea mays
  Peptide Sequence Number=SeqID_45976
atgcaggcggcatgcaaccgcgccaagtgggtgcgcttctccgactcccaacacgcccagcatggaggcccaggcccacaaccaataccgcgactcgaggccacccagcgcacaactcagcagcgccagcctggcgcggcggtcagtgcggccaaaaatgggccggcagtaatgacggtggcaggcgggcgggagcagcggtcacgtcgtcagccaagctcacgtcccatccgggggcagcgagagaaccctctctcacggcgtgaagacaacgtgcccatgttccgttcctcgagcggctcgcgcatgcgcaacggccgccccgccaaccactcgccccgtcgcattaactccgcggcgggacaggcggcgcctctggcaggagaagcaggcgacgcttcgccttcgccgctccgagccaccctactgatcagaggttcgaaggctgcccccccggaagggttcgacagccgcctcagatcgcgtgggcactacacccactactggtcaaaggctggcccccgaagggttcacaaccgcctcagacgccgagcgagggatgaccatgggtacgttcgatacataaccaaggctcgggctacgctcccgagctcaccggagacaccatgttcggtgcccatcgagggcagcatggcgctttcccccctcctccttgcggaaaggcgacgcaggggcgtatgtaaaaaagccgagtctgtccctgatcgccctctcgccctgagcagaggctcgggggctgctctcgcaaacccggctccggtcgaaccgttgacagcgtcaacataccagcccgagaacttgggacccgaccgtacacccggggtacggccagctcgcatgagggaacaaccagaccagccgaagcattacgcgaggcattaa

SEQ ID NO: 2602 - DNA, 465 bp, Zea mays
  Peptide Sequence Number=SeqID_45977
atggagcctggcggagggacagctgtcggagcggttgagtccttgctgacgtcctcttgcttccgtaagggggctgagagccgccgtcgtcacagagtatgcggggcgccatcattgcctatctggcggagcgagccagatgggacaccggtcttgtttcttgcggcccgagtcagctcggggttgggcgatgtggaagctcctccgaggccgaggtcgagtctgtcttccatggccgaggtcgagtctgagcccctgggtcgggcgaggcagagttcgtcatcttctagggctgagcccaagtccgagccctgggtcgggtggagcggagttcgccgtcttctggggccgagcccaagtccgagccctgggtcgggcggagtggagttcgctgtcttccgggacttagcccgagtccgagccctgggtcgggcggagcggagttcgtcgtcttccgggacttag

SEQ ID NO: 2603 - DNA, 540 bp, Zea mays
  Peptide Sequence Number=SeqID_45978
atgaacgaaaatagaaatttgcagaatggaattgggattcaggtgggtcaaattcaggtgatagaaatcaaggagactgcggaaaaagggggaaataggaagagcaagaccgcagagaagaaaaggaacataaacaacggattcgtgggtgtcctctgttggaacagtgaccccgtggcaaatccgccaagaacaaagctccttcggaggaagaaccccgatggatacgagatgaaggaggtcagactcggatacaacagacatatggttacctgtgaaaggcaactggctgttaggatcgatggggggaatgacagcgacggacgaactcgaggctttccgcttgggtgccatctcaacctcgccggcgagcggagcggaagcagaatcacaaaagggaagagagggcctggatgcaggaaagcaagaactagtgcacggaatgtggagacgcgcaacaatgcagtacatgtggggtttttcctgggccagataccgtttccaaaaagtgcccagtcatcactcagctgctatttctaa

SEQ ID NO: 2604 - DNA, 402 bp, Zea mays
  Peptide Sequence Number=SeqID_45979
atgggcaagagtaagaaaggtagcggttcttcgcctcgctctggtgacaagcgcaaacgtgagccgactcctccctcggaggacttcggcaactcggagtactcagaggaggagttctcctccgagtccgagggatctccggctcccgtctggacctacatccaggccgtcgagcgctccaggctcgagggctcggatgagtcggagtactcctcggacgaggaggactcctcggactcgtccgaggagggcagcggcggcgatggtggtgatgacgacgacgacggaggcgacgatgatagcggcgacgacagcggcaggggtggtgacagcggcagcaagagcggcaatggcggcggcagcaagggtagcagcaagggcagcaacaaggccagtggctag

SEQ ID NO: 2605 - DNA, 738 bp, Zea mays
  Peptide Sequence Number=SeqID_45980
atggccttctgcccgtccttacctcacaagttttggcacgggcgggggcctcctggcagcggcatcgagcctgaggtcggcgttgccgctgcttggttcctcggagcagaaggcctcgtcgttgccgctgctggagcgggtgacggcgcaccattcgtcggccttccgttgctccgcaggccttccccctcggagtggggttgttcgtacctgcggagggggaaccggagttccgtttgtaatggcacttcgaatgccagtgttcttcgttcattgcggctgtcgaggcctgaacgtccggttgaccgaggccccaggggtaaccggttgagccgcctgctcgggccggattcccggaggagtccctggaccgcggcgccgcccgaggctgggtcgggccttgctgaagacgtcgtcgatgccgagggtgctacggctcccttcagcgtgaagacccgagcctgcaggatcagatcatcttgtagcgtgtgctttctgcggccgccgaggccagaaaaacacaccctcgccgcgcttgcgaagctgcgtcttttttcctcttgtttcgagcatctggactctgtcggtaacagggatgtttgtgtgagcgagagctgcttttcgcggaagggacgagtgaggtatccgtatcccggaggcgtgggaatccctcggctcggtcggccttgcagcttacgcgtactttcactcgtccatgaggccctgtccccgacttag

SEQ ID NO: 2606 - DNA, 945 bp, Zea mays
  Peptide Sequence Number=SeqID_45981
atgtgttctgaaggggtgccccctaggccttatatattcgaccgtggggcaatacatgcagaagtcagccttatcttgatctcgccttatgctttagagaggtcagcacacatttctgtctttgaggtcgagtacgcgatctgcccatatcttgctaggtcttgcaatttatttgatctgcaactgattggacgttcgatagacgtcctgtcggcgtttcgagacaggggggtccctaagccgacgagtgagtgtgctgcgtgccccaacccagatgggtcgagcgcgtgggcgagcgcgaaggggggagaggcgaggtggccggagtcgggcgtgagagaggtcccgagccaaggggtcgggcgaggcggaagtcgttcggtcgaggccagggcggagtccgagccctggggtcgggcgaggcggagtttcgtcgtcttccgggtcttatcccgagtccgagccctggggtcgggcggagcggagttcgccgtcttccgggtcttagcccgagtccgagccctggggtcgggcggagcggagttcgccgtcttccgggtcttagcccgagtccgagccctggggtcgggcggagcggagttcgtcgtcttccgggtcttatcccgagtccgagccctggggtcgggcggagcggagttcgccgtcttccgggtcttagcccgagtccgagccctggggtcgggcggagcggagttcgccgtcttccgggtcttagcccgagtccgagccctggggtcgggcggagcggagttcgccgtcttccgggtcttagcccgagtccaagccctggggtcgggcggagcggagttcgccgtggcaaggcctgactgcctgtcagactcactctgtcgagtggcactgcagtcggagtggcgcaggcggcgctgtccttctgtcagactggccagcggagcagtggagtga

SEQ ID NO: 2607 - DNA, 348 bp, Zea mays
  Peptide Sequence Number=SeqID_45982
atggaggcccaggcccacgcgtcatgcaaccggcgcgccgaatgcttcgtgcatgcaactgcaccgccacttgcgccaccaccgcgcctcctcgactgtggaaccaataccgcgactcgagggaccgggaaaggggataccccgaaaaggatccttccccgtgaaggaaccaggctccgagcctccctactgatcagaggttcgaaggctggccccccggaagggttcgacagccgcctcagatcgcgtgggccctacaccccactactggtcagaggttcgaaggccggcccctcgaaagggtcccacggccgcctcaggctactcgggctccgcgcccattactga

SEQ ID NO: 2608 - DNA, 1891 bp, Zea mays
  Peptide Sequence Number=SeqID_45983
tgaccttgattgcccgtgtgccatctcctgtcctgcctggatcgtcacctctcgtgtcaggatgccgcgcacgaagaatgtgtcggcgccagggggaggcgatgatgaggatcctcgtcgccccttcaggcaggtcaagggcaagacagtacacttggagcagcaggaagaccgcaagaagcggcgtattgacagaacagcccgtgcagcggcagcagcagcagccgctgcgcaggccgagcttggagatcagccacagactccgtcagatcagattgcataccgtgttcgtcgtctcgcctcccgggcctcgctcctccacccacaccactgcttccactccaccacccactctgcctactcccgtcacccctgttgcgccatccaccaccacagccatacccgctacctccactacaccagcttccactgctcctcctcccgctcccgcttcagctcctcctatccctccacctcgattccgggagcgcgatgagactgagagggaccctgctgcaattgaccttttcagcaccaggattcaggagtcctttttcagagctcagatgtctgcacagattgctttgcgagtgcatcggcttttggatcttccagcttttctgcttaccgccggtgctgactctgaggtgcacctcagatatctgcctggccttctgactctgttgactaccagcagcagtcagattcgcaagctctttggatttcccgagtcgtcgactcgacttcacagcttatgctatggatcctctgaccctcctcgtcgccctcacggtggtgtggctccgggcacagctcacgtcgcgtctctgttccgcccacccttctcagatgggtcgcgacgatcaccgtcagattttactacagcagccaagtacttatttgagctatcagacggactcttctgccgaggatgggatacagggaggctaccacacacattcaactctggctcctttggtgccctggtctctcactctgagtttgacgtcgtggatttcctcatttgtgagatcgaggacactgtattggatgctgattcggcctccacagttcagggcacacttgaggcctccctccttgtttttggatcctaccgtcctgcacctgaggctcctgtgccagcttctgctccagtctttgactctcaggccgaggatgctgctcttcatcagtttgaagctcaggatgcagcagttgttgatgatgatgatgatgatgatgattttgggattcctccgcctccgcctcctatgcctccacgctcacatgatcatgaggctgggagttctagtgctgcccctgctgcccctccggctattgaccctactattgcttcgattcttcagacactcactcaacagcaggctcacttggcagccgagcagtcacgccaggcagcagctcatcagcagttatccgagaggatgctctcgatgtttcagactatacaggacagacaggattcccttcagcagcagcttctccaggatcgggctgagagcagggcattcatggctcttatgttgcagcattctggtgtctcagttcccctggttcagtctgctccacctccttcgcttcaggctccagttttgccagcgattcagacaggaccctctcttccttctgttggtccctcttcctctccgctccggccggtcactctggctttcatgtccccggttctcagctctgtctgccctcagctgtcagtgccaccagcttctgctgttaccactcctgctgtggcagtatctgtgaccacttctgttccgacagcttttgcagcgcggcctcagtccgagtcagtaccagctccagcttctaccgcagatcctagatccgagactgactctgaccccccgtcggc

SEQ ID NO: 2609 - DNA, 537 bp, Zea mays
  Peptide Sequence Number=SeqID_45984
atgtcttcgccggaggctcttactccggtgaagacaactagacggaccccagagggaccccgtgttccccggtctacggagctgaagcatgccttcctccggaaacccttctggattccccacgggtccaggttgccgacaggtacattcggaagtggccacagccaaagacgggggctcctgtgtcaaatgcagatggggacccagggtcgggacctagccctatggcgagtaccaaaccaagaagggctctgcaactctcccccagctgggaaggaccctccaagtttttcagataatactttttatctaacccacccatacggcttcaacctgttctggcataacgacatccgaattgagcagccaggcttgcagtttagggcccccgatacgaaagttgggaggtccgacagcttggggggctctagagaacgggaccccgttccatggggtggtccggagcctatgtggccgcttagcctggttccgtacccgaaagcctgcacactccaccactctgtgacgggtacctag

SEQ ID NO: 2610 - DNA, 198 bp, Zea mays
  Peptide Sequence Number=SeqID_45985
atggcggcggtgggtgcgctggaaaggggggtgggcggcggtgctagtgcgcatggaggcgggcacgcgtgcgaggggcacaggggaagaatagagtttttccaaagcacgaactactcagattcgggggctaagcataactactattgcttggctcctgaattgagaactatgctaaatgcaacttatgagcactaa

SEQ ID NO: 2611 - DNA, 1401 bp, Zea mays
  Peptide Sequence Number=SeqID_45986
atgtctcctcgggagctccagactcgtactcacaggggtccggtgttcctctacggaggtccggacccaacgcgtcttcatactgtagaagagggtacccctgattcagggtaccgacagtggcccccgggcctgcctcaggggaggatgcgagcctgcagtagacatacctcgctcttcttgcgaccactgcgcccttccgccttccgggcctccagatggggtgcgtcggtgttctctggagggatccacgtcaaggtcgtcccttccggcgacctcaccgccgaagagcttgcgctcgtggtggtgccgccgatcttgccttcttcttgctgctgttggaggaacgcaaccccgtgggggttggcgctcttccaccatcattcggcttcaaggattttcatcacgcagctcggccgcaacctccggccggtgcattcgggggagaagggcgttcaccagccttgcggaggaggcgaacttcggctacgcggggccggccggctgcggcgccgtcaactgccgcgtgtctggctcctcggcctggatggctttggtgccgcctccggcgctgcctcctgctgcttggtgggagcgtggttgtccatccaccgcacgggcgacggttgcgccgtgcacaggtcggccacatccatgggcttctcctgcgccaccggctacaccggggggtcgtacaagacgtcgtacgccgtgggggcgactgcggcgttcttggatggtcttgtcctcacttccgcagtaaggacgggagcgaggacctcttcgcacgtgctgggggcggccaccattcgccggtacggcactggtgcgcaggtggccgctatcgtcggtgctgaggtggtcgccgccgctggtgaggctccccactgcagaggtggttgcctctgctggcgagaccgtcagtgccacctatcgccgggcctccggctctttggctttaatggcctcattgtcgccccccgtaggaagacgggggaggtggccgtcgccgtcggtgctgaggtggtcgcctctgcaggcgagccgcttggagccagctatcccacggcccttactggtgtggaggctaagcggccacataggctccggaccaccccatggaacggggtcccgttctctagagccccccaagctgtcggacctcccaactttcgtatcgggggccctaaactgcaagcctggctgctcaattcggatgtcgttatgccagaacaggttgaagccaccaataggtcgggtttatggggacagaccccaccgggttgtcgtgcacgagcccccgtctttggctgtggccacttccgaatgtacctgtcggcaacctggacccgtggggaatccagaagggtttccggaggaaggcatgcttcagctccgtag

SEQ ID NO: 2612 - DNA, 288 bp, Zea mays
  Peptide Sequence Number=SeqID_45987
atgaaggtatgtgctgaaggatgcttcggccaaaatgtaacaaagatcaaatcagagaagaaggaacgatgccatgcatttgggagcgagcaagagcttgggacattgatccgctccaccttcgaagataccttctcccattacggaggggaagcttcttgtagaagggatgatgagtactgtgcgccgcttggcgcgggcgcactgttcgccaacagactggtcaggcgcgccgtctgctgggtgaccctgacgccgtctgttggcggattggacaggacgcattaa

SEQ ID NO: 2613 - DNA, 432 bp, Zea mays
  Peptide Sequence Number=SeqID_45988
atggccatgatgggttcaacctcggaaaagatgtacctctgccaggtaccaaactttgggtttgaaatgataaagctgagaccaggcataggacgcagcctgagcaaaattacatcaatgctcctgacatttactgttatccaagaagtcggtttcattctccaccgccgtccttgtgctaagtcaaagcttcttcagccacagcttcagagttggttcacccttcttcctgatcacgcttttcatatcatgcacaccttcatcttaaagccgaagcttcctgtgacagtatactatactggaaaacatgttagtcgtgttattgaggaccttcggaagataaaggcccccaacaccgtcgcttttagatatttctcctcccattcagtagtgaccaatgttctatcaagtttctcgtacatgggattttag

SEQ ID NO: 2614 - DNA, 936 bp, Zea mays
  Peptide Sequence Number=SeqID_45989
atgccctcccggggcgggcagcgggtgcgaagtcctgccttcacgttggatttgcgtggtcgggatcccgccgcattcgtgcgtgaagcggaggacggtgcggcgaggatcgtggggtgctacgtgccgaagacagagggtctacggagctgggatattcatgggtccaacgacagattgaatcgggtcttcgaattgaaccgcttgccatatggtggttatcctggggaagacgccaccgaccgtcgcgggaagaaaccgatgggcatgaccgaggaagggccttcgcaggaggctgccccggccactaagaagagaaaattagccctcgggggaaggatgtcttcgcccgagctccgggagtcttcggcgcgaatgttggaggttaccgggggtcgatggcccaagaatgctctgatcccccgcgcggctggcgaagacttctatacgtcccgcatggcatgcgacttgaaggtgtttccttacggacggaatattgttgctattgtgtcggcagtgatgaacaaggaccgtcaagacgctgcgcagaagtaccgagccatcgtcaggatggcagatcctacgcgcgaggcgaagagggcgcgggggagcgcgaaggctgctgccttcggcagcagcaagccggtgccgcctgcaaaagcagctgcccccagacccagcaaggcgtcggcgagcgcgaaggctgccgcctctggcggaggcaggcctcccctgggcggacctacgaaaggacaggagctgccttcaccagggagacgtgttgctgacttcaacacaaatatcagtgtcgaggattatcttgttgggtcgggtgagggacagttggttgttgtcccgcctttggtggcaaccacttcgccatcggcggtggtaagtgtgggggatagatatcccccgggtccactaaagaagtaa

SEQ ID NO: 2615 - DNA, 1512 bp, Zea mays
  Peptide Sequence Number=SeqID_45990
atgtcccagcggctgagggaggcggccgacttcgtcgatcgtgttgcgtcgggtgtcctgactgcagacgtcgctgccgaaatcgagagtcttcgggcgcagcatgcggatgctgtccgggagaagtcggctgcggagagcaaaaaccgcaggctggcggagaaggtggctgccttggaggccgagaagacggacctccggcgccggctggcggaggagaggagggaggctaatgaggccatcgctgaagtgcaggctgcgcgagcggaggctaaagtggcgcgagcggagaacagtctcgccagccaacttgccgaggagtgggaggcaaggttcaacaccctgtgcggccgcgtggacaaggtcgaggccttggcacgctcggaagtcgggcggacgcacgcgcagttcgtggatgcgtaccgcgatcttggtgcgcggacggcagacttcgaagtgcccgaccaagaggcaggccttcgcttcctcgaatggttgcaggaggagctgctggtgctctcgactattgtgcagggtttcatgtccttcgcctccctcgtcacctgcgaggggaccctaaatgcgttgtcccgcgaggggtgccgacactacgaggtcttcgaccaatcagacgagaactttgaacgtgaaattttcaaggtcgaagaccctatggtgaagcagtcagcgggggcactcttcgataggatgtggggtccgcacggtcgggaggcggttaaggagcggtctgaccgggcgatagagcagatggcgcgtgccaaggatgtcgaggaccttggagatctggtcggcgcgtcgcccgaggctgaggtcgacccggtgccgccctcgagtgccggtgaaggctcctcggctgcacccgtgcctaccgtggccggtgagggccctttgccagcccctgcgtcgacggccgaagatcccccgaaggtggcggctgagccggtggccgaagaccccatggccgcggtcgggccttcgcaggttcaagattttgggcctgcacacgcaatcgctactgtcaatgataattttgtggcggcttcgaccgtggttgctgaagacgattctgatgattccgtgtctaagtgttttgagtctgatgattctgggagttcgattgtgtggacagaggagtcttcggatgaggatttggattactttgcggcattggatgtggctgcggcggaggcttcaccgcgtgtaatgggtgatgaggatcttccgggtgcgagtgttgggcataggcgtcgaagggcagtggcgaaacgaagggtgagtgagttgccgcgaggtgataggcgtcctcgtggtgaggtgggaggtggtcgccttcgtgtggacggggctggcaagcgagaattgttgtcctcgccggctggggcaactatgggtgagggggagctgcgaagtctgtttgcgggtgaggaattgaggataatgttgttcaactatagggagatgggtatcatcccgaaggttgagccaatgtaa

SEQ ID NO: 2616 - DNA, 81 bp, Zea mays
  Peptide Sequence Number=SeqID_45991
atggcgctctcgcccgcgctggagcgcccgcccgggcgagaggcggtccgatgggtcacctacaacccttccgttagatga

SEQ ID NO: 2617 - DNA, 1581 bp, Zea mays
  Peptide Sequence Number=SeqID_45992
atgcggagactcctcctgaggccgaggccggggtcgggcaaggacgccattccttccgaggtcgaggttgagtccgagccctggggtcgggcgaggcggagaccgccttccgaggtcgagattgaggccgagccctggggttgggcgaggcggagaccgccttccgaggtcgaggttgaggccgagtcctggggtcgggcgaggcggagaccgccttccgaggtcgaggttgaggccgagccctggggtcgggcgagacggagaccaccttccgaggccgaggcgggggccgagccctggggtcgggcgaggcggagcttcttgtggcgcctgaggccagactcggctgctgtcagcctcaccctagccggtggcacagcagtcggagcagggcaggcaacgctgttttcctgtcagacgatccttgcattgaatgcacctgcgatacagtcggttggcgaggcgatctggccaaggttgcttcactgcgaagcctgcccgagctgggcctcgggcgagtcgaggaccaagttctttttcgaccatctttacggccctgccatgggtatgtctttcagccgggtggagcatatggatgaggtgctccatacggaggtggagcatatggagcataaggaggtactccatacggaggtggagcatatggaggaggggcgtatggaggtatctagaaagaagcttgacttccatccacagcaggtgggggaggggcatacggacgtaccgggaatgaggcttgaattccggcttgggaagttggaggttgaccatatgaagacggtggatattgatacaaatgatagggataagagtatggtggtggacgcacagccggaaatagtgcacgggggatacacgcggcagtatgggcgtactgtctgccaacggaatggacaggcacgccgcctgcgggatggcctggtcgctgcccatcagcggagtggacagggctcattaaatgctgaggcgacacatcacctgccagcggaatggacaaggctcattaaatgccgaggcggcacatcacctgctagtggaatggacaggcggtgcgccttatccgcaataaatgcagaggccgcgtggcctagaggccttacgtcatgctccgcccgctggcttacgtcacgggcagtaggccacgtggtagcatcggggctccgcctgagcggggagcggaagcaatcctgggacccagctgtgagtggcccggacctcacacagaggggtccgggacccgtcccaggggtccggttcgcgcccgtggaggtcctggaccttacccggaggtccattctgtatatacaggggtccggcactttcccatgggggtccggacccactgttgataccttggagtatatcgtcttctctggccacgtggcggccccagagccgtccacgtggtggggtcaggcgctgtttaccacacgactagagatagtcgtgtgggtatcgcgtcttcatactgtagtaagggactgggccattgttttcggcggagatgaagaggcgcactaccgcgggcggcggttcgccttctctgcactcggagactag

SEQ ID NO: 2618 - DNA, 915 bp, Zea mays
  Peptide Sequence Number=SeqID_45993
atgggtgtagtacgccgcctgcgggatggcctggtcgccgcttgtcagcggagtggacagggcttatcaaatgctgaggcggcacatcacctgccagcggaatggacatggctcattaaatgccgaggcggcacatcacctgctagtggaatggacaggcgacgcgtcttattcgcaataaatgcagaggccgcgcggcctagaggccttacgtcatgctccgcccactggcttacgtcacgggcagggtccgacactttcccatgtgggtcgggacccactgttgataccttggagtatatcgtcttctctggccacgtgacggccccggagccgtccacgtggtggggcgccgtcggcgatcttccgccgtccctgcgtacgcgcggaccgtccggccccagggcgcggaccgtccggccgtcaggcaggagccctagccgcgcaccaggccccggaccgtccggccccaggccgcggacagtccgcccctgcgcagagagtaccaccgcgcctcgcaccaggctgcggaccgtccggccccacgcgcggaccgtccgcccctgtgcagagggcaccgccacggttcttgttgagtgtttgacgctccgaaaaggcgtcaacatacttttggcgactccgctggagacagcatatttagacctatcaaatcggccctcaatggccggtttaagggataactctgatatttccccaagcaacatcatagagccgacttgggacacattgccggctgacgagcagctccagttcgaggagcacaaggagcggatgatccaggaggcgaaagcaaagttcttggccaacttcaaagtggataggaacaacaaggtcgtccgacatcgggcgacggatccggcttcgctccacccacgccagatatccccaatgtaa

SEQ ID NO: 2619 - DNA, 321 bp, Zea mays
  Peptide Sequence Number=SeqID_45994
atgaagaaaacacttgaagatctccaggcggagcaacgtgtcggggtccagcgcatcgccacatgggccagcgaggcgagcacgacactggtgccgctagggatccttgtcgcccgtctggaggccgagggcagcaggctctgccgggcggtgatcaagtacaacctgacgtgcttccggagccacgacccggccatctccttggagccggtgatcgctggtccggtggccgacactgaagacgccgctcgggaggccgtacgagatgttgtggagctggtggccgaacgtttccagcgggatcctgctgatgatgagtag

SEQ ID NO: 2620 - DNA, 69 bp, Zea mays
  Peptide Sequence Number=SeqID_45995
atgaagaggagcaagaggaagaggatagaggaggcgccacccaaggagtcggcccgggagaagaagtga

SEQ ID NO: 2621 - DNA, 239 bp, Zea mays
  Peptide Sequence Number=SeqID_45996
atgcaggcggtgtgcaaccgcaccacggggacgcacccctccgacttcgacgcatccagcatggaggcccagacccacacgtcatccgcctcagagcactcgggctccgcgcccactactgatcaggggttcgaaggctggcccctcgaagggtttgacagccgccccagagcacgcagagcgagggatgactctaggtacgtccgatacatggccgaggcttgggctacgctcccgag

SEQ ID NO: 2622 - DNA, 2526 bp, Zea mays
  Peptide Sequence Number=SeqID_45997
atgccgtcctcttcttcttcctccgacaccacgccgccggccgccgcctcgtctgaggagacgttgagtagcgtgatggtggaggagttgcgcaccggcgactccgttgattttggtgtgtcacggatgacgtcagcccgcgttgaagatatgcagcggttgggctactttggcggcggagttgctcgtgctccggggacggaggaagtccccgagccggaggtggcagaggaagatgcagacgaaggggcccttcggtgcgccgccggtcagagcagtgggcgtgatttagttgaagagtttgtggcatatggggtgtggcccttggcgcacggttgggtgctgggcgaagtgtgccctcgccagatgccttttcacgggggaagggttgtgcgaagccctgccttcgcactgaatctgcggaaccgcgacccggctgcctttgtgcgcgacgcggaggacggggccgtgcggctcgtggggcgttacgtgccgaggacggaaggccagcgcagctttgatatccgcgggtcaaatgaccgtctgaacagggtcttcgaattaaatcaattgccgtacgatggatatcctagtcaagacgaagccgaccgtcgcgggaagaaaccggcggtggagacaggagacgaccctgcgccggcggccgcccctccctcgaaaaagagaaaattaggtactgcgatgggagggattggggtgtctgatagttttgctagggatttaatgaggacgtgtgcggccccgggggagaggatgtcttcgcccgagctccgggagtcttcggctcggatgctgagggttaccgggggttgctggcctagaaatgttcctatcccctgcgcggctgaggaggactgttttacatctcgtatggttcatcggtggagagtttttccttacgggcaaaatatcggtgctgttgtgtggacagtgatggacaaggatcgccaaggggcggcgcaaaaacgccaggcgactgtcaggattcacgaagctcggccgaaaaggccgcggggaactgcgaaggctgtggcctccggcggaggtaagccgccgctggcggcgaaggctggcgcctctgcacctagcaaggcgccggaggcaacggcgggcgccggaggctccaagtcagcgaaggtggtgcccccggccagcggagtggcggaggcttcgaaggcggcccgagcgctgccgctggcgggcaagcgtgttgccgacttcggcaccgacattactgtggatgactatcttggtgggtcggacgagggccagcttgccatagttgcgccggccgcggcgatcgcgacggctgcgcaagcgccgaaggcgaggggcgagatccttggcgccggaggcgaggtgccggccctcgcgttggtcagggacgaggcgggcgcggcgacccgccggctgaagggaatgacggaggcgctgagtcaggcgacggaggcgctgagtcaggtggctgatttcaccagccgtactgcgtcgggggcccttacggcggctttgtctgccgaagtcgagagacttcggacgcaacatgctgacgctgtccgtgagaagtcggcctccgacagcaagtgccgcaatctgacagacaaggtggccgccctggagagggagaaagttgacctccggcgccaactggcggcggagaggagggaagccaacgaggccatcgccaaggaacaggctgcgcaggcggatgccaagctggcgcgggcggagggcaatcttgccaaggagctcgtggagcaactgcaagggcggctcaccgccctggagagccgcgcgaaggaggccgaggccgcgatgcgtgcggaggccgaacggacgcgcacacagcttatggatacatatcgtgagcttggtgcgcggaccggtgacttcgaggtgccggaccgagagcccgggcttcgctgtctgcagtgggcgcaggaggagctgctggaacttccaaccgttgtgggggggttgatgtcgtacgcctccctggtcacctgcgagggggcgatgaacgcactctcccgcgaagggtgccggcacttcgaggccttcgaccaggtggatgaagattttgagcgagacatctataaggtcgaagaccccgtagtgaaggagtccgccggggccctttacgaccggatgtggggtctgtacggtcgtgaggtggccagggagcgcgccgaggctgcgagggctcaggcggagcgcggcgagcgggtggacgacttcggggctctggacagcgtgctgccagatctggggtcgaccctcgcggaggctgtgactggggtcgacctggagccaaccccggagaccgcagcgatcgcgacggctgcccccccatccgctgcgactggcgaaggcgaccctgatgcccccgcagccgctgtgccgagtgctgaaggttccgcagcggtggcggcggaggccgcggcggagcctttggcggagccaacggcggaggctcccgcagcgccagggccttcgcaggtggcgtag

SEQ ID NO: 2623 - DNA, 417 bp, Zea mays
  Peptide Sequence Number=SeqID_45998
atgcctagtcacccaccaactggaaatcgtaccagccataatccaccaagcgacactgtgagtgcccctaggaaccgtagccacaaccacgccgcttgtagccgccttcgaggctttgatgctccggtctgcgactccggtcaaggcttcgtctactcaagggacgcaatctcgcctcgcccgagcccagcctcgggcgagaacagtagttccaggcgaattcacgcctcgcccgagggcctccttagcaacgggcgcaccctcgactcgcccgaagcccagctcgggcaggcttcgttgcgaagcaaccttggccaaatcgcctcaccaaccgaccgtatcgcaagcgcattcaatgcaaggatcgcctggcgccttatcctgacacgcgtgcctcagtcggcaaggtcgaagtga

SEQ ID NO: 2624 - DNA, 1098 bp, Zea mays
  Peptide Sequence Number=SeqID_45999
atgcaggcggcatgcaaccgtgccaagtgggcgcacttctccgacttccaacacgcccacgcgtcatgcaaccggcgcgccagtcgctacgtgcaagcaactgcaccgccactcgcaccactaccgcgcctcctcgactgcggaaccagtaccgcgactcgaggcgacccagcgcacgacccagcagcaccagcctggtgcgacggcggcgcctctggcaggagaagcaagcgacgcttcgcctttgccataatgaccgcgtcaaaaaaaaggccggcccctcgaaagggttcaacggccgcctcaggccactcgggctccgtgcccactactgatcaggggttcgaaggctggccctcgaaggaccagcgggaacgatcttgtaacggaatcccatcagagggaggcatcgagccctcggaccccgtcgacaggggatcgggtccggcagatcacccgcagaggctcaggggctgctctcgcaaacccgactccggccaaaccgttgacagcgtcaacatgctagcccgagaacttgggacccgaccgtgcacccgggctacggccagctcgcatgagggaacgaccagaccagctgaagcattgcgcgaggcattaagacctcggaggagtcaaaccactcctccgaggcctcgggggctacacccggcgagtgcgctcgcgctcacccaccggaacaaaacgcaaccgagaaaggctggtccccttgcaaaaaagtgcgacaaaagcctccaagcgagtgttaacactcccttcgaggctcgagggctactgtcggggaccataattaggggtaccctcaaggctcctaattctcagctgcctcggacaagggcagccgaccctggaggatctccgtctcgcccgaggcccccctccagcgacgaacatacttccggctcgcccgaggcccagtcttcgccaagaagcaaccctggccagatcgccacgccaaccgaccaaatcgcaggggcatttaatgcaaagaagggcagcgccgcctgcgccgctccgactgctgtgccactcgacagagtgaggctgacaggcagtcaggcctggcctcaggcaccatag

SEQ ID NO: 2625 - DNA, 378 bp, Zea mays
  Peptide Sequence Number=SeqID_46000
atggcgcctcctgctgacgaggctggtccgcgccctaggttgggcgatgtggaggctcctccgaggtcgaggtcgagtccgtctttcgtggccgaggtcgagtcccagcccctgggtctggcgaggcggagaccgtcggctgaagccagggctgagtccgagccctggggtcgggcgaagcggagggctgagcccgagtctgagccctgggtcgggtggagcggagttcgtcgtcttccggggctgagcccgagtccgagccctgggtcgggcggagaggagttcgccgtcttccggggcttagcccgagtccgagccctgggtcgggcggagcggagttcgccatcttccggggctgagcccgagtccgagccctag

SEQ ID NO: 2626 - DNA, 525 bp, Zea mays
  Peptide Sequence Number=SeqID_46001
atggaaaggaaagacatgctcatcaaagataacatctctagagacatacaccctaccagattcatgatcaagatatttataccctttatgcaaggagctatagccaagaaaaacacatcctttggaacgaaaagaaatcttggtcttgttctccctgtttgcggcccaactctgtgcgtgcgcgacccacctcagttaatcgcgctatcacgcacacctgccagcccacctaagtactacacccgcacccactcgcgcgcaggctcctctggcacgtgggccccacgtcaccagttgctccttcctcgcaacgacccgcgcgtcgcgtgcaacggagccatgtccaccgcgccgcggccgctgcgcaccagctttcctctcaagaccaagtcaatgtcgtgtggtgtcctttggtctgactccgcgggcgcgcccgagttaatctgggtcaccgcccggtggggcctgctcgccaggtgcttcttcctcactgtaacgtgcgcgcgggggagtgagagcacctag

SEQ ID NO: 2627 - DNA, 1023 bp, Zea mays
  Peptide Sequence Number=SeqID_46002
atgaccgcgtcaaaaaagggaccgggaaaggggatactccgaaagggatccttctccgcgaaggaagcgggcctcgagccccctactgatcagaagaagggttcgacagccgcctcaggccactcgggctccacgcccactactgatcaggggttcgtaggctggccccctgacgggttcgacaatcgccccagagcacgcagagtgagggatgactctgggaacgattctgtaatggaatcccatcagagggaggcctcaagccctcggaccctatcgaacaggaccgggtccggcaaatcacctgcaggcttcacggagaagcaaccttggccagatcgcctcgcccgccgactggatcacaggagcattcaatgcaaggatcgcctgacacctgatcctgacgcgcgctttccagtcgacaaggccgaacaaccaagactagcctcgggcaccataggaatctccgcctcgcccgaccctagggctcggactcgacctcaactcggacgacgatctttgcctcgcccgaccccagggctcggactcgacctcgcctcggacgacgatcttcgcctcgcccgaccccagggctcggactcgacctcgcctcggacgacgatcttcgcctcgcccgaccctagggctcggactcgacctcgcctcggacgacgatctccgcctcgcccgacccccgggctcggactcagcctcaactccggaagacggtcaccgcctcgcccgaccccagggctcggactcaacctcgactccggaagaaggtctccgcctcgcccgaccccagggctcggactcgacctcgacctcggaggagtcaccacctcgctcgggccgaccacgccacaaggggaggccatcattaccctacccctagctagcccaggctacggggaacaagaccggcgtcccatctggctcgccccgggcacagaagtcaccatgccctactattacttcgtcaagcgcctcaacttcgccttcaatatgttcaaaggtgcttga

SEQ ID NO: 2628 - DNA, 96 bp, Zea mays
  Peptide Sequence Number=SeqID_46003
atggatccgctcatcggcgcgagcaagagcttctacggcttcagggccgatctagcggttgacatggcgcaccatttcgatcaaaccaatgtctaa

SEQ ID NO: 2629 - DNA, 168 bp, Zea mays
  Peptide Sequence Number=SeqID_46004
atggccggaatcgctcggtccacgtgcgcaggcgggtgtcctcgtcggcggcgggtgtgccggccaaaccacggtgacctagtccaatccaacggcacggttatgaagtatattacaacttttatatttggcccaagccatgatcatgaggtttacatgaccttttga

SEQ ID NO: 2630 - DNA, 1053 bp, Zea mays
  Peptide Sequence Number=SeqID_46005
atggcagaatcctacggacgagtaagagtacacgtaagcggcaaggccgaccaagccgagggactcctacgcctccgggatacggatacctcactcatcaccttccgtgaaaacagcaccctcggcgtcaactacaccttcggcagagtccgaccgagcctcggacggcaacgcggtcggaggatctccactccgaaggacgacgtcggcaccacgcccgggccatcgccgccagggtcttctccaggaatccggcccgagaagacagctcggccggccaccccgaagcctcagtcagctgtcctccgaggacaccagcccggctcatggcctcggcaactcgactccggcgtcggttccgccagcggacggcccggccaggctccggccgatgaacaagagaagcctcgggcggcaaggccgaccgagccgaggaactcctacgccttcgggatacggacacctcactcgtcgccttcgcacgaggcaactcacacttggttaagcggccccgacaaccacaatgaacagacaccgacactcaaggtgccattacaaacggaactccgattccgcctccgcaggtacgaacaaccccccatgattggagggcctgtggagcaacagaaggccgacggatggctcgccgccgcccgctccagcagcggcgacgacgacttctgctccaagcggccgaacagcagcagcgatgacctcagggtggatgctgctgccataaagccctcgcccacatccccactcaaggggcgaggacgagtagaaggccgtagagttggaggtcagtccgcgggcggcaccgactatctcgtcggcggagaaacctcttccggctgccgcggcggaaggtggcaccgggagcagcgccgaagccgctcggaccggagagccggacacgcggcagctgccagcgccacgaacggcgaacgcccttccccccgatcactgagggaaaggagcgggccgctgcccacgcggagaccgaccccaactcggcacactcccctccccagcactgatgatgaacatccttga

SEQ ID NO: 2631 - DNA, 399 bp, Zea mays
  Peptide Sequence Number=SeqID_46006
atgacctccctcggactcccgacgccgagggctatcggaggttgttcactcaagcagcaaatcaccttctacccctcgctcacccgccgaacgatctgcggcacaccatcaacagtcgccgggacgcgcggagctccatcaacgcctcgcaagaacgacgacacgaaaacgagatccgtcaccgagaagagtacgatcgggaccatggcatcccagcacggagtcaggctaccaggaccgagtcggccatggcttcaactggaggcaccgcccggggacggtcgaggcaccacgacgatcactcccctccccgggacaggcaacatcatcgacgacaggaggacacatgtggagtatcggcacttactccgcgcctcagggccattcaatgccccctaa

SEQ ID NO: 2632 - DNA, 342 bp, Zea mays
  Peptide Sequence Number=SeqID_46007
atggcccgaccggcgcgtgtagatcgcctggtctctccggccgcaagccttaggttcattgtcagaaacaggctggctgtcgtggccctcgctgcagccactcggtggcgttttttctttattggcgatgagatctcctcttcagtccagtgggcgccccgagaacgagatgcactgcatccgtcgtggaagtggaacagtgtcccaaacggcgaggcagggacggtggtcacagacacagagccagagccagaggaggaggagcccggcggctgtgtcagcgtccgtgctgtggaggagcagtgttcttgcactgcctggtgccagatggagacgatctga

SEQ ID NO: 2633 - DNA, 180 bp, Zea mays
  Peptide Sequence Number=SeqID_46008
atggggctcggtgtatgcggctcgctctgccaagtttgggttcgccccttggggaggagtgcgagacattgtgatacaggtggttatgagattgatggttttggttatgactatggtgctggcgaagatgaagctgtggaaggagatttccaggagttccaagattacgacgagttctag

SEQ ID NO: 2634 - DNA, 822 bp, Zea mays
  Peptide Sequence Number=SeqID_46009
atgacttctcacgtatccacggaaggagggaacgcacattcccacacagacgggcttgcacgagagggttttccccgcattttgtgggaggtactgcaaggagccggttacgctacgcctccccagtatgcggtgcagttgttcgaggagcaccaggtaccccgctgtagggtgaggatgactttggagcctcatcccttgcagccaggctggcgttcattggactctgagtctttcggtttcagaactgaggatactattgagtccactgctctgcatgtgctgacgaccttctgcgactttcaccccttggagctatcaacccaccccattggcttattccccgctgagaaggaggacgacccaatgtggaaggatcgggttgagcacgccaaggatgtgtgggctctctacccgggacataccgctcacctgacggttcggtgcatgaatgccatgtatcgtctgctagcattgcgaggggaccttgttgtggacttatccactgagctggtggaaaaagatctccaggtggagcatatgggcacccaaatccaagagcttgatgatcaggtggaggccagggagaacaccatcgaggttctggaagatcagctccagatcacacaacaacaacttgaggaagccaaccagcacttggatctgcaccatcaagaaattcaggacatggaggcagtaggggccgatgaggatctagacatcgagggaggagaggagccggagcctgcatctagtttggacactgctggctcaggaagaccaccttcccccgagtatagcgttgcctcgtttgctcattag

SEQ ID NO: 2635 - DNA, 483 bp, Zea mays
  Peptide Sequence Number=SeqID_46010
atgggcaagaacaagaagggtcgaggttcatcgcaccactccggcgataagcggaaatgcgagccaagtcctccctcggaggactttagtgactccgagtactcggaggaggagttctcctccgagtccgagaggtcgccagtctacgcctctcccccggtgtcgtccgatgattcggacgattcccaggggatacccgccgaggtatggatgtacatctgggccatccaacgctccgggctcgagggctcggatgagtcggaggtctcctcagatgaggagaactcttccaactcgtctaaggaggagagcggcagtgacggcgacgacgagggcgacggcggcgatgacagcgacgatgatggcaagggcggcgaaggcgacggcggcaagggcgacggaggcagcggcggcaagggcggtggcaacggcaagggcagcggcggcagcagcaaggccaatggcaaagcgccattggcttaa

SEQ ID NO: 2636 - DNA, 591 bp, Zea mays
  Peptide Sequence Number=SeqID_46011
atggcacggtcggggtctggcgtcgcggtcgctgcacggcttctggcttgggcgcggcatcgggtggagtcgctgctcggtcctggcgcgggcgggtcggcgttggttgctcggcgcgtcgggctcggggtcgcgcgaggcttgagctcggcggctactcggggtggcgcggctggagctcgtcgtgtcacaatcatcaaggacgaagaggggtttcgaggcgcacgggtccagaacgggagcgcctgtccacgccgctcattaggatcacgccgcgcggggatgatttcgccgctccccaggacgggccgcggttctgctcccccctcctccaaggcgtcgggaccccctgtagtcgacgcatcgggtacctcctcggctaaggaggcaggcttccgatcatcgacctcgagtagcggcgcctcagccatctcaacatcggcggggacgggtggctccacgggcagaacggcaacagcctcggcagaagctggtgccggcgccggcaacccgtcaggtgggctcaaggccacggccgcgccagcattctcccccggcacgacggccacctcaacggaggggtcagcctag

SEQ ID NO: 2637 - DNA, 1206 bp, Zea mays
  Peptide Sequence Number=SeqID_46012
atggatggcagcgaccacccccgcggcggtaagccctccgtctcgcagcttctgcaaggcctccagaaggggctggagattctcctgtttctcgcgcgcggccccatagcgccagttgctgtcggtggtagtcaccactcattgagaaaacgacgggagcctcccatcgtcattccggaggtaaaaccaccggcgctgccaccccttgttcgaagacacaaggatggcggggatgtactgttgcacgcgtgcttgcctcaactggaggatgcagccaccagcccgcaccgccatgcggaccctcttttcccccgtcgtcaaggcaaaaggctccgcggaaaagagatgggtccacagatcccagtgggggtcaatccccaaaaatccttcgcaaaccgccgggaagatggccgcttgcacgatggagttagggttgagattgtacagctccaccccataataatgcaggagcgcctgcatgaaacggcttgctggcactttgaacccccgctcatggaaggagacgaaactcagcacataccccggcggcggggtcggggtggccccactcggagggaccatccactccggctgcgggtcaccagagaggggatggagcaagccatcggcgacaagggcctccagatcatccaccgtgatagtggagaaaggccacgggtcgcgcggcagaacgacggttacccggtcggccatcaccaagcgaagggggtggcggcggagcggacaagggaccgggaaaggggatactccgaaagggatccttctccgcgaaggaagcgagcctcgagccctcctactgatcaggggttcgaaggctggcccctcggaagggttcgacagccgccccagagcactcaggctccgcgtctactactgatcagaggttcgaaggctggccctcggaaaggttcgacagccgcctcagagcactcgggctccgcgcccactactgatcaggggttcgaaggctggccccacgaagggttcgacagccgccccagaacacgcagagcgagggatgactctggaggctcgggggatgctctcgcaaacccggctccggctaaaccgttgacagcgtcaacataccagcccgagaacttggaacctgaccatgcacccgggctacgatcagatcgcatgagggaacaaccagaccggccgaggcgtcacgaaaggcactaa

SEQ ID NO: 2638 - DNA, 1467 bp, Zea mays
  Peptide Sequence Number=SeqID_46013
atggataaggatcgccaagatgcgacgcggaagcgccgggcattcactagggtcagggaccctagtcgcgaggtcaagaaggcatggggaatcgcgaagtccgccgcccccggcagcaccaagccgccgccggctgcgaagcctgccgtccccggccccagcaaaccttcatcgggtgcgagggtcgtcgctcccggctcgagcaagccgccttctgctgagcccacgcaggagcgagggccaccgtctccgctacacactgccgaggcggcggcgggtggggccgacctctccatggacatctgcgtggatgactaccacgtgggtggtgtcatgatgtttgatgcccgcacgaggcggggacttgtcgggtcggatgctgggcaactggctgttgtcccggctccagtggcggtcgcaccggccgcagcggcggccgatgcgaagggtgcttcgcaggacccatggtccaagttttgcgctagcagcgagattacttcggccgccgccgctaaagaagtggcgggttctgttgcgccgcagctgaagcatgcaacgcagcagctgaagcatgcggctgccttcgccgatcatgttgcgtcgggcgctctgacctcggagttcgctgccgagaggcaacgactcaagggcaggattgagcacctccggacgcagcatacggaagttgtgcgggacaagtcagctgtggaaaacaagagccgcaggctgatggagaagttggcagctgcggaggccgagaaggaggacctcagccgtcagctggcggcggagaagaaggatgcgaacagggcctgtgctgaggcgcaggctgcacgtgccgaggccaaacttgcgcgtgctgaggccaatctcgctcgccaacgcgctgaggaggcggaagcgagccacaacagcctgcgcgactacctggacaaagcggaggcctctactcgcacagaggtcgaccggacgcatgcacagctcgcggacgcgtatcagcagcttggtgcgcggatcgctccctttgaagcgtccggtaaggaggcgagcctccgcttcctcggatggctgcaggaggagttggaggtgctcccaacgattgtgacgggccttatgtccttcgcctcgctcatcacttgtgaaggggctgtgaatgccttgtcccgcgagggatgtagacacttcaaagtctttgaccaatcagacgaagacttcgaacgtggaatcttccaggttgaggacctggtgctgaagcgatcggcccgggcactttatgataggatgtggggccctcacggccgtgatactgttcaagagagaaccgaccgggcgatggagcagatggcgcatgatgaggaggtcaaagacctcggggacctggagagcatactgcccgagtcgttgggtgcgaaggaagggactgggggcagctggcgccgccgtctgatgttggcgaaggccccgtga

SEQ ID NO: 2639 - DNA, 804 bp, Zea mays
  Peptide Sequence Number=SeqID_46014
atggccagcgccggcgggcggcggcggtccaaggcgaagccgcgggcgagggccgggggcaaggcgaagaagaggaccaagtaccttagcctcaccgagctgctggttaaggcgcacgcgcaggtgggagcgtcgccacggtccccgtgggaggacgaggaggcggtggcggcggaagtgaagccggaggacgacgcctgcggtgacgacgacgacgaccaccaccaccaccaccacgaggcgtccaccctgttcgaggccgtgccggcgccgtcgctctccgacatcctgggcccgtcgccgcccgagtcgccggccggctccggctccggggcgctgccgggcgccgaggaggaggacctcccgcgccgcgcgctgcggggcagggccagggagcgctgggtgtactgcaccggcgggccttcgccgccaccgccagcgacggcaaccggcaccgccaccgccaccgcgtcgccgtgctcgtccgccgcgagcacgggcgcgtcgccgcgctcgctgctgctcaagctggactacgacgagatcctcgcggcgtgggcgggctgcgggccgctctacatcggcgccgccgtcagcccgcgtccggtcctcgcggacgctgaggtggctgtaggaagggcggagagggtgaggcggtacagggagaagcggcggcggcggcggctcttcttcgcgaggcgggtccggtacgaggttcgccggctcaacgccgtcaagcggccgcggttcaagggccgtttcattaaggaagaggaaagggagctccggcctgcgcctgcatag

SEQ ID NO: 2640 - DNA, 57 bp, Zea mays
  Peptide Sequence Number=SeqID_46015
atggcgtggcgcaccttttttgacgtggtcattatggcgaaggttttcgcaacctga

SEQ ID NO: 2641 - DNA, 2283 bp, Zea mays
  Peptide Sequence Number=SeqID_46016
atggcacggtggttatcccgtggttcggccaagaccaacgcttgcctgctccacgttgtggtggtgacgacggtggtgctccgtggtggtgctggaggacgaggaggagggctgggagcgatgacgtcgccgaggaaggacgcggggttcctgacgcaggaccagcgggagaagctgcggatcgcggtgcagaacgcggagacgcagtcgctcgcctccccgcgctcgcccacggggggcaccacctccgcgctgctgcagcagtacgagctgcagatgctggagcagaagcgcgccgccgcggccgccgccgccgcccggggcggcggcggcggcggaggtgggcccaggcacgtgcgccggtcgcattccgggaaggccatcaaggtgaagaaagatggagctggcggcaaagggacttggggcaaactaattgagactgatgcagaggcatgccttgatcgaaatgatccaaattatgacagtggtgaggagccatatgagttagttgaggcccctgtttcaaccccactagaagactacaagaaatctgttgtccctttaattgaggaatatttcagcaatggggatgtaaaattagctgcttctgatcttaaagagttgggtcatgatggtttccactgttactttgtcaagaagcttgtttccacagcaatggataggcatgacaaggagaaagagatggcatcagtgcttctgtcgtatctttatggcaacgtggtcagttcaactcaaattaggctgggatttgtgctgctattagaggctgttgatgacttggctgttgacatacctgatgtggttgatgtgctcgcccttttcattgcacgtgcagttgttgatgacattctgccacctgctttcctcagcaatgcaaaagtgagtctgtcaggatcttcaaagggtatgcaggttgtacaaattgcagagaaaagctatctttcagcaccccaccatgcagagttaattgagcgacgatggggtggttcaacccacatcacagtagaagaggtgaagaggaggattgctgatcttctgaaggaatacatcagaaatggtgatacagctgaggcttgtaggtgcattagagaattggcagtgccgtttttccatcatgaggtggtgaagcgagctcttactcttggaatggagagtccagctgctgaagctcttattgtcaagcttctgaaggaagcatctgaagaatgtttagtaagctctagtcagatgatgaaaggattccaccgtgttgctgagagtcttgatgatctcattcttgacataccatctgcaaagtctgaatttcagttgttggtatcaaaagccatttctgagggatggttagattcttcctatgtgaactcaggtgtcaacggaagcgttgaagacgatgaacatgagaagctggctaggtacaagagggaggctgtatccataatacacgaatactttttctctgatgatacaacagaggtcatccgtagtgtcaaagagcttggttatccggaatacaatccgatcttcgtcaagaagctcataacaattgctatggaccgcaagaacagggagaaagaaatggcatcggttcttctcccttcattaagcatggagctgttctcgtctgaagacatcgccaagggatttgtaatgctccttgaatctgcagaagacaccgcgctggacatattggatgcctcagatgagctgggactgttcctagccagggctgtgattgatgacgttctcgcacctctaaacttggatgagattagcagcaagcttccaccaaactgcagtggggctgaaacattgaacatggcacgctcccttgcgtcggcccgtcatgccggtgagaggcttctgaggtgctggggcggtggaaccggatgggctgtggaggatgccaaggacaagataacaaagctcctggaggagtatgagagtggaggcgatgtaggggaggcatgcaactgcatccgtgagctgggtatgtctttcttcaaccatgaagttgtcaagaaggcgctcgtgatggcaatggagaagaagaacgagaggaccctgaacctgctgcaggagtgctttggtgaagggatcataaccatcaaccagatgaccaaggggttctcaagggtcagggatgggctcgacgatctggctctcgacattcctgatgccagggagaagttcctttcctatgtgcagcgcgcgaagaagagtggatggctcctgcctgggttcggtgtggcatcttcggcttga

SEQ ID NO: 2642 - DNA, 579 bp, Zea mays
  Peptide Sequence Number=SeqID_46017
atgggggtgcaccagcgtcgccttcttcttgctgtcgttggaggagcgcggcctcatggagatcagtgcccttcagccatcgctcggcttcaaggatttttgtcgtgcagtccggctgcattccctcaccaatggtcagtttggtggggagaagcaagtcgagctgcgacctctgccccgccctcagcttcaaggatcttcgtcatccttgctgaggcggagggcaagctgagccggggttctacctcccgcatgggtcggcaggtcgtctcctccttcagcattcaggggagagggcgctcaccggccttgcggagggggcgaacttcgacaacgcgggaccgatcggccgcaagcgtcatcagctccagcgtggctagctcgctggctcagctggctctgccgcggcctccgacgctgcctcctgccgcttggtccttgtggggaccggcgctggccggtccgcgaggatttgagtggggatctgccggcgagccgcttagagttcgttatcccgcggtccccctggtgtggaggttgttcgtacccgcgggagcggaaccggagtcccgtttgtaa

SEQ ID NO: 2643 - DNA, 429 bp, Zea mays
  Peptide Sequence Number=SeqID_46018
atgggcacggcggcgcactcggcgctcgggctcggcggcgctcgggctcggggacggggacggcggcgcttggcctcggggacggggacagaggcgctcgggctcggagatggagacggcgacgctcgggctcggagatggagactgcgacgctcgagctcggagatggggacggggacggcagagttgggctcggggacggcggcggcatggcgggcgcccagctcggagacggtggcgcttgggctcgggctcggcgacggcgtggcgggcgctcacggctcggagacggggacgggaacggcggtgcagtatcagcctggcggcgtagtatcagctccggggcgaaaactaaaccctaaaccaccgtaccgaggcttttatattgtaaacacatcacaagcggtttttctaaaaatccgcctgtga

SEQ ID NO: 2644 - DNA, 585 bp, Zea mays
  Peptide Sequence Number=SeqID_46019
atggcacccaagcgagctagttcgaaggcagccccatccatcgacgaagcagcgaaggcagcgctgctgactaagaaaaaaggcaaggccctcacggacaacacccccaagaagcctctgaagacgaagctcttcggaggacttccgcaagcaccacctccaggcttcgctccaccagagggcgaagacgcaatagaagacggcgaagtcatcggcatctcagccgaggaacagctacaactgcgggccctgcgcatcaagaaccacaacctccaaaagcagaaagacatcctcgaggccaaacgccaacgtgtcaccgcgcaggccaaggtgtgccagatgatacgagacgaggagcagagagctcgggagctcgagcaagaaatcgcgctcatgcagagcgaaggccagcatgatctgcagcacggaccgcccctccaacagcgcgtcacagccggagacctattcatacctcagtgcgggcccttcattccgcatgtcatagtttccaagggatcaactgccttgatgagcgaagccccttggctccgcaactccaagcgtcaccttggcccgccaacttaa

SEQ ID NO: 2645 - DNA, 519 bp, Zea mays
  Peptide Sequence Number=SeqID_46020
atgtgggccacgaccgtcaggtctatcctccccacggagatctcgctcgcccgcttcaagctcgcttcggttgaccgtccaacggccgccgtgcatggcgcactcgcccctgttgaccatacccctggccctacatactgggcgcccctatctctactccaaatggcctgctccgcaagaagccgagtcctctcatccacaccgcgcgccgccgccagactattagaactgatccgccgtcgacgattcccgatttccttcgctgtggtgacctcggtgccgacctgggaagcttcggagactcagagcggaaccaatcgtgaccacgataagggctgggagcgttctcgggtccccggaatttctcgccgaggctctagctccgccgcatcaccgccgcgcgccgtgggcggatcacctgggagcgtaattggagaagagcccgttgctgaggatcctggtgagcagcaggttgaagtagctgagcaggagctcattgaaggcaagttgtgcccttga

SEQ ID NO: 2646 - DNA, 459 bp, Zea mays
  Peptide Sequence Number=SeqID_46021
atggcctgctatcccctagctaatcagcacccacctttgctatgtcaacgaaatctatactacttattaagaaggacatgcacccgccgcagccccccgccgccactggatctctcgccgcacagtggatctggtggaagaaaggctggtcggaggcccaagcgggttgcggtggccgctacgggcatggtcgcggacgtgattggcaaggagtacacacgatccacggctaattctgtagtaagcatgccaaatgcttggaagggtcgggacagggagagcgatggcgatgggtctggtggccgcaaggacagtgttgaagagacagagcagttcctgtgctccatgctcggggataattccgagcttggcatgggtgttgtcagagacgtgccagctggtgttaatgacataggttgtatggtccttgatgaacaagcaatacctgggggtagctaa

SEQ ID NO: 2647 - DNA, 1410 bp, Zea mays
  Peptide Sequence Number=SeqID_46022
atgcggggcgggacgctgcagatcaactggcacgaccagcagccggtgctcagcctcgacttccaccccgtctcccgccgcctcgccacagccggagcggaccacgacgtcaagatctgggaggtagcgtcggacggcaagctccccaccgccaccttcaagaccggcctggtccccaacaccaccgcccacagctccgcggtcaacgtcctccggttctccccttcaggggagtatctcgcctccggtgctgatggtggcggcatcaccctctggaaactgcatcccgctgacgacggcgaggcatggaaaattcacaagacgttactattccatcacaaggatgttcttgaccttcagtggtcgcatgacagcacatttcttgtttctgcatcagtcgacaacacttgcataatttgggaagctagtaaaggcacagtgcaacaaaagctagagggacatctgcattatgttcagggtgtggcatgggatcctttgggccagtatattgcttcactgagttctgacagaacctgtaaaatatatgcaaaaaagcctcagggcaaatccaagaacgcggagaggttgaactttgtttgccagcatacactagtgaaggtagaataccagaatcatgatgaatctaagccaccaaccaaatctcatttgtttcatgatgagacactaccatctttcttccgaaggccttcgatacaactccctggggcaagtaaagctatagtggcagtacgcttctgccctgtactattcaaaccacgtggttctaactcagatggtttcttcaagcttccttatagagttgtctttgctgtggctactttgaactctctgtatgtctatgatacagaaagtgttcctccaattctagtccatgctggtctacactatgctgccattaccgatattgcatggtcttctgatgctaagtacctggcagtgtcatcacgagatggctactgtactataatagagtttgagaatgaggaactgggacagcctcacatactccccggatcaaaggaagttgctaatgggaatctgacacctgagaccaagaagcctgtatgtgctgatagcatgaaggttgataatagtgccaacaagcttaagatggaagccagtcctgttgctgtaggagttagagcaccactgctgccaactgagaacatcaagagaacaggagagcttgccgaaggaaatgtaacctgtgaaaacaaggagccggtaacaatagacagtatggaagtagatgccgatgataccaaaggcaaggaggcaaccatacccgtggcagctgaagtgacaccgccaccagcggtaccggcagcgaagaacagcgcatctagtaagcctgctaagaggcgaattactcctatcgcaatcgactag

SEQ ID NO: 2648 - DNA, 261 bp, Zea mays
  Peptide Sequence Number=SeqID_46023
atgcctccacctccacagatcacgcctaccctgccccgcccgcgacagcctgcaagcattaatgaagttgtctgttttgcaataactatgtggagcagtttgatcatcattgtccatgggtcggccggtgataactccagtgcacaagaatccgctgtacagggtggccttgagctgtatgcagaggtgaacaaccgtgggctctgcgctattgcccaggctgagtcgtctactataaggttctcggtggactcgccatga

SEQ ID NO: 2649 - DNA, 1017 bp, Zea mays
  Peptide Sequence Number=SeqID_46024
atgtcttcttcctcccttatgcgtcgcgtctttccaccttccaagcccccggatggggggtacccgccgtcttttcgcctcatcgttggaggaacgcaactccgtgggagttggtacctttcagccatcgttcggcttcaaggattttcatcatgcagcccgactgtatccccccgccggtggtcacccaagacggtgaccaccagttcctgggtggggagaagcaagccgggctgcgatcttggtcccaccctcagcttcaaggatgttcatcatcctcgctggggtgggggccgggttgagccggcgctctacctcctgcgcgggttcgtgggtcaccctctcccgcggcgttcgggggagagggcgctcactggccctgcgggcggcccggacttcgacaacgcggggccggtcgacggcgggcatcgtcacctccagcgtgtcgggctcgtcggcttggctcccagcggcccctcccgccggagggcggctgccgtgccgtgtacacgggagggccacccaagacgtcgcgcgccgctagggcggcgttcgtgttctggggtggtcctgcctttgcaccgagatggcgccctcgcgcggtgccccactcgcccgggaggatttgagtggggatctgccggggggctgatggcccctgccatcagtgtcgaggcggaggcggctcgagaagtccccgtcaccgacggggtcaccgccaccattcgcgcttcgggcctccggttcttcgtacttgtcctcgcccctcaagcgttgcacgaacagaggcggagttggctcgaaaatgaaaacctggttggtcggagcctagccgggttgtccgtcagcgggaccgatgccggagttgatcagccgaggcctcggaccgggctggcgcccttggaagacggttggccgaggcccctggggaaaccggccgagccgcctgctcgggccggattcccggagaagtccctggaccgcgtcgccgtccgaggctgggtcgggcctcgctga

SEQ ID NO: 2650 - DNA, 243 bp, Zea mays
  Peptide Sequence Number=SeqID_46025
atgggtgcgattaagccaaggatcggtccgttcaagggacatgatcgtgcctcgtccgagcctagcctcgggcaagggaagccgaccccggagaacctacgtctcgcccgaggaccccccccctccagcaacgggcacactatcggctcgcccgaggcccagtcttcaccaagaagcaacctcggccacatcgccgcgccgaccgaccaaatcgcaggggcatttaatgcaaaggtggcctga

SEQ ID NO: 2651 - DNA, 588 bp, Zea mays
  Peptide Sequence Number=SeqID_46026
atgggcagcggctggaccagcgtgcacgaagaggtcttcgctcccgtcctcactacgagagtgaggacaagaccatccaagagcgccgtcgccgcccccgcggcgtacgacgtcttgtacgacctcccggtgcgaccggaggcgcgggagaagccgtggatgtggccaacccgtgcatggcgcgaccgtcgcccgtacgatggacgggcagccacgctccgccccagcggtaggagcagcgccggaggcggcaccagagccacccaggccggggagccagacacagggcagctgacggcgccacagatggccggccccgcgtacccggagtttgcctcctccgcaaagcctacgaacacccttctcccccgaattctggaggaagaagcggaccgccagcccacgcggaaggcgaagctcccactcggctcgccctctaccccagcgcggatgatgaacatccttaaagctgagggcagggggaggccgcagcccgtctcgcttctctccaccacaaggctggtagtcatccttgtggatgaccaccgaccggagattgcgaccgggctgcgtgatgaaaatccttga

SEQ ID NO: 2652 - DNA, 375 bp, Zea mays
  Peptide Sequence Number=SeqID_46027
atgaggatgaagctcaaaatgatgatggagaagatcaaggagttgagccacctcaagaggagagcattgatcaagggggagatgcaaatgatcaagacaaggaggatgaagaaccaagaccgccacacccaaaagtccaccaagcaatccaacgagatcaccccgtcgacaccatcctcggcgacattcataaggggggtagatgaagcactacaagattcgtattgggtggtggcgatgcaagaggagctcaacaacttcactaggaacgaggatgccaagcctatcaagacacccatgggaaccaatgggcatctcgacctcgacatggaagattccaagccgaccctaaggaagctcaccttacggccgtaa

SEQ ID NO: 2653 - DNA, 1050 bp, Zea mays
  Peptide Sequence Number=SeqID_46028
atggctcgtagaagatcccaaaagaacaagaagactcctccaacgaacgcaactcaaaaggaggtaactcttgagatattatttgatgattgttctaattatgattcatggtctactagtgtgataaatgcctttagaaccatacatcctcaattagaacaaattattgacaagagtattttcccctctagttttaatggaaaaattaattccgaggaggatcaaagatgttatcgcttaaactacctagcttttgacatcttaaacaattctcttagcaaagaagattatcgtgccttcatatcaaactatgacgaatccattcccgatgcgcatgatatttggactagaattaaaatcaagtttgatgagtccaaacataatagttcatttaatgcctcaacttcctttagtttttgtgatactaacccttgcaaggaagaaggagaaaatgaacgatggagaccaaacgatgaatccacctctccaaaagctaatgaaaatgatagcggaagcacaaacgaggatgaggaggaagaaagaagctttgtgcatctctacgctcgcctaagccaagaagataaggcggtcatgctcaaacttctagaaagagcgagagaacaaagcgaagctcgtcaaaggctagaagatattctctccataaagatgcaacactttgacgagttgactaaagaacatgaggagctaaagtgctctcatgttgatttggtccaaagcaaatcttcctttgagctagaatttgcaggaacaaatgatgattcatatcaaaagctcaaagaagaaaatgagaggctaaagaagagcttgacacaactaaaagggaaatgcattgcccaaccttctcaagataaccgtgatcacatggtgaagaagcttgagacgggaacaaccgtggcatgcactacatcccttgaagaaaatgtcaaggatttgaggattgccatgaggaggaaacaaaaaatgaaattcaacacctcctccaaaagcctcaaccacgcctccacaaaaggtaacatccaagtcacatag

SEQ ID NO: 2654 - DNA, 444 bp, Zea mays
  Peptide Sequence Number=SeqID_46029
atggggctcaagtcactatctcaaagaatcgaatgcgcgagaatggagtcttggtgcttagaaatgatcaaggaatgcttgggtgactcctccatgcgcctaggggtcccttttatagccccaaggcagctaggagccgttggaggcaatctgggaaggcaattcttgccttctatcgggtggcgcaccggacagtctggtgcaccaccggacatgactattcatggtccggtgcagatcaccttcctaaaatggcacagccgaccgttgcagagttgtagccgttggcgcaccggacattgtccgatgtacaccggacagtctggtgcctcctgccgaccgttggagcgggccacgcttcgcccgcggatttggcggtcgaccgttgcgctggcggttgttggctcaccggacagtccggtgcaccaccggacagtccggtga

SEQ ID NO: 2655 - DNA, 1563 bp, Zea mays
  Peptide Sequence Number=SeqID_46030
atgggggtggcccccagcacttccctcttccgccatttgttcgtgctggtgaagtctggaaaggctaaggaccacctcggcgcctactacttcaagacgaggtcggattcagtcgtggcctacatcccctcccttggcggcgcaaggtgggagaactggcgcgacgactggcagagggcgcacctatgttgttggttcaccggctcaaatgacatcggcctggtccagcgtgggccagggaccgacctgtcctgggacgagctggaagtcctagtgaaggggattaccggtgagtccttcattcctgagtccctgatcctcccccagggcatttttgcgctttgcgacgatccagagctgaggacggcgatcctggccacgttgccgacccttgacgagagcggcgtggcggttcgtcggactggtggccgggacccccaccgcgggatccagatctccgacgcaccggctgggggcccccagtctgccggcgtggctcccagcgcccccgccagagcttcccgcgcctccgccacggccccctgccccttggacaagggcaaaggggctgcaagcagctcctccgccccaggcggcactagggtgtcggaggaagagaggcgacgccggctgcgccgcgccgacggattgtttgtttcggaaccccccccccccgttggggccgaggaggccggctccaagaagcgtcagaggactgctggtggggccgaagagaccggctcccaggcccagggcgcgcagaggcgccaacaacaacagcagcagcaaaagcagcggtcgccccgcttccagggtcgctggaaggtccagggccccaaggcttcctccccctctgctcccaaggtcgtgcctcccccgcccctggctgctaccaccgagacagcgccaccggtcctccaggctccagctgggggtccagcagcagcggcgccaacgtcaagtggcgccacagcagtggagggggtcccaactgctccgacggctaccacagcctcaacgaaggcgatgccgtcgagtacaccgtcggtggcaaaggaggccccaactgcgcccgccctcgccatcgaggtcgatgtggggggcgcgtctagctccatcttgccgcccactccggaggagacagaggtgatttttgggcggtgtctccggtccggcgtcgagccagaagcggtgacgattcccctcccccaggtgctgtctcgcgcccatcaggctcttcacgagaccaaggcggcgatcctgcgggagtgggaggcgctggaggccgaacaccagcgcctcagcgactggcgtacccagctggaggcgcgcaccaaggcggtgtcccgccagttcgccttcgagcggtccgagcttgagcgggaccgcaaggactacaagaaggacctccagaaggtgtacgcccgggagctagagcgggagctggatgacaaggccaacagtattgccctggccgaggagaacctcaaggagaaggatgcttccctggataagcgggcgacggatctcgcctggcgggagaaggacctcgcctttaggtag

SEQ ID NO: 2656 - DNA, 402 bp, Zea mays
  Peptide Sequence Number=SeqID_46031
atggaggcgatgaagaagacacttgaagatctcctggcggagcaacgcgtcggggtccagcgcatcgccacatgggtcggtgaggcgagcacggcactagtgtcgctaggggtgagtcccatcccggtgtcggagatgccgatgtccatctctgacgcgctcccggtgctgtactccgccgtcgaccgactccgacgcctggaccagattcttggcgcctgcctggaggccgaaggcggcaggctctgccgggcggtaatcgagtacgtcctgacgtgtttccggagccatgacccgcccatctccttggatccggtgatcgctggtccggtggccgacactgaagacgctgctcgggaggccgtacaagatgacgtggaactggtggccgaacgtttctag

SEQ ID NO: 2657 - DNA, 549 bp, Zea mays
  Peptide Sequence Number=SeqID_46032
atggatgagtccatgatggacttggagaatgaggcagtgctacggaacgactgcgagaaggaagccgtgctgcggaatgaattctgccaaattaggaataaggaagcaaaaggatatagacataaggttgtgaagttttgggatctactcagcctagtgtacaataaagaccaagcaaatggagagggtgctaaaacaacagctgaaagttcaaaggaaatggcaaaagagaataataccagaggcaaggatgctccatattctgtatcttcctcgagtagtttaaaaagacaaagatcagatgattcatttaactctatatggtgtgataagttcgacatgcttacatctgcattgaaagatgacggtccaaagctaccctcttccgtcgaagttctcaccgcattacaagaggttgagggatttgatgaagacacagaacttgagctttatgacatcctcacctctaatgcacgcaagtttgagtcgatgatggcactcccaatggaaaggaggaagaggtggcttatgatgcagctaaggaagtga

SEQ ID NO: 2658 - DNA, 666 bp, Zea mays
  Peptide Sequence Number=SeqID_46033
atgatttcacaccgaggcgaccaactttggatccggagcaggccgaacgcgacagcgaacgcgagggagatggcacgcggcgaggacgcagggcacgacaatagggggctggacttggcgaggaactcgacggcggcgacacagactagatccgcgcacggtgagatgggcaggaccgagcgcgacgcagggggttggtcgccgagcaccaacgacgaagagagcgcccatggacagaccaagatgttcctgtgcccaccaccgtggagcgccgggagatccagaacccgcgcagaaaaatccggcaccgagagcagggaaacaagcagcggacgcaaggaggaagacgccgacgaactagagtcgggcaccgagcgagtagggatcaccggcgaggctcggagctttggggagggagggacgtcgagggaaaagctcaagcagagccagtggcgcgcgatgggagaggagggtgcagccagacgctctgagaaggagaccgagctcggcgttgaggactgggacgagctggagcaccggcagaggaggagcaggcgaccgggacgcgagcgagcagggcacggtggagcacgggccgagcgccatgggagaacgcaggaagaagcagccgacgcggtggagagaagcaagcgatgtcgcggctga

SEQ ID NO: 2659 - DNA, 591 bp, Zea mays
  Peptide Sequence Number=SeqID_46034
atggctgaaagataccaactcccgcggagttgcgttcctccaacgacgaggcggaaagacggcgggtatcccccatccgggggcttggaaggtggaaagacacaatgcataggggagcacgaaaacatggtcgccttccaagagggtcaccctccttttaaaggcgactctccctacttgcgtccccagcggtcgtgggctgagtcttctccaacacgctccaaggtcctcccctacggcgcgggggctgggtcccacacgtcatgcaagccggcccagagcagaagaagccaaaccgccggaccaggaaagggggataccccgaaaaggatccttccccgtgaaggaaccaggcttcgagcctccctactgatcagaggttcgaaggctggcccctcggaagggttcaacagccgcatcagagcacgtgggctccacacccactactggtcagaggttcgaaggccggcccctcggaagggttcaacggccgcctcaggctactcaggctccgcgcccactactgatcaggggttcgaaggctggcccccgaagggttcacagccgcctcagacacagagcgagggatga

SEQ ID NO: 2660 - DNA, 375 bp, Zea mays
  Peptide Sequence Number=SeqID_46035
atggcgcctcccgttgacgtggccggcccgcgccctaggttgggcgatgcgaaggctcctccgaggtcgaggtcgagtccgtcttccatgaccgaggtcgagttcgagcccctaggtcgggtgaggcggaggccgttggctgaggccagggcggagttcgagtcctggggtcgggcgaagcggagctcgtcgtcttcgggggctgagcccaagtccgagccctgggtcgggcggagcagaattcgtcgtcttctagggctaagcccaagtccgagcccctggtcgggcggagcggagttcgccgtcttccggggcttagcccgagtccgagccctgggtcgggtggagcggagttcgccgtcttccggggcttag

SEQ ID NO: 2661 - DNA, 693 bp, Zea mays
  Peptide Sequence Number=SeqID_46036
atggtgaccactagcccctgggtggggagaagcaagccgggctgcgatcttggtcccaccctcagcttcaaggatgttcatcatcctcgctggggtggaggccgggcagagccgaagctctacctcccgcgcgggttcgtgggttggcctctccttcggcgttcgagggagagggcgctcactggccctgcgggcgggtcggacttcgacaacgcggggccggtcgacggtgggcgtcgtcagcctcagcgcgtcgggctcgtcggcttagctctcggtgccccctcctgccggaaggcggctgccgcgccgtgtgcatgggaggaccgtccaagatatcgcgcgctgccagggcggcgttcttgttctggggcggtcctgcctttgcaccagtacggcgcctccgcgcggaggtcggagtccctcggctcggtcagccttgttgtccgaggcttcccttgcttagttagaggaacccctcggccgctcttcgatgagccgaggacaggggtagcggtgtcagcgcgaacagaggcagagttggctcaaaaagaagacctgagcggagacccttggaccgcgtcgctgtccgaggctaggtcggacctcgctgaaggtgttgtcgacaccgagggtgctactgctccatttagccgtcaagatccgagcctgcaggatcggattatcttgtag

SEQ ID NO: 2662 - DNA, 435 bp, Zea mays
  Peptide Sequence Number=SeqID_46037
atggccgtgataggttcaacatcggaaaagatgtacctctgccagactaataccagaaaggccaacacgcaatgggagtggagagatggcgagagtagcgtgtaccctccgtggcaagaggctggacggtggtgtatctgtgctctcggttggcgtgaacccggtctggtcttaagaaccccagtggtgaaacgctcttgggcgagggaaaggatacaaataccgaacttgtcgagtgattatgtgcatctacagggttgtccaagaatacgaaacatagagataaggccttcacacggagctgactgggggtttgccactaacacaactagaactcatcgtagtcctggaactcctcaaagtcctccatgttgcctgcatctcctcctaagcactgattgcagtggggacaacctggggttgggtggtttttaa

SEQ ID NO: 2663 - DNA, 280 bp, Zea mays
  Peptide Sequence Number=SeqID_46038
atggcgcctagggccagacttggctgctatcagcctcactctgtcgagtggcgcagcagtcagagcggcgcgggcggcgctgtcctcttgtcagaccggtcagcggagcggcgaagtgactacggtcacttcggctctgtcgactggagggcgtgcgtcaggataaaggtgtcaggccacctttgcattaaatgcccctgcgatttggtcggttggcgtggtgatttggccaagctttgtgctgatgggggttaccagctgacatttaggagtcttgagg

SEQ ID NO: 2664 - DNA, 579 bp, Zea mays
  Peptide Sequence Number=SeqID_46039
atggctgacatggtctctaaggttactggccagggggctaggcctgctcttagggaagatccagtggtcgaggacggcgaaatcgacggcgagggaggcgtagatggggacgtcgccgggcttgaatccgcccatggcgtgctgcgacccaccgaggagcggagaggtacggtggggcaggagcttggggccgaggagagtgtggatccgcgaccatggacgagcatgacgtccaagagtcaaggcgcaggtcgaggacgtccaggtgggcagagggagtcccaccggcgacgagggagggacgtgccagggagattaacggcgagctccatggcggcaattaatgggttggacggagaggggaaaggagagctcgagatggcggacaggaaagggtctgttacttgtacccaggagtccggccgaggaggtcctgatccggtggcggaagtttcggcggccaacaaggagtcgttgaacggcccagccgatccgtgctcgagcttgaagagcgacctggcgaatgggccccacacgcagaggcacaagcacccagcagtacacggccccaggcgttag

SEQ ID NO: 2665 - DNA, 231 bp, Zea mays
  Peptide Sequence Number=SeqID_46040
atgaagctgtggaaggagacttccaggagttccaagactatgacgagttctaggcgtgggttagcggcaacccccagtcggctgcctgtgaaggccgcgtttatctacgtttcttttccgcactttgatttattgttccccatccgcgtggactacgagaagccagtcattagcttgcccgtctcgccgatcgagtacctcctccggctgctcggcgtccgtggcttgtaa

SEQ ID NO: 2666 - DNA, 1131 bp, Zea mays
  Peptide Sequence Number=SeqID_46041
atgaacaaaagaccggcattcaaggtgccattacaaacggaactccggttccatccccgcgggtatgaacgacctccacaccggggagcctgcggggcgacaagttccgggcgactcgccagcgacctctacagcagcagctatggtcctaggacggacgcgacgaccggaaggctctcgttcgcgtccccgctcatgggacacgaaccagacatcaaagccaaagagcgggccgctccaaagcgcaccggcagcaatagttcgccttccctggcatggctggaggacgcctcctccgcagagctgggggatggtttccaccaccagaagctggaagaggaggtggccagccgacccgtgcgggaggtagagccccggctcacctcgctctccgccccagcaaggatgccgggccgcgtgatgaaaatccttgaagccgaacgatggctgaaaggtaccaactcccacggagttgcgttcctccaacgacaaggcggaaggattgcgggtgtcccccatccgggggctcggaagccgtcgtgggctgagtcttctccaacacgctccaagacgaacgcgtcgagcagtgccgtgcagtcgccggcgtccttcacgtcctcgcacggttcgcccaagtgctccagatgtagcacctccgaggcgggcaggagcagcggtcacgtcgtcagccaagctcacgtcccatccaggggcagcgagagaaccctctcacggcgtgaagacggcgcgcccgcgtttcgttcctcgaacggctcgcgcacgcgcaacggccgccccacgaaccactcgccccgtcgcattaactccgcggcgggacaggcggcacctctgggaccgggaaagggggatactgcgaaaaggatccttccccgtgaaggaaacaggctccgagcctcactactgatcagaggttcaaaggctggcccctcagaggggtttaacagccgcctcagagcgcgtgggctccacacccactactggtcagaggttcgaaggccggcccctcggaagggttcaacggccgcctcaggctactcgggctccgtgcccactactgatcaggggttcgtaggctggccctcgaagggttcacagccgcctcagacatag

SEQ ID NO: 2667 - DNA, 237 bp, Zea mays
  Peptide Sequence Number=SeqID_46042
atggcgcctcccctgtacctggcacgcgggccctggctgacagccgctgcttgctcgggcgggtcgctgacgcctagggccgtgtactgctgggtgcttgtgcctctgcgtgtggggcccattcgccagcacgccatgggcggattcaagcccggcgacgtccccatctacgcctccctcgctgtcgatttcaccgtcctcgaccactggatcttccctgtgcccacatccacgtag

SEQ ID NO: 2668 - DNA, 336 bp, Zea mays
  Peptide Sequence Number=SeqID_46043
atggctttagcgccgcctccggtgctgcctcctgctgcttggtcagggcgtggctgtccgtccaccgcacgggcgacggtcgcactgtgcgcaggtctgccacatccatggcgtctcccgcgtcgccggccgtactgctccgacgtcgcccgaggggttgtacaagacgtcgtacggcgtgaggggtggtggccgcgttcttggatggtcttgtcctcactctcgtgggaggacgggagcgaggacctcttcacgcgggctgaggcggtcgccgttgccggtttcagtccgagtggccaagttgcgtgtccggacctcctcgggtcgcagcactag

SEQ ID NO: 2669 - DNA, 987 bp, Zea mays
  Peptide Sequence Number=SeqID_46044
atggcagaagagcgccaacctccacgaggtcgtgctcctccaacaacagcaagaagaagacaagatcgacagcaccactgcgcagaaaacgaagagcgcgagctctccggtggtgaaaccaccggagggggtggccctgacgcggattcttctagtgaacaccggggcgccccatctagaggccccgaaggcagaaaggtgcaagaggagcgaggcatggctactgcccgggggatggacccctttttaaaggcggatttccctactcacgccccgaagcgtcacgggcaaggcctcctccgatgcgcaccggggttcccaccctatgacacgggggccaggccccacgtgtcatacaggctgactcgaagcgcgaagaagaaaaccgccacgcaaggagcatgcaaccgccccgcggttatgtgccccttcattttcgccgcaaccagcggtcaggaagacgaaccgccgcacgaggagcgtgcaaccgccctgcggttatacgccccttcatcttcgctgaaaccagcggtcaagaaggagaaccaccacgcaggaagcgtacaaccgccccgtggttgtgcgccccctcagcttcactgcaaccggcggtccaacatggggcccagacccacatgtcatgcaaccggcgcgccggttactaggtgcgaaaaatcgcaccgtcgctcgcgccaatgccatgtctccttggggccggcgcggaagactgaaaagataagttttcagaaccagtgcagtgactcgaggcaccccgcgcatggcccatcaatgacattaagtacgaaggtcacgggccagtcaaccgtggaaactggcgtggcagtcagcgtgaccataggcgggccgacagtgattgcgtcaacaggcgcgcaggagaagcaggccaatcaccaatcagactctagccccacctgcaggctcgcatcctcccctgaggcgggcccgggggccactgcggtaccctga

SEQ ID NO: 2670 - DNA, 111 bp, Zea mays
  Peptide Sequence Number=SeqID_46045
atggggtccaggcacagtgcttgctctgccgaggctgggtgccgaggtaaagaagaagtcgtcgaggcggatctccaggagttccaggacttcgacgagtccgaggattag

SEQ ID NO: 2671 - DNA, 477 bp, Zea mays
  Peptide Sequence Number=SeqID_46046
atgacgaaggacattagcatgccttccatagctgcggtggcactaggtaatacggaggtccctatgcacccgccgacagcgacactttcaacgaccagagtggctgagacgagggttgaatctggagggcctgcacatgcagatgaaatgggcaaaggtgccgcagaaatcaaagaagccaaaaaagctatagagggtgacatgtctatgggaaaaggtccttttgaccaagagtttggcggccgatattacagagtttatcactcagcgaggaaagccatggggggccaagctctcgaattcgctgaacaactggggtatcctttgggatcaataatcttcgaagtagggccagacaattacttgtactattgtccagatagccgagagaccgatgtgtgccgctacatggttgacaacataggatttccaaagcttgaagttgtactgtcaacaatgtccttcaaagatttttag

SEQ ID NO: 2672 - DNA, 246 bp, Zea mays
  Peptide Sequence Number=SeqID_46047
atggcgcgggagcaccagagggtgcagaacacggcgaaaaggtcccgcggcggcacaaacctactccgatctcttgaacttcaaggtcctccgttgccaactgctcttctggcactctcaagcatttcttcagccgggacacatggaacacatcgtgcacagctgacagactctctggtggtcttgactggtatgaaatgggccgcctttgttaaacggtccactactacccagatggagtcataa

SEQ ID NO: 2673 - DNA, 93 bp, Zea mays
  Peptide Sequence Number=SeqID_46048
atggcgagtgggcgttgtgcgggggaggctgacaggctcaacatgatgcagcatttcatgactcacataggttttgctatattagataaatag

SEQ ID NO: 2674 - DNA, 762 bp, Zea mays
  Peptide Sequence Number=SeqID_46049
atggcagcgtcccaccagttcgcctccgagcggtccgagctcgagcgggaccgcaaggtttacaaaaaggacctccagaaggagcgggagctagaggacaaggccagcaacattgccctggctaaggagaacctcaaggagaaggatgtgtccctggataggcgggaggcggatctcgcctggcgagagaaggatctcgccttcagggaggaaatgtttgaaaggcgggataagttgctggtcgagcatgagctcgaggcggaggagaaggagaaaaagctagaaaagcggatccggcagttcctggcggcgcagacggcactgggcccccaggcgatggaggcgacgaagaaagcacttgaagatctccaggcggagcatcacgccagggtccagcgcatcgccgcatgggccggcgaggcgagcatggctctggtgccgctagggatgagtcccatcctggtgtcggagctgccgatgtccatctccgacacgctcccagtgctggactccgccgccgaccgcctccgacgcttggaccagattcttggcgcccgcctggaggccgagggtggcaggctctgccgagcggtaatcgagtatatcttgacgtgcttccggagccacgacctggccatctccttggagtcggtgatcgctggtccggtggtcgatactgaagacgccgcccgggagggcgtacaagatgtcgtagaactggtggccgaacgcttccagcgggatcctgctgatgatgagtag

SEQ ID NO: 2675 - DNA, 84 bp, Zea mays
  Peptide Sequence Number=SeqID_46050
atgggcgggtccagagctgccacgtgtccagagaaggtgatgtactccaaggcatcaacggcgatgtaccgcctccgcatttaa

SEQ ID NO: 2676 - DNA, 369 bp, Zea mays
  Peptide Sequence Number=SeqID_46051
atggcgtttgccggccggaattggctcgccggggtgcggcgagggctgttcctcgtcgtggaccttgaaaacgaagaagagattgaagtgactgaagagaagacaccaccaccttcggaatctcaggccggaaattgtttctactttgacatctgcggatccgagcctgactcacctactaacgaaggcaagccccggcgtgctgatcgaggaccctttaactggtcacatgcctcgtcatggcataccctcgagagtcttttccttagtcgggtgaggaagcgacaaatttttgttgcttttgctccaaggtggtgtcaaatgaagaaaaacaagagtgaagatgcgggaggacgtggtcctccataa

SEQ ID NO: 2677 - DNA, 390 bp, Zea mays
  Peptide Sequence Number=SeqID_46052
atgggggggaagatgtcgctgagaccgccgccgccgggcgggctgacggccgccattgtcgctgtcatgcggcagaggaaggagtaccatgtcgtagctaccgtcgagggacatgaactcgagactcccgaaacagagcagcgtcccgggctgaagaggttgctggagactacccatctggagctcgacaggaagttgttcgtcaacacgcagcaggcccctacctggcgtgccaactgtcggcgtttcgaccctggggggtccctggcccgacgagtaaattgtcgctgtgtgtcccagcctagatgggtcggcgcgatatggaacacaagggggaagagaaccgcggctcgtgttatcctgcgcccagggcagatgcgcttgcagtag

SEQ ID NO: 2678 - DNA, 216 bp, Zea mays
  Peptide Sequence Number=SeqID_46053
atgtcggagttatttatatgctacattttacgatatagcagtgagacgaatagtgtcatttatacctctgccttggcaaaggttgattcccgaatgatgcaaccgcaattactagaatccgtgaacagtaaaggaatactgttcactatttatagacacaggacacagcctgtgaagaattacaattatgcccctcataaaagtttacaacattga

SEQ ID NO: 2679 - DNA, 279 bp, Zea mays
  Peptide Sequence Number=SeqID_46054
atggcaagagtagcgtgtaccctccgtggcaagaggctagacggtggtgtatctgtgctctcggttggcgtgaacccggtccttaggacaaggacatctgtaggtgggcctaataccttgggaggttccgtcacagctggtatcggagcgaagcccatcttctcagatattacgggcctgtttggcaaagctccagctcctgcttctttagctctagatcctgatcctcgtgaggagctgatcctcctgattctcctagaaaatcagaatcatttttaa

SEQ ID NO: 2680 - DNA, 1050 bp, Zea mays
  Peptide Sequence Number=SeqID_46055
atggaggacttgagtacaatgaccccgacaattatgatcggaaagattgcggcatttgaaatgtcgcgaaaaatgggtcaacaagaggagccaacttcctcaagatcatatgcttttacatgtgatgaaaagaacaagggaaagaagaaggctcccactccaagctgctcaagtcaagaagaggaaggagaagaaagtgatgatgatgaagataatcaaccatcaacatcatcctccgaggacgaagaaacaatccgacgcgttggaaagagtggatgcttcacatgcggggtgaacgacgacttcagggacaactgcctaaatatggccaaacccacaaagaggaggagcaaaggcaaggcacttacaaatatcaagacttgggatgactcttcaagcgaagaggaacctccaaggacacgcagccaccgatcctcatcactctcatcactgtcatcacgcaagtgccttatggcaagaggtaaaatgagtattccatcctctagtgatgatatcagtagtgatgatggtgaaggtgagggaaagccgtacttagagcttgcagaagtcgttcaatgttttgaggatgtatgcactaaacaaaaggatcaacttaaaaccttgaaaaataagttgattagctctcataatgattataaatgtttgctagaaaaatttgaaacatttgcaaatttgaattgctatgccacaaggaaggccacaagtcttaccaatgcaaggcgaagactagagataagcaaaagctcaagcaaaagccaacaagcaaaatctccaacacctacatcaacaagatggacaaaaggctgctacaccatatttgatcaagaagaaaaagaatggaaaggtgatagcaatcaaggccaacaagcaagccaacaaaggaaaatgggccaaacacatctgggtgccaaaggagattatctcaaccatgaacaacaccaagaaggtttggatcccaagagggaagtgagaagtctgaaggacgttggagaatttggagacttggaaaaattgggatgtatatcatga

SEQ ID NO: 2681 - DNA, 264 bp, Zea mays
  Peptide Sequence Number=SeqID_46056
atggctcccaagaggaaaatcgcgagttcttccgctgtggtgattcccccaattgatcccaacagccagttgcctttcgcaggcctttcttggcgtgctgccgcattttggattgtggaaacacctgtatcattgtcgccctgggatggccgggggacacatcagttggttggaggtgccatcttggagatgcgcggggacgaaactgagtatcttgaaatccctctaaagacagcattagggatgcgcctggatggtttatag

SEQ ID NO: 2682 - DNA, 390 bp, Zea mays
  Peptide Sequence Number=SeqID_46057
atgaagactctgacgactttctatggctaccatccactagagatggtgatgcaccccttgggactcttccctgctgagaagaaggatgaccccatgtggtgtaaccatgtggaaaggctgagccagcgcattaccaccttggagcagcaggtggagatccgagacaacactattgatgtcttggagaaccagctccacgatgtgcagcgggaactcgaagaggcaaatgaccacctggacatgcaccacttggagatggaggccaatgaggccggaagcgagggagaagaggctcccgaggagttaggaccagcccctggtgccaatgggactacctccgcgatgcccccttcactcgcatccagtgtcgcttccaccgctcagggttga

SEQ ID NO: 2683 - DNA, 129 bp, Zea mays
  Peptide Sequence Number=SeqID_46058
atgtccggcgaggacgatcttggttctccggtgaagttctgccaggtccaagggctgggaaagcttcacaagctattggcgaagctaaccgagtggctggcgcggcttggaatatacttcaatgcctaa

SEQ ID NO: 2684 - DNA, 570 bp, Zea mays
  Peptide Sequence Number=SeqID_46059
atggagtccgggacacttgcccaggcgtgtgctgttgcacggcgtgtacaacagcagccccagactcagggcggtcgggggctgcacgactttacgtcaggctcggcccgatggcttatgtcatgggccataagcaacgggtctccgcctgagcgggaagtgaagagcaaggcctggacacatgtcagcaccggacccctactcacgccagggtcctcctcgttccgggaccttgctgaggttcgaaccttattcggaggctccggacttatacgtataggggtccggtgtccttttgtggaggtccagatcccacgattcatactgggatgtgttgtcttttcttgccacgtggcgccctttggcctacccatgcggtggggtcaggcgccatcctccgcgtggcctggagaggtcgcatgggtgcggcgtcttcatgctgtagaagaggctgaacttcttcaactgcagctgagctttccagctgaacttaacttcagctgtgttgagcttcttcagctgcagctgagcttttcagctgagctggacttcagctgtggacctctttga

SEQ ID NO: 2685 - DNA, 720 bp, Zea mays
  Peptide Sequence Number=SeqID_46060
atgactaccagccttgtggtggggagaagcaaggcaggctgcggcctctctcctaccctcagcttcaaggatgttcatcatccttgctggggtgggaggcgagccgagtcggggtcctgcctttcgcgtgggctggcggcccgcttcttcctccagcattcgggggagaagggcgttcgccagccttgcgaaggaggcgaacttcggctacgcggggtcggccatctgaggcaccgtcagctgccgcgtgtctggctcctcggcctgggggctttggtgccgcctctggcgctgcctcctgccgcttggacggagcgtggctatccgtccaccgcacgggcgacggtcgcgccgtgcgtaggtcggccacacccacggcttctcccgcgtcgtcgaccgccccggggggtcgtacaagacgtcgtacgccgtgggggcggcggcggcgttcttggatggtcttgtgctcactcccgcagtgaggacgggagcgaggacctctttgcgtgcgcgctggggcggccgccattcgctggtacgacactggtgcgcaggtggccgctgtcgtcggtgctgaggtggtcgccgccgctggtgaggctccccactgcagaggtggttgcctccgctggtgagaccgtcaatgccacctgccaccggacctccggctctttggttttaatggcctcgttgtcgccccccgtaggaagacaggggtga

SEQ ID NO: 2686 - DNA, 1926 bp, Zea mays
  Peptide Sequence Number=SeqID_46061
atgacgaacgccctcaacactgggggcgagatcgggatcacagcccggtttgcctctccccatccaggagctggagaccaacgggcgaaagaggcgggcagccatgcaggcggcatgccactgcgccaagtggacgcgcttctccgactcccgacacgccagcatgggggcccaggcccacgcgtcgcgcaaaccggcgcgccggatgctgcatgcaagcaactgcaccgccacttgcgccaccaccgcgtctcctcgattgcggaaccaataccgcgactcgaggcgacccagcgcgcgacccagcagcgccagcctgacgcggcggtcaacgcggccaaaagtgggccggcagtaatgacggaggcaggcgcgcgggagcagcggtcacgtcgtcagccaagctcacgtcccatccgggggcagcaagagaaccccctctcacggcgtgaagacaacgcgcccgtgatccgttcctcgagcggctcgcgcacgctcaacggccgccccgccaactactcgccccgtcgcattaactccgcggctggacaggcggcgcttctggcaggagcagcgggcaacgcttcgccttcgccgaaacaaccgcaccaaaaaaggtacgccgtgtcgttcggtttcgctccgagcctccctactgatcagaggttcgaaggctggcccctcgaagggttcaacagccgcctcagatcgcgtgggccctacacccactactggtcagaggttcgaaggccggccctccgaagggttccacggccgcctcaggctactcgggccccgcgcccattactgatcaggggttcgaaggctggcccccgaagggttcacagccgcctcagacgccgagcgagggatgaccaggggtacgttcgatacataaccaaggctcgggctgcgctcccgaggtacttttgggcgtgcctctgggcccctagccgacccctaacgaatggggcacggacgtccactcggattacccgcttgcagctcaccggagacaccatgttcggcgcccatcgagggctcgggggctgctctcgcaaacccggctccggccaaaccgttgacagcgtcaacataccagcccgagaacttgggccccgaccgtacacccgggctacggccagctcgcatgagggaacaaccagaccagccgaagcattacgcaaggcaataagacctcgaaggagtgaaaccactcctccgaggcctcgggggctacacccggcgggtgcgctcacgcgcacccaccggaacaaaatgcaaccgagaaaggctggtccccttgcaaaaaagtgcgacgaaagcctccaagcgagtgctaacactcccttcgaggctcgggggctactgtcggggaccataattaggggtaccctcaagactcctaattctcagctggtaacccccatcagcataaagctgcaaaggcctgatggggctcggactcgggctaagacccggaagacggcgaactccgctccgcccgacccagggctcggactcgggctaagacccggaagacggcgaactccgctccgcccgacccagggctcggactcgggctcagccccagaagacgatgaactccgcttcgcccgaccccagggctcggacaccgtcccggcctctgccgacgacctccgcctcgcccgacccaggggctcggactcggcctcggccatggaagacagactcgacctcggcttcggaggagcctccacgtcgcccaacctagggcgcaggccagccacgtcaataggaagcgccatcatcaccctaccccgagctgactcgggccgcagagaacaagaccggctccgccactcctccgacggccacgacatcacactagttgggttccaggatctctccggctgccacattggcatgtactcagggcactag

SEQ ID NO: 2687 - DNA, 1215 bp, Zea mays
  Peptide Sequence Number=SeqID_46062
atggcggcagcaggcgggcggaagcagcagtccagtcatctgcaggctcacgtcccctcctgggatagcgagagagccctctcccacggcgtgaagacgacgcgcccgtgttccgttcctcgaacggctcgcgcacgcacaacggctgccccgcgaaccactcgtcccgtcgcattaactctgcggcaggacaggcaacacctttggcaggcgaagcgggcgacgcttcacctccgccataatgaccgcgtcaaaaaagggatcgggaaaggggacactccgaaagggatccttctccgcgaaggaagcgggccccaagccctcctactgatcagaggttcaaaggctggcccctcggaagagttcaacaaccgcctcagagcactcgggccccgagccctcctactgattagaggttcgaaggctggcccctcggaagggttcgacagccgcctcagagcactcgggctccgcgcccactactggtcagaggttcgaaggctggcccctcggaggggttcgacagccgcctcagaccactcgggccccgcgctcactactgatcaggggttcgtaggctggcccccgaagggttcgacagctgcctcagagcacgcagagcgagggatgactctgggtacgttcgatacatggccgaggctcgggctacgctcccgaggtaccctaggacatttccgagaccagcaggagcgattctgtaacggaatcccatcagagggaggcatcgagccctcggaccctatcaaacgggaccgggtccggcaaatcacctgcagagtgaggctgacagaagctaagtccagcctcgggcgccataggaagctccgcctcgcccgaccccaggggccaggctcaacctcgacgccggacgacagactccgcctcgcccgaccccagggctcggactcagcctcgacctcggaagacggactccgccttgcccgaccccagggctcggactcagcctcgacctcggaagacggactctgcctcgcccgaccccagggctcggactcagcctcgacctcggacgacggactccgcctcgcccgacccctgggctcggactccgcctcgacctcggacgatggtctctgcctcgcccgacccccgggcccgaacttagcctcgacctcggaggagcctcaggctacgaggaacaagactggcgtcccatctgtttcgccccagtaa

SEQ ID NO: 2688 - DNA, 426 bp, Zea mays
  Peptide Sequence Number=SeqID_46063
atgccggggaaggcgaactgttgccgcccagctaggatgcaacattccgccctctccctcgcattcgcggcgaggacgacagcgagggagtccctcggctcgatcggccttgctgtccgaggctcctctagcttagttaaagggacccctcggccgctcttcgatgagccgaggccaggggagatggtcggccgaggccccaggggcaaccggccgagccgcctgctcgggccggattcccggagaagtccctggcagcgattgcccgggcgtggtgatgacgtcgtccttcggagcggagatcctcggaccgcgtcgccgtccgaggctaggtcgggcctcgccgaaggtgtcgtcgatgccgagggtgttgctgcccccttccagcgtcaagacccgagcctgcagggtcagagtgtcttgtag

SEQ ID NO: 2689 - DNA, 213 bp, Zea mays
  Peptide Sequence Number=SeqID_46064
atggtgatgtgtgcaaaagataatcaattgttgaacatggagaggaaagataaaagcaaaacacatgagctcaaggccaaggtcatggaattaccactagacgcgcagagcagcggaagacgtctcgatgtagacgaacgcgtcgagcagtgccgtgcagtcgccggcgtccttcacgtcctcgcacggttcgcccaagtgctccagatgtag

SEQ ID NO: 2690 - DNA, 402 bp, Zea mays
  Peptide Sequence Number=SeqID_46065
atggctccattcctcagagggctcatcaggcgcttcctggcaagcaagatcagcaatccaagccccctgcctcccaatcagaatgcctcctactcgtaccttcagacgctgaatgctctaaaacaatcaagaacccaaccaggggggagatggtcagagcttgatcttcggtatgtgaagaaaagcagcgatcagcatctggagcttggttacaaggtggagaggcatctcaatgatggggattttgttcttttcaatcggcaaccaagtcttcataaaatgtctatcatggttttcaacatggcattcagtgttctctttgatggcgcaaggatacggaaatgctccgcgcatggaagaatgcaacggatcagcccgtggctgcagccattgtcaatttga

SEQ ID NO: 2691 - DNA, 390 bp, Zea mays
  Peptide Sequence Number=SeqID_46066
atggcacttatttctcatgctacttcaactgaagtagctcccttttcttttgttgtcaatgatactgaaatattttgtgatggggagcctattaagagagaggatgaggagcgtcttgatgaagttggttattatgatgttggagttagaaagcaaatggcccaaatcagagagcttgttgagcttccactacgccatcctcagcttttcaaatctattggtgtgaagccaccaaagggcaatgggccacctggttctggaaagactcttattgctcgtgctgttgcaaacgagactggagcctttttctttctaatcaatggtccagagatcacaaaatttatatgtatagctaggatcaccaatagattacaaaatcttttctcataa

SEQ ID NO: 2692 - DNA, 1434 bp, Zea mays
  Peptide Sequence Number=SeqID_46067
atggggggagctcgagttgctggtggaggtggtggcggcgagtggggtgcgagggccgcggcggcggcggcgctgggcgttgccgggcgcgcgctcaactgcgcggtgagcttcgtggtgttctcggcgctggacgtgctggacgtggtgctgtgcctggcgtacaagctggcggactacgcggcggaggcggagtggaggccgtgctactgctccgcggcggcggacccgcgcgtggcgcagcagctgccccccaagcccaaggtggtgcggctgtcggcggcgtcgcccgccaggttgcacttgcagctggaggacgtgtcggacacgctgtacgcgcggccgtcgctgctggccgacgccacccgagccggcggcgacggcgtcgcccctgcgctcaccgtgagccccgccgccatcgcggcactgatccgcgagaagacggaccgcgcgccgcggcaggcgccgtgctggtctgactgcgactgcaaggtgtgccacgcctggagcgggacgtcccccgcgtcgttgtcccacctctacgtgcacgtccaggcgccgccggcgatgccgatggcagtggagacggaggacgtggtgttcatccacggcttcatctcgtcgtccgcgttctggacggagacggtgttcccggccttcagccccgccgcgcggtcccggtatcggatgttcgccgtggacctgctggggttcgggcgcagccccaagccggccgaatcgctgtacacgctgcgcgagcacgtggagatgatcgagcgctccgtgctgcggcgctaccgcctcggctccttccacgtggtggcgcactcgctcggctccgtcctcgcgctcgccctcgccgtcaagtaccccgccgccgtcaagtcgctcaccctcctcgctccgccatacttcccggtgccggagtcggaggccgagtcggcggcgcagtacgtgatgcggcgcgtggcgccgcggcgggtgtggccaccgatcgcgttcggggcgtccgtggcgtgctggtacgagcacgtgagccgcaccatatgcctcgccatctgccggcaccaccgcgtctgggaccgcctcttcaggatcgtcaccaggaacagggtgcgctcgttcctgatcgaggcgttcatgtgccacacgcacaacgcggcgtggcacacgctgcacaacgtcgtgtgcggcggcgcggggcggatgggagcgtacctggacgcggtggaccgccgcctctcctgcaaggtggcgctcttccacggccgcgacgacgagctggtccccgtcggctgcacgttggcggcgggggccagggtgcgccgcgcgcgcgtcaccgtctacgagcgcaaggaccacatcaccatcgtcgtcgggcaggagcgcctcttcgctgccgagctcgaggccatctggagcgccgaccaatag

SEQ ID NO: 2693 - DNA, 99 bp, Zea mays
  Peptide Sequence Number=SeqID_46068
atggccccctttgccccacccttagatccgcctctgcctggcgccgcccctggtgtccttaaagtttcttctaacacgatctcacatgagtatatttag

SEQ ID NO: 2694 - DNA, 378 bp, Zea mays
  Peptide Sequence Number=SeqID_46069
atggaggtccaccgcgcccgcacggtggccgaccaatttagcccggtccagtgccccgatatgagtccctgtgtcacccttgcctctgctgaagccttcccaggccttagcacgcctcaagccccctccccgtggtcggaatccctcaccggagttcctccggtccgcccgaggctttccccccgccgttcttcccctctctgccctcggattcgtggcattttccccgctactgagttcgccgtggcattctctccctctctgcccaatcccggtgaccccggagccaacctagcttgcgcctgcctcaactccggtgacctcaccgccgcggagatcagcagcgccccccgcagtcgttcaaccttcctggtctga

SEQ ID NO: 2695 - DNA, 2034 bp, Zea mays
  Peptide Sequence Number=SeqID_46070
atggacaaggatcgccagggagctgcacagaagcgccaggcggtcgtcaggcttcatgaagccaggccgaagaggcagcggggggctgcgaaggctgctgcccccggcggaggcaagccaccgctggcggcaaagtcggtcgtccctgcatccggcaaggcgccgaaggctgcggctgccgccggtggttccaagtctgcgaaggctgcaccggcgtccagcacggtgccggaggccgcgaaggcggcccgagagttgccaccgccgggtaagcgcgtcgccgacttcgccaccgacattagtgtggacgattatcttgttgggtcggacgaaggccaacttgttgttgttccgcctgccgcggcgaccacggcggctgccgtggtgccaagggcgaagggcggtgcttttagtgctggcggcgagatgccggcactcactgccgtcagggacgaggcgggtgctgtgtcccgccggctgaaggagatgaaggaggcactgagtcaggcggctgacttcgcagaccgcgcggcgtcgggggccctgatggcagttgtgtctgccgaagtcgagagactttggacgcaacatgctgacgccgtcggggagaagtcggccgccgacagtaagtgccgcaagctggtggataaggtggccgcgctggagggggagaagactaacctccggcgccaagtgacggaggagaggaaggaggccaatgaggccctcgccaaggcgcaggctgcgcaggcggaggccaatttggcgcgggtggagggcggtcttgccagggagcgcgccgagcagttggaggagcggctcagcgcactgcagagccgtgtggagagggccgaggccgcgacgcgcacggaggctgagcggacacgcaaacaacttatggattcataccatgagctgggcgcgcggaccgctgacttcgaagtgccggaccgagagcccggacttcgctgcctggagtgggtacaggaggagttgcaggcgctctccaccatcgtggaggggtttatgtcttatgcttccctggtcacctgcgaagaggcgatgaacgcgctctctcgtgaagggtgtcggcactatgaggtcttcgaccaagctgatgaggatttcgagtgtgatatctacaaggttgaggaccctatagtgaaggaatccgccggagccctctacaaccggatgtggggcccctacggtcgagaggtggtcagggagcgggccgagacggcgaggggtcaggcggagcgtggcgagagagtggatgactttggggctttgaacagcgtgctgcctgacccggagccgaacccgacggaggctgtgcccgaggctgccctgcagccgcctccggaaaccgccgaaggcgctcctgatgccctcgcagccactgcagtcgtcagaggcccgtcgccaactgccgcgccgagggctgaggatcatgtgaaggtggcggcggagtcgacagcggaggagaccgcgacggctgggtcttcgcaggttcaagattttgggcctacgcacgcaaccgctactactaattttttggcggcttcgaccgtggatgatggtaataaatcggatgggtctgcatctaagttttctgattttggcgactctgcgagctcggttgagtggactgaggagtcgtcggatgaggacttggactactttgcggccttggatgtggcagcagcggaggcttcgccacacgctgcggatgctgaagttgtgcctggtccgagtactgggcgtaggcggcgaagggcggttgcgaagcgtagattgtgtgccctcgcacattcggctatgctcgcgaaggcgttacgtacttggtcaggtgtatttgttatgctggactggtgcgcatgtagttggtctttgcgcgaacagtttggtgtagtcgttttcgcttttgttacgcttcgtccggctgcgcctttgggcaactgttgcacggatagtcttcgcggagaacttcgatttttcatgcttgttgcgctagcccggctgcacccgtag

SEQ ID NO: 2696 - DNA, 480 bp, Zea mays
  Peptide Sequence Number=SeqID_46071
atgggggagaatcccgcgaaaggcctcacacaaatgtacaaaaatggaaatttgcagaatggaattagggttcagatgtgtcaagttcagttcgtagaaatcaaggagaccgcggaagaagggggagacgggaagagcaagaccacgaataagaaaaggaacgtaaacgacagattcatgggtatcctctgtcggaacagtgacaccgcggcaaatccgccaagagcaaagctcttttggaagcaaaaccccagcgtcaatgagatgaaggaggttggattccgaaatgatggacatatggttaccagcgaatggcagctggctgttggggtcgataggcgggatgattgcaacaacggtgctctgcctcttccgcttcggcgccatcgcaatcttttcggcggaacgagtaggatcgagatctctgggaagcagaggagtggttcgaagggaaaaagtgaagttagggctcagaaataa

SEQ ID NO: 2697 - DNA, 501 bp, Zea mays
  Peptide Sequence Number=SeqID_46072
atgggcaaaggcaagagaggtcgaggctcgccccgtcgtgctggtgacaagcgaaagcgtgatccaagtcctccctcggaggactttggcgattcggagtactcggaggaggaggtttcctccgagttcgagggatcgctggctctcgcctctcccccgacgtcgtccgatgactcggacgactcccaggggttggccgctgaggtgtggacgtacatccgctctgtcgagcgcgccaggctcaaggggtcggatgagtcggaggtctccttggatgaggagaactccttcggctcgtccgaggagcagagcggtgatgacagcgacgatgagggcggtggtggtggcgatgacagcggcgacggtgacggcagcgaaggcgacgacggcggcgacaagggcagtgaaggcaacgacagcggcgacgatgacagtggcgacagtggcgacaaggacgatagtggcagcggcaaggccagtggcaaagcgccactggtttaa

SEQ ID NO: 2698 - DNA, 192 bp, Zea mays
  Peptide Sequence Number=SeqID_46073
atgacgggctatcggctagacgatgggctggcgacgatggcaggcaagccacggctagcgatagacttctcttttgacagaacgaagggaaataaagaatgggcgatgaagctggaagccaaaggacttcggctggacttgttgacaaagctcaagtatgatgatgactggaagaggataaagatcatatag

SEQ ID NO: 2699 - DNA, 1077 bp, Zea mays
  Peptide Sequence Number=SeqID_46074
atgccaccagaagttgttcttctaggtgaaagtcctctcgatgaggacaggttggaaacaggtccaattaatctctcggatgactttgtagtagtctgtgatgcggcattagacacacttgataatgatgcacttggtgaaatgctgggtgatgaaactggcgagagtgtactgttatctttttcagtaagatccatgcttcctgataaggttctagtgccatctgatgcagctgttgttattggtgacacccttcttgatattgccaaggatgagagtttgagatctttacgaacaccgacctttttggacacatcatctgcaccgttacaaggtgactttcttggtgatcccccttgtgatgacattgacgaagagaccagccgatcaattttatcatctgttgttactggtgacacccttcttgatattgccaaggatgagagtttgagatctttacgaacaccaacctttttggacacatcatctgcaccattacaaggtgactttcttggtgattccccttgtgatgacattgacgaagagaccagccgatcaattttatcagcaagatcaatacttcttgacaaggtatttgcagcagaggacactgttgttcgcttcggtgaaacaccacaggagctactagaaatctttttcccctttgattcgagctggaaagaagaagacagactccgcattgaaggccacagcccatcaggagcccggccaccaggcaacctcctcagagcgatttgcgtttctggaacggcatcacccactggcgtcgacgagctagagaatgaggacgggctggaagtcgcagacgatggcgatgccggggcagagatcctggacggagtactcggccgcgagccgccggaagacggccttgacggagtcaccggccgccgttcggtggactgggacctcttcgcctgtgacccagctggcgtcggggacgacgcccgaccgccggcattcggtgacgggtgcctccttggagtagtaggtgccgctgctggcatcgcggctaccttgcgcttcaccgggccatcagcatggccgttagtgtaa

SEQ ID NO: 2700 - DNA, 771 bp, Zea mays
  Peptide Sequence Number=SeqID_46075
atggctaaaaggtaccaacttccacggagttgcgttcctccgacaacaaggcggaaggattgcgggtgtcccccatccgggggctcggaaggtggaaagacacgatgcataagggagcgcgaagacatggtcgcctttcaagggggtcaccctccttttaaaggcgactctccctacttgcgtccccagccgtcgtgggctgagtcttctccaacacgctccaagatcctccccctatggcgcgggggctgggtcccacgcgtcatgcaaactggcccagggcagaagaagccaaaccgccgcgcgcggtacatgcaaccgcccagcggttacaagcgtccctccactttcgcccagaccagcgggggaagcgagcgacgcttcgccttcgccataatgaccgcgtcaaaaaagggaccgggaaagggggataccccgaaaaggatccttctccatgaaggaaacaggccccgagcctccctactgatcagaggttcaaaggctggcccctcggaggggtttaacagccgcctcagagcgcgtgggctccgcacccactattggtcagaggttcgaaggccggcccctcagaagggttcaacggtcgcctcaggccactcgggctccgcgcccactactgatcagggcgggaacgatcttgtaacggaatcccatcagagggaggcatcgagccctcggaccccgtcgaaaggggaccaggtccggcagatcacccgcatatacttttggagcgcgcctccgggcctctag

SEQ ID NO: 2701 - DNA, 5253 bp, Zea mays
  Peptide Sequence Number=SeqID_46076
atggcgcccaaggcggggaaggccaagcccaaggccaggggcgacaggaagaagaaggaggagaaagtgctgcccaccgtgctggacgtcaccgttgagacgccggactacacgctgctcacgctcaagggcatatcaacggacaggatcctcgacatccggaagctcctggccgtccacgtggacacctgccacctcaccagcttctccctgtcccacgaggtccgtgggggccagctcaaggacacggtggagatcgccgccctcaagccctgccacctcaccatcgtcgaagaggactacacggaggagctcgccgtcgcgcacgtgcgtcgcctgctcgacatcgtcgcctgcaccaccgtgttcggggcgaagaagcccgagccgaagcccgatgcggcggatgccgcggccgagtccgccaaagccggctcgccctcgcccggtaagacggcgcccggcggcggcgaggagcccatgtacccgccgccgaagctggagcagttctacgatttcttcaccttctcgcacctcacgccgccgctgcactacattcggaggtcgtcccgcccattcgttgatgacaagagagaagacgacttcttccagatcgatgtgcgagtttgtaacgggaaacccgtgacgattgtggcatcccaagaaggattctaccctgcagggaagcgagcactcatcagccgctccctcgttggactgttgcagcagacaagccgtgcatttgatggagcctacaaggctctgatgaaggcatttgtcgagcacaacaagtttggaaatctaccttatgggttccgatcaaacacatgggtggctccccctgtcgttgccgactcaccatcagtgttcccacctctcccaaccgaagatgaaacctggggtggcagtggtggtggtcaaggaagagacggaaagcacgaccatagaccatgggtgaaagaatttgccattcttgctgcaatgccttgcaaaacagctgaggagaggcaaatcagagacagaaaggctttcctactccacagtttgtttgtggatgttgcagtcctcaaagctgttgcatctatccagcaactgatttccaaccatacaagtttacatgaaacagagaatggcaccatcggttcagttttgcacaccgagcaagtaggtgatatgaaaataatgatcacaaaggacaaaacagatgcaagctccaagctagatgtcaaattggatggaagtcaggctccagggatgtcttctgatgagcttgctcagagaaacttgttgaaaggcatcactgctgatgagagtgcaacagatacagccactcttggtgtggttattgtaaagcattgtgggtatacagctgttgtccaagttccagtagatactgaactgccagctgcttctgtagcacagcaggagatccacattgaagaccagcctgaaggaggtagcaatgctcttaatgtcaacagcttaaggatgctgcttcataagtcatgtgctcaagcacctggagttcaacggttgcagactagtgatcctcaagacaatgaggctactcaaacttttgtccggaagatattaacagacagcctgcagaagcttgaaaatgaggttccgatagtaacaagacctatcagatgggaacttggtgcttgttgggtacaacatctacagaacccaacttccgagaagacagagactaagaaaagtgacgagactaaggatgtccctacagtaaagggtctgggtaaacaatttggtcagttaaaggagataaaaaagaagacagatgacaagggtggaaaagataatgggcatacagacaacactgccagtgtaaaggatgataaggacattattcttcagagattgcttccggaagcagctttccaaagactgaaggaatcagaaactggacttcatgttaagtcactggatgaactgattgagatgtcacataaatattatgatgataccgcgctacccaaattggttgcagactttggctcacttgagctttcccctgttgatggaaggacattaacagattttatgcacactaggggcctccagatgcggtcactgggacgagtggttgagctttcggataagcttccacatatacagtccttgtgtatacatgagatggtagttcgagcatttaagcacatagttcgggctgttattgcagctgttgatgatataaatgatatggcagactcagttgcgtcatgtttaaatattttgttgggaccatttctggaggaaaacaatgacaaagattgtggtgaggatcataatctcaggaaaaggtggctggaggtctttttgataaagagatttggttggaagtggaaagatgaatattgtcttgatctaagaaaatatgccattctccgtggtctctgccataaggtaggacttgagttaataacaaaagattatgacatggatatgccaaacccattcagaaagtcggatattatcagtgttgttcctatctacaagcatgttgcatgctcatcagctgatggccgcaccctgctggagtcatccaagactttcctggataaagggaaacttgaggatgctgttagctacggcacaaaagctcttgcaaaacttgttgctgtttgtggtccttatcatagaatgacggcaggagcatacagccttcttgcagtagtgctttatcatactggtgacttcaaccaggcaaccatctatcaacagaaggctttagatattaatgagagggaacttggacttgaccacccagatacaatgaaaagctatggagatcttgctgttttctactatcgcctgcaacatacagaactagcattaaagtatgtcaatcgtgccctatatcttttgcaccttacatgtggcccttctcatcctaacaccgctgcaacttatatcaatgttgcgatgatggaagaagggttgggcaatgtccatgttgcactccgttacctgcacgaagctctaaaatgtaaccaacggttgcttggcgctgatcacatacagactgcggcaagttatcatgctattgctattgctttgtctttaatggaagcgtactcattgagtgtccaacatgaaaagaccacgctaaggatacttcaagcaaagcttggatccgaggatcttcggacccaggatgcttctgcttggctggaatactttgaatccaaggcactagagcagcaggaagcagcacgaaatggtactccaaagcctgatgcttcaatagcaagcagaggacatctgagtgtatcagatcttttggattatatcaacccggatgatgagctcaaggctaaggaaatgcaaaggaaacaagtccgtgctaagatcaaaggtcgcactgggcaaaaccaatctgaacttgttgatgatgaagatcaaaggagtcctgcacctaacaatgataaaaatttattaaccgagaatggaaactctggagtaaaagagaatggaacctttgttgagcatgtgaaagatgaaatatcaagtgacactgcaatccacatacctcaagatggttttactgaagagtgcacatctgatgaggggtggcaagcggctgttccaaaggggcgatccacagggagccgcagaactggtgcaggcacgaggaggccaaatctggcaaaaattaatactagttcactaaacagtgagaatggaagatacaaaggaagaggtatatctaacttctcttcccctcgagtttcacctagtgaggctgcagtttctattggttctagacctcttgcaaagaaattggctaagagttcaagcttcaattccaaagcagttagcactgccgtctcatcgaatactggtgagaattctttcaatctcaactccaagccagcaagccctgccattgccacagctgctgccaaggtgataccatccacaacaccaagtgctagtcaaacagtaaggaagtcactttcatacaaggaggtagcaatagctgcaccagggactcttgccaaagcatcgagtgatgtacacacagaagaaaaagatacaggtgaccaaggtgcaagtcctgaaagttctaattctaagtctccaaaagaaatcaatggtcacccttctggggagaaagatggggcaatagaagtgtcgccacaggatgatacttcacaggtatctaaatcacctgatggaggtaaacctgagcaaactgatgttttgattggttcaaatcaaccagatacagtacataaaaaatcctcagatccagcagagacatctgtagcaaaggacatagatcttccggccccggtcatatcatctggaacacaaactgaggctgacaccccaaatgatgaagcaccaactgcaattgaggcaaatgattcttcctccaatgacgatgaaagagattcaggagcagatacaccagaacaactgtctagtggaggtgaaaatgagaaatcttcactatctgagagtgaaaagaatgatacaccaagagaaggtgctaaagagacaacaagtaaactttctgctgctgcggctccattcaatccatccagcgtaccagcttttggttcaatggctgtcccaggtttcagagaacatggagggctattgccatcaccagccaatgtgccccctatgctgtccattcctctccgcaagcaccctcaccaatctgcaactgcaagggtaccttatggtccacgtctggctggaggctacaatagatcagggcaccgaggacttcgtaagaagcctgtgttgacaagtggtgaagcccctacagaaacaaacacgtctggccccaggattatgaaccctaacgccccagagtttgttccaggtcaatctcggagtcctaatgggcatccagcatctccaaatggtcctttagcatctccaggtggtattccatcttcaccacaggaccttctatcctctccagatagtaccttggagtcaccagtaactgcatccccacaagtttctgaatgtagccagattagtcctgaaggagatgttgagggtgtgggtgtaaagcagaacatggatgacacgaaccacccagaaagtaaagatggtgaagtggagcctgagcaaaccaaagctcctgaaggtacagaagaaggcgcagcggtaaaagatgctgctgaagagttgattgcagccgagcagcccaaatcctgggctgactacagcgatggagaggttgaggtcgttgaggttgcaagctaa

SEQ ID NO: 2702 - DNA, 1029 bp, Zea mays
  Peptide Sequence Number=SeqID_46077
atgggcgacggcgacggcgacggggcccgggaccgggagagagagtcgtcccatatatacataggggttgcaaactgcagagcagcggaggcggaggtggggggcggcgagagaaggaccacgcacgaggcttgctgcatcggtgttccgggaggagaacacggccgcgagttattgctgctctcgtttgctgcatcttccatgtggagtctccgtccgaccgacgaggcccagaggtctgttcgggcttcggcggggaggctcggcggagcggacgccgacgccgacgcgtcctactcctaccaactcgcctgctgcgcctccgtcgcacgcgccggccgggatgtcatcatgtttagcatggcattgacatgcccatatggctggcttgccgcgacggcgagggcgatgaggggacggctgcctgcctgcctgcccgggggagagctcgctgccttgccgcgcatatctaggcgccctatttcagttcgtgtggattggacacttcaaagaaagcccccccagcccccgctgctgctggagaaaagagaaggggctgcgcagcgaggccagccaaaagtagattcggcgccgtgggcccgccgtcctccagctgaggaggaaaggcagctatcggcgaggaagggtggtggactggtggtgctagcggtggtggtggtggtggtggtggaggatcccctctcacgtcaagcgctgtgtggaaagcataaaggcgggaggaggaggagagggcgaaggcgcagagcttccccgccgcacaaagcgaaaaggcttcagaaagaagaaagcttccgccttgggagggagagcgaggcatcctgcgtgtcctgtagctcgcctggtgctgtgtcggagacggtggcaatggcattgcaggagcaggaggcggacggcgacgagggcggggaggaagacgacgaaggcgaggatgagcggatgacgggatacggtgtgggggagctgatatctgcttgtcccgaggcgtgctgtccgcttgcggcggtgtag

SEQ ID NO: 2703 - DNA, 486 bp, Zea mays
  Peptide Sequence Number=SeqID_46078
atggcgaccagggcggcggcggcagccacgctcacggcggctacgtcctctcttcttaggcgctctacctcgctgcggccgcagggtctccgggtcccccaccgcgtgcctccccaaaggtttgtgcgccatattgcttcatcatcaaacgaggaagctgctgccagagcagccgccgccactgctgacgctggaggaccaaccattttcgacaagatcattgcgaaggaaatcccttcgagcatcgtatatgaagatgaaaatgtgctggcatttagagatattaatccacaagcccctgctgagccaaggcatacagaaatcctgggccggctcctttacgcagcgaaagtagtggcagaaaaggaaggtgtagcgagtgggtaccgtgttgtcatcaacaatggtgctgaaggatgccaatctgtctatcatctgcacctgcatgtacttggtggaaggcagatgaagtggccccctggttaa

SEQ ID NO: 2704 - DNA, 75 bp, Zea mays
  Peptide Sequence Number=SeqID_46079
atggcactctggcgattgcgagctgaggcagtggctagcgcgtcgggcggaggcactctgacggtgacgccctag

SEQ ID NO: 2705 - DNA, 228 bp, Zea mays
  Peptide Sequence Number=SeqID_46080
atggtggtggcggtggaagctaaggccaggaagcttgtgaatggcttgccgaagcaacagaagctgcaggttgattgcccacatactctggcgcaagaaccttcggacatatgcctgaaggtattcctcatggtcttgagtgcactggaacaaagcctgagcagtgactggcttcgtctaaaacccttgaaagctggtgaacagcatgtccttaagcttctgccatga

SEQ ID NO: 2706 - DNA, 459 bp, Zea mays
  Peptide Sequence Number=SeqID_46081
atgggcaagagtaagaaaggttgcggttcttcgcctcgctctggtgacaagcgcaaacgtgagccgactcctccctcggaggacttcagcaactcggagtactcggaggaggagttctcctccgagtccgagggatctccggctcccgtctctcccccaatgtcgtctgatgattcggacgattcccaggggattgccgcggaggtctggacctacatccgggccatcgagcgccccgggctcgagggctcggatgagtcggagtactcctcggacgaggaggactcctcggactcgtccgaggagggcagcggcgacgatggtggtgatgacgacgacgacggaggcgacggtgatggcggcggcgatagcggcaggggtggtgacggtggcagcaagggcggcaatggcggcggcagcaagggcaacagcaagggcagcaacaaggccagtggctag

SEQ ID NO: 2707 - DNA, 411 bp, Zea mays
  Peptide Sequence Number=SeqID_46082
atgaggttctctgctccacgaggtatccactatggctccatggttgttcgacaaaggggcggcaccgccaagctttataggaggtcaggagagtccagatccggaagaaaggggggcgaccgggagggttctccggtgaccacgactggatttgctgcgcttccgccggtctcgcgggctggttggggggataagaagatcctgccggagcgggaccaccagtcagtcgccacgaggaagacgggttcggttgcgcggtttgaccagtgggtcccacgtgacatacggacgagcggcgcggcgccaagctcccaggaatcgcgcgtcgcggggagcgggtggaggggtgggcccaccagtcaacacgcagtggaggccgagttgggtcgactgcagcccacacgggtgtga

SEQ ID NO: 2708 - DNA, 279 bp, Zea mays
  Peptide Sequence Number=SeqID_46083
atggctaaaagtatgggatttccaaagctcgaggttggcctctctgccatgtcgaaggatgacctcgtggacaaccttgcatacaacagcctgaagcttcgaacaaacattttttctattacagctgaactgttgccgctgcccgagccgtacaaccccctagccgatccagtcatgaaagaagcactggatataatgagcgttgctaactccatcattgacgaagtcgtcaacaagctgttgaacgaagccacagtgaaaatacttaaggaagattaa

SEQ ID NO: 2709 - DNA, 900 bp, Zea mays
  Peptide Sequence Number=SeqID_46084
atgtccgaacccccaacacttgaagcagcgcaccaaacgtcggcagtccgccgcccgatgagaggaggccagacagttaaaacacctaccccggagatcctcagggatcgatcgacgggaaggtggcgaaggggggagttgacgtcgacgaggttcgaccctaacccagccctcccggtcaggaacaggcctgcgcaccgttccaggacgttgcaccaccgcaaacttcggtctgtgcggaggtcgagggagggactgccgggcagacggcaggggcggagggagcagcagcacgtccttgaaagtcctctgcgaggcaccgcttccaacggcaccaacgcccaaggccgaagaggacgggctggtgaggcaagaagacgcccaccgctgcgccttggaacgcccagcgggggagaacggacaagccgcggcgggagacaaagtcgccacacgggagggggaggaggaagtggtcgccggagtcgggtagtaaccttaaatggctctctggttgctagctctacaggcaattccttagcaacttccactaccggaatccgggcctttgccgagtgccagagccgagtgctttgccgagtgtcaaagccgagtgtcagagccgtagcactcggcaaagaaccaagacctgggcaccgatataggttctttgccgagtgtaatggctctggcactcggcaaagaagcacactttgccgagtgccataccaagtactcggcaaaggacctgacatggggaccctctctggcggattctttgccgagtgtcacaggtggcactcggcaaaggtggattctttgtcgagtgctgtcgggcagacactcggcaaaggattcatggatgaaacagtgcttacaaaaacctacgaggaaaatatatga

SEQ ID NO: 2710 - DNA, 78 bp, Zea mays
  Peptide Sequence Number=SeqID_46085
atgacgaaggtgatgcttgccgaagttgttcaaaagtcaagaaatggaactcgtgagaaggttagaactataaattag

SEQ ID NO: 2711 - DNA, 300 bp, Zea mays
  Peptide Sequence Number=SeqID_46086
atgggaatgactcgtattgctaaattcatgaactgtagggttacattcacgacacaaacgtctaatgagttctatttcttgctcggtaccttggagaggaccagcaaggacttgggaaaggccaaggtgttgaggaggagcagcaagggcgtccacaacaggaaggagatcaagtccgagtcggctgcgactctatctcgcgttccaggaccagtctgcactaaaatgggtgcccaagatgcatccagactccgattgcgacggactggatatggttggaaagataacgagattatctaa

SEQ ID NO: 2712 - DNA, 642 bp, Zea mays
  Peptide Sequence Number=SeqID_46087
atgaacagaactccggcatccaaggggccattacaaacggaactccggttccacctccgcaggtacgaacaaccccactcgattggggggcctgcggagcaacggaagaccgacgaatggctcgccgtcgcccgctccagcagcggcgacgacggcgacttctgctccgaggggccgaacagcagcagcgatgacctcagggcggatgctgctgccatgaggccctcgcccgtgcccaaactcatgaggcaaggacgggcagaaggccgtagagttggaggtcagtccgtgggcggtgtaggattacggggatgctacactagtgcaaaacaaaattttcacccgccggggtgtagcccccgaggcctcggaggagtgatttcactccttcgaggtcttaatgccttgcgtaatgcttcggctggtctggttgttccctcatgcgaactggccgtagcccgggtgcacggtcggggcccaagctctcgggctggtatgttgacgctgtcaacggtttggccggagccgggtttgcgagagcagcccccgagcctccgcacagggcgagaggacgatcagggacagactcggcttttttacatacgcccctgcgtcgccttccgcaaggagacgaatctctag

SEQ ID NO: 2713 - DNA, 507 bp, Zea mays
  Peptide Sequence Number=SeqID_46088
atggagtcgcaatcaacaccgtcctacccaaaaacatcacgtgaggaaccccgtggcaagagcaagaaaggtggcagctcttcgcatcactcgggcgacaagcgcaagcgcgagccaactcctccctcggaggacttcggcgactcagaatactcggagaaggagttctcctctgagtctgagggctctccggctcctgcctcttccccggcgtcgtctgatgattcagacgactcccagggaatcaccacagaggtatggacctacatccgggccgtcgagcgctctaggctcgaggtcttggatgagtcggagtactcctcggacgaggagaattcctccgactcgtctgaggagggcagcggtggcgacggcggtgacggcgacggcgacggaggcgacggtgacaacggcggcggcagcggcaagggcggtgacgacagcgacaagggtggcagtggcgacggcggcggcagcagcaagggcagcaacaaggccagtggctag

SEQ ID NO: 2714 - DNA, 492 bp, Zea mays
  Peptide Sequence Number=SeqID_46089
atggccatgcttcagtcagtggaaacagatacgtggtttggcagtctcggccgctgcctccagaaggcagaatctggagatgcaccgaaccaagacgagatgcatgctcgcgcgtacagcaggacggacgcaagcagcttattgaagcatgtaactggcaccgcaagtttgcaaggctatgcggatagcttgttggatgcgacagtcagacattttggttcagcaccgtctgctcagcctgaagaaaatgggttcaagggccacggcatgctggcgccttttacagctggctggcagggcaatgatttacaccctctgatcattgagagatctgagggttcctatgtctatgacattaatgggaacaagtatctggactctcttgcaggattatggtgcacaactttagttctgaacctggaacactatgaagatgcaagggctttctgcatatggatatttgttttgcctattggtttatttaggatctag

SEQ ID NO: 2715 - DNA, 468 bp, Zea mays
  Peptide Sequence Number=SeqID_46090
atgggcaagagtaacaaacgcaagcgtgagccgactcctccgtcggaggacttcggcgactcggaatactcagaggaggagttctcctccgagtccgaggggtctccggctcccgtctctcccccggcgtcgtctgatgattcagacgactcccaggggattgccgcggaagtctggacgtacatccgggccgtcgagcgctccgggctcgagggctcggatgagtcggagttctcctcggatgaggaggactcggacggcagcgaggacgaggatgacgacgacgacggcgacgacgacgacggtggcgacagcgacggtgacggcagcggcaggggcagcggtggcggcgacgggagcaagggcagcaccagaggcggcagcagcacgggcagcaccagaggcggcagcagcaagggcagcaccaggggcggcggcggtggcagcagcagcaaggccagtggctaa

SEQ ID NO: 2716 - DNA, 2448 bp, Zea mays
  Peptide Sequence Number=SeqID_46091
atggtgcggagtcccgccttcgcgcttaatctgcgaaactgtgattcggccgccttcgtgcgtgaagctgaggatgaggcggtgcggcttgttgggcgttatgtgccgaggaccgagggccagcgcagctgggagatccgcgggtcgaatgaccgtttgaatagggtcttcgaattgaaccaactgccatatgacggctatcctggtcaagacgacgcggaccgccgggggaagaaaccggtggtggagactaaagacgaccctgcgccggcggccgccccatcctctaagaagaggagactaggtactgccatgggaggacttggggtttccgatgggtttgctagagagttgatgaggacatgcgtggccccgggggaaaggatgtcttcgcccgagctccgggagtcttcggcgcggatgctgaaggttaccgggggttgctggcctaggaatgttcctatcccccgcgcggccagcggggacgtttttacatctcgcatggttcgcaaatggagagtttttccttacgggcggaatatcggtgctgttgtgtgggcagtgatggacaaggatcgccaaggggcggcgcaaaaacgccaggcggctgtcaggctgcatgaagctaggccgaagaggcagcggggggctgcgaaggctgcggcctccggcggaggcaagccgccgctggcggcgaagtcgggcgcctctgcacctagcaaggcgccggaggcaacggcgggcgccggaggctccaaatcaacgaaggtggtgccgccggctagcggagtggcggaggcttcgaaggcggcccgagcgttgccgttgtcgggcaaacatgttgccgactttggcaccgatatttctgtggacgactatcttggtgggtcggacgagggccagcttgctatagttgcgcctggcgcggcgatcgcgacggctgccatagtgccgaaggcgaggggcgaggctcttggcgccggaggcgaggtgtcggccctcgcggtggtcagggacgaggcgggcgcagcgaccctccggctgaagggagtgatggaggcgctgagtcaggcgacggaggcgctgagtcaggtggctgacttcgccagccgtactgcgtcgggggccctcacggcggctgtgtctgccgaagtcgagagacttcggacgcaacatgctgacgctgtccgtgagaaatcggcctccgacagtaagtgccgtaagctgacggacaaggcggaagccaaactggcgcgggcggagggcaatcttgccaaggagctcgccgaacatctgcaggagcggctcaccgccctggagagccgcgcgaagggggccgagggcgcgatgcgtgcggaggctgaacggacgcgcacgcagcttatggatacatatcgaggagctgcaggaactccccactgtcgtggggggtttatgtcgtatgcctccctggtcacctgcgagggggcgatgaacgcactctcccgcgaagggtgccggcacttcgaggtcttcgaccaggcagatgatgattttgagcgagatgtctacaaggtcgaagaccccgtcgtgaaggagtccgccggggccctctatgaccggatgtggggtccgcacggtcgggaggtggtcagggagcgggccgagactgcgagggctcaggcggcgcgtggcgagcgggtggacgacttcggggcgctgaactgcgcgctgcctgacccggagccgacccctgcggaggccgtgtctggggtcgccctggagccaaccccggagaccgcggcgatcgcgacggctgcccctacatctgctgcggccggcgaggacctgcccccaaaggtggccgaaggtgcccctgatgcccccgcgactgctgtgccgagtgctgaaggtcccgcggcggaggcggcggaaacaacggcggaagcggcggcggaggcaacggcgaaggctcccgcagcgtcagggccttcgcaggttcaagattttgggcctgcgcacgcaaccgctactactgaatttttggcggcttcgaccgcggaaggtggtaatggatatggtgaatctgcatctgagttttttgattttactgactctgggagctcggttgagtggactgaggagtcgtcggaggaggacttggattattttgcggccttggatgtggctgcggcggaggctacgccatacgccgcggacacgccagacgtgccaggcactagcaccgggcgccgacgacgaagggcggttgcaaagcgtagggttagcacggaggaaggggctcggcttcgtgtgagtagggctggtcggcaagaactgctgtctttgccggccgccgcgagtacaggggaaggggaactgcgaagtctttttgcgggtgaggagcttaggataatgttatttaattatagggagatgggaattattcctaaggttgagccgatgtag

SEQ ID NO: 2717 - DNA, 399 bp, Zea mays
  Peptide Sequence Number=SeqID_46092
atggcggccaacgcggccaaaggagggccggcagtaatgacggtggcagacgcgcgggagcagcgggcacgtcgacagccaagctcacgtcccatccgggggcagcgagagagccccctctcacggagcaacgggcgacgcttcgccttcgccgaaacaaccgcaccaaaaaagggaccaggaaagggggataccccgaaagggatccttcctcgtgaaggaaccaggctccgagcctccttactgatcaggggttcgaaggctggccccccgaagggttcaacagccgcctcagatcgcgtgggccctacacccactactggtcagaggttcgaaggccggccccccgaagggtcccacggccgcctcaggctactcgggctccgtgcccattactga

SEQ ID NO: 2718 - DNA, 1191 bp, Zea mays
  Peptide Sequence Number=SeqID_46093
atggcggatcagttcgcggattctgcgtatgacacatttgatattggtttcattacacctgatgaatttggtaatgcggatatcttagaagcaacctatcctgctgttgcgaagagacttcatggggactggatacaggatccagcgatacatgttgttactgggttccttgggaagggctggaaatctggtgctgtaactactttaggccgaggtggtagcgacttgactgctacaaccattggtaaagccttgggactgagagaaattcagcccagatgggtcgagcacgtgggcgagcgcgaaggggggaaaggagcgaggaggccggagtccggcgagagagaggtgggaatcccgtggccttcgtgttcgtcccgcgcccaggtcgggtgcgcttgcagtagagggttacaagcgtccacgcgggtgagggaagcgagcggccccaagagagcgcctgtccctgtccccgtcctcgtccccgcgcggccaaccttctctaagaaggccctggtccttccttttataggcgtaaggagaggatccagggtgatgatggcgcttcctgtcgacgtggctggcctgtgccctaggttgggcgacgtggaggctcctccgaagccggggtcgagtctgtcttccatggccgaggccgagtccgagcccctgggtcgggcgaggcggaagtcgtcggcagaggccagggcggtgtccgagccctggggtcggatgaagcggagttcgtcgtcttctggggctgagcccgagtccgagccctgggtcgggcgaagcggacccgagtccgagccctgggtcgggcggagcggagttcaccgtcttctggggcttagcccgagtccgagccctgggtcgggcggagcggagttcgccgtcttccggggcttagcccgagttcgagccctgggtcgggcggagcttcttatggtgcctttggcagggcctggcttcctttgcgttaaatgctccttttttggtgcggttgttgcggcgattcagtcagggttgcttcttagcgaaggcaaggcctcgggcaagccggagatgtgtccgccgttgaaggggggcctcgggcgagacggaaaccccttcgggctttatgctgatgggggttaccagctgagaattaggcgtcttgagggtacccctaattatggtccccgacagtag

SEQ ID NO: 2719 - DNA, 945 bp, Zea mays
  Peptide Sequence Number=SeqID_46094
atgggggatgcccaccgtcttttcgcctcatcgttggtggaacgcaactccgtgggagttggtacctttcagccatcgttcggcttcaaggattttcatcagccagcccggctgcaccccccccccccccgtcggcggtcacccgagatggtgaccaccagttcctgggtggggaggagcaagccgggctgcgatcttggtcccaccctcagcttcaaggatgttcatcatcctcgctggggtgggggccgggctgagccggcgctctgcctcccgcgcgggtccgtgggccatcctctcccgcggcattcgagggagagggcgctcactggccctgcgggcggcccggactccgacaacgcggggctggtcgacggcaggcgtcgtcacctccagcgtgtcgggttcgttggcttggctcccggcggtcccttctgtcggagggtggctgccgcgccgtgccggtgccccactcgcccgggaggacttgagtggggatctgccggagggctggtgggccctgccgtcggcgccgaggcagaggcggctcgagaagtccccgtcgccgatgggatcaccgccaccatccgcgcttcgggcctccgagcgggcggcgacgagccgctcgtcagtcttctgttgctccgcaggcctacccccatggagtggggttggcctgaacatgagttcctcggctcggtcggccttgctgtccgaggctcctctagctcagttaaagggacccctcggccgctcttcgatgagccgaggccagggcgattgcccgagcgtggtgatgacggcgtccttcggagtggagaacctcggaccgcgtcgccgtccgaggctaagtcgggcctcgccggaggtgtcgtcgatgccgagggtgttgctgcctccttccagcgtcaagacccgagcctacagggtcaaagtgtcttgtag

SEQ ID NO: 2720 - DNA, 570 bp, Zea mays
  Peptide Sequence Number=SeqID_46095
atgacgacggttcagacatcaataaggggggcagcagcaccctcggcgtcgactccaccttcggcggaatccgacccagcctcggacgccaacacggtcggaggatcaccacgtcgaaggaaaatgtcagcaccgcgcctgggcaatcgtcgccggggtctcctccaggaacccggcccaagcagacggctcgaccggccgctccgtagcctcagccagctgtcccccgaggacatcagcccggctcatggcctcggcaacccgactctagcgttggtcccaccagtggatgacctggccaggttccagccgccgctgctacgcctcctcggcctaggaagtcacctgctcctgggccgacgaagtcttcttttcgagccaactccgcctctgtccatgctgacactgctgcctctggctccggctcatcgcagagcggccgagggtttctttaactgggcgagagaagcctcgggcggcaaggcccaccgagccgagggactcctacgcctccgggatacgaatacctcactcgtcaccttccgctcgaggcaactcacacttggttaa

SEQ ID NO: 2721 - DNA, 246 bp, Zea mays
  Peptide Sequence Number=SeqID_46096
atggaattaaagatggctttgttccgccgaagtcagctcagtctgggtgcaccggactgtccggcgggacatgtgctgaggaaaagtggggttaatgttcagatgatctctcaaggagcgtcaaaggttaacatgtcgctgatagtccatgatagcgatgcaaaggcactcgtagaagcccttcaggcgttctttgaagacgatgtcctggcacaagtcaaagcggagaacctactcgtgggttga

SEQ ID NO: 2722 - DNA, 180 bp, Zea mays
  Peptide Sequence Number=SeqID_46097
atgggggtatcccgcggcgagcttctcacaccggaaagcgggcgtagttgcctttatccagctgtgaagggcacggcaagcgtgagatcgttggcaatcgtgtgcaacagccatgccgacattcccggtgaggggctcgcgtggtcattgggtccgcccgacgcggcgctcggagcggag

SEQ ID NO: 2723 - DNA, 384 bp, Zea mays
  Peptide Sequence Number=SeqID_46098
atggcggcgcggcttaccggcagtgtgggaggtccagcgaaggatggggttggcttcgggaagtccttgtggtcacaacgaggcactaggtggtacaccgggcaagcttcatcgacttgttactcttggaggttgccacctcctagacggctcgagtgttgtctccgtcgagctctccgtgaagattgtggaggagccgcggtgttgattgtgaggggttcgtgcccacctcgccagagcggcaaaggcgacactagtggaatcaagtcaaaatcgtctattcacccccctctagtcggtgtcctagatcctactagtggtatcagagctaaggactccattgtttgtggatttaatcatcccagagttggaaaaaatggctag

SEQ ID NO: 2724 - DNA, 294 bp, Zea mays
  Peptide Sequence Number=SeqID_46099
atgagctactacggccagcagcagccgcccgtcagcgcgccgccggcgcaagacgtgatcgcggtcgcggactcgcggttggcctgccactgtcagcgccaatcggcgagcggttggatgggtcgtggtcgtggagggtccaggccaggcgccctccgcgcccgtgaagttgaccgcgccctgcgctcctccaaaagccctaaccgtggtccccagtccccactacccccacgacgtttatctttgctcgaccgtctggccatccagagtggcagctctcgtctagttggatga

SEQ ID NO: 2725 - DNA, 207 bp, Zea mays
  Peptide Sequence Number=SeqID_46100
atggaattaccactagacgcgcagagcagcggaagacgtctcgatgtagacgaacgcgtcgagcagtgccgtgcagtcgtcggcgtccttcacgtcctcgcacggttcgtcctagtgctccagatgcagcacctccgagggcatatttctaacatggacctcgccgaaggtgttgtcgatgccgagggtgctgctgctcccttctag

SEQ ID NO: 2726 - DNA, 807 bp, Zea mays
  Peptide Sequence Number=SeqID_46101
atgaaaatccttgaagccgaacgatggctgaaaggtaccaactcccacagagttgtgttcccccaacgacgaggcagaaagacggtggatctcccccatccgggggcttggaaggcggaaagacgcgatgcatatggaagcgcgaagacatggtcgccttcaaagggggtcaccctccttttaaaggcggctctccctacttgcgtccctagccgtcatgggctgagtcttctccaacacactccaaggtcctcccctacggcgcgggggctgggtcccacgcgtcatgcaagccgactcagagcagaagaagccaaaccgccgcgcgcggtgcgtacaaccgcccagcggtcacaagcgaccctccacttttgcccagaccagcaggcgaaagggtgggcagccatgcaggcggcatgcaaccgcgccaagtgggcgcacttctctgactcccaacacgcccggcatggaggcccaggcccacgcgtcatgcaatcggtgcgccggttgctacgtggaccgggaaagggggataccccgaaaaggatccttccccgagaaggaactaggctccgagcccccctactgatcagaggttcgaaggctggccccccggaagggttcgacagccacctcagatcgcgtgggccctacacccactactggtcagaggttcgaaggccggcccctcgaaagggttccacggccgcctcaggctactcgggctccgtgcccattactgatcaggggttcgaaggctggcccccgaagggttcacagccgcctcagacgccgagcgagggatga

SEQ ID NO: 2727 - DNA, 1053 bp, Zea mays
  Peptide Sequence Number=SeqID_46102
atggagcctagcggagggatagctgtcggagcggttgaatccttgctgacgtcctcttgcttccgtaagggggctgagagccgccgtcgtcacagagtatgcagggcgccatcattgcctatctggcggggcgagccagatgggacgccggtcttgttccctgcggcccgagtcagctcgggtagggtgatgatggcgcctcctgttgacgtggttggtctacgccctaggttgggcgatgtggaagctcctccgaagccgaggtcgagtctatcttccgtggccgaggtcgggtccgagccccaggttcgggcgaggcggagatcgctggctggtgccggggcggagtccgagccctggggtcgggcgaagcggagttcgtcgtcttctggggccgagcccaagtccgagccctgggtcgggcgaggcggagatcatcgtcttctggggccgagcccaagtccgagccctgggtcgggcgaggcggagatcgtcgtcttctggggccgagcccaagtccgagccctgggtcgggcggagttcgccgtcttctgggacttagcccgagtccgagccctgggtcgggcggagctcgccgtcttccgggacttagcccgagtccgagccctgggtcgggcggagttcgccgtcttccgggacttagcccgagtccgagccctgggtcgggcggagttcgccgtcttccgggtcttagcccgagtccgagccctgggtcgggcagagttcaccgtcttccaggacttagcccgagttcgagccctgggttgggcggagcggagcttcctatggtgcctttggccgggcctgaccgcctgtcagtctcactctaacaagtggcaccgcagtcggagtggcgcaggcggcgctgtccttctgttaggccggtcagtggagcggcgaagtgacggcggtcacttcggctctgccggctggggggcgcgcgtcaggataaaggtgtcaggccacctttgcattaaatgctcctgcgacttggtcggccggtgtggcgatttggtcagggttgcttcttag

SEQ ID NO: 2728 - DNA, 219 bp, Zea mays
  Peptide Sequence Number=SeqID_46103
atggaggagaagtttgaggtgggacatgctgcaaaatgtagtaagaagcctaaggctcagttacaggtgctgtctgctgaggatatggagaaagaactcagtgaggagatattggccttcgagggacaaagcttggatgtggtgaaggtggttgtggagcttgcactgtcatggtctcttgctatgaccgaattacaaagaaatcactgctggagctaa

SEQ ID NO: 2729 - DNA, 591 bp, Zea mays
  Peptide Sequence Number=SeqID_46104
atggcgcgggcaggatcgacggggccgcgcgtggcgcaggcggggtcgacggggccgcgcgtggcgcgggcaggatcgacggggccgcgcgtggcgcaggcggggtcgacggggccgcgcgtggcgcaggcggggtcgacggggccgcgcgtggcgcggaagaggtcgtgggggccgcacgaggagcagggcaaagtgaggagtagggtggctcaccgccttcgagggaagacggttgaggagatgcgtggcagtatgaagggcctctgcccagtaggtggcggggagagacgcctgaaagagaaggcagcggatcatgttggtggtggtgcgaatcatacgctcggcccggccgttctgagcagaggtgtagggacacgagagacgcaactggacgccgtgagtgaggaagaaagaacgggaggcgttgttgtcgaactcgcggccattgtcgcactgcagggcacggaccgggcgccggaactgggtggatacccaggtgaagaagtgagtgagggtgggaaacgtgtcggacttcagccgaagggggaaagcccaaaggaaatgggagtagtcatccagaatgactag

SEQ ID NO: 2730 - DNA, 471 bp, Zea mays
  Peptide Sequence Number=SeqID_46105
atgaccacgtcgcgcgcttcatcgagcaagttaacggccccagtcctcagggagccgtattctagctatgttggcagcatggcttctgcgttgatggccaagaagaaaggcgtgcaactcgtcgccctagatggtctcgatcgatgtggtcaatttatccaccgccacaagcagcttttgtacctcaccgtagtatgcacacattctcagatcgcacggtttcatcgccttcatgacctattcgacaaccaatttggagtcgcccttgaccaggagccgtcacgctcctacctcggccatgatttggagcccattgacgagggtctcgtattcggtgatgttggtggtggcatcaaagtggagacatatagcataacagagcttgtgtccttgaggcgatgtggggacgacttctgcactgcttctggtattgaggtaggacccatcaaaataaatggtccagtattctag

SEQ ID NO: 2731 - DNA, 354 bp, Zea mays
  Peptide Sequence Number=SeqID_46106
atgggtatgaaaattgacccaaacccataccctaatggggtaaaaacccatcgggtttcgggtttcgggtacccattgccatctctaggccagcccaatatctctgaacaagacatatgttgctgcttccacacaacgtcgttcccactgcaagaagacattgttcgtgctgaaagatgttgttcctgctacatgaacaagaccgcctcttcggctgttcctgctgccaaacaatacctggttcagaccacaaggggtttgaatagcataggatatgctaaccttgttgataagttcaaagaacggactgacaaggagtatgatcaatacatacgccacttcaggactacttag

SEQ ID NO: 2732 - DNA, 225 bp, Zea mays
  Peptide Sequence Number=SeqID_46107
atgtcgcgcgcgtttgacgactactatatcgaggattgtggcgtcatcttggcgtcggaggtgatgcagaggaggatcgacaacagtggccagttcgtcatcctcgccaccgccaggcggcgaatcccagaggcgcgcgccgcggagtggcgcccgctggcgtcccctctcctgcgacgacgtcggccttccctaggcacgagcaacgacgacggacttccctag

SEQ ID NO: 2733 - DNA, 180 bp, Zea mays
  Peptide Sequence Number=SeqID_46108
atggaggttagactctgcatcgaaccaagattacttgacctcaaagttggacatgaactatcagtgaagttctatccaagaccaggcaaaggccttaaggaggacgaccaagtcctcgccgagcaagtctgcgaggatgagcaaccgaccaggtccccaccgagcatatccaagttctag

SEQ ID NO: 2734 - DNA, 483 bp, Zea mays
  Peptide Sequence Number=SeqID_46109
atgaggtgtcaggccatccttgcattaaatgctcttgcgatatggtcggtcggcgtggcgatttggccaaggttgcttcttggcgaaggctgggcctcgggcgagccgaagctttgtgctgatgggggttaccagctgagattaggagccttggggggcgccgaacatggtgtctccagtgagctgctaacggatcctccgaccgcgctgccgcccgaggctcggtcggacttcgccgaaggtggggttgccgccgagggtgctgctgctccccctccgtcaaggatcccactttcgaagtggtcgaaaagcatgaaagacgtcttggcagaaaagatcttttccgaggaaaattttgacgcggaggggccgaagcaccaagtcgcccacctggaggtctcgggaccgaacccctcgggcgtggccctcgtcctcggggaaccgtattctaagtctgtgggcaagatggcctcggccccatag

SEQ ID NO: 2735 - DNA, 378 bp, Zea mays
  Peptide Sequence Number=SeqID_46110
atggttgccccgtctcctcctcctgcggcgaggagggtggcggggcaaacccggatgctgctcttccgccacggggggaagacatcgtcgagttcgccgccgccgggcgagctgacgactgtcgttgttgctgtcgcgctacggggggaggagtatcatgtcgtggctgctgttgagggacatgaactcgagactcccgaagcggagcagcgtcctcggctgaagaggttgctgaagactactcatctggaactcaacgggaagccttacctgggtggttggcacagcagtcgaagcggggcgagcggctctgtcttcctgtcagatcggtcagcgaagggacaaagtgactgtggtcacttcgaccttaccgactga

SEQ ID NO: 2736 - DNA, 996 bp, Zea mays
  Peptide Sequence Number=SeqID_46111
atggatcatattaaacccaagaacaccccgcacaatgaaccactgcctctaggccagaagcttatgctgcatcatggaagtgatgcaccccttagaattggtcattcaagtcatgagaatatgagacttagatcaaatgatcttccacctttaagtcacactgtgcaaactcaaggttatagagttgggaacccaggagcctcacatgctccttttgttcattgtcatgctggaagttccagtagtcatttaccagaacctgctgtgaattatccacatatgtcggaggaaggctttgctccagtgggttcccatatggacaacagaagggctgcaacgaagcgaaaagatcctattgtgcaccctgctgggatcagtgctactggttattatgttggaagttcttccaatactcagctatctaactctgtgcagccaaatcctgctccactttctgagcccttacttcgtcaaatacgtttaagcattgaccgaagtggttgggatggcctacacttaattcatcaagaaggatttcagaggaatgttgccaaggatccatcagggaaggacatcaatgcacttgagcagcacatcaagaacctcctgagcccttccaccccatttttcttcaatactctatacgacccttaccgtgttggcgccgattttgttcgtgggtacccctacagccttcgtgagggtgtcccaactgctatttctcacaggctttggctcaacattccagactatgatgcccctacccagcttgttaagccccttgagagaaacaccaggtatgtggatgctattcttacgatcccaaagggcaccctcttccctacgtgtggaatgaaccttgcatttgaccgtgagctcattggtcctgcaatgtactttggtcttatgggtgatggccagcctattggacttgttttgcagccatttgagtggattaagaaaactttcttcgagaaaccccaaccagaggcataa

SEQ ID NO: 2737 - DNA, 1005 bp, Zea mays
  Peptide Sequence Number=SeqID_46112
atgaccgcatcaaaaaagggactgggaaaggggatatttcgaaaaggatccttctcagcgaaggaaacgggcccccgagccctcctactgatcaggggttcgaaggctggcccctcggaagggggttcgaaggctggcccctcggaagggttcgacagccgccccagagcacacagagtgagggatgactctgggtacgttcgttacatggccgaggctcgggctacgctcccgagcgccgctcgccccgctccgactgctgtgccaaccacccgggtaaggctgacaacagccgagttcagcctcgggcacaacaggaatctccgcctcgcccgaccccaggactcggcctcagcctcgcccgcgggaggaatcgcgtcctcgcccgacctcggcctcggcctcaggagaaggctccggcacttctccgacgaccacgttatcgcgtacacagggctcaagcacttctccgacagccacgttggcatgaaggcactcgacaaagcttgctatgccgagccgcccatcgccgagtgtatacctatgccgagagtcctgctctcggcaaacgtcgtcgttaccgagaggagggctttgccgagtgcggcactcggcaaagaagcctttgctgagtgcctgacaaaaagcactcggcaaagcgccgagcactcgacaaagacccggattccggtagccgagccaccgccgcgcctccaccgcgccgccaccgcgccaccgcgcccaggccgtgccgccgccgcgctgccgcttgcaaaagatctctccagacttctgcaagcacatcccctgggcggcgtcgagcaaaagacctgctactccgcaccgcggctggcagagcaacaagcgacggcgctgtcggcacgcgagaggaccgggccctcgcgtaatgatgacgccagtccgaagcgtgcggacaaggattattccgtcgggaaggagctggtgtcgtaccatgtgcgccaggtgagcacgcagaaggtctaa

SEQ ID NO: 2738 - DNA, 615 bp, Zea mays
  Peptide Sequence Number=SeqID_46113
atgactattaagcatcagaagtttttgaattccaacaaccttctggcgaaagatatggatattaagtcagatgagaaagctaccaaaattgataccaatgtgcagccagttgatgttaagtcgaatgagaaaggggctggtgtgggcattgttgaggcttctcatggaaaagctcatgtggttattacaaatcccctgataatagtgcccatacagttggagacaccaatcgttaataggctggatggaaataatggaacatctttgtcggcgtttcgagacaggggggtccctaagccgacgagtgagtgtgctgcgtgccccagcccagatgggtcgagcgcgtgggcgagcgcgaaggggggagaggcgaggtggccggagtcgagcgtgagagaggtggaagtcccgcggccttcgtgttcgtcccgcgcccaggtcaggtgcgcttgcagtaggggggttacaagcgtccacgcgggtgagggaagcgagcggccccaagagagcgcctgtcccgtcctcggtcccgcgcggccaaccttctctaagaaggccctggtcctcccttttatagtcgtaaggagaggatccaggtgtacaatgggggtgtag

SEQ ID NO: 2739 - DNA, 309 bp, Zea mays
  Peptide Sequence Number=SeqID_46114
atgcgcatcatcctgcggtacctgctcttgacctgtgggggggggtgtgagacagcaagagtgagctcacatacgttcatcgctcaacaagttgtggggaataatgtgcatgaactcgccaaaggaccgccatcacagcaaaatcctcccgagggcctccccaggaatcccttgcaggaccgccatctcagcaaaatcctcccgagggccttcccaggaatcccttgcaggaccgccatcacagcaaaatcctcccgagggcctccctacactgaccactcccctactgcccttgcccctttcgggtaa

SEQ ID NO: 2740 - DNA, 381 bp, Zea mays
  Peptide Sequence Number=SeqID_46115
atgcggagttcgtcgtcttccggggctaagcccgagtccgagccctgggtcgagcgcggcggagtttcctatggcgcccgaggctggacttggctgctgtcagcctcactctgtcgagtggcacagcagacggagcggcgcaggcggcgctgtcctcttgtcaggccggccacctttgcattaaatgctcctgcgatacggtcggttggtgtggtgacttggccaaggttgcttcttggcgaagactgggcctcgggcgagccgaagctttgtgctgatgggggttaccagctgagattaggagtcttgagggtacccctaattatggtccccgacaaggtggtagtcttaaatgggattatggaatctggtgtgatctaa

SEQ ID NO: 2741 - DNA, 285 bp, Zea mays
  Peptide Sequence Number=SeqID_46116
atgaggctttcacaaaatacacttaatacgaagcaacccgctaaggtttctaaagacgatggtggtggccccctgggtgaggtcgacggcgtcacaacgcagggcgaattcatgatgctggcgagtggcgtcacggtgatgagcagtaggagcgatgcaatggcgggtggtagcaggcgagtgcggcaccagcagcacgacgcggaggaaggcaacgcgaacagaggaagcagggtgaagagcgtgctggagacagaagaatggcatgctgctctttttatatag

SEQ ID NO: 2742 - DNA, 522 bp, Zea mays
  Peptide Sequence Number=SeqID_46117
atgacgaagatctgtcttcaacttgcgttccttcgtcatgaggaagaggcttgtatcccgaagacgaagcttcctgtaatagcttatgtggaaagcaaatggttaattatgtttttgaggaccttcggaagaatgcccccaatagtatctttaagaagatctttattagaaaccctatttgctttagaagatgtagcttcaagatctaaagtcggccaaacacgtttggatggtgtgatgctcgctctttctcaacttttacaatttcagcaagggtcaaaggtagcaaagtatatttctttcctttatgcacaaagaggtgctgatgtagccattctctgtagcaatatatgcccgctgacttgggtagtccttctacacatggccaatcccatggcaacagtggcattggatgccagagcaactctcgaagctgttggtcgcttgctagatggtggtggtgacatccggaaagttgcagacttgttcaaccccgttgatgtcgttgaacgtggcgtgtag

SEQ ID NO: 2743 - DNA, 414 bp, Zea mays
  Peptide Sequence Number=SeqID_46118
atggagaaccacttgggaaaacagtgctaccacaagggtgacttccgctatgtaataatgatacttgtgatatttatctctatacactttgttattatatgtggtgttcttctttggcgcacatatgagacgcacccgactttatcccttaaatccgggtgtgacaggttggccaagttcatgacaatcccacattgctcgtacctagtcctcaagatgctaggaccatatggtgtcttcatggtgagggcagtcttccagagctccacagagtgccatatgaaagtagtcaagatggcccactccgtgaggacctttattgcacaaaagcagcttgcggtggaagcggacgcactcccaaaggacgaattgtttatttcggccctagaagcaacttcggtcgtggcgatatga

SEQ ID NO: 2744 - DNA, 489 bp, Zea mays
  Peptide Sequence Number=SeqID_46119
atggcccccaagcgagatagttcgaagacagccccatccatcgacgaagcagcgaaggcagcgctgctggctgagaaaaaaaggcaaggccctcgtggacaacacccccaagaggccttcgaggatgaagccgtcagcaaaagacagtgccaagaccaccccacccccgaaggcaacctacgcacctgcagcttcggaggcgtacttcaagcaccaccaccaggcttcgctccaccagagagtgaaggcgcaatagaggacgacaaagtcatcggcatctctgtcgaagaccagctacagttgcgggccctgcgcatcaagaaccacaacctccaaaagcataaagacatcctcgaggccaagcgccaacgtgtcaccgtgcaggccaaggtgtgccagatgatacaggacgaggagcagagagcttgggagctcgagcaagaaatcacgctcatgcagggcgaaggccagcacaatctgcagcattaa

SEQ ID NO: 2745 - DNA, 366 bp, Zea mays
  Peptide Sequence Number=SeqID_46120
atggtggagaaaggccacgggtcgcgcggcagaatgacggtcacccgatcggccatcaccaagcgaaggaggtggcggcaaagcggacaaggagcgcggttttctttctctggctattccctcagggaccaggaaaggggatactccgaaagggatccttctccgcgaaggaaacgggccccgagccctcctactgatcagaggttcgaaggctggcccctcggaagggttcgacagccgcctcagagcacccgggctccgcgcccactactggtcagaggttcgaaggctggcccctcggaagggttcgacagccgcctcaggccactcgggctccgcgcaccactactgatcagggattcgtag

SEQ ID NO: 2746 - DNA, 810 bp, Zea mays
  Peptide Sequence Number=SeqID_46121
atggaggtttgctgccaaaccagcttttgccagaaggaagatggtttccccaagttgctgagagcatgcacagttcgcctcggaatcaggagtcagccagagtatgatggtcgtgaattcgtcgagcatggcacagagaagtgtgtcgtgactgtatacattggatccagtccgcaccatgtggaatggagtgtcactgctgaagatgcagagaagcgcaaccgtcagctgcatgtggatctcaccacagctcaagcccgtgcaactgccttggagagtcatgaagtcattgctgttgatgccctgaagcaagccgaggatgagcacgtccagaagttgatggaggcctacttagtcacccataaccaacgtagagccctgtggatccaagagcccgctccatccaaccctgttcaacccatcaaagctgaagacccccagattcttgaaggtcacccggtctccattagaggagagaagaaggcttgggaactaccggaaggagccatagtcttggaaggaattccagtcttccctcaggctatggataagcaagagcaccccgagtcctcccaagatcccccgccagagttgtttgagcccctcaccatgaagaatattccagcaccatcccttgaagtcaaggaagaagctgcaagcaccccgccatcaccgcggccctctgaggagctacaagagtcggtcccgcttgaagaagagttcgaccctgtgttgccatctcagtcgccgccagaagaagtcatcaacatcaactccctcttaacccatccaggtgatgtctcagattga

SEQ ID NO: 2747 - DNA, 705 bp, Zea mays
  Peptide Sequence Number=SeqID_46122
atggtggtggtggtggcaggcccatcacaaacggccaaaatctccgtttctccagagccaggctccactcgctccctgtcctcgcagctcagagcacgcgcaggccccttccctgtgtcctggcgtggagctcgcgcagccgcctcgcctcgcctggagctcgcgcagccgcctcgcctggatctcgcgctagggttggagccagggtcctcacagccgcctctatcctcgcctggagctcgcgctagggttcctctcgcagccgccgctgttgagatctcactctccgacgctagatgcacttgctcctggtactaccgggtaacgaggtttggcattgtggtcggaggcggccatgccggatgcgaggccgcccttgcttcgtctcgcctcggcgcgcgcaccctgcttttacgctcaacattgaccggattgcgtggcagtattagaagtgtagttctgcttcaactcatctaccctacccagccttgtaaccctgctgttggtggccctgcaaagtctcaacttgtccatgaggtagatgcctttggtggtgaaattggaaaaaataccgataggtgctacttgcaaaagcgtgtactgaacagctcaaaaggccctgttgtacgtgcactgcgtgctcagactgataagagagagtatgcaatagagatgaagaacagtgtggaaaggtccatatggtaa

SEQ ID NO: 2748 - DNA, 486 bp, Zea mays
  Peptide Sequence Number=SeqID_46123
atgaagctgtggaaggagacttccaggagttccaagattacgacgagttctaggtgtgggttagcggcaacccccagtcggctgcctgtgaaggccgtggttatctacgtttcttttccgcactttgatttattctctacgagagcaaaatcccccaaaaaatgtaaatgtaaaaattcagcatgcaccatcgagtgcaggcaaaaaggaaaaaacagtgatgaagctcgaaagtcgtccctaaggggatgcagagcacgacgaagctacaaaaagccgttcctaggggagcgcaaccttcatcattgtctattaagcttcggcttcgcgctcttcagcttcgtcaacttgctcctcagcttcgtcatcctgtacatatttaagtattgtaagaattattcaagtttaaagggaaagatttcaggaaggcgacagctgtgccccgagaagctaccagggcacataaatcaccatgtccggctataa

SEQ ID NO: 2749 - DNA, 576 bp, Zea mays
  Peptide Sequence Number=SeqID_46124
atgcaggcggcatgcaaccgcaccaagtgggcgcacccttttgtctccaacgcgtccagcatggaggcccaggcccacacgtcatgtaaccggcgcgccggttgctacatgcaagaaactgcaccaccgctcgcgccactaccgtgcctcctcgactatggaaccagtaccgcgactcgaggcaaccctgtgtatgacccaacagtgccaaccaggcacatcggtcacgggtcagtcagccgcgggagaaggcgcgacggtcgatacggccaaaaatgggccggcaggaccaggaaaggggataccccgaaagggatccttctccgtgaaggaaacgggccccgagcccccctactgatcagaggttcgaaggctggcccctcggagggattcaacagccgcctcagagcgctcgggctccgcgcccactactggtcagaggttcgaaggccggcccctcggaagggttcaacggccgcctcaggccactcgggctccgcgcccactattgatcaggggttcgtaggctggccctcgaagggttcacagccgcctcagacacagagcgagggatga

SEQ ID NO: 2750 - DNA, 591 bp, Zea mays
  Peptide Sequence Number=SeqID_46125
atgcacaattatatgcagtcaaatgcatcttctggcatgggagttgctcctaacattagggagacgtttgtcgagctccaaatgaagaaggcattccgatatgttatcttcaaaatcgaagaaaagcaaaagcagattctgaggttgtatatgtacccttgtggtgcctcatattcattcatgctcaatgcatacgctttggccttcccgctggtttcagttcaccaaaccttttacctaatctaccgttaccccaggtccccgttgacatcccgcatccgtgccaagatgctttactccacctcgaaggaccgcatcaagtatgagctcgacgggttccactatgagatccaggcgaccgacccatccgaggtggcgaggtggacattgaggttctgcgggagcgggctcactgaagctggttcgcctttgaagaagggaccaatggagggccatgaaccttttggtttgaagctgatcatggacaagatcagtatggattatggcttcatgttaaatgatggttgcatagttcatgcatgcttcagagtgatgattgataatgcaatagaggacttgaataacacatag

SEQ ID NO: 2751 - DNA, 453 bp, Zea mays
  Peptide Sequence Number=SeqID_46126
atgacctttttaatagatatcatatttaacaagtcactcccgcttatgatattaatgttccaaatgggaagtcttatgttgggtgctagtcgtggtcgacaggaacgggggcatctggcaagctcttatagttccggctcaggcagattggatacgggcatagttcccaaagctttaccatgtagtctggactatgagttggttacgaagtttgcagatgaagttatgatgctgagctccatggatgctagtctagtgatacccccggtcatcttcctgtggatggatgtccttgctcgctgtactttgatgaataaagatcctggcacacatatgctatgcacccggctctgcccttgggaaacgggtgtgacaacgatatgcgaagaacttgagtcaagtcgaccccaagcatggactactccgcatggtgaggctgatggaccaacctga

SEQ ID NO: 2752 - DNA, 559 bp, Zea mays
  Peptide Sequence Number=SeqID_46127
ctcgccggcgcccaagccctctgctcgctctccatcgcgaccttcccagccttctctgccgagcccagctgaagctccctacgcgcggtcttctccaatcgagctgcgtcccgtccgctcggtcctgctcttctccaaccgcgcccctgatctggagtctagccgagctctccactgcctagctccatctcacggcgctctgtcctgctcgctcatggccgaagccacctggtcccagcccagccgcgcccctgtccatctcgtcgcggctgctgttttagtgtttttcctgcgtgccgtgctctcttccatggatgccgcggctgctgctctggagttctccctgcacgcgctcagcttcaattcagttgttgtgcccaccgtcggtttgtgtgtgcgcgcgctggacacggtaaaacgttgcgtgagcttgtgtccgagcccgcccgaccgtgaccttgctttgcttctcgcgtcgctactcgtcaagtccttctccaatccgcgccataaaattcactcggacacgatctcgtcgtcgttccgcgcgtcagcataa

SEQ ID NO: 2753 - DNA, 468 bp, Zea mays
  Peptide Sequence Number=SeqID_46128
atggctcccgtcgtcggcgccgaggtggtggcggctgaagaagtcctcatcaccgatgggatcaccgccaccatccgtgctccgggcctccggctctttggctttgatagcttgtcctcgcccctcgagtggggacgtgggcgagggccttgttgcagcagcgtccgccctgaggccatcgctgctgctgtttggccacctggagcggaggtcgttgtcgctgctgccggagcgggcgacgccggagccggaggcaatggtgtcagcatggacagaggcagagttggctcgaaaagaagacttcgtcggccggagcctgaccgggccgtccactggcgggaccaacgccggagtcgggttgctgaggccacgagccgggctggtgtcctcgggggacagctggctgaagcttcgggggccgggttcctagaggagaccctggcggcgatggcccgggcgtggtgctga

SEQ ID NO: 2754 - DNA, 447 bp, Zea mays
  Peptide Sequence Number=SeqID_46129
atggcactcggcaaagaaggaaacctgggaaccggcaaagacatctttgccgagtgctgttgccaaggcactcggcaaagggactggcaaaggggcccactggaggactctttgccgagtgccagtccactagacactcggcaaagagtcctcctttgccgagtgcctacgagagctctcggcacagggactggcggtggggtccactggacctgtctttgccgagggccccacactcggcaaaattggcctctttgccgagtgccacggaaggcactcggcaaaggatccgtcaccgtcacttggcgtcgtgacggtgacttttctttgccgagtgccaaatggcactcggcaaagtctttgccgagtgcccgacaaaaagtactcggcaaagagactgttgtcgatgtacagttcgccgagcgttctttgtcgagtgtaaaatag

SEQ ID NO: 2755 - DNA, 1320 bp, Zea mays
  Peptide Sequence Number=SeqID_46130
atgcataaggggagcgctaagacatggttgcctttcaagggggtcaccctccttttaaaggcaactctccccacttgtgtcctcagccatcacgggctgagtcttctccaacacgctccaaggtcctccccctacgacacgggggctgggtcccacgcgtcatgcaagctggcccagggcagaagaagccaaactgccgcgcgcggtgcgcgcaactgcccagcggttacaagcattcctccactttcgcccagaccagcgggtgaaagggcggaccgccatgcaggcggcatgcaaccgcaccaagcgggcggaagcagcggtcacgtcgtcagccaagctcatgtcccctcttgggacagcgagagaaccctctcccacagcgtgaagacggcgtgcccgtgttttgttcctcgaacagctcgcgcacgcgcaatggctgccccgcgaaccactcgtcctgtcgcattaactccacggcgggacaggcggcacctttggcaggagaagcgggcgacgcttcacctccgccataatgaccgcgtcaaaaagaccccgagcccccctactgatcagaggttcgaaggctggcccctcggaggggttcaacagccgcctcagagcgctcgggctccgcgcccactactggtcaggggttcgaaggccggcccctcggaagggttcaacggccgcctcaggccactcgggctccgcgcccactacttatcaggggttcgtaggctggcccccgaagggttcacagccgcctcagacgtagagcgagggatgacccggggcgccataggaagctccgcctcgcccgacctagggctcggactcgggctcagccccggaagacgacgaacttcgcctcgcccgacccagggctcggactcgggctcagccccggaagacgacgaactccgcctcgcccgacccaaggctcagactcgggctcagccccggaggacgacgaactccgcctcgcccgacccagggctcggactcgacctcggcctcagccgacggtctccgtctcgcccgaccaaagggctcggactcaacctcgacctcggaagacagactcgacctcaacctcggaggagcctccgcctcgcccaacccagggctcggaccgaccacgtcacaggaggggccatcattaccctacccctagctagctcaggctacggggaacaagaccagcgtcccatctggctcgccccgggaccccccggggtcgaaacgccgacaagggacttgtcagtttctggggagatccctggtgtcttgggcttcaaagaaacaaaaactcagtag

SEQ ID NO: 2756 - DNA, 1419 bp, Zea mays
  Peptide Sequence Number=SeqID_46131
atgcagcccgactgcaccccctcgctggtggtcacccaagacggtgacctccagtttgatggcggggaaaagcaagccgggctgcggcctctgcccctccctcagcttcaaggattttcatcatcagtgctggggaggggagtgcgccgagttggggtcggtccctacgcgggcggcgacctgctccttccctcagtgattggggggaagggcgttcgccgttcgtggcgctggcagctgccgcgtgcctggctctctaacccgagtggcttcggagccgctcccggcgccgccttccgccacggcagctggaagaggttcctctgccgacgagatagccggtgccgcccacgggctgacctccaactttacggccttctgcacgtccttgcctctcgagtgagggcatgggcgagggtgaaaaaggttcacactcagccaataaaaagaccaagttttgaattcaataaaggagcaaaggggcaaccgagggcacccctggtctggcgcaccggactgtccggtgtgccaccggacagtaaacagtacctgtccggtgcaccaggggactcagactccacctcttcactctcgggaattctcggaagccggcgcgctataattcaccggactgtccggtgtgcaccggacatgtccggtgctccaaggaagcacggcctccggaactcgccagcctcggtttcgcgtggcagccgctccgctaaaattcaccggactgtccggtgtgcaccggactgtccggtgtgccagcggagcaacggctctcttcggcgccaacggctctctgcggtgcatttaatgcgcgcgcagcgcgcgcagacgtcagacttgcccataccggtgcaccggacatcaaacagtacatgtccggtgtgcaccggacacccaggcgggcccacaagtcagaagctccaacggctagaatccaacggcagtgatgacgtggcaggggcaccggactgtccggtgtgcaccggactgtccgagggcctcatggcagtagcatccgccctgaggtcatcgctgctgctgtttggccccccagagcagaagtcgtcgtcatcgccgctgctggagcgggcgacggagtccctcggctcggtcggccttgctgtccgaggcttctcttgcttagttaaaggaacccctcggccgctcttcgatgagccaaagctgggggtagcggtgtcagctcgaacagaggcagagttggcttcgaaaagaagacttgctggccgaggcctcggggtggccggccgagtcgtctgctcaagccggattcctggagaagaccctggcagcgatggcccgggcgtggtgctgatgtcgtcctttagagtggagattctccgactgcttcgctgtccgaggctaggtcggacctcgccgaaggtgtag

SEQ ID NO: 2757 - DNA, 447 bp, Zea mays
  Peptide Sequence Number=SeqID_46132
atgaacaagacatcggcacttaaggtgccattacaaatggaactccggttccgtccccgcgggtatgaacaacctccacaccggggagcctgcggggcgacaagctctgggcgactcgccagcgacctctgcagcagcagccatggtcccaggacggacgcagccaccggaaggctctcgtttgcgtccccactcaagggacgcgaaccagacattaaagccaaagagccggaggacgcctcctctgcagagctggaggatggtttccaccaccagaagctggaagaggaggtggccagccgacccgtgcgggaggtagagccccgactcacctcgctctccgccccagcaaggatgatgaagatccttgaagctgagggcgggaccaagatcgcagcccggctcgcttctccccaccatcgagctggaggtcaccgtcttgggtga

SEQ ID NO: 2758 - DNA, 180 bp, Zea mays
  Peptide Sequence Number=SeqID_46133
atggggctcggtgtatgcggctcgctctgccaagtttgggttcgccccttggggaggagtgcgagacattgtggtacaggtggttatgagattgatggttttggttatgactatggtgctggcgaagatgaagttgtggaaggagacttccaggagttccaagactacgacgagttctag

SEQ ID NO: 2759 - DNA, 747 bp, Zea mays
  Peptide Sequence Number=SeqID_46134
atggaccctatgctcggcgccatcatcattggcgccgagcatgtgtgtgccggcgccaatactattggcgcttatacgtcagacgccgatcttggcgccgaggtagacgtccgatcaacgacgcctacctcggcgccaagatctatggcgccgaggtacgttcctataaatagcaccctacgtctggcttgttgctgtgctcatttcaattcttctaaactagagatgtctaggcgtggtaaatatgctaaacaaaggaagggtcctttgaccggaactgccttcgacccgctgcctttgccaagtggtgttccagtgcctatgtgtttttgtggtgatccttgtaaggtcgataagtctgaagatcatgacacctatcgacagaggtattggatgtgtgctaactttgcatttgagccaactattgttcaacgtcggatgaatttaatgactcctccaccgctatgtgattttgagcagtggattgacacagaaatatcagagaaagataagaagtggctggagaatcttcaaaagtgggatgcagaggacaaagagaggatgaaaaaaagacgagaggagcttgctgccgagcaacaacgtgaagacgaagagaaaatgaggcgtgttgctgaatgcagggaagataaggagaagaagcttgagcgtgcacgtcgtgcaaaggaagcaatggaggagaaccctgatgcatttcacaaaggcaaatggccccgttgtactcagtag

SEQ ID NO: 2760 - DNA, 489 bp, Zea mays
  Peptide Sequence Number=SeqID_46135
atggcttcagggtcttctaggggcaagggtgcggtaaatgagagacgaaaggatggagggaagttaactccaatgtgttttgatggccctcttggtccagatttttttgaagaggcggtttttaactttccagttcaaagtaaaaaagatttcaacaaagagcattcattggtcaaggagaattgtgggttcactcgttgggtagatcctcgtccaatttttcctcatgcggaatacatatcctacctacagaataggatatttgatctagagagagaagtaagcaacaaaaatgatgaggaagaaagagacacaaacaatggtggtgcttcacaggtgcaagtatgcccagatccatattgttgctgcccttgtcacaacaagaatgttggtcctccgtcgtctccaccgcacccacagcagacaccaacaatgggaggatactatggggaagggtcaactcaatttggaatgtgggagcactactag

SEQ ID NO: 2761 - DNA, 258 bp, Zea mays
  Peptide Sequence Number=SeqID_46136
atggacgtcggcctcgcttccgcggtcaccgcgctccggacctgcaccgatgtcgcgcacctcgcgcacgtgctcgagcaatttcgcctcgcttggtgcggcaagctcgtccgggacgcccgcgtcgtcgctccgccaagggcctctgctttgacctcttcatcattaggggtggaaacaaagctttcaatgcatgctggaggctgtcatgttgtttgctggaatggagatatttcattgttcacttggttcatgtga

SEQ ID NO: 2762 - DNA, 1419 bp, Zea mays
  Peptide Sequence Number=SeqID_46137
atggtcttactacactcggcgcggtaccagcagtccctgcgacgctaccacgcccgaggggtccggtcccgagacctccaggctcggatcttaacagctgaagggagcagcggcaccctcggcgtcaactacaccttcgacgagggtcttctccgagaatccggctcgagcaggcggctcggccggtcaccccgaggcctcggccagctgtcccccgaagacatcagcccggcccgaggcctcggcaactcaattccggcgtcggtcccgccagtggacgacccggccaggctctggccgaccaagtcttcttttagagccaactctgcctctgtccgtgctgacaccgctacccctggcttcggctcatcgaagagcgaccgaggggttcctttaactaagcaagagaagcctcggacatggtgtctcaaacgcgaggtcgaggtccagtaccgcgactcgaggcaaccctgcggcgcctctggcaggagaagcaagcgacgcttcgccttcgccataatgaccgcgtccaaagagggaccgggaaagggggataccccgaaaaggatccttctccatgaaggaaacaggctccgagcctccctactgatcagaggttcaaaggctggccactcggaggggtttaacagccgcctcagagcatgtgggccccgcacccactactggtcagaggttcaaaggtcggcccctcagaagggttcaacggccgcctcaggctactcgggctccgcgcccactactgatcaaggcgggaacgatcttgtaacggaatcccatcagagggaggcatcgagccctcggaccccgtcgaaaggggaccgggtccggcagatcacccgcagtcacctcgccgctccactgaccggcctgacaaaaggacagcgccgcctgcgccgctccgactgctgtgccactcgacagagtgaggctgacaggcagccaggcccggcctcaggcaccataggaaactccgcttcacccgacccagggctcggactcgggcttagccccggaagacggcgaactccgctccgcccgacccagggctcggactcgtgctcagccccggaagacggcgaactccgctccgcccgacccagggctcggacttgggctcagccccggaagacggcgaactccgctccgcccgacccagggctcggactcgagctcagccccggaagacgacgaactccgtttcgcccgaccctagggctcggactcagccctggcctcagccgacggtctccgcctcgcccgacccaggggctcggactcgacctcggcctcggaagacagactcgacctcgacctcggaggagcctccacatcgcccaacctagggcacggaccgaccacgtcaacaggaggcgccatcattaccctaccccaagctga

SEQ ID NO: 2763 - DNA, 870 bp, Zea mays
  Peptide Sequence Number=SeqID_46138
atgacttctcacggatcctccgatgacggaaatgcactgacccacactgacggacttgcacgagagggttttccccgcatcttgtgggaggtacttcagggggccggatacttgacaccccctcagtacacggtgcagcaatttgagaagcaccgggtgcctcgttgtagggtgaggatgatcttggagcctcatcccctgcagccaggctggcgttctctggactccgagtctttcggataccgagcggaggacacgatcgaggcgatcgctctgcacgggttgacgactttttgtgggttccatcccttggagctctctacccaccccattgggttgttccccgtggaaaaggaggacaacccgatgtggaaggatcaggtggagcatgccaaggacatttgggctctctacccaggccacacggctcacttgtcagtgcgatgcatgaacgccctgtatcgtctgcaagtgatgcgtggggaggcaatgtctcatttgatggcactgctggaggcaaccaagatcaccttggacaacagggaggagctcgtggttgacttgtcccaggagctggtagaaaaagatttacaagtggagcaactgtctgatgagattcatgagttggaggagctagtgggcaccagggagaacaccatcgaggttttagaggatcagctcattaacactcagcagcagcttgctgaggctaatgagcacctggacatgcatcaccaggagatccaggaccaggaggccaacgaggacgtcgacatcgagggaggagatgagcctgcctccagtgtggacactgctggctcgggaagaccaccttcccccgagtcgagtgcggcctcattcgcgcactag

SEQ ID NO: 2764 - DNA, 546 bp, Zea mays
  Peptide Sequence Number=SeqID_46139
atggaagaaactcacctccacgtgttcgacgccttctgcccgcgccagagcacgcccgcgcgcgctcccgcgtgcccagcgccgcgcccgagccaaaccagcgccgtggcccgcgcccgagcctataaaaccctcccaggcttcgaatacacccttccgcgcaccctcaaaacctcaccggagttagctcgtcgccgtttgcccgtgcgcagcgagtccgcggccgcccaatccccctgtcaccgtagaccggccagcagagccattcccaaccccgtccagccctcggagaagactgtgcacgactccgtgaagctccccgagcgaggaatcagagtttgcttcgccggagaggccagtccacgctcgccggagctctcaaccccgccggagtacgtggaccggtttggccggtacactcgccgccgacgagcacacccgcctgcgctcgtggaccgggcgattccggccatccccgacgtcaagccgtacctcgacgtgaccgccagagtctccccgagccaaccccaccctaagagcacctag

SEQ ID NO: 2765 - DNA, 1368 bp, Zea mays
  Peptide Sequence Number=SeqID_46140
atgaccgataaaggcaaaggcaagggcatcgtcattggcaatcctcgcatgtcacttatatcacaaaaggagattgctcgaaaggcttcggacgagaaggctaaaaagctggatgatgctggttatgctgttggtgcaagggtgattgaactactttgtcataaggagaagcctcgggctggagcagtactcccagacgagttcacgcctcgcctgagggccgcctcaggcaacgggcaccccctcgactctcccgaagcccggctcgggcaggcttcgttgggacgcctgacgccgtatcctgacacacgcgcctcagtcggccaggccgaagtgaccgcagtcacttcgcccctcttttttactgtccgatatgacgggaaaacagcgccgctcgcctcgctccgactaccgtgccaaccacccaggcgaagactgacaacaagtcatgatcaaccaccgagtttggcctcgggcgcaacaggaagctccgcctcgcccgacatcaggctccggcctcggggaggaggtctccgcctcgcccgacccccggactcggccttgacctcggtctcgggaggaatcgcgtcctcgcccgaccccggcctcggcctcaagagaagtctctgcctcgcccgaccttgggctctgaccgaccgcgccaacaggggatacatcattaccctatccctagccagctcaggctacaaggaacaagaccggcgtcccatctggcttaccccgacgataggtaatgatgggctcaggcgcttctccgacggccacaccatcacgtatacagggctcaagctctcccccgatagccatgttggcatgataatacaagggttgcccacctcttgtgttccatcccgcgccaacccatctgggcaggggcacgcagcgacaatctcactcgtcggtccagggacccccagcaacctcttcagcccgggatggtgctccgcttcgggagtctcgagttcatgtcccttgatggcagctacgacatggtactcctcccctcacggcgtgacgacaacgacggtcttcgactcgcccggtggcggtgagctcggcgacaacgtctccccgtggcagaagaggagcactccggtcgtacccgccaccctcctcgccggaggaggcagaggcggggcaaccatggccacgcaggagacggcaccttgtcggctgtcgcaccagagcgagtcgacgacgccggcactccccccggggacatgttgggcaatgtcctcgcacctgagacgacagcgggtgtcacttccccgcaacgtgtcaaccccaagcagactgatgacgcagcaccctcacaaaggatctgctaggcgttaccctcgtacctga

SEQ ID NO: 2766 - DNA, 150 bp, Zea mays
  Peptide Sequence Number=SeqID_46141
atggcttttactggccaaccgccctctaggatgcagctgagatgggccatcgacgggtaccagtacctcttcgtcgccatcgacaagtccaccaagtggccagaggccacccctatggtccatgaaagtcgcctagaggggggtgaatag

SEQ ID NO: 2767 - DNA, 192 bp, Zea mays
  Peptide Sequence Number=SeqID_46142
atggcactgagttggttcctgctggcttgttgcaagctgcttcgggtggcgaccttacgcccggtcatcaatcgatttctcacgatttgggagtcccttcgttcttctccaatctccaggaagaaaaacgtgtccttgctgcgtctcgcgacaatcttgacagactgtatcgcgactctagcaacttgttga

SEQ ID NO: 2768 - DNA, 480 bp, Zea mays
  Peptide Sequence Number=SeqID_46143
atgccggccaatgacaaacacagagatgcggaaaactggggagcagcttacggagtcgaggagggagagcgcctcgcgggtggcctggtgctcgcgaccgccgtcgcagggacgcacgcacgggtgacggcgcgccggtctgctcgcccgccggcctgctcgcccgcgccggtctgctcgcccgccggtctgctcgcccgccggcctccggcctgctcgcccgccggcctgctcgcccgcgccggcctgctcgcccgcgccggcctgctcgcccgcgccggtctgctcgcccgcgccggtctgctcgcccgcgccggcctgctcgcccgcgccggcctgctcgcccgcgccggcctactcgcccgcgccgccctcgaccctctcaagcgccgccgcctgttgctagagtcgcgcgggacacgtacgtacggcgccaggttttttactgggccgatgtgttgtatccccttcaataactaa

SEQ ID NO: 2769 - DNA, 1032 bp, Zea mays
  Peptide Sequence Number=SeqID_46144
atggcgcttcctgttgacgtggcgggcctgtgccctaggcagggtgacgtgggggctcctccgaagccgaggttgagtctgtcttctgttgccgaggccgagtccgagccatggggtcgggcgaggcggaggtcgtttggccgaggccagggtggagtccgagccctggggtcaagcgaggcggagtttcgtcgtcttccgggtcttagcccgagtccgagccctggggtcgggcggagcggagttcgccgtcttccgggtcttagcccgagtccgagccctggggtcgggcggagcggagttcgccgtcttccgggtcttagcccgagtccgagccctggggtcgggcggagcggagttcgccgtcttccgggtcttagcccgagtccgagccctggggtcgggcggagcggagttcgccgtcttccgggtcttagcccgagtccgagccctgggggtcgggcggagcggagttcgccgtggcgccttcggcaaggcctgactgcctgtcagattcactctgtcgagtggcaccgtagtcggagtggcgcaggcggcgctgtccttctgtcagactggtcagtggagcggtggagtgacggcggtcacttcggctctgccgggggggcgcgtgtcaggataaagctttacgctgatgggggttaccagctgagaattaggcgtcttgaggcccccgagcctctgcacagggcgagaggacgatcagggacagactcgactttttacatacgcccctacgtcgcctttccgcaaggaggaggggggagtgcgccatgttaccctcgatgggcaccgaacatggtgtctccggtgagctgcaagcgggtaatccgagtggacgtccgtgccccgttcgttgggggtcggctaggggcccagaggcacgcccaaaagtacctgcgggtgatttgccggacccggtcccctggcgacggggtccgagggctcgatgcctccctccgatgggattccgttacaagatcgttcccgctggtctcggaaatgtcctag

SEQ ID NO: 2770 - DNA, 201 bp, Zea mays
  Peptide Sequence Number=SeqID_46145
atggaggaggtggacgagcatgaagggcaacatggccgcattagtaggaagcatgttaaagagaggtctattatgctacatgttaaaaaagttgaatctcctattatgttatctgttaaagttaaagagaggtctatctcatcgttgttatatttaggatctaaagaaaaaggagaaagaactccaggttatggaggctga

SEQ ID NO: 2771 - DNA, 678 bp, Zea mays
  Peptide Sequence Number=SeqID_46146
atggaggatcgcaagtgcaagatcagtgggccccagcctggaagcagcaatcgccctcgtttctcgggcaacccacctcagcagttcaggcagaaccagcacccacctcagcagcagcaattccagaagcagtaccctcagcaccagcagcagaatcgccagaacaatcagtcaggaggaggtcagttcgagaggcagaatcagcaggcacctcgtcttccttccccagcaaaccagcagaacagtcaagcagcaccaattcaaggcagaagcagggcatgtttccactgtggagagcaagtccattgggtgatgcaatgtccgaagaaggcagcccagcagcagtcaggccctggcgccctagcaaagcagaatgtgtctcagcctggagcaggcaactgctctcagccacgctacaaccatgggagactgaaccacttggaggctgaagcagttcaggagacccccgacatgatagtagccgtgagacttgctcaagctcgacccggggaccctcgtcaccggaatagcccaatcgcgctcaccggagttcaagaacccgccggcgcacgtggaccggctccgaccacctccgacaccgacccgcacaccgacatgaccgtcgcaacctcccggacgtcactgaccaccccgccggagctctactgccgccggtaa

SEQ ID NO: 2772 - DNA, 1065 bp, Zea mays
  Peptide Sequence Number=SeqID_46147
atggagaggggtaatgatgtatcccccttggcgtggtcggtccgagcccaaggtcgggcgaggcggagactcctcctgaggctgaggccgaggtcgggcgaggacgcgattcctcccgaggtcgagtttgaggccgagccctggggtcgggcgaggcggagaccaccctctgaggccgaggctgaggccgagccttggggtcgggcgaggcggagttctccttctgaggccgaggttgagtccgagacctggggtcgggcgaggcggagtcctccttccgaggccgaggttgaggccgagccttggggtcgggcgaggcggagcttcctgttgcgcctaaggctaaacttggttgttgccagcctcactctggcaggtggcacaacagtcggagcggggagtccctcagctcggtcggccttgctgctcaaggcttcccttgctcagtttgagaaccttcggccgctctgcgatgagctggagccggaggctgcggtgtcggcatggacagaggcggagtcgtctcaaaaagaggcttcgtcggcccaggagcgggtggcttcccaggccgaggaggtgcagcagcggcggctggagcctggccaggtcatccgtgagagagaccatcctcggagtcacgctaccgaggccgtgagctgggctgatgtcctcgggggacagctggttgaggctacggagcggccggtcgaggtgtctgctcgggccggcacccttgcgaagaccctggctacgatggcccaagagcggtgctggcgtcctcctttgaggtggagatccttccgcccgtgtcgccgtccaaggccgggccagattccgccgaaggtggaaataacgccgaaggtgctgctgctcaatttgtcgatgtctaaacctgcaggaacaatttgtctgtacagaatcgcttatccgagcgagagttacttttcgcggaaggtgatgagtgaggatcccgctatcgaagctgtcgaaaagcgcgaaagatgttctggcagaaagactttttccgaggaaaattttgacgcagagggggttccccccttctag

SEQ ID NO: 2773 - DNA, 479 bp, Zea mays
  Peptide Sequence Number=SeqID_46148
gccgtatctgccccggcgtctcacagttgagtgacagccctaggtgccaggaagaggtctgcgccggacttttgcaaagattcgcacgtttgcgacctcttgcgacatttgaacactggaagaaacaaaccgccacgtgttcgacgccgtctgccgcgccagagcacgcccgcgcgcgcgcccgcgccgcgcccaagccaagccagtgccctgccattcccaaccccgtccagccctcggagaagactgtgcacgtctccgtgaagctccccgagcgaggaatcgggctctgcttcaccggagaggctggcccaaggtcaccggacttcaaccgaccgccggcaaccgtggaccgagagtacatcctcgtgccggagcaaggagctgctcaggaggtagccccagatccagtacccgagcctgcaccagaggacctgcctgccactgctttggaaggcaagccccggttttatgcataa

SEQ ID NO: 2774 - DNA, 237 bp, Zea mays
  Peptide Sequence Number=SeqID_46149
atggaatacctctttgatgaaccctgcggccatcagcttgtggatctcctcgcctatggctctgtgcttttcttcgtcgaatcggcgcagaggctgcttcacgggtcgggatccagctcagatatccagcgagtgctcggcgacatccctcgccaggttctggccgaccccactggaagccggtggcggccttgccctgacaccgtcggcaatgcagtgctggatgccctagggtag

SEQ ID NO: 2775 - DNA, 537 bp, Zea mays
  Peptide Sequence Number=SeqID_46150
atgggcgcgattaaggtcaaggctcagtccactcaagggacacgatctcgcctcgcccgagcccagcctcgggcaaaggcagccgaccccggaggattcacgtctcgcccgagggccccctcaagcaacggacacaccttcggctcgcccgaggcccagtcttcgcagagaagcaaccttggccagatcgccacgccaaccgacccatcgggcgacataggaagctccgtctcgcccgaccccagggcttgggctcaacctcgacgctcgacgacggactccgcctcgcccgaccccagggctcggacacagcctcggcctcggaagacggtctccgcctcgcccgacccagggctcggactcaacctcgaccttgtaagacagactccgcttcgcccgaccccagggctcgggctcagcctcgacctcgaaagacggactcgacctcaacctcggaggagcctccgcctcgcccgacctagggctcggaccgaccacgtcacaggggggggccatcattaccctacccctagctag

SEQ ID NO: 2776 - DNA, 669 bp, Zea mays
  Peptide Sequence Number=SeqID_46151
atggccccccctgtgacgtggtcggtcgaggctgagtccgagccctggggtcgggcgaggcggagaccgtcttctagagtcgaggttgagtccgagccctggggtcgggcgaggcggagaccgtcttccgaggtcgaggtggagtccgagccctggggtcgggcgaggcggagaccgtcttccggagtcgaggttgagttcgagccctggggtcgggcaaggcggagaccgtcttccgaggtcgaggtggagtccgagccctggggtcgggtgaggtggagaccgtcttccggagtcgaggttgagtccgagccctgggatcgggcgaggcggagaccgtcttccaaagtcgaggttgagtccgagccctggggtcaggcgaggcggagaccgtcttccgaggtcaaggtggagtccaagccctggggtcaggcgaggcagagaccgtctttcggagtcgaggttgagtccgagccctggggtcgggcgaggcggagcttcctatggcgcccgaggctggacttggatgctgtcagcctcactctggcgggtggcacagcagtcggagcagggcaggcggcgctgttttcctgtcaggtcggtcagtggagcagcaaagtgactgcggtcacttcggccctgccgactgaggagcgcgcgtcaggataa

SEQ ID NO: 2777 - DNA, 1299 bp, Zea mays
  Peptide Sequence Number=SeqID_46152
atggtgggtctcgtcggcggcagcacggcgcgggcggagcacgtcgtcgccaacgccggaggggaggcagagtacgtgcgccgcatgcaccgccacgcgccgaccgagcaccagtgcacctccaccctcgtcaagcacatcaaggcgcccgtccacctcgtatgtcccccctccaccccgctctttcctaccctcaacgcggctggccccggtggttcagcggttggactgcctcgcgtctgggctgctatttctcttcggatctggagtcaggagtccttcgtccgatttccaaggccttgttgggtgtgggagctggtgcggaggttcgaccagccgcagcggtacaagccgttcgtcaggaactgcgtcgtgcgcggggaccagctcgaggtcggcagcctgcgcgacgtcaacgtcaagaccggcctgccggcgacgaccagcaccgagcgcctcgagcagctcgacgacgacctgcacatactcggtgtcaagttcgtcggcggggaccaccgcctccagaactactcatccatcataactgtccaccccgagagcattgacgggaggccgggcaccctggtgatcgagtcgttcgtggtcgatgtgcctgatggcaacacgaaggacgagacatgctacttcgtggaggccgtgatcaagtgcaacctcaattctctcgcagagctaagggtgttccgtacaaccctcacggttgcactgttgtcccaggggctctatcaacaaaccggttttagggtgaagcactcgagaaacgagctcaagtctccaggggactcagccatctatgctcctactatggttgagtcttctgccaacatcataacagagcctcgacttgcggagccacttgtgattgagtcttttgaggtccctgaggacataatggtagaagaggtcattcctgaggcttctatgcccaccataggaactgaccttgtgaccacgatcgaagatcctatggctccactcactaggtccccggctccatcattggtcgatcccacgaccgcatcgtcaggcaaacccattgttgtatcatcgggtgagccctcagtgacgtcgaatccttggctttccactaacccaccaagagacccaaacatcgaggaggtcttgcatgatgccaaggccattgcgtcaaacattgagtacaataatctctcgatgaagttttgtaagtatttgttggccaaggttgaccatcttgaagactggttgtgtggcctgcttagaatcaactcgaacgagcttgaaggtagcacccaggtctag

SEQ ID NO: 2778 - DNA, 615 bp, Zea mays
  Peptide Sequence Number=SeqID_46153
atgccccctgcaccaccacagggcctcccggctgctggaggagaccctgacggagaccgagacgacgatgacgctggtggcagtttgagccacggcacagagctctcggaggagcctgagccgaagggatggatcgctagacccatcactcgtgacgccgctcgcgggtgccacttccacgacgctctcaacaccatgctgtgtcgggccttcgaccgacacacttggtccatcgagtaccattgtgtggtctaccagcatcatcgcgggttatacccggaccagtgggaggctacttgtttgtactaccctagccgttcgaccggcagtgctggaggtgtgattgtctcaccagttggtgagggcaatcctaggctgaatagcatggtcaacctagccgtcgtgctcaacacagagttggaccacgcccttgacgagttgggcaaggtttgggtggaggttgcggaagtgcatgttgagtgcgcagcacaccactatctggatggtggttctcctgtccctgtcgggattcaacacccttaccgttcaccgccccgtggtcgcttcgactatggtaccccagactacaaaacccgaatagatttggatccatag

SEQ ID NO: 2779 - DNA, 231 bp, Zea mays
  Peptide Sequence Number=SeqID_46154
atgcgggggaaggcggcctctcagactccacctcctactgaggcgagggggaagagtcatgttgctcctgctcctgctcctgctcctggcgtcggcgctcctgctcctcgtgcaggcgacgatgcagtctctctaggtgactggactgacctggcacagtgcgacgcagtggacgctccgccaggcgagaaggcaaaaaggggatcacagacttacgtgcagtgcacctaa

SEQ ID NO: 2780 - DNA, 1284 bp, Zea mays
  Peptide Sequence Number=SeqID_46155
atgaagaatctagagcatctggaccttagctacaacataataactgatggtgcaattgaacatattgcgaagattggaacaaacttgcaatatttgagcctcaagaatactggaataacttcccaggcactatgtattctggcagggacagttccaaacctcacctcactgtctttagctaatacaaaaattgatgactctgctctagcatatattggcatgatacctttgctgagaacgatagatttaagccagacaagttttattcacactgaagtaaattccgagaagttgttgtctatgtctgcatttgagcatctcaaatatctggaaagtctaaatctggaggatacaccgctatcagctgaagttatacctcccttggcatcctttgcaacactgaaatatttgtacctgaaaagtgatttcttgtctgatcctgccttgcacgcactctctgctgcctccaatttgatacaccttgggttccgcgggaatatattgtcaagctttgggcttttacagtttgtaccccctgtcacactctgtgtgttggatttaagcggctgttggatcttaacaggcgatgctatttcaacattccgtaagcgtcatcctacgattgaattgagacatgagctcctgcacgaagttgaggaaaattttgttggtggttcccaatttcgtaaacctagacgcagacgatctcctcatgtgaaagcagaagttggaaacagttttgctggctcaatcctagtcagggactctgcattttacaatatattgacactgacacagctccttgagctcatccgaaatgtcatggagcgctataatggtgtctgcgaactgcaacgtggtggggacgctgagaacccgaacgtcgtcgacggtgacacactcgcggacgaagtgcaggtcgatctccatatgcttcatgcactgatgttgcacgagattggtagagaggtagaccgtgctgacattgtcgcagtagacgagggtgccacattgaagggggatgtggagctcctggaggagctggtgcagcaagaaggcctctgccaagccgttgagcacatatcccagctatggacgagcggtgtcgacaaagccagtgggctggctgcagtagacaatctccatcagagtgcaatggaggaaggcattattgacgttgagctgatggatcgcctagtaccgagagagggcgagggagaggaagactcacacggtggcaaacttgacaacggggctaaaggtctcatctggggcgttgggtga

SEQ ID NO: 2781 - DNA, 882 bp, Zea mays
  Peptide Sequence Number=SeqID_46156
atgcgtcgtgcatttgagggctgccctgacgatttggagacgaacacaaacccaaatgcggaaaagcagggaggtgacattggtgcatctcatgacactccaacttacatgggccccctttttgatcagacacctagtggtcatgttgcatatggtgaggaaacacatagcttgcacactacacatgaccactctctgccacgtttaacagaattggaccgtgctcggtcgctccgtgattttttgtgctcctcaaaacccgacccaaacaggaagatcatagaattcgatgaatgtattggaaattgtctcgatattcaacaatcatttgcagacgggatgtgtctggataatgtgttcatgcagtgtttcatcatgtgttttcgcgatgacgaaatcaataattgctcgtccatcaacaaaaacagacttgtactggatgtcaatgttggtactctcctcaattttgaggagcatgaacgctacagtaattctcctcagatttttgatcaaactgtccttgatgcttatctggacaagacactgccccagctggacaactttgttgactacaaaacgattatggtccctatacttcatatgggacattggacattgtatgtcatcaatatccagtttcgatgtattcacattttagattcaaatccatatggtccagagttgggtggtacttcatggaagatgtttcattactcccaaaaggacataggctccaggaaactaccatgggctagggttataatgaacagattgaacaaatctttgcaacaagtccggcccaattcacgcatccctaaatttggaaatttcccaattgacatgccacctatgtgtcccaccatgatagctgtaacgccctga

SEQ ID NO: 2782 - DNA, 1218 bp, Zea mays
  Peptide Sequence Number=SeqID_46157
atggcgctggaggcagaggaacgggtgggtgatggaggtgcatgcgctgctgcccgctctgtggccgcgcgctcgactgctcgccggacatcacgcgcgcgcctgcgcctagtgaacgttttaccgtacatgacatctcgagatcgccttaaaggaaaatgcagtcttttcaatggggaatggataccaaacccctctggtccagcctatacaaatgcaagctgtcgatttatcgacgatcaccagaactgcatgatgaatggtagacctgataaggaatatctacattggaagtggaaaccttatggatgtgatcttccaccatttgatgcagtaagatttctagattctgtgagaaacaaaggttggggactaattggtgactccatccttcgtaaccaagttcagtcattgctttgccttctgtctaaggctgaagaacctgttgaggtttaccatgataacgaattcaaaaacaggagatggcacttccaatcctacaacttcacagtgtccatcgtctgggctcctttcctcatcaaatctggtatttttgagaatgaggatggcgtgtctacctctgaaatacagctccaccttgatatactcgatgctaactggacaagtcagtatgagagctttgactatattattatttctggcggacaatggtttctgaggacagcggtctactgggagaacggtgcagtggttggtggtcataattctcagaacaagaacgtcgctgaacttggttttgagcacctgtatcagaaaactctacaaaacgttttcaacttcatcgtctcagcgaaacacaagccagtaattttcttcaggacctggtcacctgatcacttcgaggatggagagtggttcagcggtgggtcttgtcgcaggaaattgccctacaacaagggagagtacagagagggtaacatcgagcgtgtcatgagacagatcgagcttgagtccttcaacaaggctgtagccgcgcttaggggttcagcggacatggatagactgagactgatggatacctacagcctctcgtccttgagaccggacggccacgttgggccttacagaacaccctatccctttgcaaggggcagcagtaaatccacgcccgttcaaaatgattgcttgcactggtgtgtaccaggccccattgatgcatggaatgatcttgttatgaagatggccctggatccatga

SEQ ID NO: 2783 - DNA, 78 bp, Zea mays
  Peptide Sequence Number=SeqID_46158
atggccgagtttcccctatgcttgatgcatggcgccttggtacaacagcagcatgtcagacctttgcaaccccggtaa

SEQ ID NO: 2784 - DNA, 1488 bp, Zea mays
  Peptide Sequence Number=SeqID_46159
atgactgggaacgagaacctcgtcgacggagtcgagaacgagagccaacaagacgcccacgtcgctgagcatgctgccggtggtactgctagtatacgtcgccatgaagtacacgaagctccgccgcctcgccgttaccgtcttcctaaggtgcggcgtgccttcggcggaccaccaccccctcctcctcatatcagcttccagtacaacagcgccgccaccatcgagaggatcccctacaaccttcagttcatcgtccctcgaaaccgcaacgtcatcgcgcccactgcagtggccataggtccctaccaccgtgccttaccccagctctcggggatgcaggaggccaaggccgcagccgtggcggagttctgccgcgcggcgggccagccgctcgcggcggtcagaggaaagatgctctcggtggcgggagccgctcgcgggagctacgccgccgacggcacgctcgtggacttggacaacggcgagttcgcggagatgatgttgctggacggatgcttcctgctgcagttcatggcctccgtgtgccggcgccgcgacgacgatccactcatctcgagaggcgaggtgcggagaagcatcaacgccatcgtgcgggacgtgatgctgctggagaaccagatcccctggcttgtgctcagctccctcatgcagttgatgccgccgcccgccgggtctgtcgtcaatgacttccttcttctcatggcctccgccttccacatcgtcggcgacatcagcaatgccaacagccaaaccggcctgccggccgccggagaattagataagccgccgccaccgcatctccttggcctcttccatcgccgtcaaatggatatgggcgcggtgcgcacccagcagcaccagggcagcctcctccgcgtccccttccagctggcttccctgtccagcaccgcggtggagctcgctgagatgggcgtcaagctcgccccaagcaagacgaagacatttggggacatggccatgtccaagcgggggcgccgctggcccctcggcctcttcggcgagctctccctggcgccgctggtcttgaaccgactcaccgagtgctggctcctgaacatggcggcctatgagttgtgccagccgcaaggcgacgctaccgatagcttccctgtcagctcttacgtcacgctcgtgtcgctccttgtgaaccggccggaggacgtgcaggagatgcgcgccaagggcctcgtcgtcagcgtcttcgacgacgcggaaacactcggcttcttcaaggcgctagcgccgcacctgagcgtcggttaccgctactacgaggtcttccagtgcctgcaggagtacaggcaggagaggtggctgtggatcgccgtccacaggttcttgtacaacaacatcaagaccatcgccactgtcttctccatcgtcggcgtgctcgcgggactcttcaagaccatcctttctgtgaagcagccccatggcccgtaa

SEQ ID NO: 2785 - DNA, 372 bp, Zea mays
  Peptide Sequence Number=SeqID_46160
atgtccggtgcgccaacggctccaagactgccaacggtcggcttcgccatagaaggaaagaaatcgggcaccggacagtgtccgggtaatgatggcgcctcctgtgacgtggtcggtccgagccctgggttgggcgaggtggaggctcctccgaggtcgaagtcgagtctgtcttccgaggccgaggtcgagtccgagcccctgggtcgagcgaggcagagaccatcggctgaggccagggctgagtccgagccctggggtcgggcgaagcggagttcgtcgtcttccggggctgagctcgagtccgagccctggggtcgggcgaagcggagttcgtcgtcttccggggatgagcccgagtccgagccctag

SEQ ID NO: 2786 - DNA, 1761 bp, Zea mays
  Peptide Sequence Number=SeqID_46161
atgaacaagacaccggcattcaaggtgccattacaaacggaactccggttccacctccgcaggtacgaacaaccccacacgataggggggcctgcggagcaacggaaggccgacgggtggctcgccgccgcccgctccaacaacgacgacgacgacttctgctccgaggggccgaacagcagcagcgatgacctcagggcggatgctgctgccatggggccctcgcccacctcctcactcgagaggcaaggacgagcaaaaggccgtagagttggaggtcggtccgtgggcggcaccggctatctcgtcggcggagaaacctcttccggctgtcgtggcggaaggcggcgctggaagcggctccggagccgctcgggccagagaaccgggcacgcggcagctgccagcgccgcgaacgacgaacgcccttccccccgatcactgagggaaggagcgggctgctgcccgcgcagggaccgactccaactcggcgcactcccctccccagcactgatgatgaacatccttgaagctgagggaggggcagaggccgcagcccggcttgcttctccccacccaggggctggtggtcaccatcttggggcggaagaagccaaaccgcaacgcgcggtgcatgcaactgcccggcggttacaagcattcctccgttttcgcccaaaccagcgggtgaaagggcggacagacatgcagtcggcaggcaaccgcgccaagtgggcgcaccccttcgactccaatgcgcccagcatggaggcccaggcccacacgtcatgcaactggcgcgccatttgctacatgcgagcaaccgcaccgcccctcgcgccactaccgcgcctcctcgactgcggaaccagtaccgtgactcgaggcaaccctgcgtatgacccaacagtgctagccaggcgcatcggtcacgggccagtcagccgcgggagaaggcgcgacggtcgatgcggccaaaaatgggccggcagtaatggcggtggcaggcgggcagaagctgcggtcacgtcgtcagccaagctcacgagaagcgagcgacgcttcgccttcgccgtaatgaccgcgtcaaaaaagggaccaggaaagggggataccccgaaagggatccttctccacgaaggaaacgggccccgagcccccctactgatcagaggttcgaaggctggcccctcggaggggttcaacagccgcctcagagcgctcgggctccgcgcccactactggtcagaggttcaagggccggcccctcagaagggttcaacggccgcctcaggccactcgggctccgcgcccactactgatcagggcgggaacgatcttgtaacggaatcccatcagagggaggcatcgagccctcagaccccatcaaaaggggaccgggtccggcatatcacccgcagctcactggagacaccatgttcggcgccctccaagggcaacatggcgcttcccccctcctccttgcggaaaggcgacgcaggggcagtgaggctgacagcagccaagtccagcctcaggcgccataggaaactccgcttcgcccgaccccagggctcggactcgggctcagccccggaagacgatgaactccgcttcgcccgaccccagggctcggactcgggctcagccccggaagacgacgaactccgcatcgcccgaccccagggctcggactcgggctcagccccggaagacgacggactccgcatcgccctaccccagggctcggactcgggctaa

SEQ ID NO: 2787 - DNA, 111 bp, Zea mays
  Peptide Sequence Number=SeqID_46162
atgaagctgtggaaggagacttccaggagttccaagactacgacgagttctaggtgtgggactatatggacgtctcagacgtatgatgtaatcgactatttcccttcttaa

SEQ ID NO: 2788 - DNA, 288 bp, Zea mays
  Peptide Sequence Number=SeqID_46163
atggaatgcatgggcgacctaatttcattatgtggcttcgggaccgtgaccgaatttgggatgacacagatccaacctgaaaaattgcttcaaggacacgacatgtatatccttgcccatcaagcagaccaagtttatttctcgacatatccatgcaaaaggttgtctacatggagggctgtgtacaatgtaaatccccgcgaacgcctatacactcctggtgaggaagaatatcaatttggtcaccttgagcaggttgatgaggatgccaccaaagtcaaagtgtaa

SEQ ID NO: 2789 - DNA, 156 bp, Zea mays
  Peptide Sequence Number=SeqID_46164
atggggaagcatgtcccattactcatcatgctcctcctcagccgagtgaccgcacttgtacccaccataaccggaatgggagaccacgtctcaggtcgcgtgagggccaaagtctgcgggcaggttcactcagaatttaggaaccatgatgcatag

SEQ ID NO: 2790 - DNA, 555 bp, Zea mays
  Peptide Sequence Number=SeqID_46165
atggcgtggctcggcctcggcggcccctgcgcggcgggcctgcctcgcgaggccatggtggcgatgagaatgatggttttggtattgactatggtaatggttgtccgtgttgaaaccactgctcaggagaagatgaagctgtggaggaagacttggcaggagatagagtctgtgaggagctgctcccctgtgctcccacaggaggcgccccctgcaccaccactgagcgccccagccgctggggtagctactggaggagaccctgacgacagaggcggcgacggtagctcgagcttcagcaccgacctttctaccgaccaggagccggaaggatgggttgcccaacccatcactcgcgacgctgctcgcgggtgtcacttccacgacacgctcgacactctgctatgccaggcactcgaccgacgtacttggtccatcgagtatcgctgtgtggtgttccagcacagtcgcagggtttacccggaccactgggaggcgacctgtttggtgcgcctgaggcgcggaggtctactcagagcactattccatctctga

SEQ ID NO: 2791 - DNA, 105 bp, Zea mays
  Peptide Sequence Number=SeqID_46166
atggcgacgacggcgagcgccaccaagtgcttcggcacccgcgccttcgccgccggccgcgccatcggcaagcggctacaactggactacagaagccatacataa

SEQ ID NO: 2792 - DNA, 141 bp, Zea mays
  Peptide Sequence Number=SeqID_46167
atggcgcccaagcggaagaaccagaattctgctgcggtagtcattcctcccatcgaccccaacagcgagttgccgttcgcagaacattcagcctttgaaggacagggcatacccagcttacttgtacagtggcattactga

SEQ ID NO: 2793 - DNA, 150 bp, Zea mays
  Peptide Sequence Number=SeqID_46168
atggccatcacagtgatcttgagttcaaggtgggcgactgggtctggctacgcctgttacatcgacaggcacaatcactgttcaaccgacctgaagggaaacttgggccaagaggatcacctcctgttctaccgcgagctctgccaatga

SEQ ID NO: 2794 - DNA, 777 bp, Zea mays
  Peptide Sequence Number=SeqID_46169
atgaccagggtcaaagaccgccacacccaagagtccatcaagcgattcaaagagatcaccccgcgaactcaattctcggtgacattcataaggggggtggaggatgcactaagagattcggattgggtgctggcaatgcaagaggagctcaacaacttcatgaggaatgaggatgccaagcccatcaagacacccatgggaacaaatgggcatctcgacctcgacacgggaagtaaatctgtagatcaaaagagcgttgttgacgacaacagaaggcgagcacgtgctgcagacgagcggaggtggtcagcgaagcttggcgaggctcggacacagggccggtttcacggcgtaggcgagtgcgcgtcgccggtgagagaggtgaaggtctcggcgacaatcgagtcgcctaactatgtgacactcatcgtggatgagctcttcagcatactcaagtccgctgagatcgatcaccagactagggacaagattgagaaccctagtgcacccatcatggccttggtctctagaggtggttcctcttcttactcttcacctgtaatgtttgctttatcttatttgtcaaccatcacagaggagcaggtggagatccttggggatgaggagctggcgcttattgccaaccggttcaagcagtttcacaacaattgtctgaattggcggcatggcggatctaaggatggatgctacaactatggtgaccccgaccacttcatcgcccacttccccaagaagggcaagccgaaggatggctag

SEQ ID NO: 2795 - DNA, 963 bp, Zea mays
  Peptide Sequence Number=SeqID_46170
atgcataaggggagcacgaagacatggttgccttttaagggggtcaccatcgttttaaaggcaactctccccacttgcgtcctcatccatcacgggctgagtcttctccaacacgctccaaggtcctccccctacgacacgggggctgggtcccacgcgtcatgcaagctggcccagggcagaagaagccaaaccgccgcgcgcgaccagcgggtgaaagggcggaccgccgtgcaggcggcatgcgaccgcaccaagggggcgcaccctttcgacttcaacgcgtccagcatggacaggcggcgcctttggcaggcgaagcaggcgacacttcacctccgccataatgaccacgtcaaaaaagggaccgggaaaggggataccccgaaagggatccttctccgcgaaggaagcgggccccaagcccccctactgatcagaggttcgaaggctggcccctcggaagggttcaacagccgcctcagagcactcgggctccgcgcctactactggtcagaggggttcgtaggctggccctcgaaagggttcgacagccgcctcagacgcagagtgagggatgaccctgggtacgttcgatacataaccaaggctcgggctacgctcccgagcgccgcctgcgccgctccgactgctgtgccactcaacagagtgaggctgacagcggccaagtccggcctcgggcgccataggaaactccgccttgcccgaccccagggctcggactcgggctcaaccccagaagacgacgaactctgcctcgcccgatcccagggctcggactcgggctcagccccggaagacgacgaactccgcctcgcccgaccccagggctcggactcgggctcagccccggaagacgatgaactccgcctcgcccgatcccagggctcggactcgggctcagccccggaagacaatgaactccgcctcgcccgaccctag

SEQ ID NO: 2796 - DNA, 99 bp, Zea mays
  Peptide Sequence Number=SeqID_46171
atgacttcagtatttgagtctcttgacttcggcttggtctgtggggcgatagtgtccttgcagggtctcttacgactagggcttcgattatctaaatga

SEQ ID NO: 2797 - DNA, 423 bp, Zea mays
  Peptide Sequence Number=SeqID_46172
atggcgcagagccgaagctatgcgcaggggagcttcggcgtgatagcagaaaaagaaaccgacttaaaagggaaaaggctatttagaccccgatggattgctatagagttgttagcaaatcatttgagaacaagtccccaacattggcgcccacctccggtgaactcacttccactttttgagtttcgaacaccttcggcaagcatagaccttcgtcatgccgccaaagaaagcttcagcaacaggggctgccgctctgcagccgctggaccccaactaggagaccctctctcttcgggaggcccgaagccagaaaaggaaggccaccagtccaatgcctcaggaggacgacttggatcaagagatcagaaatatggagatgctccatcagcaggtgcaaaggaagaaggaaatgatggctag

SEQ ID NO: 2798 - DNA, 2334 bp, Zea mays
  Peptide Sequence Number=SeqID_46173
atgcctcattcgcgcctcaaatggcgcaagcggaagctcaaccccgacgcgtccccgtcgaagccctccatttctaccgcggcggccgaccactcctccgactccgactccgccgccttaaacgacgacgaggacccctccgccctcggcgcgacgggggacggggcaaccgacaacgacgcggacgccgcggcgtccgaggaccccgcggtcgagctccgcgaggcggaggttctgccctcggccgatgccatctctagcttccctgccgccaagcgccgcgtggtcaaccggccgcatgcgtccatcctcgcgctgctcgaggccgaacgatctgcttgttccggcgatgtccctaccgtggcactgccggcgctagagaacatctcgcacgggcagctgcaggtgctgtctggggtgcttccggaccacccatcccttgcgacagaccccgacaagccgtccttgtatgtgtgcacgccgcctcccctcatggagggtcacggggtgcccaagcagttccagggtcgcttccatgtggtgcccaagcactcagattggttctccccagggacagttcataggctggaaaggcaggtagtgccacacttctttacagggaagtctccagggcatactccggagaagtatgtcatgttaaggaataaagttattgctaaatacttagagaacccaagcaagaggcttgcttttgctgagtgccaggggcttgttgggagcacatctgaattgtatgatctgagtaggattgttaggttcttggacacttggggcatcatcaattaccttgcggctgggtctgtgcaccgtggtctgaggatggcaacttcgcttctaagagaggaacctacaggggaactgcaattgcttacagcaccattgaaatcaatcgatggtctaattttgtttgaccggccaaaatgtagcctcccagtggaggacatttctaggatggcagcgacttcatcgaactcggaggctgtggattttgatgctgcattttcagacttggatggaaagattagggagcgtttgtctgagagctcttgcagttattgcttacagcctttgccaagtttacattaccggtcgcaaaaggaggcagatatttttctatgttctgattgcttccatgatgcgagatatatcactggacattcttgcttagatttccaaagagttgatggggataatgatgaatcagaaaatgatagtgataaatggactgatgaagaaacattgttgctgttggaaggcattgagaagtacaatgacaactgggatgacattgcaggtcatgttggaacaaaatcaaaggcacaatgtatctaccattttattcggttgccagtggaagattgtttgctagagaatgttgagatacccaatgcacccattccatttcgaccacaaagcaatggttatcaatgtttagattccaatggcagcacatcaggagctccagttcaaaatatccaacaaggcaatgagcttccgttcataaattcttctaatccggtcatgtcactggttgcatttttggcctcttcaattggacccagagttgcagcatcatgcgcacatgcagcattatcttttttgactagagacgaggattccagggtgagttcagaaggctcacatgctggtggtctgggcaatggtgcaaattcaaattttcagaaccataatggtgcttcaccatccatttctccaggaaatgttaaatatgctgccatgcttggtctgtcagcagcagcaatgaagtctaagctctttgccgatcaagaagaacgcgaagtgcaaagactaactgctactgtaataaatcatcagttgaagagattggagttgaagctgaagcagtttgcggaagttgagaccttgctcttgaaggaatgtgagcaagtagaaagggttagacacaggatttcagctgaacgcgtcaggatgaggtcagccctattaggtcccaccggaagcggtctaccagggggcagttgtagcactatgccatcaaatccagcaggcatgagccccagaccagtcggtgtgccaggctacatgccacagaccagcatgccagccacatatgccaacaacctgcaggggcatgggaatcctcagatgccgttcttacatcagcggcctcagatgctttcgttcggccctcgcctaccactctcagccatccagactcaaccatcaccacaatcatcaaacatgttcaactctggcatgcccaattcgattgctcctaaccaccatcagttgctgagatcatcctccggaaacaattctagtgcaggatag

SEQ ID NO: 2799 - DNA, 1110 bp, Zea mays
  Peptide Sequence Number=SeqID_46174
atgcctcaccagagttactccagcccacccaagaccctctctccaccgctctcccctctctgccctcgaatttgtggcctcctccccgccattgagttcgccgtggtgctctcgccctctctgcccaactccggcgaccctagagccaccctagctcacgccagtctcaactccggtgacctctccgccgcggagaagagtagcgccgcccgcagccgttcacccctccccgacaacgagcagtccgaggttcctgagtgtgttgttggagacctccctaagcaacaacctgccacctggagagactgcatcatcgcctgcacgaggagcaggagtgccgacgccaggagcaagagcagcaggactcttcctcctcgcctcagcgggaggtggagtatgagaggccgccttcccctgcacctcagccagagatgccccctgcaccaccatagggcatcccggctgctggaggagaccctgacggagacggagacgatgacgacgccggtggcagttcgagccacggcacggagcgctcagatgagccagagccggagggatggatcgctagacccatcactcgtgacgccgctcgggggtgtcacttccatgacgctctcgacaccctgctgcgtcgggccttcgaccgacacatttggtccatcgaaggccttctcagagcactattctattactgagagggatactgtcgaggcagccatgcaagatgcagcacgacgggcactttcgcagtattgctcgttgttcagcggggtagcagatggcctcgacctgaagtactaccctcgtcgttcgaccggcagtgctggaggagtgattgcctcgcgagttggtgagggcaatcacaggctgaacaacatggtcaacttggttgccgtgctcaacacagagttggaccacgcccttgacgagttgggcaaggttcgggcagaggttgcggaattgcgtgctgagtgcgcagcacgccactatcttgatggtggttctcctgcccctgtcgggattcagcacccttaccgttcaccgccccgtggtctcttcaactatggtaccccagactgcaggacccggatagatttggacccctag

SEQ ID NO: 2800 - DNA, 276 bp, Zea mays
  Peptide Sequence Number=SeqID_46175
atggggcacgctgaacttgtcttccaaaacaatgcaaagaagctggtgaaggatgtcatatactatgcaagaattcaggctacaaacctgtattttcaaaagcatccggaagaagcaggccccttgaataaaaaggaagggtcctcaaagatatatttgactaaggatcaatatcgtgaggaagctacgagtggccaaaagcctagtgacattgaggtctaccaggagggccacaaaggaccaaacccgaacaaccctgaccagctctgcagctag

SEQ ID NO: 2801 - DNA, 402 bp, Zea mays
  Peptide Sequence Number=SeqID_46176
atggttcgtcgccatggccctgacttcgactggcgccatgaaccgttggatccctcggtggtgtacgcaagtggtggtggcaaagcgcatggacgatacgcactctttgacggattcattgactcgtcatcgttaatgcagcaacagggcatgacatcaaattttccaccgccaccacaatggagccaatttgcaaacacaccagttccaccaccacagttcaccacccctccgacacatatacctgcacctggagatagggttacgcctgaagcgggtggtagtgggtctgatccagcagtagggactagatttgttgactcgctcttcgcgttccctcctcctggtggtggtggcggcagcggtcaaagctctaaccacccaagtggtggttatatctaa

SEQ ID NO: 2802 - DNA, 1251 bp, Zea mays
  Peptide Sequence Number=SeqID_46177
atggaagcccacgcccacgcgtcacgcaaccggcacgccggtcgctacgtgcaagcaactgcaccgccactcgcgccaccaccgcgcctcctcgattgcggaatcagtaccgcgactcgaggcgacccagcgcgtgacccagcagcgccagcctggtgcgacgacgacgcgcccgtgttccattcctcgaatggctcgcgcacgcgcaacggccgccccacgaaacgcacgccccgtcgcattaactccgcggcgggaaaggcggcgcctctgggaccgagaaagggggaaaccccgaaaaggatccttctccgtgaaggaagcaggctccgagcctccctactgatcagaggttcgaaggctggcccctcggaggggtttaacagccgcctcagagcgcgtgggctccacacccactactggtcagaggttcgaaggctggcccctcggaagggttcaacggccgcctctggccactcgggctccgtgcccactactgatcaggggttcgaagggctcggacttgggctcagccccagaagacggcgaactccgctccgcccgacccagggctcagacttgggctcagccccggaagatggcgaactccgctccgcccgacccagggctcggactcgggctcaaccccgaaagacgacgaactccgctccgcccgacccagggctcggacttgggctcagccccggaagacggcgaactccgctccgcccgacccagggctcggactcgggctcagccccagaagacgatgaactccgcttcgcccgaccccagggctcggactcgaccctggcctcagccgatagtctccgcctcgcccaacccaggggctcggactcgacctcggccacggaagacagactcgacctcgacctcggaggagcctccacatcgcccaacctagggcgcggaccggccacgtcaacaggaggcgccatcattaccctaccccaagctgacttaggctacgggaaacaagaccggtgtcccatctggctcgctccgccagacaaagtaatgatggcgccccgcacgctctatgacgatggcggctctcggcccccttacggaagcaagaggacgtcagcaaggactcgacagccccgacagctgtccttccgccaggcttcagcgctcctccgacggccacgacaccacacgaaccgggtgccaaaacctctccggctgccacgatggcatgtacttagggcgctagctctcctccgctag

SEQ ID NO: 2803 - DNA, 738 bp, Zea mays
  Peptide Sequence Number=SeqID_46178
atgactttcatgccttttgactgcatcgatggcggaatccaaaaaacgacaagagagaccttgaacgacaaggccgaccgagccaagggactcctacacctccgggatacggataccttactcgtcaccttccacgaaaggaatgaactacctccacaccagaggggctgcgagataacgagctccaagcggctcatcggcgaccactgcaccagcatcgacaatgacctccacctcgggcggctagacagcagcagcgatggccccagggcaaacgctactgtgaaaaggccctcgcccccgtccagggggcgacgacaagccattaaagccaaaaggccgaaggaccaggtccagttggaactgatggtctcgtcggcagaggcaaccacctcggcggtgggaagcctcacctatggcagccaccacctcagcaccgacgacagcggccacctgtgccccaacgccgcaccagctaatgatggctgccccaacacgcacaaggaggtcctcgctcccgtcgtctccgcgggagtgaggacaggaccgtcgagggacgcgaacaccgcccccgcggcgtacgacgtcttgtacgccccccggtgtggtcggcggcataggacgagctgtggacatgggggacctgcgcacggcacgaccgtcgcccgtgcggtgggtggactgccgcaccctgaccgggcagcaggtggcagttcgcctcctccgccaggctggtga

SEQ ID NO: 2804 - DNA, 615 bp, Zea mays
  Peptide Sequence Number=SeqID_46179
atggcggacatcagccaagaactcgtctcgttcggccatcgtcttgtccactgtagctactcgagtgttgccatcttcataggacctgatggtgggcgggtctcagccatagaccacacggaacggtgtctcccacagggacgactgaatgcggtgttgtcggtgtattctgcccagggcagccaccgcatccagtctcgtggacgatcgcctatgaagcaacggaggtacatggcgatgacgcggttggcagcctctgtctggccatcgaactatggatggaacgccgttgtcatgtggagctgggtgcccatgagccgcatcagttcccgccagaacgtcgaggtgaacaccggatctcgatctgagactatggactacgacatcccatggaggagcacgatgtcggtgaagaacatctgtgccacagactccgcggagtatggggtaggcgcggatgtagtcctagacgatgcagcgcatgtcgaggaagtggaagtcacgccggaggcgatggagggtgcgctgcacgccctcatgaccgtcgccgtgcacccggtcacgatcttaggcaggagtggcaaggccgagggaacgtatagtcgcccggcgtag

SEQ ID NO: 2805 - DNA, 1713 bp, Zea mays
  Peptide Sequence Number=SeqID_46180
atggatgaatgtccagacacgttcttctcccttcggcttgggccagacggcggcaccgcctacatgagacgacggcgcatcgccgccgcagcactactaagagcggacagcggactatggaggtggaggccatccgagttcccttcgaagcttctcgaggataggtacgcggaagatagcttcgtcgtcaccattgcggcatcccgcttcgtcggccatttctgggggaaaccgcgaagatcctttgcaagtgtggtaaaaaacccccgcgcgcccaccacggtggtgaagatgcaacctagaggagccgggaggcggggaggtgttgcctctcgaggtactggtcgcagatcggcgcgggagaatgtgtggagaagggtggaagaaggctcatcaagcgctcacagacaggaagctgacccgacagatgaagagaagatgaagggagaagaaccccatcagcagaacccttgggaacagcagagaaaaagccccgaaggaaaaagcggaatagattggaggcatgttgctgaggatgaggattttaaagaagagaatatcaaaaaagagctgtcagtgccaaaagctgtttacaaagaggttggtttagaatcagaggaagaggacccccatgacaatcgtggtagtggcatcaaaattgatgatcaagatcagaataatgctaagagaacaaagtttgaaggaaacccctggagtgaagggaaaaacaaaggcaagactcaagaagggtataacaataatcagcaaaaaggaaaaaatgaccagcccatgcagcatagatatatgaaggctccccctgctccaccagctgagaaaaacatgtggaatctgaataaaggaaaagatatcatccaagatatttcaactgaagagaatttgactaaagaaggaagagttcaaattacagacagtgaagaagaggatacaagtgaccttttaggggaggaattgtttgctgcaggtatgaacattggaatgtatgatacacataaaaaatgggatactggtgaaaaggatgaagatgcaaatgagagggcaacttatgataaaaaagaaaccacaaaaaagggcaacgtggtcattgaagaaatagtggatgaatttaaagatgaagaagaaaagaatgaaattctggtaagcactcaggatagtgggatcatgcttggatcacaagaagaggttgatcagaaagaagaagctgagaaggatatgatgaatcctaaaaacaaaaagcatgctgaagaaaagatgtgttctaaaaaagaagatagaagggttagtgaaagacttaagaaggacgcaggaatcagaatcgaggagaagaacagaagaatagctgctaaaaggaatttggaagggcttagcaagaaagagctccaggaccttctgcaagagggcgccaagatgctgctttcatctccctgcttcacggtgggggtggtttgtgcttcctccgatgatgtacaagggtcacagggcttgggttttatactctggaggcggggattacccttagctagatggctcggctgttgcaacggctcggaaatcccgaccggggagagcagaatcgcggcccgcaaggagtccgaccagggcgcgtgcggctatggagaagataggcctgacatggcgggcccacaaggaagtcccacagagcagcatcggcgcgagatgcgtattggcgcatag

SEQ ID NO: 2806 - DNA, 291 bp, Zea mays
  Peptide Sequence Number=SeqID_46181
atgtccggtgcaccagaggactccagcacaaactcgtcgtcttcggaaaaatccagaggcaactccactataattcaccggactgtccggtgtacatcggacagtgtccggtgctccaaggaagagcggcctcaggaactcgccagcttcgggaaactgcaacggctgctccgctataattcaccggacatgtccggtgtacaccggactgtccggtgtacaccggactgtccggtgtatctgcggggcaacgactacttcgcgccaacggtcacctacaacagcaattaa

SEQ ID NO: 2807 - DNA, 495 bp, Zea mays
  Peptide Sequence Number=SeqID_46182
atgtccggtgcaccagaggactccagcacaaactcgtcgtcttcgagaaaatccagaggcaactccattataattcaccggactgtccggtgtacaccggacagtgtccggtgctccaaggaagagcggcctcaggaactcgccagcttcgggaaactgcaacggctgctccgctataattcaccggacatgtccggtgtacaccggactgtccggtgtatctgcggggcaacggctacttcgcgccaacggtcacctgcaacagcaattaatgcgcgccagagcgcgcagaagtcaggcacgcgcgtagtggcgcaccggacactctacagtacatgtctggtgcgccaccggacatccaggcgggcccagaagacagagctccaacggtcggaacccaacggctttggtgacgtggctggcgcactggacatgtccggtgtgcaccggactgtccggtgcaccatgcgacagacagccccaccaaacggctag

SEQ ID NO: 2808 - DNA, 180 bp, Zea mays
  Peptide Sequence Number=SeqID_46183
atgacgaggagagtgcgcctgctcaccatcttcggtgctgcgactgcgatctgcctgatgctgctgcgcaggagtgggcggacgggtaacgggtatccactggatagcggatacccagcgggtacgggtatggatacagatccatacccacgaacgtttatgggtacgggtatgggttga

SEQ ID NO: 2809 - DNA, 1059 bp, Zea mays
  Peptide Sequence Number=SeqID_46184
atggcgaaccgctgcacacgaagcatgcaaccgccccgcggcttcgtcgcaactggtggtccagcatggaggcctgggtccacatgtcatggcaagcgacacctctggcaggcgaagcgggcgccgtttcacctccgtcatgacgaccgcaacaaaaaagggatcgagaaaaggggatattccgaaaggatccttctcagcgaaggaagcaggccccaagccctcctactgatcaggggttcgaaggttgcgccctgcggggttcggcaaccgccccagaccacttgggctccgagccctatactgatcaggggttcgaaggctggcccctcggaagggttcgatagccgccccagagcacacagagtcagggatgaccctgggtacgtccgttacatggccgaggctcgggctacgctcccgaggaaaacagcactgttcgcctcgctccggctactgtgccaaccacaacaagtcacgacctcccccaagttcagcttcgggcacaacagggagctccgcctcgctcgacctcaggccccggcctcagcgtcggcctcgggagaaggtctccgcctcgcccgacctcgggccccggcctcagcgtcggcctcgggagaaggtctccgcctcgcccgatcccaggcctcagcctcagcctcggcctcgagggaaaatctccgcctcgcccgacctcggcctcgggaggagtcacatccgcgcccaacctcatcctcggcctcggaggagtcgccacctcgcccgacctcggccttggaccaactacgcaactgtggatccatcattaccctacccctagctagctgcctcaggctacaaaggaacaagaccgggctcaagcacttctccgacggccacgttaacacatatacagggctcagacacttccccatcggccacctgaatgggctgccctatggcccgtatccggaagaggtatccaaagacgatgaggatgcagcaaccaagaagaagcgttgcgcgaagggtgcgccgacagatgaggggacctcgaaaagggaggttgtgtccccatag

SEQ ID NO: 2810 - DNA, 258 bp, Zea mays
  Peptide Sequence Number=SeqID_46185
atgcacatagactctgccaatgcaagtggacagctgagaagcacatactacatgcttatgaagtttctctcttcactcgatcaaaatcaggtccatctgaatggtcgccaaatggtggacaggattacacaagaaagagtcacgcgagtaattaaggaagcttcgtcttcaggatgcaagccccttcctcatgatgaacgcacacgagacgaagacagatctaaagatgataagagtaaacaccgaagctatcgctag

SEQ ID NO: 2811 - DNA, 171 bp, Zea mays
  Peptide Sequence Number=SeqID_46186
atgggatccacttttagtaagcatttctgcaaaacagagtctttgattattgagaagccttaccttgactcccttacaaccagcatacccttgagagtcttttctttagtcgggtggtaccaaaggaagaacgccaggaatgaagtgcgggaggaagggatcctccattag

SEQ ID NO: 2812 - DNA, 474 bp, Zea mays
  Peptide Sequence Number=SeqID_46187
atggcgtccccggggccccgaggcagcggcacttccaaggcccgcgagcaagcggcgcccctcgacgtgggccgaaggccacgcgcagaggccagggccgcgcgccgggatgttgggccgccgcgccgggggccagagcaggggggcgggcgggccacgacggggccggggagcgccgccgcggggtggggcaggggcaggcggaacgcgccgccgcgggaggcgcaaggacggccgcgccgccagggggaggggcaggggcgggcgggccacgccggggctggggagcaccgccgcggggaggggcaggggtgggcgggccgcgccgccgcggggagggcaggggcgggcgccgtcacgcatggggccggggcggggtcacgccgcaccgccgcgggcaggggcaagccgcgccggggcagggtcgcgcgcgcaggggagaaggggagggcgcgcgcagggaagagaacatga

SEQ ID NO: 2813 - DNA, 276 bp, Zea mays
  Peptide Sequence Number=SeqID_46188
atgatgcatggcatggctagcgacatgccaggggacgccaacatgttgtctctttgcctcttcgccagcacccttaactacttcgtctactccactttgacaactgtgagctacaatggcactcctgccatatcgcaggagtgcctccacgatggttgtgtcaccccacctcatgattcttcaaccacgccatttcttgtcttctccgcggtccccaccagtttggcttcggcaacgacccgtgagcgcctgtcgatgggggttggttcgcccaag

SEQ ID NO: 2814 - DNA, 816 bp, Zea mays
  Peptide Sequence Number=SeqID_46189
atgggcggtgatgaagtcacgtcggggactgactgcaccgccgtctcaggtacgagggtgacgtccagcaagcctttcgcgagcgtgctggcgtcgttcgtttgctcggaattggcgtgttgcggggagacggcgctcgtcctcgtctcaaacgcgaggtcgatgcccggcgcaccccctgttgaggtgccggcgccatcgactcgctcgacagccgacgaggcgctgcctcctgcttggccttggttgccccgcctcgtcctccgtcggcgggggagaggacgggctgccgtcgagggacatgaactcaagactcccgaaacggagcaccgtcccgggccggagaggttgctggagactgcccatctggagcttgacgggaagctgttcgtcaacacgcagcaggcccctacctggcgcgccaactgtcagcgtttcgagaccggggggtccctgggccgacgagtgaatgtcgccgcgtgccccagcccagatgggtcggcgcgaggccgagcgcgaaggcgggaagtgaggtggccggagtcgggcgtgagagaggtggaaatcccgcggccttcgtgttcgtcccgcgcccaggtcggggtgatgatggcgcctcctgttgacgtggctggtctgcgccctaggttgggcgatgtggaggctcctccgaagtcgaggtcgagtctgtcttccgtggtcgaggtcgagtccgagcccctgggtcgggcgaggcggagaccgtcaggtgaggccagggcggagtccgagccctggggtcgggcgaagcggagttcgtcgtcttccggggcttag

SEQ ID NO: 2815 - DNA, 297 bp, Zea mays
  Peptide Sequence Number=SeqID_46190
atggatggcggcaatcactcccgcggtggtgagtccccctttccgcaacgcctccaaggccttgagaaggggctcgaggttcttctgtctttcgtgcggggtcccgtggcgccaagcatcggcggcgacggtgactactcgctgggagaacggcgggagcaactcgccgtcattccggagggtctctggcagggtctctggcaggggaagcgagcgacgctccgccttcgccataatgaccgcgtcaaaaaagggaccgggaaagggggataccccgaaaaggatccttccccgtga

SEQ ID NO: 2816 - DNA, 327 bp, Zea mays
  Peptide Sequence Number=SeqID_46191
atggggctcggtgtatgcggctcgctctgccaagtttgggttcgccccttggggaggagtgcggtgcatttaggaaacctaacaggtggcaatgagactgatggttttggttatgactatggtgctggtaagtggtattctttccgtttggaaagggttgtcagcattgcaaccactgctcaggagaagatgaagtcgtggaaggagacttcaaggagttccaagactacgacgagttctaggcgtgggttagcggcaacccccagtcggctgcctgtgaaggccgcagttatctacgtttcgttttcgcactttgatttattgtaa

SEQ ID NO: 2817 - DNA, 165 bp, Zea mays
  Peptide Sequence Number=SeqID_46192
atgggcgggggcctcctggtagctgcatcgaccctgaggtcagtgctgccgctgttcggccccccggagcagaagtcgtcgttgtcgccgctgccggagcaggccttccccctcggagtggggtcgttcgtgcctgcggagggggaaccggagttccgttcgtaa

SEQ ID NO: 2818 - DNA, 153 bp, Zea mays
  Peptide Sequence Number=SeqID_46193
atggcgccgccgtacccccgtgcttgcgccgccgcgatttggttctggatccaacggccagaaaccttagataccccttcgcgggttagttttacacatgggaccttcgggtatttgagaatcaacctgccgtccatcgcggcagtgttctga

SEQ ID NO: 2819 - DNA, 57 bp, Zea mays
  Peptide Sequence Number=SeqID_46194
atgcgaaaggggtggaggaaggagggacagagggaggtcaagcacctcctatgctaa

SEQ ID NO: 2820 - DNA, 153 bp, Zea mays
  Peptide Sequence Number=SeqID_46195
atggcgccgctgtacccccgtgcttgcgtcgccgcggtttggttctggatccaacggccagaaaccttagataccccttcacgggttagttttacacatgggaccttcgggtatttgagaatcaacccgccgtccatcgcggcagtgttctga

SEQ ID NO: 2821 - DNA, 1035 bp, Zea mays
  Peptide Sequence Number=SeqID_46196
atggctcgtcttagacacactgcacgtaagtcggtgattcctttcctgccgtctcgacttgcggagcgtcctctgcaccgcaccgtgtccggacagtcgagtcacctggagaggctgcaccaccgcctgcgtgaggagcaggaacgccggcgccagcacggagagcagcagggctcttcctcctcaccccagcaggaggtggagaccgtgaggccccgttcctctgttgcccagctgggggcgccccttgttccaccgcgggacgtcccggctgttggaggagctgttggaggagccgttggaggagctactggaggagaccccgacgacgacgacgactcagaccacagcacggagtcttctgagccgcaggaggcggaaggatgggtcgcccgacccatcacccgtgacgccgctcgcggttgtcacttccacgacgcactcgacaccttgctgcgccaggctttcgaccggcacacctggtcgatcgagtatcgttgtgtggtctaccagcacagtcgcgggaggtacccggaccgctgggaggctacctgcttagttcgccgtccgaaggatgacctccggggtgcggaggccgtttcggagcactattccatctccgagagggacactgcagaggcggctatgcaggatgcagcacgacgtgcactctctcagtactgttctttgttcggtggcgtggccgacggtcttaacctttggtactacccccgccgccctactggcagcacagagagtgtggttgtctcacccgttggtgaggctaaccctaggttgagcagcacagtcaacctagtcgcagtgcttaacacggagctggatcactctctggacgagctaagcagggctcgaatggagattgcggagttgcgtgctgagttggcagagcgccatcaccaggagggtggttctcccgctcctgttgggactcagcacccataccgctcaccgccacgtggtcaccacacttatggttcccccgtctgtaagaccaggatagatctggatccttag

SEQ ID NO: 2822 - DNA, 852 bp, Zea mays
  Peptide Sequence Number=SeqID_46197
atgcaggcggcatgcaactgcaccaatggggcgcaccctttcgacttcgacgcatccagcatggaggcccagtcccacacgtcatgtaaccggcgcgccggttactacgtgcgagaaactgcacctccacttgtgccagtaccgcgccttctcgactgcggaaccagtgccgcgactcgaggcaaccctgcgcatggcccaacagtgccaaccgagcacatcggtcacggggcaggagacacctttggtaggcaaagcgggcgacgcttcacctccgccatgatgaccgcgtcaaaaaaggtgcgccacgtcgttcaatttcgtatccttttcctcttcccctttctctctcttgctacaaggatcgggaaaggggatactccgaaagggatccttctccgcgaaggaagcgggccccgagccctcatactgatcagaggttcgaaggctggcccctcgaaagggttcgacggccgcctcagagcactcgggctctgtgcccactactggtcaggggttcgaagactggcccctcggaagggttcgatagtcgccttaggccactcgggctccgcgcccactactgatcaggggttcgtaggctggcccccgaagggttcgacagccgcctcagagcacgcagagcgagggatgactctgggtacgtctgatacatggccgaggctcgggctatgctcccgaggtaccctaggacatttccgagaccagcaggagcgattctataacggaatcccatcagagggaggcatcgagccctcggaccctatcaaacgggaccgggtccggcaaatcacctgcaggtacttttggagcgcgcctctgggccactag

SEQ ID NO: 2823 - DNA, 870 bp, Zea mays
  Peptide Sequence Number=SeqID_46198
atggggagcgcccgcgttgctttcgtcttgctgtcgttggaggagcgcaacttcgcggaagttggtacctttcagccatcgctcggcttcaaggattttcatcaggcagcccggctgcatcccctcgccgatgcttcaaggatcttcatcatccttgctggggaggagggcgaggcgagccggggcctgccttcacgttggccggcgtcctgcttcttcatccggcttctgggggtggaaaccatcctccagctctgcggaggaggcgccctccagccgtgccggggaaggcgaactgttgctgcccagtccagggtgcagcattccgtcctttgtccgggagacggtgcccagccgcaccggggggtctcacaacacgtcgtacgccgcgagggcggtactcgtgttctgggacggtcccattctcgttttcgtggcaaggacgggagtgaggacctgtcggtgcgctttggggcgcccggcgcccgctggtgcggtgttggtgggcaggtggacgccaccgccggtgctgaggtggtggcagctggagaaagcttctccgccgacgagaccgtcagcgccacccgtggatcgacctccggctctttggctttaatgtctggttctcgtccctcgagtggggacgtgaacgagagcattccagcggtagcgtccgtcctgggaccatcgctgctgctgcagaggtcgctggcgagtcacccggagtttgtcgtcccgcaggctctccgatgtggaggttgttcatacccgcgggagtggaaccggagttccgtttgtaatggcaccttgagtgccggtgtctgttcattgtggctgtcggggcctgaacatcgaggtatttgggcgtaa

SEQ ID NO: 2824 - DNA, 1569 bp, Zea mays
  Peptide Sequence Number=SeqID_46199
atggtcacccaagacggtgaccaccagtttgatggtggggagaagcaagccgggctgcgacctctgccccgccctcagcttcaaggatcttcatcatccttgctagggaggagggcgaggcgagccggggcctgccttcgcgttgaccggcgtcccgcttcttcatccggcttctgggggtggaaaccatcctccagctctgcggaggaggtgccctccagccgtgccggggaaggcgaactgctgctgcccagtctagggtgcagcattctgtcctttgtccgggcgacggtggccagccgcaccgggggggtctcacaacacgtcgtacgccgcgagggcggtactcgtgttctaggacagtcccattctcgttttcggggcgaggacgggagtgaggacctgccggtggacgccgccgccggtgctgaggtggtggcagctggagaagtcctcgtcgccgacgagatcgccgctgccatccgcgctccgggcctcggctctttggctttgatagcttgtcctcgcccctcgagtggggacgtgggcgagggccttatcgcagcagcgtctgccctgaggtcatcgttgctactgtttggccgcccggagcggaggtcgttgtcgctgctgccggagtgggcggcggcgagccacctaggattttgtcgtcccacaggccctccaatgaaccctcggtcgctctgcgatgagccgaagccggaggcagcgctgtcagcatggacagaggcggagttggctcgaaaagaaaacttcgtcggcctaggagcaggtgacttcccaggccgaggaggtgtagcggcggtggctggaacctggccaggtcgtccactggtgggaccaaccctggagtcggtcgggcccggcctgtcggcgcggccgccttccgcgcacccgcctctctctctcactgctcgtccggccccacctgtcggcgctgccgctttccccgcgcgcgcccgctccctcgctctctctctgctcgcgggcccgggttgtcagccccgtcttcctcgcgtaaccgccgccgagctgctcgcgcccaccttccccgtgcccacgtcgcgcgtggaactcgcccccacctcgcccctggccacttgtgccccgagccccactcgccctcacccccctcccccatttgcgccccagcagaccccctttccccctcgctgcgcgcacgcagagccccgccgccataaccccgccgtcccgagctcggttcctcgtcgccgttggagctccgccgcgcccttagccccggtgagctccgctctggcgtccgcaacccggaacgcgccccaattccctctccccctccctatttctctctgcccgcgctcacccgtcgtccgccgtgcagccgccaccgtcgacccgggtccccgtcgcgtctccgtcgccgccgaggagtccccggagcccgccttgagaccctaccggagaactccccgcgcccttcccgacctccctgaccactcggattgccccaaagccccgccagtcgcccgcgcccctcgtctccggcgagccctccgccccagctag

SEQ ID NO: 2825 - DNA, 705 bp, Zea mays
  Peptide Sequence Number=SeqID_46200
atgactctgggtatgtccgatacatggccgaggctcgggctacgctcccgaggtaccctaggacatttccgagaccagcaggagcgattctgtaacggaatcccatcagagggaggcatcgagccctcggactctatcaaatgggactgggtccggcaaatcacctgcagcgccgcctgccctgctctgactgttgtgcaacccgccagggtgaggctgatagcagccaagtccagcctcgggtgccataggaagctccgcctcgcccgaccccagggctcggactcaaccttgactccggaagacggtctccgcctcgcccgaccccagggctcggactcaacctcgactctggaagacggtctccgcctcgcccgaccccagggctcggactcaacctcgactccggaagacggtctccgtctcgcccgaccccagggctcggactcaacctcgactccggaagacggtctccgcctcgcccgaccccagggctcggactcaacctcgactccggaagacggtctccccctcgcccgaccccagggctcggactcaacctcgactccggaagacggtctccgcctcgcccgaccccagggctcggactcggcctcgacctcggaggagtcaccgcctcgcccgacctcgggctcagaccgaccacgtcacagggggagccatcattaccctacccctagctag

SEQ ID NO: 2826 - DNA, 597 bp, Zea mays
  Peptide Sequence Number=SeqID_46201
atggcgatgagggcagggtgcagcgaggtcggcgagcggaggttgacgacggcggttgcgcggcgagtggggatcgaccacggtgctgctcggcgcgaggaggtgctacgcaatggcgtcgatggccgggagcacggagaggtcgcgacgaggtcgtgggcgagaaaactgggcactcaggcgaaaaatctgtgcgtctggcgaggaaaatctgcgcagcgggcggttctgggaagacgaacagcggcatcctgcgtcctggcgcgtgggccccattgggtagtggcggcggcaggcgctccacgcgctgcgtgcgcgcaacgcacgcctggacgtgccgctagccatggtcgtgcggcctgggctggggcgtggcgctggctgggctgcctcgtgcggctgggctggcgctcgtgggcttggccgaggcgcggagctgggccgcacggagcgcgcgggcccacgagggaggagctggcgtggtgggccgagcgggaggggaaaaggggatgctgggccgagcggggggggagggagagaggggggaagggggcggctgagccggccgagatgggccagggaggagaggtgggctaa

SEQ ID NO: 2827 - DNA, 1092 bp, Zea mays
  Peptide Sequence Number=SeqID_46202
atggaggaaggccatgggtcgcgcggcgagacgatggtcacccggtcagccatcaccgagcagaaggagtggcggcgcaaaggacaggatcaaggcgagaccggttcaacgttccgcccggaccggccgcgggattcaaaaacacgaagcgaaacagccattcctggaacggctcgtgcacgcgcaacggccgccccgcgaaccgcacgccccgtcgcattaactccacggcgggaaaggcggcgcctctggcaggagaagcgagcgacgcttcgccttcgccataatgatcgcgtcgaaaaagggaccgggaagggggataccccgaaaaggatccttccccgtgaaggaacctggctccgagcctccctactgatcagaggttcgaaggctgacccctcggaagggtttgacagccgcctcagatcgcgtgggctctacacccactactggtcagaggaacgatcttgtaacggaatcccatcagagggaggcatcgagccctcggaccccgtcgccaggggaccgagttcggtagatcacccgcagctcaccggagacaccatgttcggcgcccaccgagggcaacatggcgctttccccccctcctccttgcggaaaggcgacacaggggccgtcaacataccagcccgagaacttgggacccgaccgtacacctgggatacggccagctcgcatgagggaacgaccagaccagccgaagcattacgcgaggcattaagacctcggaggagtcaaaccactcctccgaggcctcgggggctacacccggcggggatcggtccattcgagggacatgatcacgcctcgcccgagcctagcctcggacaagggcagccgaccccggaggatctccgcctcgcccgaggcccccctccagcggctaacgcagtcaggcccggccgcaggcgccataggaagctccgcttcgcccgacccagggcccggacttgggctaagtcccggaagacggcgaactccgctccgcccgacccagggctcggactcgggctaagtcccgaaagacggcgaactccgctctgcccgacccagggctcggacttgggctaa

SEQ ID NO: 2828 - DNA, 216 bp, Zea mays
  Peptide Sequence Number=SeqID_46203
atggcgctccacaagctctatgacgacggcggcccccagctctcttacggaagcaggacgacgtttgtccaggttgaacagattcagacttgcgacttcaaaaattcacaactacagattcagacatccaaacaaattgattctagactttctggaaagatcaccaaaaagagtgatccaagactttttggaaagcttagcaaaagtactacatga

SEQ ID NO: 2829 - DNA, 234 bp, Zea mays
  Peptide Sequence Number=SeqID_46204
atggaggactggagtaccatgaccccgaccattgtgattgggaaaatcgcggcttttgagatgtcgagaaaaatgtgtcggggagaggagccaacttcctcaaggctatatgcttttgcatgtgatgaaaggaagggtatcttcggactcgaatcggtaccacagtgggataagcccaaagaatacgaaggtcgacacagcgccgaagctgtgagcaggaaagcttcggcgtga

SEQ ID NO: 2830 - DNA, 1179 bp, Zea mays
  Peptide Sequence Number=SeqID_46205
atgtcttcttcctcccttaagcgccgggtcttcccgtcttccaagcccccggatgggggatatccgccgcctttccgcctcctcgttggaggaacgcaactccatgggagttggtacctctcagccatcgttcggcttcaaggattttcatcaggcagcctggttgctcccttccgccggtggccacccaagacggtgacctccagctcctggatggggagagacagaccaggctgtgatcccgccctcagcgtcgggtgtgttcgtcaccctcgctggggcgggggccgaggcgagccggggctctgcctcgcgtgcgggtcggcgaaccacctcctcttccagcttctggtggtggcaaccgtcctcccgcgtcgcgacggagtcgtcctccagtcatgccggggaaggcgaactgttgctgttcagctaggacgcaacattccgtcttcctcctcgcattcggggcgaggacggcagcgaggatctaccggagcgctcgggagcggcccgctctttggctttgatggcttgttcgcatcccttgagtgggaccgcgaacaagagcctttcggtgactgcgttcacctgaggccatggctgccgtcgcagaggtcgtcgccccgcaggcccgaggtcgcttgtaccctcggggacggaaccggagtcccgtttgtgatggcaccttggatgccatctcgcctgtttgattgtctgaaccgcttcaccaagcatgagttgccccatgtcaaggtgacgggtgaggccgggggtagcgacatcagtatgaacagaggcggagttgactcgagaatggggaacctggttggccggagcctagccgtgttgcccgtcagcggagccgacgcccaagtcggtcagtcgaggcctcggatcgggctagcgcccttggaagccggttgcccgaggcctcaggggatcaggtcatcttgtagcgtgcgctttctgcggccgccgaggccagaagaacacgccctcgccgcgcttgcgaagctgcgtcttttttcctcctgcttcgagcatctggactctgtcggtaacagggacaaagggacgagtgaggtatccgtatcccagaggcgtaggagtccctcggctcggtcagccttggctgcttacgtgtacctcgtcgtttccaggatccgctttccgaagtag

SEQ ID NO: 2831 - DNA, 303 bp, Zea mays
  Peptide Sequence Number=SeqID_46206
atggcaagaaagcgtaccaagtatcttcggactcgaatcggtaccatagtgggagaagcccaaagaatacgaaggtcgacacagcgccgaagctgtgagcaggaaagcttcggcgtgatagcagaaaaggaaaccgacttaaagatgaaaaggctattcagacctcggtggattactatagaattactaccaaatgtaaagggcatggatttcacaggatgcgaagtggattggactgaggctctgaggatgcaacacctcaaagaggacattataagactcacagaagacattacaaagtaa

SEQ ID NO: 2832 - DNA, 303 bp, Zea mays
  Peptide Sequence Number=SeqID_46207
atggaggccatgtcacaccatgaaccaaatcaaggaggtacctgcaaaaattatgccacaagcaaggctgagtatactaatactcagctagacttacccgtggccgcacttgcacccaccatatctagaatgggagacccagtctcaggtcgcgtgagggataaagtccgcgcccggcttcactcaggcaaacacttattagacttgtcggggaccataattaggggtaccctcaagacgcttaattctcagctgggaacccccatcagcataaagctgcaaaggcctgatgggtacgattaa

SEQ ID NO: 2833 - DNA, 372 bp, Zea mays
  Peptide Sequence Number=SeqID_46208
atggaattaccactagacgcgcagagcagcggaagacgtctcgatgtagacgaacgcgtcgagcagtgccgtgcagtcgccggcgtccttcacgtcctcacacgctctacaagagcaatatcccccaaagatgtaaatgtaaaaactgagtatgcaccatcgagtgcaaagggaaaaggaaaaacagggagaagctcgaaagacgtccctaaggggatgccgagcacaactaagctacaaaaagtcgttcctaagggagcacagcgtaagttttctgctcaaaagtcgttcctaagggaatgcagagcttacagcgaaaagtcaacgctgattccgctgaagtataaggcgaagcgcgaaaagtcaacgtga

SEQ ID NO: 2834 - DNA, 285 bp, Zea mays
  Peptide Sequence Number=SeqID_46209
atggacactgttgacgcctttttggagcgccaaacactcaacaagaaccgtggcggtgccctctgcacaggggcggacggtaacaaatcccgcgagaaactaggaaacctaactgattctgcgcacgcgcggaccatccgcgccaccaccgctgacagtctggaccgcggaccgtccgacctcagggccggaccgtccgcgagacacatttggtctccaacatatgccccctgccttttggtgaaggttgacgaaccaaaagcatatgaactaaacctgatgtaa

SEQ ID NO: 2835 - DNA, 735 bp, Zea mays
  Peptide Sequence Number=SeqID_46210
atggggatccgcaagaagcccgaatatgtctggaaggaataccgcgaaaatggaatggagaaatgctctatggcagtcttcctgggagaaagccgaagctacccaaaccaccccccttccaagtcaccttcatcgggcaccgcttcccagacacttgccaaagtgttgcccgaaaggccctcaaacagctatgccaaaactacagcagagagcaataaaaatacccccacctggaggaaaagacttcaagctctgtcagggagagaccccaccgaggatgaccccaccattgtctacatggccggatacctccacaccctcgatacccactacgatgatctctcctcccactgcacccacctaaactcccgggtggaaagcctagagcagcaagtcaaagagcttaagaaggagaaggtatctgttcaagagtgtcttgacatagcagaaggcgaggaggccaacactcgtgaggcctatcgaaccttaaagatggactatgataagaagcttaagaagctcgcccccataaagaaaatccggaagaaaaccacgagccaaggatgccagatggaaaggaggaagaaagctcccccagcaacagctcccgccaggatagagaatttgtccgatatcgaggatatgtccctcgctagccttgatgatcttctcaaggaatttggggacactctagaaaaggaatttggtagtacctcagggaacgctcgcgtgtag

SEQ ID NO: 2836 - DNA, 516 bp, Zea mays
  Peptide Sequence Number=SeqID_46211
atggccggttctaaagatcacaccgatatctcctcggacaatatcctgaagccggctgttgaaagtctgacggccgatgagcaacagcaatacgaggactacatgcgtcaagcgagggagaaattcttatcacaatacacggtggatcgccaccagaaagttgtcaaacatggagagaccgatgtcgcatctcttctatcttcgcttcaagtccccaacggacctgcccgcgcacgcctaggatctgccgcgcaacgcacaccggagacccgccccgcgccgtgccatgccgcctggacacccttgtcgtgccgcgcgccggagaagggcccgtccccgccgcacgccggtgaaggccgctggggctgccgcacgccggagaagggagtggtggagagcgatggaccagccgctgccagcgaacctgggagcgtgctcgcgtgcgattcaatttgggaagagaagcaggggaaaggggagcgggtcccacttgtaaggtgtcaggtccacctgtaa

SEQ ID NO: 2837 - DNA, 555 bp, Zea mays
  Peptide Sequence Number=SeqID_46212
atgaaagttgttcgccatgcgagtatgttgaaagcagggtatgacaaggcaatggatgtgttgaatgagcttgttagtgttctatgtcgtttggagccagacattggatgtaatgagtcgtgtgatgttagtgacgaggaggaaaaccagaaagaaggaatacaaaatgatgcagtgggagtgggaatggatgaagctgacaatgcaattacatgtcacgatatagatgagcctaatgttgtgactggctgtggatctgtgttagaattagtgccagttgggaagcacggcctgttacaatgggctgaatcacacgtgggcctccatgttggacgaggccgcgagatgagacgacctcgtcacaggtcttcgtccgccgacacgtgggacgaaggcgaggttggcgaaggcatcgagcgaagggtggcgtcttcgccttcgccccaacatttgccctccgagggaccagctcgactaagtcatctggtgtcgaagacgtcgctagatggtggagacactgccctcgctcgaagtggttccgcgggggttttttga

SEQ ID NO: 2838 - DNA, 1314 bp, Zea mays
  Peptide Sequence Number=SeqID_46213
atggagttgatgaggacatgcgtggcccccgggggaaggatgtcttcgcccgagctccgggagtcttcggcgcggatgctggaggttaccgagggtcgatggcctaagaacgttcctatcccccgcgcggccggcgaagacttctttacgtctcgcatggctcgtgacttgagagtgtttccttacggacggaatattgctgctgttgtgtcggcagtcatgaacaaggatcgccaggaagctgcgcagaagcgtcgggcggtcatcaggcttcccgaggctaggccgaagagggcgcgggggactgcgaaggctaccacccccggcggtagccagccgacgctggcggcgaagccgaccgcccctgggtctagcaaggtgctggagagcgtgaaggcggccagtgccagcggaaccaagtctgccccggccggagctgcgaaggcccgggaactgccttcgccggggaaacacattgccgacttcggcacgaatattagtgtggacgattatctcgttggatcgggcgaagggcaacttgttgttgttccgcctgcggtggcaaccacggtgtctgccgcggtgcctggggtgaagggtagcgctctcagcgctggcggcgagatttcggcggtcgctgccgtcaaggacgaagcgggcactgtgtcccaccggttgaaagaagcgtcgcagcagctgagtcaagcggccgacttcaccgaccgtgtggcgtcgggggcccttactgcagatgtgtctactgaagtcgagagacttcgggcgcagcatgctgacgccgtccgggaaaagtcggatgtggatagcaagtgtcgcaagctggcggagaaggtggctgccctggagggcgaaaggacgaacctccggcgccagctggtggaggagaggagggaggccaaccaggccatcgccaaggcgcaggcgacgcaggcggaggctaaattggcgcgggtggagggggttcttgccagccagcgcgccgaggaatgggaggtgcggttcaacgctttgcaggcccgcatggagagggccgaggcctctacacgctcgaaggttgagcggacgcgcaaacagctcgtggactcataccgcgagctgggcgcgcggactgctgacttcgaagtgcccgaccgagaggcgggccttcgcttcctcgagtggctgcaagaggaattgttggcgctcccgaccatcgtggagggatttatgtcctttgcctccctcgtcacctgcgaaggggcgttgaacgcgctgtcccgcgaggggtgcagtcactatgaggattttgggcgctag

SEQ ID NO: 2839 - DNA, 108 bp, Zea mays
  Peptide Sequence Number=SeqID_46214
atgccggtgaaggcactcaaagcatttgagaagatggcggtggttggcatgcccattgatgaagtttcactcaccggtgctatctcggcttgcgctcagcttggtgcg

SEQ ID NO: 2840 - DNA, 1059 bp, Zea mays
  Peptide Sequence Number=SeqID_46215
atggacacctacatgacccaacccgagggaaggggagctgattgttgtgttcttgtatatgatgccaatgtaaccaagtcatttgaaaaactcaactggcatgtggaattcctaattcaagctagccaatcagatctagaaaatttgccatttgtaatgcttgggaacaagatttatgttgatagcggacttcgtgaattcacgagggaacatgctcttcacctacaggtggacaccgaggaaatgggagtgcagagctctaatctttatctgcgacgagctttgatgacatcattaataatcctggtcctaagacaacttttgaagctggagtggttagctggcgattcatggaagaaggcttttgctagtgatgatgttcaagctgaatttgagaaatccaaaatggatgttttaagtgtgaagaaccctgaacctgaaaaagcatgctcttgttcgttgctggggcaagtggacagacatccaacagaaaaaggtcttccctcatgtttggtaaaagaccatgaagttactaaaaggaatagagaggaagccttgaagaggaggaatgactcaaagcttaagcacatcaccatttatgaacatgtagataagaaggaactctgcatatccattaagggagaaagatttcagaaaataagagatgaggcaacctggatatgggttaaggagctgtttttgaagatcctcctgtttctctccttccataagttccacctggtgtatatcacgatgctgttgaagtcacacttttgggtttttgggagcagggaggatgctgcttcccaccagtcattaatgttggagaagcgagcagggtccaccagggcagggggtcatacctttccaagccaaaatctaatcccacatagcatggatgacaatggtcaaggcgctaaagagaagtctgtccacagtgttacaaggcacgtcaagccctttccaagggtgatcctcacccatccattccttccaaagccaacaaagctgaagggcatgtccgaacttgtcgaggttgagaacacccaaaccgcctag

SEQ ID NO: 2841 - DNA, 960 bp, Zea mays
  Peptide Sequence Number=SeqID_46216
atggaggaggttgagcacgaggcactcatcagtggtgggggccagagggatccgagtctggcggtggccgaggaactgagcctcaaggcaccccagatccgggaccgcggagaggacgtggtcggcgagggcgtagcgacggaggagaagcgcgaagggttgaggccggggcggcgcgggcttgaaggtgtcggtgctgtggcgagcggacgtgggggagccatccgatgcgcccttgccagcgagacggcggtaggtctcggcgtactggcgctcaatggcgtcgacaatcgcctcctcttgctcaagagcacgggcggcgtcctgggcccgctggcaagcagccgtaacagttgcccgggtggcggcgagaagggcagcagcgtcatccaaaggagcgcgcagggaggaggtgatggcggacggctagctgtagacagtcgtcggcagggggcagccacgcacgcgggccccgtaaggggcagccccgagggtggcggattaggtcagcatgggtggaggtggttcgatagtgacgacagcacagcagcgatgacgatgtgccccaacagtgcgtcgggagcggcgatggggcgcgcagggccagagacagcggatgtggcggggaagtgggccacagggggtgcaacaactatcggtgacgcgctgaccacaaaggggagggccgtcagggacgcgttgttgcttagcggcgcgcctgccgcagagcggaggggtgctgaaggggtggcggggcccgacaacacgccagccatgggggagaaggggcgtctgaggtgcagcgaggcctggcggcgctgctgccgcaaaggagatggtcgccggaggggctgcgacgtccggcgacgcgccggtcgtggggaagacggtcgtcgggggcacagcaagggcggcacagtaggagagaggaaggggagggaagagctcgacggcgaatga

SEQ ID NO: 2842 - DNA, 3093 bp, Zea mays
  Peptide Sequence Number=SeqID_46217
atggtgccgaggtcggatgtgggcggcggtgggagcagcaatgcgagtggggtggtggagatcgacgaggacctgcacagcaggcagctcgctgtgtacggaagggagacaatgcggcagctctttgcctcgaacgtgctcatctccggccttaacgggctaggggccgagatcgcaaagaatcttgctctagctggtgttaaatctgttaccctacatgatactggaaatgtggaaatgtgggacctatcaggcaatttctttctatctgaggatgacatcgggaagaacagggctgttgcttgtgttgcaaagcttcaagaacttaacaatgctgttctcatatataccctaacagaagaattgaccactgagcaccttccaaagttccaagtggttgttttcactgacattagtttggacaaggcatttgagttcgatgattattgtcgtaatcagcagcctccaatttcctttatcaagacagaagtccgtggactttttggtagtgtgttttgtgactttgggcctgaattcagtgttcttgatgtcgacggtgaagatgcacgtactggcataattgcatccatctccatcaccactgacaatcgtacaatggtgtcctgtgttgatgatgagcgccttgattttcaggatggtgatcttgttgttttctcagaggtccagggtatgacagaactgaatgatggcaagccaaggacagtaatgtgcgcaggaccattttccttttgcatcgaggatacaagtaactttggcacttatacaaaaggtggaattgttacacaggtgaaagaacggaagatcttgaagtttaagagtttgagagattcgattagagaacctgggaatttccctctaagtgattgttcaaagtttactcgccctcctctgcttcattttgcatttatagctttggataaatttaggaaagagtttggacgcttccctggtgttgcttgtggtctggatgcccaaaggtttgtggagttcactgcttctatcaatgaagccacaattgattacaagatagaagatgagcttgatgagaatttgttgcggctttttgctagtggttctaaagctgtcctgaacccaatggctactatgtttggtggaattgtcagtcaagaagctgtgaaggcatgttctgggaaatttcatccactgtaccggttcttctactttgattcatccgaatctctgccaactcaccaattggaccctaaagacctgaagccattgaatagtcgctatgatgctcagatttctgtttttggctctaagcttcagaaaaaactgcgggatgccaatgtctttgttgtgggatctggtgctcttggatgtgaatttttaaagaacctagctttaatgggagtgtcttgcagccgtaaagggaaaattactataacagatgatgatgtcatcgagaaaagtaacttgagtcgccaatttctgttccgtgattggaatattggacatcctaaatctacagtagctgccacagctgctagtgctatcaattcctgcctgcacattgatgctctccagaaccgtgcctgtctagagaccgagcatgtgttccatgatgcattctgggagatccttgatgttgtcattaatgcacttgataatgttaatgctaggatgtacatggacatgagatgtttgtacttccagaaaccactcctggaatctggaacactgggtacaaaatgtaacacgcaagtggtaattcctcaccttactgaaaattatgggacttcacgagaccctcctgagaagcaggcacccatgtgcacagtccattcatttccacacaatattgaccattgtctaacatgggcccgctcagagtttgagggtttgctcgagaagactccaaaggaagtcaactcttttctgtctaatcccgctcaatatgctgcctccatgaaaaaggcaggtgatgctcaggccagggagttgcttgagcacgtatgtgaatgccttgagaaggagtgttgtggaacatttgacgattgcataacgtgggcaagactgaaatttgaagattacttctccaatcgtgtgaagcagctaacattcacgtttcctgaagatgctgccactagcatgggagcccatttctggtgtgctccaaagcgtttccctcaccctctggaattttcagctgctgattcatcacacattcagtttataatgtctgcttccatattgagggcattgtcttttggaatctctatacctgattgggcaaaggacactgataatctggctgatgcagtcagtaaagttgcagtacctgaatttaagccaaagagcggggtgaagattgagacagacgtgaaggccgaaaacatctccagtgcctcagttgatgacgctgctgttatcgaagatcttttaagcaggctgaaagcatgtaccaagaaactacctccgagattccaaatgaaacctattcagtttgagaaggatgatgatacaaatttccacatggacttaattgctggtcttgcaaatatgcgtgccaggaactatggcatccaagaggttgacaagctgaaggcaaaaattattgcaggaaggatcatcccagctattgcaacttcaactgccatggcgacaggactagtgtgccttgagctttacaaagttctggccagagggcacccaatcgaagactaccgcaatacatttgctaacctggccctaccgatgctcaccacatctgaacctcttccccccactgtgatcaagcatggagatatgacgtggaccgtatgggatcggtggtctatcgagggagacatcacagttgcagagctcctgaagtggttaagcgacaagggcctgagtgcgtacagtgtctcctgcggcacatcgttgctctacaacataatgttcacaaggcacaaggatcgactgagcaagaagatcagagacgtagccaaggaggtggcaaaggtagacattccagaatacaggaagcatctggatgtcgtcgttgcttgtgaggatgacaacgggaaagatgtcgacatccctcttatctccatttatttccggtag

SEQ ID NO: 2843 - DNA, 1962 bp, Zea mays
  Peptide Sequence Number=SeqID_46218
atggcgcttcgcatctggcacctccttggagaggctctccaggtcggcgatgagggtctcggactcggcgagggcctcagcgtactccacacactccacgtcgcattcgtacgcgtgtcagtatgtggatccgacggttatgaccccgttggggcccgacatcttgagcttgaggtaggtgtagttggggacggccatgaacttggcgtagcacggtctccccagcaccgcgtggtaggttcctcagaacccgaccacctcgaacgtgagggtttcctttcagaagttggagggagtcccgaagtagacgggcagatcgagttgtccaaggggctggacacgcttcccggggatgatcccgtgaaagggcgccacatcggcccggatcgtggacagatcgatctgcaagagttcgagggtctcggcgtagatgatattgaggctgctgcctccgtccatgaggaccttggtgagcctaacgttgccgatgatggggtcgacaacgagctggtactttcctgggctcggcacgcggtcggggtggtcgccttggtcgaagacctcccgacgctcttgcttgcggtgccgagccgaggcgttcgccacttgcccaccgtagatcatgaagcagtcgtggacctcggggaactcctctgctttgtgatcctccttcttgtcgttgttgtgggctcggccaccttccgccggtggcccggccctgtggaagtggcgccgaagcatgacgcactcctcgagggtgtgcttgacgggcccctagtgataggggcacggctccttgagcatcttatcgaagagattggcacctccaggaggtttccgagggttcttgtactcagcggcggcgacaaggtccgcgtcggtggcgtcgcgtttcgcttgcgacttcttcttgttcttcttcttggtgccgcgctgagtggacgccccggggacgtcttccggctgtcggccctggggctatttgtccttccggaagatggcctcaaccgcctcctggccagaggcgaacttggtggcgatgtccatcagctcgctcgccctggtgggggtcttgtgacccagcttgctcaccaggtcgcggcaggtggtgccagcgaggaacgcgtcgatgacgtccgagtcggtgacgttgggcagttcggtgcgctgcttcgagaatcgccggatgtagtcccggagagactctcccgactgctggcggtagcttcggagatcctaggagttcccagggcgcacgtacgtgccctggaagttgccgacgaaggcttggaccaggtcgtcccagttggagatctgccccggaggcagatgctccagccaggcccgagcggtgtcggagaggaacagggggaggttgcggatgatgaggttgtcatcgtccgttccacccagctggcaggccagtcggtagtccacgagccacagttccggcctcgtctcccccgagtactttgcgatggtagtcggggttcggaaccgggtcgggaacgatgctcgtcgtatggcccggctgaaagcctgcagaccgggtggttcaggcgagggactccgatcctccccgctgtcatagcgtcccccacgcctggggtggtagcctcggcgcaccttttcgtcgaggtgggctcgacggtcgtggcggtggtgctcgttgccgaggcgacccggggccgcaggcgccgtgttgcgcatgcgcccggtatggaccgaggcttcccgcatgaatcgggaagtcacggcgcgatgctccgaggggtacccctgccttcgggaggcagagctttcggtccatcggaccgcggcatcctccaggagattcttgagctctccctggatacgccgcccttcggtgatcgatgccaggttctggccaaccccactggaaaccggtggcggccttgccctgacgtcatcggcaatgcggtgctagatgccctggggtag

SEQ ID NO: 2844 - DNA, 294 bp, Zea mays
  Peptide Sequence Number=SeqID_46219
atgtccggtgcaccaggggactccaactccaaactactcaccttcgggaatttccagaggccactccgctataattcaccggactgtccggtgtacaccggacatgtccggtgctccaaggaagggcggcctcaggaactcgccagcctcgggttttcactccagccgctccgctataattcaccggacatgtccggtgtgcaccggactgtccggtgtaacttcggagcaacgactacttcaggcgccaacggctacctgcagcgcatttattgcgcccccgcgcgcgcagag

SEQ ID NO: 2845 - DNA, 585 bp, Zea mays
  Peptide Sequence Number=SeqID_46220
atgccgtcctcttcctcgtctactacaaatacaccgccaaccggcgcatcgtccgaggatactttgagcaacgtggcggtggaggagctacatcctggtgatacagtggagttcggcgtgtcgcggattttctcggtccgcgttcaggatatgcagcagcttggatattttggcagcgaagtggggcgtgtcccgggggcggaggaggttctcgagcccgagggcgagttggtcgtgttcgaggtgtttttcaccgctggccttcatctgcctgcacatcgatttgtggcggaggtcctacagagattcgaggtccaggtccaccagctgatgccaaatgccatggtggccctggcgaagtatgtctgggcgacgacttcgtatggtgcggaaggcggtgcggcgaggatcgtggggcgctatgtgccgaggacagagggtctacggagctgggatatccgcgggtccaacgatagattgaatcgggtcttcgaattgaactgcttgccatacggtggttatccccgggaagacgtcgccgaccgccgcgggaagaaaccgatgggcgtgaccgagaaagggtga

SEQ ID NO: 2846 - DNA, 2022 bp, Zea mays
  Peptide Sequence Number=SeqID_46221
atggacaaggatctccaaggcgcggcgcgaaaacgccaggcgactgtgagggttcacgaagcccggccgaaaaggcatcggggaacggcgaaggctgaggcctctggcggaggcaagccgccgctgccgacaaaggtgggcgcctccgcgcctggcaaggcgccggagacgacggtgggcgccggaggccccaagctgtcgaaggtggtgccgtctgtcagcggggtggcggaggctgcgaaggcggcccgatcgctaccgccgcctggcaaacgcgttgccgacttcggcaccgagattgatgtggaggattatcttggggggtcggacgagggcccgcttgctctagttgtgcctggcgcggcgatcgcgacggctgcgccagcgccgaaggcggggggagagacccttgacgccggaggcgaggtgtctgccctcgcgctggtcagagacgaggcgggcgtggcgacccgtcggctgaagggagcgacggaggcgctgactcgagcgacggaggcgctgagtcaggtggctgacttcaccagccgcactgcgtcgggggcccttacggcagcgttgtctgccgaggtcgagagacttcggacgcaacatgcggacgctgtccgtgagaagtcggcctccgacagcaagtgccgcaaactggcggagaaggtggccgcccttgagaagaaggctgacctccggcgccagctggcgggggagaggagggaggccaacgaagccatcgccaaagagcaggctgcgcaggcggaggccaggctggcgcgggcggaaggcaatatcgccaaggagctcgccggagagctgcagcggcggcttactgcccaggagagccgcgcggagggggccgaggccgcgatgcgagcggaggccgaacggacgcgcatgcagctcatgacttcatatcgcgagctgggtgtgcggacgggtgacttcgaggtgccggagcgagaggccgggcttcgctgtctggaatgggtgcaggaggaactgcaggagctccccactgtcttggcggggttgatggcgttcacctccctggtcacctgcgaggcagcgatgaacgcgctctctcgcgaaggctgccggcactttgaggccctcgaccaggtggatgaggattttgggcgtgatatcttcgaggtcgaagaccccgtggtgaaggaatccgccggggccctctatgaccggatgtggggttcatacggtcgtgaggtggtccgggcgcgggccgaggctgcgagggctcaggcggagcgcggcgagcgagtggacgacttcggggcgctgaacagcgcgctgcctgagccggagacgacccctgcggaggccgcgactggagtcgccccgggaccgaccccggagactgcggaagatgcaccgggcgctcctgcatctgccgcggccggcgaagaccttcccccaaaggtggccgaaggcgcgccagatgcccccgcagctgctgtgccgagcgctgaagatccagcagaggcagcggcggagggtcccgcagcggccgggccttcgcaggttcaggattttgggcctgcgcacgcaaccgctaccactgagtttttggcggcttcgaccgcggaagatggaaatgaatgtggtgggtctgtttctgagttttttgatgttactgactctgggagctcggttgagtggactgaggagtcgtcggaggaggacttggattattttgcggccttggacgtggctgcggcggaggctgcaccacatgctgcggacgcgccaggcgtgcccggtcctagcaccgggcaccgacgacgaagggcggttgcaaagcgtaggattagtgcggaggaaggggctcggcttcgcgttagtagggctggccggcaggagctgctgtctttgccggccgcctcgggtgtaggggaaggggagctgcgaagcctttttgcgggtgaggagcttaggataatgttatttaattatagagagatggggattattcctaaggttgagccgatgtag

SEQ ID NO: 2847 - DNA, 135 bp, Zea mays
  Peptide Sequence Number=SeqID_46222
atgggggcgcggctgcggccgtgggcacggcggtggcgcggcgagggcgtgggcacggcggcggcgctgcaagggcgtgagcacagcgaacctacatgtaacttcgagggagaaaggtgcagcattaacataaag

SEQ ID NO: 2848 - DNA, 669 bp, Zea mays
  Peptide Sequence Number=SeqID_46223
atggaagactctctggtcattaggacatcctactgctcagaggtggaggggttcccacatctattgcgaagttgtgcgcttcgcatggggatccgcaagaagccagaatatgtctggaaggagtatctcgagaacggaatggagaacaacaaaaatacccccgcctggaggaaaagacttcaggccctgtcacggagagaccctaccgaggatgaccccaccatcgtctacatggctggatacctccacaccctcgataatcaatatgatgaccttgcctcccactgtactcacctaaactcccgggtggaaaacctagagcatcaagtcagggaacttacaagggaaaaggcgtcccttcaagagagcctagagatagcagaaggcgaggaaaccaacacccgtgaggcctaccgcactctgaagatggattacgacaagaagctgaagaagctcgcccccgcaagaaaaatccgcaagaagaccaaaagccaaggatgtcagactgagcagaaggaagaagcccctccagccctaccacctaccaggatagggaactcgtccgacaccgaggaaatgtccctagccaaccttgatgaccttctcaaggaatttggggacactttagagaaggagttcgggagtaccctagatagcactcgcgtgtaa

SEQ ID NO: 2849 - DNA, 282 bp, Zea mays
  Peptide Sequence Number=SeqID_46224
atggaagagcaaacaccgtccgagaccacgtgcggaccgtccgggctcaggcgcggaccgtccggcctatatagggatgacaatgggtacgggtatgggcaaataaccgcggataattatccattggatatgggtatggtggaatttgatatccgcgggtacggttatggatataataagtgggcgggtaacgggtatccactggatagcggatacccggcgggtacgggtatggatacagatccatacccacgaacgtttatgggtacatgtatgggttga

SEQ ID NO: 2850 - DNA, 621 bp, Zea mays
  Peptide Sequence Number=SeqID_46225
atggctgaagctattatggatgaagttgtcgatcgactgttgaacgaagctgcagaagtgatgacatttgttccgaaagatacacacatatcctcacacaatatttttgtatcagcgctgattcttcgctgtaagctctgcattcccttaggaacgtctttggagcttcttcgccttttacttaggcggtataagctctgcattcccttaggaacgtctttggagcttcttcgccttttacttatgcggtataagctctgcattcccttaggaacgtctttggagcttcttcgccttttacttaggcggtataagctctgcattcccttaggaacgactttggagcagaaaacttacactgcgctcccttcggaacgactttttgtgacttcgtcagacttactctgcgttccttataacgactttttattgcttctaagaattttcgatagtccgaagcatattggctcccttctggctgctggccctgttgcaacggaggtggaggcggaggctgttgccaggaagcttgaggctgactcgccgaagcagcagagactgcaggatggttgcccacatattctgggatgtagggcgaatgatacgaagctgtatgcatga

SEQ ID NO: 2851 - DNA, 246 bp, Zea mays
  Peptide Sequence Number=SeqID_46226
atggccatgtggggaaaaaggccgctgcaccaccacatcgtcgacagcgacttttgggcactggtgaacgggaagcttcggtcagaatcgcgggaggaagtaccggcaattgctcaccgaactttcatccccgccgtggtaaaatgggtcgcggtggccggggacctctacgctgcaaaacccggtaagatcaccctctggagattcgctttattcctctcttcgagtagagccttccgtggttga

SEQ ID NO: 2852 - DNA, 1395 bp, Zea mays
  Peptide Sequence Number=SeqID_46227
atggccgatgccgaggatatccagcccctcgtctgcgacaacggaactggcatggtcaagcaccaacctcggcaggctgggttcgctggcgacgacgccccgagggccgtcttccccagcatcgtggggcgcccgcgccacactggtgtcatggtcgggatggggcagaaggacgcctacgtcggtgacgaggcgcagtccaagaggggtatcctgaccctcaagtaccccatcgagcacgggatcgtcagcaactgggacgacatggagaagatctggcatcacaccttctacaacgagctccgcgtggctcccgaggagcaccccgtcctcctcaccgaggcgcccctgaaccccaaggctaacagggagaagatgacccagatcatgttcgagaccttcaacacccccgctatgtacgtcgccatccagaccgtgctctctctgtatgccagtggccgtaccacagattttagagattacctgtatcgcaattttagatattccgtggaaaagacggaaggcctgggttgggagtactctactgatgggaaatgtgaaaaaatgccatcaacaaatatgctcaacgtgcacatccagtcattgccatgctttgagcaggaaggaatggtctggatttggcctagggatgacccaccaaaggctacaatcccttctcttctgcctccttcaggatttacatgctcactgttgatgcagggggtgcatggcctagggggaggatggcgactaggttcatcgatggcggcaagcagctcgtgttcgaccacgcgacacagttcttcactgcgagcatccgcaccgctgcaggtgctgcatatcatcggcagagaggatcgagttcagatcgatgatgcaaggcggctgcatcgtcgagctgtaacacctgcagcggtgcggatcaatgaggggatttttttgtacagggccagggtattaccccatgacctgggttcacacccatacagttcttatcctatgcagtcaccaaacggacagttcaaactccagtacaatcaggccatgactaatgtgcaatcatgtgtaaatgtaaaaacaagtatcttaattttggagatatgtgacaaacgccatgccctgtgcattagagaagatacagaatcgccatgccctgtacaagacagccctaggttggaggttgtgactgatgagttgggaagggattacttgattggtggtgtacaattcttggactggatacatgttccagtttttggtccattagttcaggaattgtttcatttacatgtatattcagtacactcgtataatggaaacaggcaaatctctatctcattctttggttattgtgttattatacggttccgttgcaacgcacgggcactcacctag

SEQ ID NO: 2853 - DNA, 465 bp, Zea mays
  Peptide Sequence Number=SeqID_46228
atgcaggagctggttgtaccaagtccatgcaacgccgagcatgttgcaaactccaagcggtggaagcgaggaacaacagcagatggcggtggagagaaagcactgggtatggtgtgctgtagtgggggaaaggatggaacaggagatggtgaatgtggtaatggcagcaggtgcaatggaagtgaggtggtggggcaatctggtggcggcgccatggccgatgttcttggggtggattccaccgcggcaatgcgggaggacatggaggccatctgcgtggcgaagagcccgagttggcgctggactttggcaagggcggtggtgattgttgccaactccgacggctgggctgaagctgtagtttcagcttcatcagatcctagcatatccgataccaggttgttagaattaccccggctgcggaggttgtatgagtggctaatggttggagggttggaggaataa

SEQ ID NO: 2854 - DNA, 324 bp, Zea mays
  Peptide Sequence Number=SeqID_46229
atgtgcctgacatgccggcgagtgtgcagggccggtgagctgacgcctgaagagctggagcgcctgatgacggtcgtggcgaaccctaggcagttcaaggtgccggactggttcctcaacaggaagaaggattacaaggacggaaggttctcacaggtcgtctccaacgccctcgacatgaagctcagggacgacctcgagaggctcaagaagatcaggaaccaccgtggtctgcgtcactactggggcctccgtgtccgtggccagcacaccaagaccactggcaggcgcggaaaaactgttggtgtctccaagaagcgataa

SEQ ID NO: 2855 - DNA, 693 bp, Zea mays
  Peptide Sequence Number=SeqID_46230
atgtcgcgtcttctcgagactacagaaccagtgcaatggctcgaggcagccccgcgcatgaccctacaacatctacagcataaagacgacgcactcgtgttccattcctcgaacgactcgcgcacgcgcaggagataccccgcgagtcgcccgtcccgttgcattaactacctgggatcgggaaaggggacatttcgaaggagcccttcgcagcaaaagaaatgggccccgagccctcctactgatcaggggttcaaaggttgcaccctatggggttcagcaacctccccagagcactcgggctctgagccctttactgatcaggggttcgaaggctggcccctcggagtgattctacagccgcccagaacatgcagagtcagggatgaccctgactacgtccgttacatggccaaggctcgggctacgctcccgaggccactagctgactcttatcgaatagggcttgggcgtccgctcggattacccaatagcaactcactggaaacaccatgttcagcgcccaccgagggtaacatggcgcgttccccctgctccttgcggaaaggcgacgaaggggcgtacaataaaaagccgagacggtcctcgatcgtcctctcgctccgtgcagaggctcggaggctgctctcgcaccaggctacggccaaattgttgaccacgtcgataaactag

SEQ ID NO: 2856 - DNA, 774 bp, Zea mays
  Peptide Sequence Number=SeqID_46231
atggaagccacggcgacgccacgaacccaagaagtgatgaagcccgagcccggcacggtcaaggtgaccgtggacgaggtgacgctccgcaagttcgagctgtccgacgtggacgccatgatggcgtgggcgtcggacccgcaggtggccgccttgtgccggtgggagccctacgagtcaacggagccgctgctggccttcatccgcgacgtggtgctcccgcaccagtggttccgcgccatctgcctcggcagcgaaccccgccccgtcggcgccgtgtccgtgtccccgacgggggacccgtgccgcgccgagctcggctacgtgctggcgcgcgcgcattggggccggggcgtggccacggccgccgtgaagcgcacggtgaccgcggtgttcggcgaggtcccggggctggagcgcgtcgaggcgctcgtggacgtggccaacctggcgtctcagcgggtgctggagaaggccgggttcacgagggaggccgtgctccgcaagtatggcgctaacaagggcgtcgtcagggacaaggtcatgtgcagcttcatcgaccccgacgcatcctacgtggccgcatacgccgctgtgtacgacaagcttcggcgcagccgccgcttggatgcggtgcagagcggctaccccgcgttgtccatcatcaagcagggggacctcatggtcgtcgccaatgtcggtgactctcgggttgttctgggcaccgcatccgacgacgacgccatcacaccgtccaactcatcgtccacctaa

SEQ ID NO: 2857 - DNA, 1170 bp, Zea mays
  Peptide Sequence Number=SeqID_46232
atggcggcggttagtgcgaagggtgcttcgcaggacccgtggtccaacttctgcgcgagcggtgagatttcgtcggacgccgccgctaaggatgtggcgggctctgtgtcccagcaactgaggcatgtgtcgcagcagctgaagcatgcggccgccttcactgaccatgttgcgtcgggtgctctgactttggagtttgctgccgaaattgagcgtctccgggcgcagcatacggatgttgttcgggagaagtcggctgcggaaaacaaaagccgtaggctgacggagaggttggctgctgcggaggccgagaagggggatcttcggcgtcagctgaccatcgcctttgaagcatctggccaagaggtgggcctccgcttcctcgagtggctacaggaggagctgggggtgctcccgacaatcgtgacgggcctcatgtcctttgcctccctcgtcacctgcgagggggccgacctgattctgaagcggtcggcgggggcgctcttcgacaggatgtggggccctcacggccgagagacggtccgagagaggtccgaccgggcgattgatcagatggcgcacgacaaagaggttgaggattttggcgatctggacggcacgctgcccgacagcatgctccccgaggcatcgggggtggagctggcaccgccatccgatgcgggcaagggcccctcggcaacccccgcgccgactggagcgggcgaagaccccacgccagcccctgcgctgacgggtgaggacgcttcgaaggcgatgggtgaaccagctgccgaagaccccgcggcggcggccgggccttcgcaggttccaacgtttgagcctgcgcaagcaaccgttgctgacaatactgattttgtggcggcctcaaccgtagtgtctgtcgatgatagtttgtttggttctgtgtctgagtgttttgaatctgatggtgaatctaggagtttgtttccttggacgaaggagtccttggatgaaggcttggattattttgttgcgttggatgcggctgcagcggagacttcgccgcgtgtggagggtgccggggatctgggtgtaggcagcgaagggtggtgggaaaacatagtgtgggtgaattttcgcgaagtggcaggcgccgtcgtatggggatggaacgtggtcgtcttctag

SEQ ID NO: 2858 - DNA, 1080 bp, Zea mays
  Peptide Sequence Number=SeqID_46233
atgtcgtcttcttcttcgtccgctgcgaatgtgccattgggtgaatcgtcgtccgaggataccatgagcgatttggcggcggtggagttacacccgggccacatggtggagttcggcgtttcgaggatctcctcggttcgcgtgcaagacatgcaacagttggggtattttgggaatggagttggacgagttccgggggcggaagagattcctgagccggaggtatgtctgggcggtgacttcatatggcggtcagcccttcgtagaggtcttcgccaagaattattgtctgcactggcagaagagaaaaattgggagcaagattgcacagtttggattgtgcacctttacgccgaggactgggaagacttcgatggaagttgtggaactagttccctgcgcccgcaacaagtggggcaactggtggcggaggatgatagggacgaaggggcccttcggtgtgctgcccgcatgagtagcgggcatgatttggttgaggaattcatcggttatggagtgtggcccttggcgcatggctgggcgatgggcaaagtatgccgtcaccagatgccctccctgggcgagcagcaagtgcgaagtctggccttcacattcgatctgcgcggccgggacccagccgcattcgtgcgtgaagtggaggacggagctgtgaggattgtggggcggtatgtgccgaggacggaggctctacggagttgggatattcgtggatccaacattcgcttgaatagggtcttcgagttgaatcgtttgtcgtacgacggctaccccggggatgacgctgttgtggccgtcgatcgctgcggggagaaaccggtggctacggctggggaaggttcttcacgggaggctgctccagccatgaagaagagaaaattaggtactacaactgaagggttgggggtctctaatcgttttgctgtggagttaatgggtacttggcgcggccctcgggggaaggatgtcttcgcccgagctccgggagtcttcggcgcgaatgctgatggttaccgggggtcgatggccaaggaatgttccaatcccccacgcggccggtga

SEQ ID NO: 2859 - DNA, 798 bp, Zea mays
  Peptide Sequence Number=SeqID_46234
atgggtcggcgcgagacggagcgcgaaggagggaggaagccggagggagacaggcgtaaaaaggggaaacccgcggccttcgtgtttgtcccgcgcccaggtcggggtaatgatggcacctcctgtgacgtggtcggtccgagccctgggttgggcgaggtggaggcccctccgaggtcgaggtcgagtctgtcttccgaggccgagcccctgggtcaggcgaggcggagaccgtcggctgaggccagggctgagtccgagccctggggtcgggcgatgcggagttcatcgtcttccggggctgagcccgagtccgagccctggggtcgggcgaagcggagttcgtcgtcttctggggctgagcccgagtccgagccctggggtcaggcgaagcggagttcgtcgtcttctggggctgagcccgagtccgagccctggggtcgggcgaagcggagttcatcgtcttccggggctgagcccgagtccgggccctggggtcgggcgaagcggagttcgtcgtcttccggggctgagcccgagtccaagccctggggtcaggcgaagcggagttcgtcgtcttccggggctgagcccgagtccgagccctggggtcgggcgatgcggagtttcctatggcgcctgaggccggacttggctgctgtcagcctcgctctgtcgagtggcgcagcagtcggagcggcgcaggcggcgctgtcctcttgtcaggccggtcagtggagcggcgaagtgactgcggtcacttcggctctgtcgactgaagggcacgcgtcaggataa

SEQ ID NO: 2860 - DNA, 1062 bp, Zea mays
  Peptide Sequence Number=SeqID_46235
atgggccacaagattaatctaatgggtgtgtccctgcaggtcaaggatcttctctttaacattgacatgaaaaagcaaagaaagataggatgcttcgcatgtggggaaaaaggacactttagggacaactgtccaaatacggtcgaatccacaaaggggaggagcaaaggcaaggcgcttacaagtgtcaaaacttgggatgactcttcaagcgaagatgaatccccagggacgcgcagccaccgatcctcatcacgctcatcatggtcatctcgcaagtgccttatggcaagagaaaattttgaaacgtttgcaaatttgaattgtgaactatcaactaaaattgagcaattagagtcttgtgttccatcctcagctaccaatgatggccttattaaaaagaatgaaaaacttaaggctaaattagctagctctcaagaagccatcgaaagtttgctaggaaaaatggaagttcttagcatgcataataatgagataactaccaagctagaaaacatcgatagcaccccagaagtgtctgtaattgaaatgcctggtattattaagaaagatgcttctacctcttgctttgatttaattgatgattctaacccctgcaaccaagttcttgttgaggatattgttgtagaaacatttttgaatgaggttttatatgacaagaaaggcaaagccaaacaaatccaacctcctcaggataacaccactacgggagtgaacaagcctgtggagcgagaaactgtgaattgtaggctatgccacaaggaaggtcacaagtcttaccaatgcaagctgaagaccgaagataagcaaaagctcaagcaaaaaccaacaagcaaaatctccaacacctacatcaacaaggtggataaaaaggctgctacaccatatttaatcaagaagagaaagaatggaaaggtgatagcaatcaaggccaacaagcaagtcaacaaaggaaagggggccaaacccatctgggtgccaaaagaaattaattcaaccatgaaaagcacgaagaaagtttggatctcaagagggaagtga

SEQ ID NO: 2861 - DNA, 273 bp, Zea mays
  Peptide Sequence Number=SeqID_46236
atgagaactatccggtcgaagagcccgaggaactcgcaggagaagcccctgagcagcagtggctatgagatcgatggttttggttatgactatggtgctgctagtccactacagccaaacaggatacttgctgagtatgttgatgtgtactcacccttgctctacacaccaaaccccccatccccaggttgtcagcattgcaaccactgctcaggagaagatgaagctgtggaaggagaccttcaggagttccaagattacgatgagttctag

SEQ ID NO: 2862 - DNA, 591 bp, Zea mays
  Peptide Sequence Number=SeqID_46237
atgtcgagggcgtactggcgctgctcgccgctccacggtgaccctgaggaaatggtggagcgggcccatgtccttcatcgcgaactcgtgctaaagggcgacgatcatgtgttggaggaggtagacactggatgccgtgagcatgatgtcgtcgacacagaggaggaggtagactatgtcgtcgccgagccgatggatgaacatggatatgtccgacctggcctcgacaaagccgagggagaccaaataggaggcgaagcgactgtaccaagccctctgtgcttgtttaaggccatacagagagcggtttcgcttgcagaccaaacccgttacactgtctcggttagtgccgtggaggaaggcattcttgacgtccagctggtggatcacccaatctcaagagagggcgagggagaggacgacccgaacggtggcaaactttacgacgggcctggaggtcttgttgtagtccactctgaggtgctgagtgaagctacgaaggacccaacaggccttgtagcgattgagcgagccatcaaaggtgagcttgtggcggaaaatccacttgccggttacaccaagtcccagtag

SEQ ID NO: 2863 - DNA, 378 bp, Zea mays
  Peptide Sequence Number=SeqID_46238
atgccgttgggattcgaccgttggagttctgacttctgggcccgcctcgatgtccggtggcgcaccagacatgtactgttgagtgtccggtgcgccagtatgggcacgcctgacttctgcgcgcgctggcgcgcaataaatgctgttgcagcggagcagccgctacgatttcccgaggctggcgagttcctgaggcctctcttccttggagcaccggacactgtccggtgtacaccggacagtccggtgaattatagcggagtgcctctagaaattcccaaaggtggcgagtttgagttggagtcctctggtgcaccggacactgtccggtgccccagaccagaggtgccttcggttgtccctttgctcctttgttga

SEQ ID NO: 2864 - DNA, 312 bp, Zea mays
  Peptide Sequence Number=SeqID_46239
atggatttcaaccctagttctttatttcttctctcctccctgcgcagcccctctctctccccaccggccccctgcgcgtgcccgctctgcccctgcgcgcgcccgccctacccctgccccgtggcagaggcgcagcccctgcgcgcacgtcccggcgccccctatgatgatgaggataatgatggtttttatgatgatgattatgcttatggtttctactattctttccatttggaaagagtaaagaagaaggagaacggtgtcgaggcggatctccgggagttccaggacttcgacgagttcgaggattag

SEQ ID NO: 2865 - DNA, 147 bp, Zea mays
  Peptide Sequence Number=SeqID_46240
atggaggctttagaggcaccacatgtccttgaggccctagtgccccagtgggacaagaaggttaaaagcaaggtagagatgcaaactctcatggatgacgccggtatttttaccgaggtatccgaaaccacgcaaggttccgactaa

SEQ ID NO: 2866 - DNA, 705 bp, Zea mays
  Peptide Sequence Number=SeqID_46241
atgtcgaggtcatatcgacgggcgaggcctgccgccgcgggctcgccgccggcatcgacaagctcgccgacaccgtcagtgtcaccctcggccccaaagatgttcattgcagtgaggaatgttgttattgaccaatatgatgtacctaaagttattaatgatggtgtcacaatttccaaggctatagagctcccaaatgcacttgagcatgcaggtgccacgctacttcaagaaaactgggacgtagctttggaggaactcaaccgcttgaaggaaataattgattcaaagaaactcatagagtgtgagcaggtagaggatcttctctttaacattgacaggaaaaagcaaagaaagagaggatgcttcgcatgcagggagaagggccactttagggacaactgtccaaatatggccaaaccgacaaagaggacgagcaaaggcaaggcgcttacaagtgtcaaaacttgcgatgaatcttcaagcgaagatgaacctccaaggacgcgcagccatagatcctcatcacggtcatcacgcaagtgccttatggcaagaggtaaaatgagtattccatcgtctagtgatgatagtagtggtgatgatgttgaaggtgggggaaagccctccttagatgagcttgcggaagccgttaactttttcaggatgtatgcactaaacaaaaggcttaacttaaaactttga

SEQ ID NO: 2867 - DNA, 93 bp, Zea mays
  Peptide Sequence Number=SeqID_46242
atggagaaccacccggaaaaacagtgctaccacaagggtgaggtgtatgggattcatgacccatggcagatgggtaacacgacttgtgggtaa

SEQ ID NO: 2868 - DNA, 975 bp, Zea mays
  Peptide Sequence Number=SeqID_46243
atggccgttgctgacgttcccagcccagagtcatcagtactcggtatgtcgcgcgcgttcgacgactactatatcgaggactatggcgtcatcttggtgccagaggtgatgcagaggaggaccgacaacaatgaccagttcgtcatcctcgccaccgttgtgggcattgatgcaggaaaagacggaaagaaggatggtggacctagaaagcatgcggctccaaccctagccgctgccacctcctctcccacctctctctacctcaccgccgtcggagctagccggcgggatgctcgcgcggctcgcggtgaaggcgatggcggagcgatttggccgactccgggctcctgcgcgccgtttgtggtggcggccttggctgcgtccgcggcgggcggcaggtcgtgtgccgggccgtggcatgggtggcgtccagccgtggcagtggctcatgtcgggcgcggccgcctcgcccccagagagtgctcgctgacgcgggccgtcctctccggtgacgggggtggcagctggcgtggccggcacgatgcggctttggctggcgtggtggagacggcgacaggctatgtcaacggctgtcgtggctgggcgccacgcctctggccgttctgggctatggcggcctcaagaggctggagcgggatgtcctctcgtctgcggcagcatcagctagtggctctggctagcgcagggtggtggcggcggcggcaggccccaaaatcttcatcattgtgcgggacgacggggcagcggtccatcgcggacaggggacggtggcgtcacgatgacgtcactcccttcctgaaggtgtcgcttctgacgttcgtctcggcacggctttgccttcagttgttgcttcgcttctcggcgcctggtatgcgggtggagaatgtttcgaaggtcggacaaaaaccggaggcagggcgaagggtcaagattggaagttggagcttctcttga

SEQ ID NO: 2869 - DNA, 1236 bp, Zea mays
  Peptide Sequence Number=SeqID_46244
atggcgcgagcgccggccaaggtccatgctgccgccggcaccgggaccaaggcctccctgtcgccgtgcccctctcgctgcggggatgtcgaaatctcgtacccgttcgggatagggctgggctgcttccgtcaaggcttcgagctcacctgcgatcaaacagctccttctcccaggctcttcttcgtgtcggggaacagctcgatccaggtgacttctctatatgtcggcaacagtgcggttttagcttcagctgttgggttcaacgtcaccatgaacgcaggcgtcgacacctacaccaagtcttgggaggcccctactgccactggtgtcagtttttatgcagataataattatctgtacactgttggatgtggtgtctacgtctacgtgttcggtgataacagagagatcatggagagcgcaaacactggttctggtgtctgtgaagggttaggctgctgcagcattccaatgcgtggcggccaaggcttcactctcaaactaggtcgcctcaatagtaccattccacagttcggtgaagcgctctccagtgttaagattatcgtttcccaaaactatgaatttgttactgatgatgtttatgcaagttgggtgaatacaagcaatgttcagggcatgctacttgacattgcaatcacggaccaaccaaactgcgcgagtgcccagtcccaagagaacaaggatacctacgcatgtactagtgaaagcatctgcaacgacgttctaccaccagtagtatctcaaggaggctacagttgcttctgccctggtcaaatagagggcaacccctatattgaagatggctgcatagcatattacaacccagaggcaccgagtattaggaactgtacgagattatgtggaaacataagcgttccatttccttttgggatcgaagaaggctgttacgcaaatgataacctacgactcaactgcacaattaacgacactactcttattcttgatcgagggtacgcacagtatcgtgtgaccaatttgtcacttgatgatgggcttctgatggttacaaacatgttgaatgacacaagctccaaaaatgtggagagaataatcatcactagtaactatgacaattaccaggaggttatggatggtaattatgatttctctcaggaggatacagcaataaaatgggttatatcaaacataacttgtcagaaagcaatgcaaaataatgctacatatgcgtgc

SEQ ID NO: 2870 - DNA, 315 bp, Zea mays
  Peptide Sequence Number=SeqID_46245
atggccgctgccctccgcctgcagcgccagagcctcaccgctagcccctttctcttctccgcccatggcctccgctaccgcaagctcgaggtcatcctcactacgaacatagacgggttagacgggattggcaatcacgagcctatcaagacaaaggataagaaattttacgagagatctgaacactggctttatcaaactcctcaacgaattaaaggctacctgaatctggcctcggcaaaaatcaaacaactgtacatgataggagtggtcacatctatcaagtggcatttaagtagaataattggtcaatga

SEQ ID NO: 2871 - DNA, 246 bp, Zea mays
  Peptide Sequence Number=SeqID_46246
atggcgacaggacgaactggaggggcgtgcgttgtcgccgtcgattggatttgtgtggatctcgtctcctgcgtcgagaactactccatggacctggccacgcctgttgccaccggtgggctggccgcggagctctgcatcgtcgacgttcccatagccagggatgcgatggttgctgccgccgatgggatgatagccgtcaactctgtccaccatcgtgaaggctcgtacacgatatctgtgtga

SEQ ID NO: 2872 - DNA, 318 bp, Zea mays
  Peptide Sequence Number=SeqID_46247
atgaacagacaccggcactcaaggtgccattacaaacggaacttcggttctgcccccgcaggtacgaacaacccccacattggagggcctgtggggcgacgaaaccccaggtggctcgccgacgcccgctccggcagcagcgacaatgacctccgctccaagcggccgaacaacagcagcgatgacctcagggcggatgctgctgccataaggccctcgcccacctccccactcgaggggcgaggacaagcctccaaggtcgtggagttggaggagctaagtgcttattttacttgtaattgtagtctattatgttaa

SEQ ID NO: 2873 - DNA, 507 bp, Zea mays
  Peptide Sequence Number=SeqID_46248
atgaagaattgcttcgaaggcgttaagagtaccacgaccaatgattgcattgtaaggttattccatgtcaacaatatcaaacacaacttgttcagttcttgtgttgttgataaatccgaatgtcactggcattgtgattttgccgagtgctacaatctgcctccctccgaagccacaaagaggatgtgtggcatcatgaattttgtcttcgggctcttgcatctatctgaaggccttagcaaatatgatatcagctgcgctgcctgtatcaaccagaacattatggaccagaaatcctttgatcacacaagagatgaccatagcatcgttgtgtgggtaatccttgagttgaagatcctcttgggagaagggtccttgcaccccgacatgctgtacccttctctgtgcttccttcttctgcttcttgttggctgggctctgagcatgaaccgcctgttatcgggagtaccagcttcggagccgaagccgctccagcttgattgttga

SEQ ID NO: 2874 - DNA, 2163 bp, Zea mays
  Peptide Sequence Number=SeqID_46249
atggtgcgaagtcctgccttcgtactgaatctgcaaaaccgcgacccggccgcctttgtgcgtgaggcggaggatggggcggtgcggctcgttgggcgttacgtgccgaggacagagggcccgcgcagttgggatatccgcgggtcgaatgaccgtttgaacagggtgttcgagttaaatcaattgccatatgacggctaccctggtcaagacgatgcggaccgccgtgggaagaagccggcggtggagattggaggcgaccctgcgccggcggccgccctatcctctaaaaagagaaaattaggtactgttatgggaggtcttggggtttctgatggttttgctagagagctgatgaggacgtgcgcggcccccgggggaaggatgtcttcgcccgagctccgggagtcttcggctcggatgctgagggttaccaggggttgttggcctaggaatgttcctatcccctgcgcggccggcgaagactcttttacatctcgcatggttcgcaaatggagagtttttccttacgggcggaatattgctgctgttgtgtcggcagtgatggacaaggatcgccagggagctgcacaaaagcggcaagcggccgttaggctcgttgaagccaggccgaagaggcagcggggggctgcgaaggctgtggcccccagcggaggcaagccgccgctggcggcgaagtcgggcgcccctgcatctagcaaggcgccggaggcaacggcaggcgccggaggctccaaatcgacaaaggtggtgccgcctgccggcggagtggcggaggtcgcgaaggcggccggagcgttgccgttgccaggcaaacgcgtcgccgacttcgccactaatattagtgtggacgactatcttggtgggtccgacgaaggccaacttgctatagttgcgcctgccgcggcgaccacgacggctgccgtggtgccgaaggcgaagggcggggctcttagcgccggaggcgaggcgtcggccttcgcggttatcagggatgaggcgggcgctgcgtcccgccggctggaggaggtgacggaggcgctgagtcaggcgtcccgccggctgaaggaggtggctgacttctccaaccgtacagcgtcgggggccctcacggcggctgtgtctgccgaagtcgagagacttcggacacaacacgccgacgccgtccgtgaaaaatcggccgccgacagcaagtgtcgtaagctgacggacaaggtggccgtactggagaaggagaaggctgacctccggcgccagctggcggcggagaggagggagaccaacgaggccctcgccaaggagaaggctgcgcaggcagaggccaaattggcgcgggcggagggcaacattgccagggagcgcgccgagcagctgcaggagcggctcaccgccctggagagccgcatggagagggccgaggccgtgtcgcgcgcggaggcagagcggacgcgcaaacagctcatggatacataccgtgagctgggcgcggggaccggtgaattcaaagtgccggaccgagaggccggacttcgctgcctggagtgggtgcaggaggaaatgcaagcactccccactgtcgtggaggggtttatgtcgtatgcctccctggtcacctacgagggggcgatgaatgcgctctcccgcgaagggtgccggcacttcgaggtcttcgaccaagccgatgaagatttcgagcgagatatctttaaggttgaggaccccgtagtgaaggaatccgccggagccatctacgaccggatgtggggtgcgcatggtcgcgaggtggtcagggagcgggccgagatggcgagggctcaggtggcgcgtggcgagagggtggacgacttcggggcattgaacagcgcgccgcctgacccggagccaaccccggcggaggtcgtgcctggggccgccctggagccgaccccggagactgcggaagacgcactggatgcctccgcatctgctgcggccggcgaagaccttcccctaggggtcgccgaaggcgcgcctgatgcccccgcagctgctgtgccgagtgctgaagatcccgtggcggtggcggcggaaacgacagcggaagcaacggcggagccagtggcgggggctcccgcaacgtcagggccttcgcaggtggcgtag

SEQ ID NO: 2875 - DNA, 1473 bp, Zea mays
  Peptide Sequence Number=SeqID_46250
atggtactcggcaaagaaggcaacctgggaaccggtaaagccatctttgccgagtgctcacaaaggcactcagcaaagaaggaaacctgggaaccggcaaagacatctttgccgagtgcctttaccaaagcactcggcaaatatactggcgaaggggctcactggagggttctttgccgagtgccagtccacctgacactcggcaaagaggctggcggtggggcccactggaccagtctttgccgagggcctctagagcaaacactcggcaaaattggcctctttgccgagtgccacagaaggcactcggcaaaggatccgtcaccgtcacttggcgccgtgactgtgacttttctttgccgagtgccaaatggcactcggcaaagtctttgccgagtgcccgacaaaaaacagcagcgaggcggcgagggcggctgtgacattttcaggggcgagtgggtgccggacccggacgcgccctactacaccaacgacacctgcaaggtgatccacgaacactacgactgcatggggtacggcaagccggacctgggctttgtcaactggaggtggcagcctgacggctgcgaccttccccgcttcaacccatggcgcttcctccacatgatgaggggcaagacccttgccttcgttggcgactccctcggcaggaaccacaaggactcgctcatctgcctcttgaccacggtcgcggagcctacgacgagctggccgagcagcaagcacaccgtgtactactacgccgactacaacttcaccgtggcccacttctgggcgccgtaccttgtccggcacgagcagatcgacgaggacggcccagcgcacacgggcgtctggaacctctacctggacgagccagacggcgtgtgggcggcgcacgtcgcggagttcgactacgccgtcgtgtccgcgtccagctggttctaccgcccctccatgctgtacgaggccggccggctcgtcggctgccactactgccggctgcccaacgtcaccgacctcacgctgcgctacgcgctgcgcatggccacgcgggccgcgctgcgggcgctgtccggcgccgacggccgcttccgcggcacggccctgctgcgcaccgtggacccgtcgcagtacgagggcggtgagtggaacaaggacggcaactgcgtccggacggcgccgttccgtcgcggccagaacgcggtccagggcctcgagcgtgagttccgcacgctgcagctggaggagttcgcgtcggcggagaaggcggcgacggacggtggcggtaaggtgaggatgctgctgatggacaccacggaagccatgatactgcgtgcggacgcgcacccgagcaagtaccgggggtggacgccggagaagcacttcaccctgcacaacgactgcgtgcactggtgcctgcccggggccattgatacgtggaacgacatgctgcttcatatgttgaaatga

SEQ ID NO: 2876 - DNA, 696 bp, Zea mays
  Peptide Sequence Number=SeqID_46251
atgaggatccagtgcgacgcgtgcgaggccgcggcggccgcggtggtgtgctgcgccgacgaggcggcgctgtgcgcgcgctgcgacgtggagatccacgccgccaacaagctcgccagcaagcaccagcggctcccgctcggcgacgccgcggcgctccccgccagcctcccgcgctgcgacgtgtgccaggagaggccggccttcatcttctgcgtcgaggacagggcgctcctctgccgcgactgcgacgagcccatccacgtccccggcacgctctccggcaaccaccagcgctacctcgccaccggcatccgcgtcggcttcagctccgtctgcggcgccagcgccgagggcctcccgccggcgccgcccaagggaagctccaagcccacggccgtcgtcagcgcgccagctgccgggacgaccaccaaaacaaggacggtcaaggacgcgctgccgcaggagaaagactcgtctcttgggctcaaggagctggagtggttcgaggacatcgacctgttccacgcccattcgccagctaaaactgccatggcggagttcttcgcctcgccgcagccagtgagtaacgccgggttctacaaggcgaacggggcgcgcctgttcaagaagtcacggatggaggtgcctgacgacgacgacgaggactacttcatcgttcctgatcttggctga

SEQ ID NO: 2877 - DNA, 591 bp, Zea mays
  Peptide Sequence Number=SeqID_46252
atggggccggatcttggtgagacaggacagctagggagggggatcgatgaaggcatacccgacgatgctagcaaggaagagggtgaggacctcggtgaggctggagctagggccgatgctgtagctgtgcagtgcctccacgatttctgtcggcttcatcagtgggaaggagaaggagtttgccattcccttcgtcgcgagcaccgcaggcaaatcgattcgaagtcatatgggttttgcccctttgcaaacaggcaggcggcgacgttggggtatttgtcttcctgccatggtggtgcctggtggaggcggagggggacacgaggccgtggcgagctgggctccagcgaccagtggaaaaggcggaggggggcacaaggccatggtcgggatgggatccagcggctggcggcgagctcaggaatggtggagggcggcgaccgggaagagggcgagggcatcaggcaccaccccgggaagagggcatcgggccatgtcgtcgcttggtttgcgcagaatgggagggagggagggagacgtgagatgggggcacaatcatcgcgtggggatgggggccggcccgcgtggtga

SEQ ID NO: 2878 - DNA, 774 bp, Zea mays
  Peptide Sequence Number=SeqID_46253
atgggtccacaggtcctagtggggggtcaatcccccaaaaaacccctcgcaaaccgccacgaaaatggtcgcctgcgcgatggagttggggttgaagttatgcagctccaccccatagtagtgtgggagcgcccgcatgaagcgactcgccggcatcccaaacccccgctcatggaagggggtgaaactgaccacgtatcccggcggcggagtcggttcggcctcgctcccaggggccaaccactcaggctacggccccccggagagaggacggagcaaacccttagtaacaagggcctgcagatcctccatagtgatggtggagaaaggccacgggtcacgcggcggaatgatggtcgccgtgttagccatcgccgggctaaagcggtggaagcggaggagatgagggatcgggaaacgggacatttcagaggagtccttcgcaacgaaggaaacgggccccgagccctcctactgatcaggggttcgaaggttgcgccccacggggttcggcgactgccccagagcactcgggctctgagccctttactgatcaggggctcgaaggctggcccctcgaagggatttgacagccgccccggaacatgcagagtcagggatgaccctgagtacgttcgttacacggctaaggctcgggctacactcccgaggtaccctaagacatttccgagaccagcgggaacgatttgtaatggaatcccaccgaagggaggcaccgagccctcagaccctatcgaatgggtccgggtctag

SEQ ID NO: 2879 - DNA, 222 bp, Zea mays
  Peptide Sequence Number=SeqID_46254
atggcactcggcaaagaagaaaacctgggaaccggcaaagccatctttgccgagtgctgttgccaaggcactcggcaaagggactggcaaaggggcccactggaggactctttgccgagtgccggtccactagacactcggcaaagagtcctcctttaccgagtgcctacgagagctctcggcacagggactggcgggtatttactgtttaagatctggtag

SEQ ID NO: 2880 - DNA, 1376 bp, Zea mays
  Peptide Sequence Number=SeqID_46255
atggcggctcacagctctcttacggaagcaggaggacgtcagcaaggactcaaccgctccgacagctgtccctccgccaggctccgccgctcctccgacggccacgacatcacaccaactgggtgccaagatctctccggctgccacatcggcatggccttcttagagaaggttggccgcgcggggacgaggacgagacaggcgctctcttggggccgctcgcttccctcacccgcgtggacgcttgtaaccccctactgcaagcgcacccgacctgggcgcgggacgaacatgaaggccgcgggatttccacctctctcacgcccgtctccggccacctcgcttccccccttcgcgctcgcccacgcgctcgacccatctgggctggggcacgcggcacactcactcgtcggcttagggacccccggttcaaggctgtttttggcatggcaagagcaacaacaacaggagccgagcaatgagtcactcctcgccgcgaagggcagcagcatccacctgttgatggatggtgttgcaacgattcgtgaagtgatggtagatctcgtcgcagcgctcctcgaatcgctttgcaacgccatcacagcgcccagagatcttctcgggaagcctggcttccatcaactgcatttcttcaagcatcctgtacacggtggtgttggcgggttccatagtggtggatcacggatgccgcggcacgatgctaaacggatccaggtcaacaagccgctggcgatgccaacgatctcgctgaagcgcccatccggcggcggcgcaggccgcctgcgccgcctcctcgcgtcgctgcgcccgccggggcctctctcggtccagaccggcttcccgacctccctcgcggacatcgtcgtcaagaaccacggccgcatcaggaacaccaggaagaggcgccgcgctgctgccgctgccgcggagccccagcaaatgcgcgagctttcggtggctcgcgacgcggcggcaccggcgccggtgcgcccaggcataggcgcggtcttcagcgtccggccggggctcctcgcggtctgcggcgccgccgtggcgctggcgctggtggtgatctgctggagcaagcagatggtggccgcggccacgctggcatcggtggcgctgtcctggattgagtccgtccgaagcaatcgatggcggccggagacgaatgctgaggtgcatttgcgcgggcgcgtctcgccgatccgggaggtggcggactcgccgaagtcgcgccgcgccgggtgcgagtccgagcccgacaacgtaggcaacgacgccgcctcgctctggtccgcggacacaagcaagccgtcggcgaataacaatccgaagctgaaacagagcaggag

SEQ ID NO: 2881 - DNA, 333 bp, Zea mays
  Peptide Sequence Number=SeqID_46256
atgggcgggggcctcctggcagcagcatccgccctgaggtcagcgctgccgctgtttggccccccggagcagaagtcgtcgtcgtcgccgctgctggagcagaggcagagttggctcgaaaatgagaacctggttggccggagcctacccgggttgtccgtcagcgggaccgacgccggagttgatcagccgaggcctcggatcgggccagtgcccttggaagatggttggccgaggccccaggggcaaccggccgagccgcctgctcgggccggattcccggagaagtccctggaccgtgtcaccgtccgaggctgggtcggacctcgctga

SEQ ID NO: 2882 - DNA, 657 bp, Zea mays
  Peptide Sequence Number=SeqID_46257
atggagagcacgctcaaggggattcgtggcagcgacgtgccgtgcgtgctggacttggacaatgcagccaccgtggtgggcggtgtcaaggacacttaccgcgaggaccgcgccaccgaggagcagctcgccacgcccttggacatgctcctgtgcgcccgcatcgaccctgtcaagtcgcacatcgggtgcctgctgctacagcacctcaaactttcgcctacctcgatttgtgccaatgtggtattcgaggaaatgcagcaaagcgccatcctcagggacgcgcacgcctatggcgtcacggtgcatgtgccgcccgtttgcatgcttgatggagttcactctcaacatttttttggaacgagggttataatatatcattctgagcacctgggtctggttgcagttgataggaaaacaatagttgtatctatcgctgttatactgctttcatttgctgcatattccattgaaatacctggagaggttgttttcctccatcctgttcacaactttgacctggtcgcttatgatccttccgcactaggagctggagcgtctgttgtccaggctgctaagcttctatcaggtagtggtgccactacagttgaggaccaaaaggtgttggaagaaaaacaactgctcaaaatacagtga

SEQ ID NO: 2883 - DNA, 366 bp, Zea mays
  Peptide Sequence Number=SeqID_46258
atggacgcaacgagggaggcgtcgtcgagcgaggcgcagtcggagaggtcgagccgctcgagcgtcaggaacacgcgaagcaggcgtggaagtggctcgcatcggggcacccacagcgtgcgacgggataagccttcatggcgaggtcattcgtctatcacgggtgataatcaacgaagtcgtggtgtagtgattgcgaggaaccgttcgctcgaaaccaatgttagcatcacaaccctcgaagagtccgccccagttgtcggcgacgacggatggcgccgcctagtactgctcgccttcatcgaagcacccagcccagttgtcagcgatgacgacggccccaatggccgcagccggggtgggtag

SEQ ID NO: 2884 - DNA, 354 bp, Zea mays
  Peptide Sequence Number=SeqID_46259
atggcggactccggctgcgcaagaaaacgctccggtgagcgcgaaccagacgcagcagggagggagagggcacaccaaagggtgtcccgagtagctgacggtaaggcgaagctcaccatggcactaggcagggcacgggcacaacggcggccacggaacaggcggtgggcgtcggcgggcgatggcggagctctcggttcgcgcgagcagagcgagagagagggcgagggagctgggcagagggcgcaaatgagagagaggaggtgggcgagcagggcgtggggctcggacgtggccggagaacgcgcggacgtgggcgcgtccaaggcggggagatcatgggcgagaggttag

SEQ ID NO: 2885 - DNA, 759 bp, Zea mays
  Peptide Sequence Number=SeqID_46260
atgtcggggggactaagaaacgaaagtgcttctaagcttgaaaaagttgaggttgcctcgacttcatcttttggtgcagatgttgatcctagggcaatagaccttgccatgagaatcaccgaaaagatgttcctcaaaatgaaggaagatgaggcaaagaacaagattgaagaagaagaaaatgatcgatggagaccaaacgatgaatccacctcttcacaaggttcgtctttcaaatccacttctcatatgtgctttatcgctaatgggagtgacagtgaaagcgaaattgaggatgaggaggagcaagaaagtgatagtgaagatgaggatgatcttcaacaattcttcgctcagctaagcaagaaaaatcagatgaacttgctcaaactcacaaaaagagcggaagaacaaaaagaaatgcttcataagcaagaagacttcctcatcagaaaaatcgaagacttagagaagttgaccaaagagcatgagaagctaaagtgctctcatgatgatttggtccaaagggtgatgatggcgcctcctgttgacgtggctggcctgcgccctaggttgggcgatgtggaggctcctccgaagccgaggtcgagtctgccttctatggccgaggccgagtccgagcccctgggtcgggcgaggcggaggtcgtcggcagaggccggggcagagtccgagccctggggtcgggcgaagcggagttcgtcgtcttctggggctgagcccgagtccgagccctag

SEQ ID NO: 2886 - DNA, 477 bp, Zea mays
  Peptide Sequence Number=SeqID_46261
atgacatttgttgagtacgttgatgtgtactcacccttgctttacaaatcacccccaccccaggttgtccccattgtactcagtgctcaggaggtgaagctgatggcccatatcaggtgcactgcatgtaagtctgtgatcccctttttgccttctcgactggcggagcgtcccctgcgtcgcaaggtgttaggtcagtccagtcacctggagagactgcattgtcgcctgcacgaggagcaggagcgccgacgccaggagcaggagaaggagcagcaggactcttccccctcgcctcaacgggaggtggagtcagagaggcctccttcccctgcacctcagctagagatgccccctgcaccacctcagggcatcccagctgctggaggaaaccctaacggagacgaagatgacaacgacgccggtggtagttcgagccacggcacggtgcgctcggaggagccggagctagagtga

SEQ ID NO: 2887 - DNA, 174 bp, Zea mays
  Peptide Sequence Number=SeqID_46262
atggagagtcatgatctccgggcagaaagggaatcacggcttgtgggtggctatgagatcgatggttctggttatgactatggtgttggttgtcagcattgcaaccactgctcaggagaagatgaagccgtggaaggagacttccaggagttccaagactacgacgagttctag

SEQ ID NO: 2888 - DNA, 546 bp, Zea mays
  Peptide Sequence Number=SeqID_46263
atggggatcgcttccgtcgtgtttccaagcttcgagagtgtgtggtggcgaggtaattcctcgtcgtgggcctccgctgtcagctccaccctccccgcgtccgccgtgcgcgcgcactcgcgcacgtcgctagaatccttggccacgtcgctctacctacgtgccccaaccctttttgagccctgcctgcgcccgcactcactcccccaccccatttcacgcagtcccgctcccgctcgcgctctgctcacgccgctagaccccgctggagacccgcgctcgcctcctcggccatctagcccgccggagaccgtgccaagccaccccgagctccgccccaagatcgcgggataccgcttcgcgcacgcgcaccctatgcccgggcccgcctgtcagcgcccgtgccttctggcgctgggctcgaccgacaacgagcagtccgaggttcccgagtgtattgttggagacctccctgagcaacaacctggaggtgatgctggcaacatggaggactttgaggagttccaggactacgacgagttctag

SEQ ID NO: 2889 - DNA, 495 bp, Zea mays
  Peptide Sequence Number=SeqID_46264
atggagagtcatgatctccggacagaaagggaatcacggcttgtgggtggctatgagatcgatggttctggttatgactatggtgctggtaagtggtattctttccgtttggaaaggcaggagatagagtccgtgaggagctgctcccctgtgcttcccctggaggcgccccctgcaccaccaccgggcgccccagccactggagtagctgctggaggagacccagacgatggaggtggcgacgacagctcgagccacgacaccgacttccctgctgaccaggagccggaaggatgggttgctcgatccatcactcgcgacgctgctcgcgggtgtcacttccacgatgcgctcgacaccctgctacgtcgggcacttaaccggcgtacttggtccatcgagtatcgctgtgtggtctaccagcatagtcgcggggtctacccggaccgctgggaggcgacctgcttggtgcgccgcccggagaacagtctctag

SEQ ID NO: 2890 - DNA, 609 bp, Zea mays
  Peptide Sequence Number=SeqID_46265
atggcgcgtgccgaagacgtggaggacttcggacatctgaacagcgcgcagcccgaagcagaggtcaacccggtggtgcccgaggctgaggtcgacccggcaccgcccccagaaaccagtgaaggctcccctgctgcccctgcgccgatggcggaggatcccccgaaggcggcgatggaggtggcagcagaggatcccatggtggcagctgggtcttcgcaggttcaggattttgggcctgcgcacgcaaccgctactgctaattttgtggcggcttcgaccgtggtcgctggaaatgaatcaaatgagtctacgtttaagttttctgagtttgatgactctgggagtttggttgtgtggacggaagagtcttcggatgaggacttggattactttgcggccttggatgtggctgcgacggaggcttctccgcgtgttacgggtgctgaagttttgcctggtccgagtgctggacgtaggcagcgaagggcggtggcaaagcgtagagtgagtgaggtggatggtggtcgacttcgtgtgggcggggctggcaaacgggaattgttgtcctcgcaggttggggcgagtataggtgaggggaagttgtga

SEQ ID NO: 2891 - DNA, 390 bp, Zea mays
  Peptide Sequence Number=SeqID_46266
atggcgtccaagggtccgacccgatcagtgcctctggctaaagtcatggttgcgaccacagacgtcccgaccactcaaatctatcactacttcgcatgtgggggcgacgatgcctactccaccgccctctccaagcgctactatcgtgcctatggaggccacagtgacgagtttgtagctcttgcaccaaatcctctggtctcggtagatgccgttattggcacagggaccaaatcaagcgtcatcacatctatttctgttagcaaagagttgaacgagagtcctggagctagacgatgtcatagaacaaaagaagaagaatgggcgacgatccagtcaaaaatagaggttgtggtggccctccagaaggaagcactcatagtgggctag

SEQ ID NO: 2892 - DNA, 486 bp, Zea mays
  Peptide Sequence Number=SeqID_46267
atgtggcagcattgggccctcggccgagcagggagcggaggcgcaccggatagagcccagacacgcatcaacaccagacccatgcctaggtcacaacactttctcctccgggaccttgttatgggtggtccggagcttacttggtggggtccgaactccatccaatggcttcgggctgctttactttgggggtctaggttgtgcgcacaggggtcctgcgccttcttgaggaggtctgggcccgatgacgttgtctccgagaacgccacctcaactgctcacgagatatccttggggatgttctctgtgcggctagggatagccgcacaggcatcgtgccttcatactatagtaaggggtacccctgatccagggtaccgacagggtgctctaattggagccattgaatcagatcggacagctgagagtgatcaataccccttcggccaccacttttgcataaagagcccgtctactttagcctaa

SEQ ID NO: 2893 - DNA, 297 bp, Zea mays
  Peptide Sequence Number=SeqID_46268
atgccgagtgtccggcactcggtaaagagcctcgttgccgagagcctagctttaccgagtgtggcactcggcaaagccttctttgccgagtgcccgacaaaaggcactcggcaaagattgcaacactcggcaaagccttggattccgacattcacgattgcccagtcacactacgacaacattgaccttctagagttgtccaaaggcttcgtgctggggtacactgaggaagaactagacaagatcaaagaggagatgtcccctctgaaagggaaatatgcttacaccttttcctaa

SEQ ID NO: 2894 - DNA, 2097 bp, Zea mays
  Peptide Sequence Number=SeqID_46269
atggcggtcagccttcggtggaggtcttcgccaagcaatactgtctgcactggcagaagagaaaaattggacatgagattgcacaattcggatcgtgcactttcacgccgaagtccgggaagacttcgatggaagttgtggagttggtcccctatgctcgaaataagtggggcaactggtgggactactggtcttatgtttcggaggctgaagtcgaagatcacccagggctccctgccgccattctgtgttctcattattatgtggcgtacccgccatttgaagtggcggaggatgatgaaaatgagagggccctttcggattgctgcctgcacaagtagtgggcgcgatctagttgaggaattcatagggtatggggtgtggcccttggcgcatggatgggcgctgggcgaagtatgccctcgcgagattccctccctgggtggacggaaagtgcgaagtccgctttttgctttggatgtgcgagggcgggatcctgccgtggttgtgcgtgaggcggaggatggggcggtgagaattgttgggcgctatgtgccgaagacggaggcccagcagagttgggatatacgtggatccaacaaccgcctgaatatggtcttcgagttgaattgtttgccgtatggcggttatctcggggaggacgtcgtcgaccgccgcgggaaaaaaccagccgccgtgattgaggacgaccccgcgctggaggccgccccagccactaaaaagaggaagctaggtactgcggtgggagaactaggggtctccgatagctttgctatggagttgatggggacatgcgcggcccccgggggaaggatgtcttcgcccgagctccgggagtcttcggcgcggatgctggaggttaccgggggtcgatggcccaggaacgttcctatcccccgtgcggctggcgaagaattctttacgtctcgcatggttcatgacttgagagtgtttcctcatggaccgaatattgctgctgttgtgtcggcagtgatgaacaaggatcgccaggatgctgcgcagaagcgacgggcggtcatcaggctccccgaagctaggccgaagagggcgcgggggactgcgaaggctaccatccccggcggtagccagccgacgctggcggtgaggatggccacccctgggtccagcaaggtgccggagagtgcgaaggcggtcggcgtcggcggaaccaagtctgccccggacggagctgcgaaggtccacgaaccgccttcgccggggaaacgcgttgccgacttcggcacaaatattagcgtggacgactacctcgttgggtcgggcgaggggcaacctgttgtcgtcccgcctgcggtggcaaccacggcatctaccgcggtgcttggggtgaagggtggcgctttcagcgttggcggcgagattgcggcggccactgcagtcaaggacgaagcgggcaccgcggccgactttgccgaccgcgtggcatcgggtgcccttactgcggatgtgtctgccgaggtcgagagacttcgggcgcagcacgcggacgccgtccgggagaagtcggctgcggagagcaagatccgcaggttggcggataaggtggccgccctggagggcgagaggacgaacctccggcgccagctggcggaggaaaggagggaggccaaccaggccatcgccgaggcgcaggctgcgcaggcggaggccaaattggcgcgggcggaggggagtctcgccacccaacgcgccgaggaatgggaggtgcggttcaatgctctgcatggccgcatggaaagggtcgaggcctctacgcactcaaaagttgagcggacgcgtaaacagcttatggactcataccgcgagctgggtgcgcggactgctgacttcgaggtgcccgaccgagaggcgggcctttgcttcctcgagtggctgcaagaggaattactggcgctcctgaccatcgtcgagcgcttcatgtccttttcctccctcgtcacctgcgagggggccgtgaatgcgctgtcccgcgaggggtgcagtcactatgaggccttcgaccgatccgatgaagactttgggcgcgagattttttag

SEQ ID NO: 2895 - DNA, 651 bp, Zea mays
  Peptide Sequence Number=SeqID_46270
atgcctaggtcacggcacttcctcctccgggaccttgttatgggtgttccgaagcttacttggtggggtccgaactccatccaatggctccaggctgctttacttcgggggtccaggttgtgcgcacaggggtcctgcgccttcttgagcaggtctgggcccgatgacattgtctccgagaacgccacctcaactgctcacgagatatccttggggctgttctccgtgcggctagggatagccgcacatgcatcgtgccttcataccgtagtaggggtacccctgatccagggtaccgacagtggcccccgggcccgcctcaggggagggaacaagcctgcagacctggcccccatgcctgaggttggaccattggtcgcggcgaagatgaagcggcgcacctaccgcggggtgagtgcgggtgttcgttggaaggatccgcgtcagggctgcccccccagcgatctcaccgccggggagctcgcgctctttgtttcctgcgtggtggtagtagagatggaactaggactccgcttgaaggcggatgtaatacttttgctttttgtaaggcttgatgtgtcgaggttggataccagcgtatctaaaagggttgtcaacaactcccgggaggcagccttggctgggatctag

SEQ ID NO: 2896 - DNA, 1023 bp, Zea mays
  Peptide Sequence Number=SeqID_46271
atgaagaagcgcataaccgcggggcagttgcacgctccctgcgcggtgatggggtgcgccggtgttttctggagaggtccgcatcagggccacctcctctacccggctgcagtcccccgccagtggtcatctagaaggatgactaccagccttgtggtggggataagcaagctgggctacggcctccctcctgctatcagtttcaaggatgggagaaggtcgttcgccagccttgcgaaggaggcaaacttcggctacgcggggtcggtcatctctggcgccatcagctgccgcgtgcctagctccctagctcggatggccctggggccgcctccgacgcttcctcctgccgcttggtcggggcgtggctgtccgtccaccgcacgggcgacgatcgcgccatgcgctggtccaccacatccatggcttctcccgcgtcgctggccgtactggggggcgtacaagacaccgtacgccgcgggggcggtggtggtgttcttggatggtcttgttctcactccgtgggaggacgagagtgaggaccttttcacgcgccgaggcagccgccgtccaccggtgtggaggtggccgtcgtcgtcggtgctgaggtggtcacagccgctgaggttgcacgaccctacgtcaggcttggcccgatggcttatgtcatgggccacaagtagtgggtctccgcctgagcaggaagtgaagggcaaggcctggacacgtgtcaggaccggacccctactcacgctaggatcctcctcattccgggaccttgctgaggttcggaccttacttggaggctctgggcttatatgcataggggtccagtgtccttctgttgaggtccggaccccacgatacatactgggatgtgttgtctttccttgccacgtggcgccctttggcctgcccatgcggtggggtcaggcaacgtcctccatgtggcctggagacgttgcatgggcgtggcgtcttcatgctgtagaagagggtacccctgatttagggtaccgatag

SEQ ID NO: 2897 - DNA, 765 bp, Zea mays
  Peptide Sequence Number=SeqID_46272
atgaccgccccgcgaaccacctgtcccgtcgcattaactctgcggcagggcgagcgacacctttggcaggcgaagcgggcgtcgtttcatctccaccatgatgacaacaacaaaaatgggactgggaaaggggacatttcgaaagggatccttctccacgaaggaagcgggccccgagccctcctactgatcacgagttcgaaggctggcccctcggaagggctggcacctcggaagggttcgacagccacctcagagcactcgggctccgcgtccactactgatcaggggttcgaaggctggcccctcgaagggttcgacagccgccccagagcacgcagagcgagggatgactctaggtacgtccgatacatggccgaggctcgggctacgctcccgagcgtcacctgccctgctccgacaactgcgccacccgccagggtgaggctgacaacggctaagtccagcctcacgcgcaacaggaaaactctgcctcgcccgacctcagggcttggcccccgcctcagcctcgaaaggtggtctccgcctcgcccgaccccagggctcggcctcaacctcggccttggaaggtggtctccgcctcgcccgactctagggctcggcctcaacctcgacctcagaaggaatcacgctacagggaacaagaccgtcgtcccatctggctcgccccgccccggcagctgtgcttctacagggctcaagcgctcctccgacggccacgacacagcgtgcacagggctctag

SEQ ID NO: 2898 - DNA, 462 bp, Zea mays
  Peptide Sequence Number=SeqID_46273
atggccatgatgggttcagcatcgaaaagatgtacctctgatagaagaccgaacttgttaagtgattatgcatctacatggttgtccgaggtccttaggacaaggacatctgtaggtgggcctaataccttgggagggtccgtgacatgcgacgagcgcggggagagggtgaatgggccaagaattatcatggtctatggacacggatccatggggatgtgttgtctacgagacaaaattggaataaggattaatgtatggtatcgtggtcaagtgtttgaacgtactaaacacatgtcggaaaatatgactttatccctcagtggacctgggacggagtgtcccatgccggattatggggggtacaattgtggtcactatacggcggcgcccggggtttacctttcaaggttaaaactcgacttgaatcgtctgcttctcgcagctaatgagactgcttga

SEQ ID NO: 2899 - DNA, 246 bp, Zea mays
  Peptide Sequence Number=SeqID_46274
atggccgcgattttctccgggttggcctcgattgcccgctcggagaggatgaaccctaggagcatgcctcggggaactccaaagacacatttctcggggttgagtttcacgcccttccctcagacacttgaatgttgtttcaaggtcagagagaaggtcggaggctttcctcgtcttgactacgatgacatcgatgcgtcgaggaatgacagggtttcgcacccagaagtggaatccacgatttga

SEQ ID NO: 2900 - DNA, 780 bp, Zea mays
  Peptide Sequence Number=SeqID_46275
atggacggtgacgaagtcacgtcggggacggactgcaccgttatctcaggtacgaggctaacgcccagcaaacccttcgcgagcgcgctggcgtcatctgtccgcttcgggcgcgtggtcaacgcccgacatgtcgcctgctggggtgccggcgtcgtcgactcgctcgacagccaacgaggtgccgcctcctgcttggccacggttgccccgcctcctcctgctgcggcgaggaaggcgacgggacaaacccggatgttgctcttccgccacggggggaagacgtcgccgagtccgccgtcgccgggcgggctgacggtcgttgttgtcgctgtcgcgccgcgggggaaggagtaccatgtcgtagctgccatcgagggacatgaactcgagactcccgaaacggagcagcgtcccgggttgaagaggttgctggagactacccatctagaactcaacgggaagttgttcgtgaaaacgcagcagacccctacctggcgcgccaactgtcggcgtttcgaccccggggggtccctggaccgacgagtaaaattgtcgctgcgtgccccagcccagatgggttggcgcgagacggaacacgaagggggaaaaccgcggctcgtgttatcctgcgccagagtgggtgcgcttgcagtaggggttacaagcgttcgcgagggagagagggagtcccgtgcgaccaccctcctttgtatgagggccctggaccttccttttatagatgcaatgagagggtccaggtgtacaatgggggtgtag

SEQ ID NO: 2901 - DNA, 195 bp, Zea mays
  Peptide Sequence Number=SeqID_46276
atgtggagttgcgatcctcgggcagaaagggaatcacggctcatgggtaaagtgtgcaacctctgcagagtgttagaaactgatatatcagaggtgctcacggttatgagcggccttgggatcctctttggtaaagaagaaggcgttgaggcggatctcaaggagttccaggacttcgacgagttcgaggattag

SEQ ID NO: 2902 - DNA, 639 bp, Zea mays
  Peptide Sequence Number=SeqID_46277
atgaccctagagcctcatcccctacagccaggctggcgttcactggactttgagtcctttggataccgggctaaggacacgatcgaggcgattgctctgcacgggttgaccactttctgcggattccatcccttggagctgtctacccaccccattggcttgttccccgcggaaagggaggacgacctaatgtggaaggatcgggtggagcataccaagtacatctgggctatctacccagtgatgcgcggtgaggcgatgtcccatctgatggcactattggaggcgacaaagatcactttggacaacagagaggagcttgtggttgatttgtccactgagatggtggaaaaggatttgcaggtggagcagctatccaatgagatccaagagttggaggaattagtggggaccagggagaacaccatcgaggttctcgaggatcagcttattaacactcagcagcagcttgctgaggctaatgagcacctggatatgcatcaccaggagatccaggacatggaggccaacgaggacgtcgacatcgagggaggagaggagcctgcctccagcgtggacactgctggctccgggagaccaccttcccccgagtcgagtgttgcctcgttcgctcactag

SEQ ID NO: 2903 - DNA, 645 bp, Zea mays
  Peptide Sequence Number=SeqID_46278
atgggcgggggcctcctggcagcagcatccgccctgaggtcatcgctgccgctgttcggccccccggagcagaagtcgtcgtcgtcgccgctgctggagcgggcgacggcgcgccgtttgtcggtcttctgttgctccgcaggcccccccatcgagtggggttgttcgtacctgcggaggtggaaccggggttccgtttgtaatggcactttgaatgccagtgtttttgttcatcgtggctgtcgaggcctgaacataaatgtttgtgcgagcgagagttgcttctcgcggaaggtgatgagtgaggtatccgtatcccggaggcgtaggagtccctcggctcggtcggccttgccgcttatgcgcactcttacccgtccatggggctctgtcaccgacgcagtcgagaaggctcgaagaatcgctccgacagaagagcttccgagcgtgaagacttgttcggtccgcggaatcacttatccgaacgtgagttacttatcgcagaaggtgatgagtgaggttggccttttaatcttgtcccacgccttagaagtcgacactatcttggtttggaatgatgatccatggggtgcaccggaggtgcacccaatgggtgtagcccccgaccttcaaatggatttttga

SEQ ID NO: 2904 - DNA, 225 bp, Zea mays
  Peptide Sequence Number=SeqID_46279
atgagccccatgaaactaatgaaagacagaggattggaaaggtcgttttgttgcgctgttgtgcacgcggttgtagggagggcgcattgtagcggctacgagggaccgatgttcctgtgtggcagtgacaacgacaccgtggagctaagacaatgtcggcaagctgatttttcagattggaatctatggttctttttaaagatcgaaaatgttctagcatcttaa

SEQ ID NO: 2905 - DNA, 1239 bp, Zea mays
  Peptide Sequence Number=SeqID_46280
atgaggaagaaacacatcatcacgctcaaatgcccaaatgttcaggcctcagcagccgcaaagaacaaacacccatactcagggtaccattacaaacgggactccggttccactcccgcgggtatgaacgacctccacaccagagggcttgcgggacaacaaactcctcggcagggcaagcgacacctttggcaggcgaaacgggcgtcgtttcacctccgccatgatgaccgcgtcaaaaaagggaccgggaaaggggacatgtcgaaaaggatccttctcagcgaaggaaacgggccctcgagccctcctactgatcaggggttcgaaggctggcccctcggaagggttcgacagccgccccagagcactcgggctccgagcccattactgatcagggggtcgaaggctggcccctcggaagggttcgacagccgccccagagcacgcagagtgagggatgactctgggtacgtctgttacatggccgaggctcgggctacgctcccgagcctcgggcgcaacaggaagctccgcctcgccccgacctcaggcctcggcctcgggaggaggtctccgcctcgcccgaccccagggctcggcctcagcgtcggctcgggaggaatcacgtcctcgcccgaccccggcctcggcctcaggagaaggctcaagcgcttctccgacagccacgttggcatgtacacaggctcatgctcttctctgccagacactcgcaacggggacaccacacacgatgagactggagtagaagccgaaggtaggagccgacgggttgaaatcgcccacagtcgcaacatcatgaggcagaagcatgttcttcgagagcggtcaacgttcgagcggtcaatgatcggcgagggcgacacaacaaaagagcaccagcaggccgaccttcttgcttcttcaatcgtccgggcgtcgaggagccccgctagggaggccgacagcaacgcacgcatccgcgccggtcatggtggccgcgcttgcggcagaatagaaggggtaacgatggatccgtccaggaaggccacggtagcgacagatccagccgggaagacgcgatctggtcaaagggacaacggatcgagccgagaaggttgcgacaacggtgaatccaaccaggaaggctgcgacagcgacagatcgaacgaaggcgatgaaggggagggcaacggagcgggtccagccgggttggggcctgcgccgggcctggcaggg

SEQ ID NO: 2906 - DNA, 1068 bp, Zea mays
  Peptide Sequence Number=SeqID_46281
atgccttcgcactctcctcatgcattgcgtccttccgccttccgagcccccggatggggagcgcccgcgttgccttcgtctcgttgtgggaggagcgcaacctcgtggaggttggtacctttcagccatcactcggcttcaaggatttgcatcaggcagcccggctgcatcccctcactaatggtcacccaagacggtgaccaccagttcgatggtggggagaagcaagccgggctgcggcctctgccccgccctcagcttcaaggggagagggcgctcaccggcctagcggagggggcggacttcgacaacgcggggccgatcggccgcaagcgtcgtcagctccagcatgcctggtttgctggctcagctggctttggcacagcttccggtgccacctcccaccgctgggcggagtgtggctatctgcccgtcgttgtcctgccctcgctccggcacgacgcctccgcacggaggtcggtgctcgcccatccgggaggacttgagtggggatctgccggtgggcaggtggctgccatcgtcggtgctgaggtggtggccgccggagaaggcttctccgccgacgagatcgtcggtgccatctgcgctccgggcctccggctctttggctttgatagcttgtcctcgcccctcgagtggggacgtgggcgagggccttgggcagcagcgtctgccctgaggtcatcgctgctgctgtttggccgcccggagcggaggtcgttgtcgctgctgcagtggtcggtggcgagccacctggagcttgtcgtcccacaggccctccgatgtggaggttgttcatacccgcgggagtggaaccggagttccgtttgtaatggcattatgagtgccggtgactcgcctgtcggctggctgaaccgcttaaccaagtatgagttgccctgtgcggaaggtgacgagaaccctcggctgctctgcgatgagccagagccggaggcagcggtgtcagcatggacagaggcggagttggctcgagaagaaacttcgtcggcccaggagcaggggacttcccaggccgaggaggcgtag

SEQ ID NO: 2907 - DNA, 375 bp, Zea mays
  Peptide Sequence Number=SeqID_46282
atggtccctgcgactcttggaatagatgaggatgtcgtcgataaaaaccacgacaaacttatccaattcttccataaataccttattcatgaggttcatgaaaaaggcggtgttgggggccttcgtcctccgaaggtattttcggattcagaattatggatatggagcacgaccaggacgaaggctgagccaggcgaaggtcgaaggcagccgaagctgtacgcagggaagcttcggcgcgatagcacaagggggaaccgacttaaagataaaaagacttcggggtcctcaatagatttccataaaccgttaacaaatgtaatggacatggatgtaattttacgtgggctgcgtcccgcgtctataaatagatga

SEQ ID NO: 2908 - DNA, 372 bp, Zea mays
  Peptide Sequence Number=SeqID_46283
atgaattcacccacccccgccagtggaggagactctcgtttcagttctgacttcctttctcgtgatggttttccttccatcttgtgggaagtgcttaactccgccggttaccctacgccccctttgtacacggtgcagttgacagacgacactgttgaagcagcaaccatgaagactctgacgactttctgtggctaccatcccctggagatggtgatgcaccccttgggactcttccctgctgagaagaaggatgatcccatgtggtgtaaccgcgtgagccatgtaaaggatgtgtgggcgatgtatcctgacttggttgggagggtcattgttcagtgcatgagtgcgctgtaccgccttcagccctag

SEQ ID NO: 2909 - DNA, 69 bp, Zea mays
  Peptide Sequence Number=SeqID_46284
ggattaccggagctggaggacgaggtggctggtgactgccgacagttgatgcaggaggcgaagggagag

SEQ ID NO: 2910 - DNA, 519 bp, Zea mays
  Peptide Sequence Number=SeqID_46285
atgtcatgctcaagttttagtgttaataactccaggggtgttacaacgctgaagccaaaaaaggttaaagttttgacacatcgccccaaacgcactgacacagtcgaagagccgaggcctgctgaagggtcttctgcttttgagtcaagttaccctgctcctgccgaagctaagagagagttgaccgaagagtcaaaaccgaagatagcagtggagcagctgaaagccttgagtccattgaaaggaacagtaccaccgaaggtgtctactcctgcctcagcgcctgctgcagaggagaagattgtaaagggatctgccgaagctagcacaacgcaggctgcggttgaagctgggccctcaacccccgccgaagcgggaccttcaggggccgctgaggagggtgctgaagcaagtccttcggaagctgttgagggaccatcaatgttaataaaagagggtgctaccgaagatctgagttccctgcccccggagcccctgccgaggaattggatttcataa

SEQ ID NO: 2911 - DNA, 547 bp, Zea mays
  Peptide Sequence Number=SeqID_46286
gccgggactcctccgcccgccgacgaagcatctccgcctgcgcgcgtggaccgaccgagatctccgggccaatctccggacgggggacccgcacaccgttgttgatccccgagaaactttcccttacgtcctagaccacttcacccggagccatctcgccgcccgaccggccccaccggtcagccgcttcgtcatcctccccgcatacgacgccccgctgtcccttcaccgccgtccttcaccgccgtctcttcatcgccgtctcctcgccgcacaggaaagtttggcaccgctccgtcctcctccccttgaccagcgtcctcgccagtactgccccgccgtagcgtcccctcggcggcgctcctcgaccaccaccctcctcccctcgcccgagcccaagtcgcgaagcgccgccgtcttccccctctccgagctcaccggcggcaaccccgccgcgaagctccgccacctccccgcgggcagccccctcccgacctcctctgaccaaattgagcccacctctaggtccgccatcccctccccatga

SEQ ID NO: 2912 - DNA, 765 bp, Zea mays
  Peptide Sequence Number=SeqID_46287
atgtggaagacgtcgtcgattccgccaccggcgggcgggttgtcggccgccattgtcgctgtcgcgcggcggaggaaggagtatcatgtcgttgctgctgtcgagggacatgaactcaagactcccaaaatggagcaccgtcccgggctcgaaaggttgctggagactacccatctggatcttgacgggaagctgttcgtcaacacgcagcaggcccctaccaggcgcgccaactgtcggcgtttcgaccccggggggtccctggaccgacaaccctgggtcgggcgaggcggtggctcctccgaggtcaaggtcgagtctgtcttccgaggtcgaggtcgagtccgagccccgggtcgggcgaggcggaggccattgtctgaggccaaggctgagtccgagccctggggtcgggcgaggcggagttcgtcgtcttccggagccgaggctgagtccgagccctggggtcaggcgaggcggagttcgtcgtcttccggagccgaggccgagtccgagccctggggtcgggcgaggcggagttcgtcgtccgaggccaagacgggggccgagccctggggtcgggcgaggcggagctttctatggcgcccgaagccggacttggctactgtcagcctcactctatcgagcggcacagcagtcggagcgacggaggcggcgctgtcctcttgtcaggccggtcagtggagcggcgaagtgactgtggtcacttcggctctgtcaactgaagggcgcgcgtcaggataa

SEQ ID NO: 2913 - DNA, 2274 bp, Zea mays
  Peptide Sequence Number=SeqID_46288
atggcccctcctgtgacgtggtcggtccgagccctgggttgggcgaggcggaggctcctccgaggtcgaggtcgagtctgtcttccgaggtcgaggtcgagtccgagcccttgggtcgggcgagacggagaccgtcggctgaggccgaggtcgagtccaagccctgggtcgggcgaggcggagttcgtcgtcttccggggccgaggccgagtccgagccctgggtcgggcgaggcggagttcgtcgtcttccggggccgagcccgagtccgagccctgggtcgggcgaggcggagttcgtcgtcttccgggaccgagcccgagtccgagccctgggtcgggcgaggcggagttcgtcgtcttccggggccgagcccgagtccgagccctgggtcgggcgaggcggagttcgtcgtcttccgggaccgagcccgagtccgagccctgggtcgggcgaggcggagtttcctatggcgcccgaggccggacttggctgctgtcagcctcactctgtcgagtggcacagcagtcggagtggcgcaggcggcgctgtcctcttgtcaggccggccacctttgcattaaatgctcctgcgatacggtcggtcgtcgtggcgatttggccaaggttgcttcttggcgaagactgggcctcgggcgagccgaagctttgtgctgattgggtttaccagctgagatttaggagtcttggagagctgccagtcttccacggcccgtgctcccaacgccagggccagccgtcacgtcacgtctcgctcccactgtactatcccgcacctccctccgactccgagcgtggggcttcaccagaccaagaacacgccaagcccgacgctcccaggaccacgccgcccaagccgtcgagcaaatccgcgatgcacaagtggtggcgcagccccgggcccgccctgctcgccgccgcactggcgatcgtggtggccgcgctgcggccggcgacggagcacgcggccgccaaggggcgaccgccgctgcggttcgggccaggaggagcgttcaaggtggccctgttcgcggacctgcattacggcgaggacgcgtggacggactgggggcccgcgcaggacgccgcgtccgaccgcgtcatggccgccgtcctcgacgccgagaacccagacttggtggtgtacctcggcgacctggtgacggccaacaacctcccggtcccgaacgcgagcctgtactgggaccgcgccgtctccgccgcccgaggccggggcgtgccgtgggcgacggtgttcggcaaccacgacgacatggccttcgagtggccgcccgagtggttctcccccgacggcgtcccgccgctgcgctggccgccgggtccaggatcagggtgcggcttccgtgggactccccggacggacctcatggcggcggagaccggcgcgaaccggctgctgtcctactcgtccagcgggcccagggagctgtggcccggcgtctccaactacgtcctgcaggtgctctcgcggggacggcgggcccgcggcgacggtcacgaccacgacccggctctgctcatgtacttcctcgactcgggcggcgggtcgtacaccgaggtggtgtccagcgcgcaggtcaggtggttccacacccagtctcagttcctgaatccagatggaaggatccccgagctcatcttctggcacataccgagcacggcgtacgccaaggtagctccgaaggccaagtctgagataaggaagccctgcgtcggctccatcaacgaggaggaagtggcgccgcaggcagctgaatggggcatgatggatgcgctcgccaagaggtcgtcggtgaaggcggtgtttgttgggcacaaccacgggctggactggtgctgcccctacgacggcgaggagcgggagcaggagctgtggctgtgcttcgcacggcacacgggtgctaccacgtcttcaccctccgcggcctgccccacgcgccccgcctcggcgctgtgccctgtgtaccccacacccagcgtccgtgcaaccagctactacgcctgcccagcatctgaccccaccccggatggacctggccgccctcacgaggctgactcgcacgtgctcctcacacctcttgtcttgggccgaaacaaagagcgaaggctgcgacggaagctggcatgccccgtccccacgccgccacgcgcgatcgcgaccccgaagcaggctcacgaatcgcaggccggggagcgcgagccgacgcccgctgatcatcaggctcaagaatag

SEQ ID NO: 2914 - DNA, 576 bp, Zea mays
  Peptide Sequence Number=SeqID_46289
atgggaagggagacgggttctctacatcttcttgcgcctctacttctgacgggagggaagggagcggatctggtgatccgtggtaacgtagttcttaacacgttatcagcacgctctacctcgacgttgctgcgggatcagatctgcatcaactcttcgtcaagctggcaggtcttttggcctagccaaactgtcctacgcgacaggcttcgtttccgttcgctgatgaagaaatgtggtatgaaatctctggtggacgatttacttttgttgacgcaggccaccagcccgtgcgccctcgtgcttgtgactgcggcctcggccaacggcttccatatcgcgcctgagtttgtgcctgtgatggaggcacacctcgccatggccacgcccgtatcggaggcttgccagcatggttgtgacggagtccacgcgtctgtggaaggcggcgatctgggcgcatctgtggccaggcaaaagtgccttggtccgtccgaatttgtttattggactggatcatcgtctatctgggatctggcgatgcaggtggataaaaatgagactgtttccacggtctaa

SEQ ID NO: 2915 - DNA, 1401 bp, Zea mays
  Peptide Sequence Number=SeqID_46290
atgcacgtggtcggtgacatcctgaagcgtcggatcgcgccgctgcagaggagggcgcgtctgtgttgctggttcaccggccctaacgacatcggccgaatccagcgcgggccggggaccgacctgtcctgggaggagctagaacttctggtgaaggggattactggtgagtccttcgtccctgagtccttaatcctcccccacggcatccctgcactcggcgatgacctagggttgaggacggcgatcttggccacggtgctgaccctcgacgagagcggcgtggcggtttgccagaccggcggccgagacccccaccgtgggatccggatctccgatgcgctagctagaggcccccagccagccgtcgtggctcccaatgcccccgccgcggtcccccgccccttggataagggcaagggggctgcaagcagttcctctgccccagaggcgcgtcagcccgtcgccaccgccaccatcgggtccgccaccaccacaaccaccaccaccatcggtcccaccgccaccaccaccacctggggcgccaccgggctcccatgctccagctgggggtccggcagcagcggcgccaaagtcaagcggcgtcgcagcggcggtgggggtcctaactgctccgacggctatcgcagcctcaacgatggcgatgtcgtcgagtacaccgtcggcagcggtagaggaggtcccgactacacccaccctcgccatcgagggtggcattctcatgcagcgccagttccccttccccgggtgctgtctcgtgcccatcatgctcttcatgagactgaggcggtgatcctgcgggagtgggaggcgcttgaggccgaacaccagcacctcagcgactggcgcacccagctggaggagcgcaccatggcggcgtccctccagttcgcctttgagcggtccgagcttgagcgggaccgcaaggattacaaaagggacctccagaaggtgtacgcccgggagttggaggcatcccgaagggagaagaagttggccaggagggaggaggccctgagcgagagggaggcccttacaacagagctccgggccaagctgaaggccctggaccaaaccctggtggcccagcgggtccagcaagtgcaggccatagagaagatccaaaaatgggagcgggaactagagaacaaggccagcaacattgccctggccaaggagaacctcaaggagaaggatgcgtccctggataggcgggagatggatctcgcctggtgggagaaggatctcgccttcagggaggaaatgtttgaaaggcaggataagttgctggccgagcatgagctcaaggcggaggagaaggagaaaaagctggatcggatccagcagttccaggcggcgcaagcggcaccgggcccctag

SEQ ID NO: 2916 - DNA, 306 bp, Zea mays
  Peptide Sequence Number=SeqID_46291
atggctgatcaagagcgagaaaagtggaagctggctagagcaagaaagttatccttgctaactagtcacatcccgggtactaggtgcaagcgtgtaagcagactttttagcccgttagatctgtatccaacgaatgtcttggaaaagagtgcaaatgctagtagacatgtatctggagaaggtgttcaacaagcattgttgaaaatcctagaaggaactgtatcttcggaatcaggttacgggtatacaagtgtctggtcaagacgaagcttgagtgggacagaagacgatcacgacgaaggataa

SEQ ID NO: 2917 - DNA, 543 bp, Zea mays
  Peptide Sequence Number=SeqID_46292
atggattcgtattttctgtttggtttgcttaagttgggtcaattagtccttaatctggtggtgcacaggctacaggcctcctcctccaagaggaagcaaggactggaaatttccgccgatagtgtgcagttagagatccaaggaccacacaggatgatgagacggagcactatgcaccttgtagaccttgaaggggacattctatgggggcgggacattgccggggagggtcggcgacacctaggatggcgcgtggtggggcgggggaagcgtgtgctaggcgtggatggggaggcccggtgcggtgagtggcggcagtgtccgaggctcaaggcgacgatggcctgggctcgtggtgttagccgaacgttcctcgcggtggccgaaggttcctcgcgacggcatggagctcgactgcgtgccttgggcaacggcgggcagggacgcgtgcacggaagagcggcgacggggagacaggcgcgcatgcaaatgaaagagaataacaaaggcgatgtctgtttattttcggtgtttcatctctag

SEQ ID NO: 2918 - DNA, 738 bp, Zea mays
  Peptide Sequence Number=SeqID_46293
atgtcattgcgcaggacaaattcggttgcgaccttcctcgctgtctacgccaactggggcttcgccaggatcaagggctgggctggtgttgtctggctctacagcatcgttttctacttccccctggacctgatcaagttcttcatccgcttcgtgctcagcggcagggcatgggacaacctcctcgagaacaagaccgccttcaccaccaagaaggactacgggctggaagagagggaggcgcagtgggccaccgcgcagaggacgctgcacgggctccagccgccggaggcttcctccaacacgctgttcaacgacaagagcagctaccgcgagctgtccgagatcgccgagcaggccaagagacgagctgagatcgcgaggctgagggagctcaacaccctcaagggccacgtggagtcggtggtcaagctcaagggcctggacatcgacaccatccagcataactacacgtcaaataactgggtacctcgacgtgaggagattggaacagggcctaaggccaagataatcagtgaaattcactctgaggcagaaaagaatcttggattacgccctggagcagcatctgtcattaggaatggccgtggctcaccaggagggcccctttcacctggagggggatttccaatgaatcggtcaggaactggaggcatgatgtctgggatgcctggttcaaggaagatgcctggaatgcctgggttggacagtagatag

SEQ ID NO: 2919 - DNA, 2541 bp, Zea mays
  Peptide Sequence Number=SeqID_46294
atgagcgacaaggtcgagcgagtcgtcaaccgtccaggtgctgataggtcaatgattacagcatattttgaggcgaataagctacacgaggaggctcggggcatcctgtatcgtgacttccctgagtggtacacttggcagcagggcaaagtgtggcaacggaggaaacaaaatacaggtggacaggtcggtagaattgcctccactctaccatctgagggggagcgcttctatcttcggctcctcctaaaccatgtgactggtgctacctcctatgcagatctaaggatagtagatggtgacacactaccatcgtttcatgaggcagcacaaagaaggggattgcttgaagcagacaacacaatagatgagtgtctcaatgaaggtgaactttaccaaatgccatcagcgctacgaaggttgtttgcaacgatactggtttactgcgagccgaatgatgtggcagaatcgtggcagagacaccttgacacaatgtccgaggattatcatcgtattactcatagcaaaacccatttgcagcagatggtcttgattgacattagaaacatgttgcagtcaatgggtaaagacataaagacattccccctcccttctatcatcgatagatatgatgattcacaaggtattgatagagagatttacgaggaggaaagtatcgaggcgatgatagaagatgttgctttgcaagaaaccctaaatgaggagcataagtctgcctatgaaaagatcttatctattgttgacactagtaatggcgatgtgttctttgtggatgggcctggtgggactggaaagacttatctgtataaggcattgcttgcggtgctacgtagtcaggacaagattgcagttgcaatagctacatctagggttgccgattccataatgcctggtgggagaactgcccattcacgcttcaagataccactcactattgatgatggtgctatatgtaccttcacgaaacaaagtgggacatcaaagttgctacagaaagcgtcgctcattatttgggacgaggcatcaatggctaagagacaatcaattgaagtgctggacaatagcatgcgtgatatcatgggacgccctggtctgcccttcggtgggaagactattgtgtttgggggagattttagacaagtactccctgttatatgtaaggtgtcaaggggtcagatagttgctgcctctctatggagttcttacctatgggaatcaatgtgccacctaaagcttgttcacaacatgagagcaaagagcgacccatggtttgcagaatatttgctacgtgtcggtgatggaaatgaggaagtgaacatcgatggtgatgttcgtcttccagatgaggtatgtgtgccatataccggtgatgaccgcgtccttgacagattgatagatgacatttaccccagtctaaacgaaaacatgtctaatacaagctacatcacttcaagagcaatattgactactcggaacgactgggtggatataataaatatgaggatgatcgatcgtttccaacgggagcagatgatgaatatagaccctgctaacgaactttgcaacggtacacggctggtgcatgctggaatgcgagttttcttgcctcgtatacccctgtgcccttctgatgacgagatgttccctttcaattttaaaaggaagcagtttccgattatatgcacacagggtgatcttgcactcatcgattggattaaagaaatcccttgtgaaccaagggtagaagtcatgcttattgatgatgcctttgtggaaaggaagtggatggaatgcctatttcaaccggacgcatatctaggtgatgaggtgatagactgttacataaatttaataaaagctcaagagcatctaaaatgccaatctggaggtcgtgtacacatagaaaatgcttttcagttcaactttctaaagcgagacggtgatgttgaaactaaaacagatgagttatatccaattaaagacatggcacaaatatctagcgctgaaagaagggttttactttatccagaccatgacatgatattagatagtcccacaaatcctaagaagaggaaactactttgtgtatctgaagatagcgaagtattgatggaagatgatgatggccccatcactcaagcagacttagaaaggtggttagttcatgattgggataaaagaactcctataaaaatcccgaccgatgagtgcactaatgattttttactgagtggcctttccacaaaggacatgccagtgaccaaagccgatttaatagatgttctatgtgattacatcatgacaatccaagatgattcgacattagagatgacatgggtgcgaagtttcaacatttttaagatagaaatatctgtcaacgacctgccaaacgtattaagggtaaatctcgatatgactctaaaatgttttgacatggctgttcgattgttggccattaaagagtcacatatgtcgaaagatgaaatgataaaggataaaaaacattatatggacatgtaa

SEQ ID NO: 2920 - DNA, 129 bp, Zea mays
  Peptide Sequence Number=SeqID_46295
atggccggctcggccgcagccgcccttggccggttcggccgccccctgcccgcgcccccgccggctcggccgccccctgccccgccccgccggttcggccgcccctgccccgccccgccggcaggctaa

SEQ ID NO: 2921 - DNA, 1719 bp, Zea mays
  Peptide Sequence Number=SeqID_46296
atggcccagcggttgagggaggaatcgcagcggctgccgcagcagctggggcaagcggccgacttcgccgaacgcgttgcgtccggtgtcctgacagcggatgtggctgccgaagtcgagaaacttcgaacgcagcatgcggatgccgtccgagagaagtcggccgcggagagcaagaatcgcaggcttgcggagaaagtggccgccttggaggccgagaagacggacctccggcgcaagctggcagaggagcggagggaggcgaataaggtcgttgccgaggcgcaggctgcggaggcggaggccaaagtggcacgggcggaggtgagcctcgccaaccagcgcaccgaggagtgggaggcgaggttcaatgccctgcgcggccgtgtggacaaggctgaggcctccacgcgctcagaggttaagcagacgctcacacagttcgtggactcataccgcgagctgggtgcgcgggccgctgacttcaaagtgcccgatcgagaagcgggacttcgctttctcgagtggctgcaggaggagttgttgaatctcccgactatcgtggagggtttcatgtccttcgcctcccttgttacctgcgagggggccgtgaatgcgctgtctcgcgtgggctgcaggcactacgaggtcttcgaccaggccgacgagaactttgaacgcgagatctttaaggtcgaagaccctgttgtgaagcagtctgcgggggctctttttgataggatgtggggggcgcatggtccggaggctgtcagggagcgatctgaccgggcgagagagcaggtgaagatggagcatgccgaggatgtcgaggaccttggaggtctgaacgacgcgccgcccgaggctgcgggggacattccggtgctgccctcggatgctagtgaaggcccctcggccgtgcccgtgcctgctgcggccggcgaagaccctgtgtcggtccctgcgccgactaaggaaggtgccctgaaggcagcggccgagccatcagtcgaagaccccatggccgaggccgggccttcgcaggttcagggttttgggcctgcgtatgcaaccgctactgacaatgataattttgtggcggcttcgaccgtagtcgttgaagatgttttggatgattcagtgtctaagttttttgagtctgatgattctgggagttcggttgagtggacggaagagtcttcggatgaagacctggattattttctggcttttgatgtggctgcggcggaggcttcttcgcgcgtgatgggtgctgaagtttttcctgttgcgagtggtgggcgcaggcggcggagggcggtggcgaagcggagggtgagtgaggtggaggctggtcgtcttcgtgtggacggggccagcaaacgggaattgttgtcctcgccagctgggattgaccaagttgatataaggcttcaggcagttcacctgattgggaggcttcttgccttgtctaatatttattttggtgaaaacaacaaggtggtttttatagaattcctaaagagattctcgaacaaatctgctaaagttagaattgttgcaattgatgcagtcaaagcatgctacatggaagttgtatttgttttggtgattttgatctttgcaactcttcctcatgagattttggagatgactagcaagtttatgactaaaccacctaggatccttatgaagcgtgatgagttgactctgacgtaa

SEQ ID NO: 2922 - DNA, 864 bp, Zea mays
  Peptide Sequence Number=SeqID_46297
atggcctctctgccttgttcacaaataaagttaagcaaagtacttgtcaggaggaagtttcatgagagtggacagaccaatttgccaaggcctcttcactggaaacccttgcgaccaggccgttttgaaaatcttgtgctgcaatgcaccaagaatttgtcatgggaaacatctcttccatatgcctctgcagaggatgatgccagtatcatcaagggaacaggtgttgttgaacctattgatacagaagaagctccacagattccaatcctccagagtgatgaagatgttgtagaggtgaagaatgaaccttcttggcatcttaaggcatttaaattggcaatgtggctagtagggccttcaatcctgttggttacagtgtttcatggtcccaacatcgctggccttctatctctagtcggacttgacttcatttttaatatgggagcaatgttgtttttccttatggctgatgcatgcagccgtcaagagaacaatatttttgacctgaaaaggtccgccctggatgatctgcgcactgaaactacaagttctaagaagacgtccacctttaacgttgatgtgtcggcgtgtcgcaacggaccaggacacaaggggcctgtttggttcggcgatgggaggagcgagggaaaggcagaaggaggaggtgaggatggtcggaccggcggaggaggcgagcgaggcgaggatgcggggctgccggtggatggatggagggatggagcgtgggagggcggtgggctgcgggagggcggcggggctgccgacaggatgcagggcgaggtgcgaccgcgggcggatgtggggcggatgcggaggcgcggcagaaccatgtgggtgtga

SEQ ID NO: 2923 - DNA, 1581 bp, Zea mays
  Peptide Sequence Number=SeqID_46298
atgaagcagacgtgggagtcgcaggccacgctggaggcccgcatctccgcggagaggcagaatgcgtcgtgctgtcggcccggccctcgccagagaatcgacgagcatggtctacgagaactcggtcctgcggggcgtttcgtcgagcacctgcagcaccagctcgacgcggtcggccttggcttaggcattcgagagcgccatggagacaaacacggaccaacgttggaggaggacgccaccacaggaagatgcgaaggtagtaatccatctgatctgaagctgatggataagtatgaagcatccgagttcaacactctatttgatccgaatacgatggagaagacggcggaggacctgtcgttcgatgttctgtggcttatctttgctaatctggagttacctgaccttgtgcgtgctggatcagtctgttccatatggcgtgacatatacacgagcctatgcaacagtggatcttacaatcctcagcacacaccatgccttctctacacctctgagtctgccggcacaaaggcagcttgcttgtacagccttgcagagaagaagacctacacgttaactctgccggaccctcctctctgtagcaggtacatctttggctcgtcatatggttggattgtcaccgctgatgagaggtctgagttgcacattgtaaaccccatcaccggcgaccagattgccttgccatctgtcaccaccattgatcaggtgaagccgatctttagtgatattggagtcgtttgcggatatgagcactcagggtactctggggtgtgggaagtttcggacataccgtccatatttgacctcagtgagctacgtgaccacctcttccacaaggtcttcctctcttcagatccatccgcgggagactactttatggtgctcatccataacccacactgtcagctttcctttgcaagggcaggggatgataaatggacttggttgccacaaggtgattcctatgatgattgcttatttaatggtcaattgttgtatgcctgcactcaactaggagaaatccatgaattcgatcttggtaccccaacaatcacgcacaagatatttttgggtcgtgttaaagatctctacgacgagaagatttacatggttcaagcttcatgtggtcagatgctgcaaatatggaggtccgacgacactatagaagaaggggataacgaagatgaatatgatccagattttggacctgacttgccttggcatagtacctccatgatcaaagtttataaactggaaccaacttcaaaaaaacttgttgagataagtagcctgggtgcgaatgtgttgtttcttgggcacaacctatcactttgcctccatgcagaagaacacccacagctgaaagcaaatcatatctacttcgctgatgacgaaccatatacatatttcaagagtaaacgacgtgatattggtgtatttgacttggaacgtaattgcagcgagaaaatagtatctcctcagctttggtccaactggccagccccagtgtggttagttccaaatccaaggcgaataggcctatcattgtgcaagtag

SEQ ID NO: 2924 - DNA, 267 bp, Zea mays
  Peptide Sequence Number=SeqID_46299
atggctgatcaagagcgagaaaagtggaagctggctagagcaagaaagctatccttgctaactagtcacatcccgggtactaggtgcaagcgtaatgtcttggaaaagagtgcaaatgctagtagacatgtatctggagaaggtgttcaacaagcattgttgaaaatcctagaaggaactgtatctttggaatcaggttacggatatacaagtgtctggtcaagacgaagcttgagtgggacagaagatgatcatgacgaaggataa

SEQ ID NO: 2925 - DNA, 855 bp, Zea mays
  Peptide Sequence Number=SeqID_46300
atgtcgtcctcctcttcatctgctgccgataaatcgccggccggcgtatcttccgaggacacgttgagcgacatggcggcggagttgcatcctggtgacatagtggagtttggcgtgtcacggatttcctcggtccgcgttcaagacatgcagcagcttgggtattttggcagtggagtggggcgtgtcccgggggcggaggagatccccgagccggaagatgagttggttgtttttgaagcttttttcaccgccggcctttgtctgcctgcgcatcgattcgtggtggaggtcctgcgaaagttcgagaagaggaagattggagatgagattgcacagtttggatcgtcgtacccgcagtttgaggtaggggaggatgatgaaaacgaaggggcctttcggtgcgctgcccgcatgagtagcgggcgtgatttagtcgaggagtttgtcgggtatggggtgtggcccttggcgcatggctgggcgctgggcgaagtatgccctcgcgagatgccctctcggggcgggcagcttgtgcgaagtcctgtcttcgcgctggatttgcgtggccgagatcctgccgcatttgtgcgtgaagtggaggatggtgcagtgaggattgtggggcactacgtgccgaagacggagggcctacagagctgggatatccgtgggtccaatgacaggttgaaccgggtcttcgacctgaactgccttccgtacgacggttaccccggtgtggacgctgctgaccgccgcgggaagaaaccgatgggcggagccgaggaagagacttcgcaggatgcttccccggccgttaagaaaaggaaattaggtactatagtgggggaatag

SEQ ID NO: 2926 - DNA, 264 bp, Zea mays
  Peptide Sequence Number=SeqID_46301
atggcctgccaggctatagctgaatctccaagaatccggtatctggaatcgaatcataacttttccgaagagagtgacgcctacatcgacaatactgtgatgaaagccatcgacaccagtaggaaacgtatatcttggtgtagctcggcgggatcatggagaacgatgcgaatacaatggccgcagaattgcaatctttatctttcggtggatcaactgaggataccgatcccgactgaaattttggatggggaatcttggtga

SEQ ID NO: 2927 - DNA, 78 bp, Zea mays
  Peptide Sequence Number=SeqID_46302
atggcccaaaccacccccaacatggacatggatgtgacgcgcactcgcgcgcaagcttccatttgcacattcggttaa

SEQ ID NO: 2928 - DNA, 1308 bp, Zea mays
  Peptide Sequence Number=SeqID_46303
atggctgaaaggtaccaactcccgcagagttgcgttcccccaacgacgaggcggaaagacggcggatctcccccatctgggggcttggaaggtggaaagacacgacgcataagggagcgcgaagacacggtcgccttccaagggggtcaccctccttttaagggcggttctccctactcgcgtccccagccgtcacgggttgagtcttcttcacacactccaaggtcctcccctgcggcacgggggctgggtcccacacgtcatgcaagccggctcagagcagaagaagccaaaccaccgcgcgcggtgcgcacaaccgcccagcgattacaggcgaccctccacttttgcccagaccagcgggcgaaagggtgggcggccatgcaggcggcatgcaaccgcgccaggtgggagaagcgggcgacgcttcgccttcgccataatgaccgcgtccaaaaagggaccgagaaagggggataccccgaaaaggatccttccccgggaaggaaccaggccccgagccccctactgatcagaggttcgaaggctagccccctggaagggttcaacagccgcctcagatcgcgtgggcctacacccactactggtcagaggttcaaagccgcctcagatcgcgtgggccctacacccactactggtcagaggttcgaaggccggcccctcgaaagggttcaacgaccgcctcaggctactcgggctccgcgcccaatactgatcaggggttcaaaggctggcccccgaagggttcacagccgcctcagacaccgagcgagggatgaccatggaatcccatcagagggaggcatcgagccctcggaccccatcgccaggggaccgggtctggcagatcacccgcagaggctcgggggctgctctcgcaaacccggctccggccgaaccgttgacagcgtcaacataccagcccgagaacttgggacccgaccgtacacccgggctacggccagctcgcatgagggaacgaccagaccagccgaagcattacacgaggcattaagacctcgaaggagtgaaaccactcctccgaggcctcgggggctacacccggcgggtgcgctcgcgcacacccaccggaacaaaacgcaaccgagaaaggctggtccccttgcaaaaaagtgcgacgaaagcctccaagcgagtgcaaacactcccttcgaggctcgggagctactgtcggggaccataattaggggtaccctcaaggctcctaattctcagctggtaacccccatcagcacaaagctgcaaaggcctgatgggtgcgattaa

SEQ ID NO: 2929 - DNA, 831 bp, Zea mays
  Peptide Sequence Number=SeqID_46304
atgagactccacggcggggcggtactgggcaaggacgtggtcaagcggcaaggacggggcggtgccgaactcttcctgtgcggcaagggggtgggcgaggggacaacgatggaggggacggcgtggatcgacggtcctgataaatttgaccctcgatatcttcttttcgctaattggttgagtggaaggactagtcatgagcgttttaagtgttgggtacctcctcccccgaatcctccaccaatgacggatgcggagaaggaggtagcaacagaaagacggatggactcaccgcctcgatgcgattgtggagaccgtgctatcatcgacgaagaccatgagaagcagttctgttgtccgaacattgattatccatacgggtggcgtaagtgtcatttcagagagtggttgtatggtcctttgtcccattggccagagccagaggagacgaggaaatgcagttgggagagttacgacgacaaaagagaggtgatgcgcacaatagagtccaagagactaaagggacagaagatgtgttgtggatctcagctcgtcgatttgtacattaacgatcgcatacgcgacatgcgtagggacgcaaaatctgccttttatgatagcccgaagcgtgcagagtataggaggttgaaggcggcagatgagaagagagcacatgatgcaagggaatgggaagcggctcaagccgagaaacagatgttggataatcttacaaacatggtggaagcatcgtcttcacaattcttacatatctcacccaatcatcttctgaggcaatggagatcaaccgtcggacaactgttccatatgtaa

SEQ ID NO: 2930 - DNA, 945 bp, Zea mays
  Peptide Sequence Number=SeqID_46305
atgtctttgccgagtgcttttgccaaggcactcggcaaagatactggcaaaggggcccactggagggttctttgccgagtgccagtccaccagacactcggcaaagaaacctcctttgccgagtgcctactagggctctcggcacagggactggctgtggggtccactagaccagtctttgccgagtgtcgtcgttggcactcggtaaaggatccgtcaccgtcacttggcgccgtgacggtgacttttctttgccgagtgccaaatggcactcggcaaagtctttgccgagtgcccgacaaaaagtactcggcaaagaagccgttgccgatgtacagttcgccgagcgttctttgccgagtgttacactcggcaaaggaaattttaaatgcatttttggaccctttgctcggcgccataggctatggcgccgaggtaacacaggcgccgagctctgacgtggcgacgacagttagggtcgacgtggaggctgacgtgtccctagctcggcgccatagatcttggcgtcgagctaggggttttgactcgcgtcgtgctcctcttgctcattctcttctcacgccgtgtcgccatcgtcccttagctcttcgctgcccctccgccgagccgccgcacaccgagccgccgcaccacgccgcgcgctcctcccagccgcacgccgcccctcctccgagaatcacgccgagcagatgcccgccgccgcggtcgccgcccaacgccgcggcctcctccaccgccgcgccagcgcgcaacgccgcggccccctccaccgtcgtcgtccaagccgcgaccccctccaccgctccaagcccgacgtccccacgccgctgcccttgccgttctccgtcgccgtcaagaccctcttctccacggtcgaccctcctccccacggtgttcttccgacttgaccttctccaacgttag

SEQ ID NO: 2931 - DNA, 699 bp, Zea mays
  Peptide Sequence Number=SeqID_46306
atgccccctgcacgaccacagggcatctgggctgctggaggagaccctgacggagacagagacgacgacgacgccgatgacagttcgagccatggcacggagctctcggaggagccagagccagaggggtgcattgctagacccatcactcgtgacaccgctcgtgggtgtcacttccacgacgctctcgacaccttgctgtgtcgggccttcgaccgacacacttggtctatcgagtaccgttgtgtagtctaccagcaccgtcgcgggttatacctggaccagtgggaggctacttgcttggtgcatcgtccggacgatgatctccagggtgcagaggccttctcagagcactattctattactgagagggatactgccgaggcagccatgcaagatgcagcacgacgggcactttctcagtattgctcattgttcaacggggtagctgacggcctcgacctaaagtactaccctcgccattcgaccggaagtgctggaggtgtgattgtctcgcctattggtgagggcaatcacaggctgaacaacatggtcaacctggtcgtcgtgcttaacacagagctaaaccacgcccttaacgagttgggcaaggttcgggcggaggttgcggaattgcgtgctgagtgcgcagcaagccactatctggatggtggttctcccgcccctgtcgggatttag

SEQ ID NO: 2932 - DNA, 372 bp, Zea mays
  Peptide Sequence Number=SeqID_46307
atgaaactcccagagcaaggaatcgagctctgcctcaccggagacaccgattcagggtcaccggacttcaccagatcgccggggagcgtagaccgggctccacgaagtacaataggaaggaaaagggaaattttgggagaaatagatggcgtacaaccaaaaccttccaaggatctcatggagcatagtaatataattaaagagtgtgagttcattcaaaatctcaaaggttgtaatctcactgacggggagtacatcctcattccggagcaaggagttgctcaggaggtagtccaggagccagcgccagagtctgccatcgaggatctgcctgccccagctttggaaggcaagccccggttttatgcataa

SEQ ID NO: 2933 - DNA, 876 bp, Zea mays
  Peptide Sequence Number=SeqID_46308
atgacttctcacggatcctcagaaggagggaacacacattcccacacggacggacttgcacgagagggctttccccgcatcttgtgggaagtgctgcagggagccggttatacgatgcctccccagtatgtggtgcagttgttcgaggagcaccgggtaccccgctgtagggtgaggatgaccttggagcctcatcccttgcagtcaggctcgcattcgttggactccgagtctttcggataccgggctgaagacaccatcaaggccattgccctccacggactgacgaccttttgtggctttcaccccttggagctgtccactcaccccattggtttgttccccactgaaaaggaggacgacccaatgtggaaagatcgagtggagcatgccaaggatgtgtgggctctttacccagggcagactgctcacttgacggtgcgatgcatgaatgccctataccgcctgcaagcggtgcgaggagaggcaatgtctcaactaatgggcttgttggaggctaccaagatcacgctggataatagggaggaacttgtggtagacctatccactgaaatggtggaaaaggacctccaggtggagcagatggccacccggatccaagagcttgaggagctagtgggagccagggagaacaccattgaagttcttgaggatcagctgataaacactcaacaacaactcgaggaggctaaccagcacttggatatgcaccatcaggagattcaggacatggaggccgacgaggatgttgacatcgagggaggagtggagccggagcctgcatccagcctggacactgctggctcagggagaccaccttcacccgagtcaagcgttgcctcgtttgctcactag

SEQ ID NO: 2934 - DNA, 462 bp, Zea mays
  Peptide Sequence Number=SeqID_46309
atgggcacaataagggatggagttaaagcaagcattgtaactggcaagggagaaaatgcaaccaaggtcgggataggtaaaacaccattctcaaatccagatgggaaagatgatatttcaaaaggtaggcataggataagcatcatggaaagatctagacaaaactttcaaggcgtcaaagaagggggagcagtcaacgatgaaatagatgaggcattatccctgaacagggatggaaaagaggaggcttcaaagggtaggttcaatgtaagcagaaggcaagggaatagatatcacgagggtctgaaggtgataacggacaaggatgtaggagatgaggtaaataggcataagacaaaggatatgagtaccataaagaatggagttaagatgggacctataaatggaaaaggacagggtacgtccaagggccagataagtaaactgccactctccaattga

SEQ ID NO: 2935 - DNA, 519 bp, Zea mays
  Peptide Sequence Number=SeqID_46310
atggagcctggcggagggacagctgtcggagcggttgagtccttgctgacgtcctcttgcttccgtaagggggctgagagcctccgtcgtcacagagtatgtggggcgccatcattgcctatctggcggagcgagccagatgggacgccggtcttgttccctgcggcccgagtcagctcggggttgggcgatgtggaagctcctccgaagccgaggtcgagtctgtcttccatggccgaggtcgagtccgagcccctgggtcgggcgaggcggaggccgccggctgaggccagggcggagtccgagccctggggtcgggcggagcggagtttgccgtcttctggggctgagcccaagtccgagccctgggtcgggcggagcagagttcgccgtcttccgggacttagcccgactccgagccctgggtcgggcggagcggagttcgccgtcttccgggacttagcccgagtccgagccctggggcgggcggagcgaagttcgccgtcttccgggacttag

SEQ ID NO: 2936 - DNA, 111 bp, Zea mays
  Peptide Sequence Number=SeqID_46311
atggccatgatgggttcaacattggaaaagatgtacctctgtcaggaccttctcgatgtaggcttgatgatcgaggaccctttaactggtcacgtgcctcgtcatgggtaa

SEQ ID NO: 2937 - DNA, 528 bp, Zea mays
  Peptide Sequence Number=SeqID_46312
atgggcttcgcttcgataccagctgtgacagaacctcccaagtcattaggcccacctacagttgtccttgtccaacagacctcagacaaccctgcaggtgcacctgatcacttgacaagttcgatatccgaattccttacctttcccaagagcgtttcacccgtcacgcagacattacaatacatcggaggcccacgaaagaatgaccttacgatttattgggcccttgggcctttcgtgaggtcttttactcttttagtggacccgggggatatctatcccccacaagcccccgatctttgggttaatttagagaccgaagccttgtttcgtgcttgtgccttagaggtcggcatttcaatttgtaggattctgaacttcattgggtgcaccggagaaattggcatgaagctattcgcattatgctttggaggtcagcattacgtcatcaatattttgcttcagaggtcagcatatattttgtctttagcagccgagttcgcaatccatccatatcttgctaggtag

SEQ ID NO: 2938 - DNA, 228 bp, Zea mays
  Peptide Sequence Number=SeqID_46313
atgggggcgcgcgcgggggggccgggggcgcggccaaggggccgagcgggcggggtggggcgggcggccgaaccggccatggggccgagcggcgaggggaaggggagggaggataggggtagggaggagagggggaggggcctcaccggttacggggacggggcggccgagcggggcggcggatcggcgacggggaggggcggcggcctaggcaggggcggcggctag

SEQ ID NO: 2939 - DNA, 843 bp, Zea mays
  Peptide Sequence Number=SeqID_46314
atggacgagtctggtgtggtatggcaattagtgttttgtttccaaaaaaagggtgcgtttgagaaaagtggttttaaaaaggtccggcgggttgagtcaaaaaaggagatcagcctcctgggactagtaactttatcacaattgagtcccaaaggatcgggacacttcacggtcgtattgaaccgtgaaagagctgcatcggaccgcctaaaacggatgcctatgttgttcgacgactaccgtgatgaagatttttatgggctaccgcagaaatactgtattgtcgctcggggagccaagatcgaggccataacatatatgtatgagacagtcaaacatttcgacaatttgctccatgaaaagcatgtttataagatgcataacgtaaagtttggtcttcatccaggtgaatttaattttcgacatctaaatggtctcatggaattgtgtctcaaccaacaaactatcgtggagccatacaatgttccaattcaaatggcgtcattcccaaaacaaatattcttgaaccttgctgatattgcggagttgccaaacaggactttagtcgggggtctttacatatcattaaagtttgggggtgacctactaaacaaaaatgcactccgctgggcgttggctaaggaggattatggcataataattaggactatgtttaggcggttcagaagacaagagtgcctcgagccttcggatcataccgcaatacacttcaatccgttccatcacaacacccattattttggaccaattcaaaaagctttgatggcgtggaacaaccgtcagtttgctgttacatttcttgaagaacaaaggcgtagatag

SEQ ID NO: 2940 - DNA, 180 bp, Zea mays
  Peptide Sequence Number=SeqID_46315
atggtggcggtgggtgcgctgcaaagggggcggggcggcggtggtagtgcgctgcaaaggggcgagggcggtggtagtagtgcgcatggaggcgggcacggcttgttccaggcttcaaggggctctggccaaagtgaagaaaaacttcactacccaatgcatgcagaggactgggcataa

SEQ ID NO: 2941 - DNA, 1041 bp, Zea mays
  Peptide Sequence Number=SeqID_46316
atggccgaaaggtaccaacttccacgaagttgtgttcctccaacgacaaggcggaaggattgcgggtgtcccccatctgggggctcggaaggtggaaagacacggtgcataagggagcgcaaagacatggtcgcctttcaagggggtcaccctccttttaaaggcgactcttcctacttgcgtccccagctgtcgtgggctgagtcttctccaacacgctccaagttcctccccctacggcgcgggggctgggtcccacgcgtcatgcaaactggcccagggcagaagaagccaaaccgccgcgcgcggtgcatgcaaccgcccagcggttacaagcattcctccgctttcgcccagaccagcgggcccacgcgtcatgcaaccggcgcgccggttgctacgtgcgagcaactgcaccgccactcgcaccactaccacgcctcctcgactgcggaaccagcgggcaggagcagcggtcacgtcgtcagccaagctcacgtcacctcgtgggacagcgagagaaccctctctcatggcatgaagacggcgcgcccgtgttccgttcctcgaacggctcgcgcacgcgcaacggccgcctcgcgaaccactcgccccgtcgcattaactctgcggcgggacaggcggcgcctctggcaggggaagcaagcgacgcttcgccttcgccataatgaccgcgtcaaaaaagcctcgggcaagggcagccgaccccggaggatctacgtctcgcctgaggccccctccagcaacggacatactttcggctcgcccgaggcccagccttcaccaagaagcaaccttggccaaatcaccacgccaaccgaccaaatcgcaggggcatttaatgcaaagggctcggactcgggctcagccccggaagacgacgaactccgcttcgcccgaccccagggctcggactcgggctcagccccggaagacgacgaactccgcttagcccgaccccagggctcggactcgggctcagccccggaagacgacaaactccgcttcgcccgaccctag

SEQ ID NO: 2942 - DNA, 816 bp, Zea mays
  Peptide Sequence Number=SeqID_46317
atggcgcagacggtccgatacttaaatccgccaggaccccgcaacggcccgagaagaggggggaaacaaagaccgggttcggagatcgttggccggagctcggatgccaacggagatttttcagctgcggcccggggaagaacatcccgacagaagggtcccacgcgtcggtcacctgttgtttcagcgggcgcgcatgatgagaagctgacccgtggggccaggctgccagcgacgaagggaaagcagggtagcgagtcgcgcgtggccccgacagccacaatgaacaaaagaccggcattcaaggtgccattacaaacggaactccggctccgtctctgcaggtacgaacaaccccacacgattggggggcctgcggagcaacagaagaccgacgaacggctcgccatcgcccgctccagcagcggcgacgacgacgacttctgctccagggggccgaacagcagcagcgatgacttcagggcggatgctgctgccatgaggccctcgcccatgccctcactcgagaggcaaggacggacagaaggccgtagagttggaggtcagtccatgggcggcatcggctatctcgtcggcggaagaacctcttccagctgccgtggcggaaggcggcgccgggagcagctccgaagccactcgggtcagagagccaggcacgcggcagctgccagcgccacggacggcgaacgcccttccccccgatcactgagggaaggagcgggccgccgctcgcgcaagggccgaccccaactcggcacactccccctccccagcactgatgatgaaaatccttga

SEQ ID NO: 2943 - DNA, 1365 bp, Zea mays
  Peptide Sequence Number=SeqID_46318
atggctgaaaggtaccaactcccgcggagttgcgttcctccaacgacgaagcagaaagacggcgggaatcccccatccgggggcttggaaggtggaaggacacgatgcataagggagcgggaagacatcgtcgccttccaagagggtcaccctccttttaaaggcgactctccctacttgcgtccccagccgtcgcgggctgagtcttctccaacacgctccaaggtcttcccctacggcgcggggactgggtcccacacgtcatgcaagccggctcagagcaaaagaagccaaaccgccgtgcgcggtgcgtacaaccgcccagcggttacaagcgactctccactttttcccagaccagcgggcgaaagggcggacagccatgcaggcggcatgcaaccgcgccaagtgggcgcacttctccgactcccaacacgcccggcatggaggcccaggcccacgcgtcatgcaaccggcgcgccgaatgcttcgtgcatgcagctgcaccgccacttgcgccaccaccgtgcctcctcgactgcggaaccaataccgcaactcgaggcgacccagcgcatgacccagcagcgccagcctggcgcgacggtcaatacggccaaaaatgggccggcagtaatggcggtggcaggcgggcaggagcagcggtcacgtcgtcagccaagcctacgtcccatccaggggcgacgagacaaccctctctcacggcgtgaagacaacgcacccgtgttccgttcctcgaacggctcgcgcacgcgcaacggccgcctccagggaccaggaaagggggataccccgaaaaggatccttccccgtgaaggaaccaggctccgagcctccctactgatcagaggttcgaaggctggcccctcggaagggttcgacagccgcctcagatcgcgtgggctctacacccactactggtcagaggttcgaaggccggcccctcggaagggttccacggccacctcaggctactcgggctccgcgcccactactgatcagggcgggaacgatcttgtaatggaatcccatcagagggaggcatcgagccctcggaccccgtcgccaggggaccgggtccggcagatcacccgcagctcaccggagacaccatgttcgacgcccatcgagggcaacatggcgcttcccccctcctccttgcggaaaggcgacgcaggggcgcaccataggaagctccgcttcgcccgacccagggctcggactcgggctaagccctggaagacggcgaactccgctccgcccgacccagggctcggactcgggctaagcccaggaagacggcgaactccgctccgcccgacccagggctcggactcgggctaa

SEQ ID NO: 2944 - DNA, 1125 bp, Zea mays
  Peptide Sequence Number=SeqID_46319
atgcgggcagcacaacttgaggagaatagaggatcacaagttaatgttgctggtgatgacgaggcacctatgaggattgtcaaaaactacaagaggcctgaggagaggattcctgccgagagagacccaactaagtttgttgtctcaccgataactggagagctcattcccatcagcgagatggaggaacacatgtgcatctcactcattgatcccaagtacaaggagcagaaagagaagatgttggctaagatcaaggaaactacccttgcacctgatgatgaaatttcacggaacattgttggccttgctcgcactcgccctaatatttttgggaccactgaggaggaggtgtctaacgccgtcaaggcagaaattgagaagaaaaaggttgagcaaccaaagcagctccacttgtccgacctggcatgtcgctgcccccgacctcctcaaccacttcctcttgttagaaacaacctcctcagccacttcgctggtggcattgtcaagaatcgctcagagagtgatgctccctgctgggaagctgatgttgtggatgagagcgaggaaagagagtgtttggtgaaggttgatatgggaactgaactcaaaacatgtatggatgaaaattgtgtgctgaagagagatttgggtgtcttggccagaagagaggacactgattgtatgccagtcaactggctgtatgatcgtcctgacaacatgagaaggagctacctttcaaatgatgcgtacaacatactggagatggatcacactcctgaccttacaccaagtgagaatgaggatcatgctgtaaacggatctactgtacttgaggggctcaaaagtctgcgcttaacatcagatctaagatggaaggtttggtgcaggcactcgatgaagaagaaaaagagcttgaaatcttggagaaaaagacctcagaagtttataggacctaagctttggcagaacttgcaacgactgttgacaaatttgatgagctgcatagcttgtctgagaaccttcttgctgaagtggaaaaccttaagttgcaattgcaataaagagattctgagatctctttcttgcgaaaagaagttacaaaaagcactaatgaagtgctaa

SEQ ID NO: 2945 - DNA, 603 bp, Zea mays
  Peptide Sequence Number=SeqID_46320
atggaggtccgctgccaaactagcttgtgccaaaatgaagatggtttccccaagttgctgagagcatgcacattccgtctcggaatcaggagccatacagagtatgatggtcgtgaattcgtcgagcatggcacagagaagtgtgtcatgactgtatacattggatctagtctgcaccatgtggaatggagtgtcactgctactgggcacagattcaaagacacctgtcaagtcgtcgctcgcaaggcattgagggccctatgtcaaatttatgaagaagaagtggtcgacaccgctcagattctttctgccctttcagagaaacttcgtgaagtcattgatgttgaggccctgaagcaagccaaggatgagcatgtccagaagttgatggaggcctacttggtaacccataaccaacgtagagccctgcggatccaagagcctgcttcatccaacccagttcaacccatgagagctgaagatccccagattcttgaaggtcacccggtctctatcagaggagagaagaaggcttgggaactcccggaaggagccatagtcttggaaggaattccagtcttccctcaggctatgaataagtaa

SEQ ID NO: 2946 - DNA, 408 bp, Zea mays
  Peptide Sequence Number=SeqID_46321
atggtggcaagaaccgcaagcaacgacgaggaagcaaggggaggagccgacgaggaggcaacgacgtcagtccaggcgggtgcagcaagggtggggggcctcgacgctattcgtcggcgtttcgaccccggggggtccctctaccgacgagtaaaattgtcgatgcgtctcctagcccagatgggttggcgcgagacagaacacaagggggaaaacatggctcgtgttatcctgcgccagggggatgcgcttgcagtaggggttacaagcgttcgcgagagagagagggtgagcctgttcgtcagctcgttctcccgcgcgaccctcccgcatggaggccctggaccttccttttatagatgtaaggagagggtccaggtgtacaatgggggtgtagctatgcgctaa

SEQ ID NO: 2947 - DNA, 417 bp, Zea mays
  Peptide Sequence Number=SeqID_46322
atgcaggtggcgtgcaaccgcaccgcgggggcacaccccttcggcttcgtcgcatccagcatggaggcccaggcccacgcgtcatgtagccggcgcgccggttactacgtgcaagaaactgcaccgccacttgcgccaatgccgcgccttctcgactgtggaaccagtgccgcgactcgaggcaaccctgtgcatgaccaaacagtgccaaccgagcacattgatcatggggaccaggtaaggggatattccgaaagggatccttctccgcgaaggaagcgggcccctcggaagggttcgacggccggccagagcacacgggcttcaagctcattactgatcaggggttcgaaggctggcccctcgaaagggttcgacagccgccctagagcactcgggctccgcgcccactactga

SEQ ID NO: 2948 - DNA, 597 bp, Zea mays
  Peptide Sequence Number=SeqID_46323
atggacttccgcgcgacgcttttccctcgccacccggacctcttcagactcgttaacacctcccgcggccacgcactccagctcgctgatcccccgccaacgtccccaccgtcgcctctctctcttcgccccgccgtgccgcccgatcgcctcatggaccggctgcggaggcacaatctattcttgcactctgccctggtactgtcaaggaacactccgtcatcagtaagaggaatcaatgatgcttgcaggttcttccttcttgaaagtggtgtagcgatgttcgtggcacttctcatcaacatatgcatcatctctgtctctggaactgtctgtaactccagcaacgtctcaccagatgactctgcaaaatgcagtgacatcaccttggactcctcgtccttcctcctgaggggtttcttggacatcaagatgagacagtggctgaggaacctgatgactcgcagcattgccattgtaccaagcttaatcgtcgccatcatcggatcttcctgctgctatgggaaagagaggggtgaaacttggcaaggcatcctattaagagctgacaggggtaaagaagctaaagttggatga

SEQ ID NO: 2949 - DNA, 327 bp, Zea mays
  Peptide Sequence Number=SeqID_46324
atgaggagaaggcggtggatcttggcggcgagcgcgcctgcgcctgtgccggtggcgcggagcgccgcaatatcggcggcgggggtgagcgcgaccgagcaccctgagctgcgccgcggcgacggcggggtccaccctgtcgcccccggcacgcgggttggtggccagcgcggagaggtacccgaggagggcctcggcctggagcgcacgcctggcgaaggccgcgtccactgccgccccgggcgcgccgtcacggacgtcggcgttgtcgatcgcctgcgtgctggtggtggcctcgttgtccccgccgcctccgcggcagcatga

SEQ ID NO: 2950 - DNA, 2536 bp, Zea mays
  Peptide Sequence Number=SeqID_46325
tctactcaggagtgcttcagcgttgacataccccgtgctccggcggggactgttagacccgagacaagggcgtgctgctgatgaggatgatgactttatgccatcatccaagaagcgtaacttggacgacagccctgggaaagttttgaagaagcagaagctgaacgtcagatgcaacccccaagatgtgttagtaagcatacagatattaaatgacagacagcaacaagcaattgcacgtaggggattttctagtattcttgatatgagactggatgcactcggcagcagatcacacttagcttggctgatggaaaagctcgaccccaatgacatgacaattcgagctggccctgggaaggagctgaaaataacaaaggatacggtacacctaattttgggtttaccgaatgctgggggaggaactgcattgggcattgatgaagctgttgttgccaacaatttgagagctgaacttgggctatcgaaagaagattttgggattacagctctacaagatcgtttgaggaaaggttctgacgatgatttgagcatcagatgctttttcttgatattgttcaataggttgttgttccctactgccagctggggaataacgaaccatgaggttcttttaaccgagcagatggatcgtttccaccagattgactggtgtcagcttattttcaatgatttatgccaagctgccaagaagtggcataacaggagcgttacgaacgtttctacaaccatctatggatgttccatcgttattcttctgtattatttggatcatttgcatgactcagcggcacccctgaacaaacgtggaacaccacgaatcaaatactttgataggaatattattcaagccctgacaagagctgacaagggcaagatacgcaaaggagaagaagcatttggacattgctcgcataagaccaggaccaacgcttttgatgttcctcgtcctgacccatctggacagcactcaattcacatcgaactcccgctcatcagggatttgatatcaagcaagcttaatcagcttccatcccgccaccgcatgggtttcatagagaagctgtcacattttgatgcggaggttggtaaggcgtgttcagttattaaacagaatcttcagcagattgttgagaaacaattcaatctatctgatgtttttggcgagttaattgatgaggtcctccgtgccgaggcgggtgacaacgaagatgcttatgatgtgcagaaaaccacatcaaaatcagatgatattcttccccagacagctgaaggatgtacgtgtccggcccccccaactgtacccgatatgtctactccagtttctcagctggatacgcagtttacagacacacagggtaaacatggtgacggtggcaagaacatgccgaccaatacaaacgtcactcctaaagcaacaccccacatggatcctgacgcgccgatatttgatgcgacaccgcaaatcaagtctactggtggcgtacaacaagtggcagaaacagacttgcctgacagtggtccatgctttgatcagactccatctgaacatgtttatgttgaaacccatccagctacaaacactccacaggttggccaggcttctcttgattcggagatgcaaactgtgttagctctacgcgaatatttgtgtggtctgcaatctgacacccgcaggaccataatagattatggtgaatattcagcgacatgttctgacatatatgaatcttttgccgatgggaagtgtctcgacaatggattcatgcagtgtttcatccaatgtgttattcatgatgcaaaaaatcagcagacttccatgagttcaaactgtttggttcttgatgttaatgttgggtcaatactcaactttgaggaacaggaacgacacagtcgcaatcctcaaccttttgatgaatctgtactccacacacatctagacaattcattgcctgagacagatgagttggaccaatacaaagcgatcatggtccccatggtaagcagggggcattggacattgtatgttgtcaacaaggtcaagaagtgcattcatattttagattccaacccatatggaccaacacttggtggaactacatggaaggactatcattttgcacatttggggtcaggtggccgaaagttaccctgggctaaggttattatgagcagattaaacaaagcaatacaacatgtgcggcccagttcatgttttcccaagtttggtaacttcacaattgacttgtgtcaaaattgtcctaacatggtagctggatcaaatgactgtggtttttatgtcatgggttacattctattttatctatgcgacgaaggatctttgcggtcagacatagaagcagtatgtacaaatttaccatttaattctacagttggcccatggcaacacatggaacagagtgagatacggtctcttgcgctgcattacatcacattccacccgaagaacaaagcattatcgctgctccaagacatccaaagattcaaggtctaa

SEQ ID NO: 2951 - DNA, 141 bp, Zea mays
  Peptide Sequence Number=SeqID_46326
atggccgtgatggattcaacatcggaaaagatgtacctctggcaggtgaggaagcagcagatttctgttgcttctgtaccaaggtggttccacatgaggaaaaacaagaatgaagatgcgggaggacagggtcctccataa

SEQ ID NO: 2952 - DNA, 1380 bp, Zea mays
  Peptide Sequence Number=SeqID_46327
atgaaaatccttgaagccgaacgatggctgaaaggtaccaactcccacggagttgcgttcctccaacgacgaggcgaaaaggcagcggatatcccccatcccgggggcttggaaggtggaaagacacgatgcataaaggagcgcgaagacatggtcgccttccaagggggtcaccccccttttaaaggcggctctccctacttgcgtccccagccgtcatgggctgagtcttctccaacacactccaaggtcctcccctacggcgcgggggctgggtcccacacgtcatgcaagccggctcagagcagaagaagccaaaccgccgtgcgcggtgcgtacaaccgcccagcggttacaagcgactctccacttttgcccagaccaacgggcgaaaggggtgggcaaccatgcaggcggcgtgcaaccgcgccaagtgggcgcacttctccgactcccaacacgcccagcatggaggcccaggcccacgcgtcatgcaaccggcgcgccgaatgcttcgtgcatacaacagcaccgccacttgcgccactaccgcgcctcctcgactgcggaaccaataccgcgactcgaggcgacccagcgcacgacccagcagcgccagcctggcgcgacggtcaatgcggccaaaaatgggccggcagtaatggcggtggcaggcgggcaggagcagcgaccacgtcgagaagcgggcgacgcttcgccttcgccataatgaccgcgtcagaaaagggaccgggaaagggggataccccgaaaaggatccttccccgtgaaggaaccaggctccgagcctccctactgatcagaggttcgaaggctggcccctcggaagggttcgacagccgcctcagatcgcgtgggctctacacccactactggtcagaggttcgaaggccggcccctcggaagggttccacggccgcctcaggctacttgggctccgcgcccattactgatcagggcgggaacgatcttgtaacggaatcccatcggagggaggcatcgagccctcggaccccgtcgccaggggaccgggtccggcagatcacccgcagctcaccggagacaccatgttcggcgcccatcgagggcaacatggcgctttcccccctcctccttgcggaaaggcaacacagaggcgtatgtaaaaaagtcgagtctgtccctgatcgtcctctcgccctgtgcagaggctcgggggctgctctcgcaaacccggctccggccgaaccgttgacagcgtcaacataccagcccgagaacttgggacccgaccgtacacccgggctacggccagctcgcatgagggacgaccagaccagccaaagcattacgcgaggcattaagacctcggaggagtga

SEQ ID NO: 2953 - DNA, 304 bp, Zea mays
  Peptide Sequence Number=SeqID_46328
gaactccgccagcttcgggaaatagcaacggctgctcgctataattcattggacatgtccgtgtacaccggactgtccggtgtaactgcggggcaacggctacttcgcgccaacggtcacctgcaggcgcatttaatacgcgccagaagcgcgcagaagtcaggcacgcgcgcgctggcacaccggacactctacagtgcatgtccggtgcgccactggacatccaggcgggcccagaagacagagctccaacggtcggaacccaacggccttggtgacgtggctggcgcaccggacatgtccg

SEQ ID NO: 2954 - DNA, 1323 bp, Zea mays
  Peptide Sequence Number=SeqID_46329
atggtcatccgtagggatgatcaccagcattgtggtggggagaagcaagccgggctgcggcctctgccccgccctcagcttcaaggatgttcatcatccttgctggggagggggcacaccgagttggggcctgtctctgcgtgggctggcgacccgcttcttcctccggcattcgggggagacgggcatcctccagctctgcagaggaggcgtcctccagccatgcgggggaaggcgaacttatgctgccaggacagggtgcagctgtccgtcttccacccgggcgacggtggccggctgcactggggggttgcacaacacgacgtacgccgcaagggtggtactcgtgttctgggacggtcccattctcgttcttgtggcgagagcgggagtgaggacctgtcggtgcgctttggggcggcggccgcttgctggtgcggtgttggtgggcaggtggccgccgtcgtcggtgctgaggtggtggtcaccataggtgaggctgcctctgccgaagcggttgcttctgccgacgagaccatccgtgccacctgcactctggacctccggctctttggctttaatggctggttctcgtcccccgtgaggggacgtgaacgagggcctttcagcagcagcgtttgccctgaggccatcgctgcagctgtcttgccgcccgagacggaggtcgttgccgcgctgttggtgcagcggtcgtcggcgagccacctggagtttgttatcccgcaggccctctggtgtagaggttgttcatacccgcgggagtggaaccggagtcccaacctttggccgctctgcgatgagctggagccggaggcagcggtgtcggcgtggacagaggtggagtcggctcgaaaagaggcttcgtcggcccgggagcatgtggcttcccaggccgaggaggtgcagcagcggcggctggagctttgcctggtcatccgcgagcgggaccaaccccggagtcacgttgctgaggctgtgagccgggctgaggtcctcaggggacagctggctgaggctgcggagcggccagccgaggcgtccgctcgggccgaaatccttgcggagaacctggccgtgagggcccaagcgcggtgccggcgtcctccttcaaggtggagatccttccgcccgtgttgccgtctgaggccgggccatattccgccaagggtggaaatgacgccgagggacttgttcgtcggtagcagaatcgcttatccgagcgagagttacttttcgcggaaggtgatgaatgaggattctgttatcgatatagtcgagaaggcacgaaagtcgttttggtag

SEQ ID NO: 2955 - DNA, 717 bp, Zea mays
  Peptide Sequence Number=SeqID_46330
atgggaccccgaaccctccttctgatcaggggttcaaaggctggcccctcggaagggttcgacagccgcccagagcactcgggccccgagcccattactgatcaggggttcaaaggctggcccctcggaagggttcgacagccgccccagagcactcgagctctgtgcccattactgatcaggggttcgaaggctggcccctcggaagggttcgacagccgccccagagcacgcagagtgaggatgactctgggtacgtctgttacatggccgaggctcaggctacgctcccgaggcttcatcgagaagcaaccttggccaaatcgcctcgccaaccgaccgtatcgcaggcgcattcaatgcgaggatcgcctgacaccttatcctgacacgcgcgcctcagttggcaaggtcgaagaaaacaacgtcgctcaccccgctcagactgttgtgccagccacccgggcaaggctgacaacagcaagttcagcctcgggcgcaacaggaagctccgcctcgcccgaccttaggcctcggcctcgggaggaggtctccgcctcgcccgaccccaagactcggcctcagcctcggcctcgggaggaatcgtgtcctcgcccgaccccggccttggcctcaggagaagtctccgcctcgcccgaccttgggctcggaccgaccacgccacaggggatacatcattaccctacccctagctag

SEQ ID NO: 2956 - DNA, 378 bp, Zea mays
  Peptide Sequence Number=SeqID_46331
atggtcaccggtgaaaagtccgaagtctcgggaaagaagaacgatgaaaggactccgtcaaaggaggctggcgacaagcacaaggaggacaaggaagaatccatcggctccatcaaagaggtgcctgagccctgtgtacatgccaacgtggctgttggagaggtgctagagccctgtgtatgcgataacgtggctgtcagagaagtgcctgaggcctatagaagcacagttggcggtgctgctgggatcctgctgacgtctccttacttccgtagggggctgagaaccaccgtcgtcatggacacacgcggggagccatcattacctgttaccggaacaagccagatgggacgccagtcttgttcccttgtagcctga

SEQ ID NO: 2957 - DNA, 147 bp, Zea mays
  Peptide Sequence Number=SeqID_46332
atggagagtcatgatctccgggcagaatgggaatcacgacttgtgggtggtgacaaggatgatggttatgactatggtaatggtaaagaagaaggcgtcaaggcgaatctccaggagttccaggacttcgacgagttcgaggattag

SEQ ID NO: 2958 - DNA, 1686 bp, Zea mays
  Peptide Sequence Number=SeqID_46333
atgtcgtgccttctcgactgcgaaactggtgccgcgactcgaggcaaccctgcgcatggcccaacagtgccaaccgagcacatcggtcacgggtcagtcagccgcgggaggaggcacgacggtcgatatggccaaaagtgggccggaagtaatggcggcagcacgcgagcggaagcagcagttaaatcgtctgcaggatcacgtcccctcctggagcagcaggggagccctctcccacggcgtgaagacgacgcgcccgtgtttcgtcccgtcgcattaacttcgcggcagggcaagcgacacctttggcaggcgaagcgggcaacgtttcacctccgccatgatgaccgcgtcaaaaaagggaccgggaaaggggatatttcgaaagggatccttctccgcaaaggaagcgggccccgagccctcctactgatcacgggttcgaaggatggcccctcggaagggggttcgaaggctggcccctcggaagggttcgacagtcgccccagagcacgcagagcgagggatgactctgggtacgtccgatacatggccgaggctcgggctacgctcccgagaggctcgagggctgctctcgcaaacccgcctccggccaaaccgttgacagcgtcaacaaaccagcctgaaaactcggaacctgactatgcacccgggctacgatcagatcgtcaaggcttcgtctgctcaagggacacggtctcgcctcgcccgagcccagccttgggcgggaactgtagtcccaggcgaattcacgcctcgcccgagggcctcctcaagcaacgggcgcaccctcgactcgtccgaagtctagctcgggcaggcttcgttgtgaagcaaccttggccaaatcacctcaccaaccgaccgtatcgcaggcgcattcaatgcaaggatcgcctggcgccttatcctgacatgcgtgcctcagtcggcaaggtcgaagaaaacagcgccgctcgcccctctccgactgttgtgccacccgccagggtgaggctgacatcagctgggtccagcctcaagcgccacaggaagctccgcctcgcccaaccttgggcctcggcctcaggaggaagtctccgcctcgcccgaccttgggcctcggcctcaagagaagtctccacctcacccgaccctagggctcggcctcggaaggtggtctccgccttgcccgaccctagggctcggcctcgacctcggaaggtggtctccgcctcgcccgaccccagaacccggcctcaacctcgacctcgggaggaatcgcgtcctcgcccgaccccggcctcggccctcaagaggagtctccgcctcgcccgaccttgggctcggaccgaccacgccgcaagggacggtggctccctgccccttatggaagcaaggagacgtcagcaagctcccaacaaccccgacagctgtgcttctacagggctcaaacgctcctccgacggccacgacgccgcggccctcatacggagggtggtcgcgcgggactcccttgtaacccctactgcaagcgcacccactctggcgcaggataacacgagccgcgagaccccccccccccccggggtcgaaacgccgacacctgccaaggtgggtgtcgccaaatgtttcatcgacccattcttgcactccctctgcgtctccttgtttgtgtacaagtga

SEQ ID NO: 2959 - DNA, 156 bp, Zea mays
  Peptide Sequence Number=SeqID_46334
atgccgtcaatggggtccaggcacagtgcttgctctgccgaggctgggtgccgaggtggtgacaaggatgatggttatgactatggtaatggtaaagaagaaggcgtcaaggcgaatctccaggagttccaggacttcgacgagttcgaggattag

SEQ ID NO: 2960 - DNA, 1017 bp, Zea mays
  Peptide Sequence Number=SeqID_46335
atgcatcgcatccttccacctttcgagcccccggatggggagctcccgcgttgccttcgtcttgttgttggaggagcgcaaccttacggaggtgggcacccttcagccattgctcggcttcaaggattttcatcaggcagcctggctgcattccctcaccaatggtcacccaggatggtgaccaccagtttgatggtggggagaagcaagccaggctgcggcctctgccccgccctcaccttcaaggatcttcatcatccttgctggggaagagggcgaggcgagccagggcccgccttcgcgtgggctggcgactcgcttcttcctttggcatctgggggtgaaaaccatcctccagctctgcggaggaggcatcctccagccatgcgggggaaggcgaactgttgctgcctagccagggtgcatcattacgtcctctatccgggcgactgtgcccgcccgcaccgaagggtctcacaacacgtcatacgccgcgagggtggtactcgtgttctgagacggtcccgttctcgttcttgcggcgaggacgggagtgaggacctgccggtgcgctttggggcgaccggtgctcgctggtgcggtgttggtgggcaggtggctgccgtcgtcggtgctgaggtggtggcagccagaggaggtttctctgccgacgagatcgtcggcgccacctgcggtcggacctccggctcttcggccttggcggcttgtcctcgcccctcgtgtggggacgtgggcgagggacctccagcagcagcgtttgccctaaggccgtcgctgcagttgtcttgccgtccgagacggaggtcattgacgctgcagcagtggtcggtgaaccctcggctgctctgcgatgagccggagccggaggcagcggtgtcagcgtggacagaggcggagtcggctcgagaagaagcttcgttggtccgggagcacgtggcctccctggccgaggaggtgcagcagcggcgactggagcttggccaggtcgtccgttag

SEQ ID NO: 2961 - DNA, 942 bp, Zea mays
  Peptide Sequence Number=SeqID_46336
atggccgtggggttccgtcggacgctgaccacgctggcgtcgcccaagtcgatggctccgtcgttcctgctggactgcgcgcggcccaagaagctgtcgtacgcgcgggtgcggtcgaccagcctccccgtgcggctgcacccgctggcggcggcgctgcacgagtcggcgcgcgcgctgctggcgtgggcggacgcgccggcgcagacggggcccgcgtgggtggcggacggcgccgggcgcgcggggcgcgtgctgtcggggctggcggacctgctccaccacccgcaggcccgcgacgcgctccggcggcacccctggacgacggagcagctgctggacgacctgctcctgctggccgacctccacgggtgcttccgcgagtcgctggtggcgctgacgcagctcctggccgagacgcacgcggcgctgcgcaggcgcgacggcgcccgcctcgccgccgcgctgcgggcgcagcggcggtcggcgcgggaggtgtcccgcctggcgtcctccgcgcgggacctctcccaccgcgcggcgcccgacgacgactccgacgaggccaccctcgccgacgccttcgcggccgcgacggctgccgtggccgccgcctcggccgcggtcttcgccggcgtgtccgccgcgtccgccgagtcggcggccagcgccgcgccgtccccgaggaccccgacgccctactcccccgcgcgcacccccggcagcccgatgtggctcgtgaccgacctgctccggcggcggcggaccgtgtcgttcgaggactcgtgcggcgaggaggaggaggagcggaaggcggccatgggacgggtgcgcgggctcgaggcgtgcgtcgacgccgccgagtcggggtgccaggaggtgtaccgcgcgctcgtgaacgccagagtctccctgctcaacctgctcacgcccacgttctga

SEQ ID NO: 2962 - DNA, 213 bp, Zea mays
  Peptide Sequence Number=SeqID_46337
atggggtgggcgacttggttcctagcgacggtgtgcttctttgctgcgagccaactcttcgtctctgatgctcttgattcctccttcggcgtaggctctgtcacctccaacaagctggctcacgaacctattgaggcacatgttcgacaacctgtacagcaagctgttcctagccgacttcacgcttttaggagatttggcattcaagagtaa

SEQ ID NO: 2963 - DNA, 618 bp, Zea mays
  Peptide Sequence Number=SeqID_46338
atgtcaggcacgcccatactggcgcaccggacatccaacagtacatgtccggtgtgcaccggacatccaggcgggcccagaagtcagaagctccaacggtcagaatccaacggcattggtgacgtggctggggcaccggacatgtccggtgtgcaccggactgtccggtgcgccatcgaacagacagcctccaccaacggtcaagtttggtggaggctgtctgttcgatggcgcaccggacagtccggtgcacaccggacatgtccggtgccccagccacgtcaccaatgccgttggattctgaccgttggagcttctgacttctgggcccgcctggatgtacggtgcaccccggacaaatactgtgggacgtccggtagcagttgccgccgaaatagccaatattactttgctataccgcacagtccggtgtaccccgtacagtcagagaagaggaagcccgtctccaagaaattccccaaagaaagaggtccgaagggggctcttcccggagcacgggacaatgtatacccccaaccaccacacttcaaggcatccaagttttcagccaacacactcaatacaagagctagtgcattcaatacaagacacaattag

SEQ ID NO: 2964 - DNA, 429 bp, Zea mays
  Peptide Sequence Number=SeqID_46339
atgggcgagcgcgaaggggggagaggcgaggtggccggagtcgggcgtgagagaggtggaagtcccgcggccttcgtgttcgtcccgcgcccagggcgacgtgggggctcctccgaagtcgaggtcgagtctgtcttccgttgccgaggccgagcccgagcccccgggtcgggcgaggcggagatcgtttggccgaggccagggcggagtccgagccctggggtcgggcgaggcggagatcgtttggccgtcttccgggtcttagcccgagtccgagccctggggtcgggcggagcggagttcgccgtcttccgggtcttagcccgagtccgagccctggggtcgggcggagcggagttcgccgtcttccgggtcttagcccgagtccgagccctggggtcgggcggagcggagttcgctgtcttctag

SEQ ID NO: 2965 - DNA, 189 bp, Zea mays
  Peptide Sequence Number=SeqID_46340
atgcggcttcatacccttagagtgattgatgaagctgaggtgcccgatctttcggcgagtagagataattccgatttgtcggaagatgacccttgcgatccgactacgacgagcaagcccgaggcgccaatgcaatcgctgaaccaactccctgtggttaccgaccttgctgatgcgagatcggcctga

SEQ ID NO: 2966 - DNA, 264 bp, Zea mays
  Peptide Sequence Number=SeqID_46341
atggagacccgtgcactcttgttttgcttaggaatcagggagaagaccgaaagggaaaaggatttgaacatgctggattcggactgcagaagaacaccaacttgtgacggtcaccacggtcagatgcgggctcggattggaatgttcaagcacaacatggaaagcttatcaagtctactttcatatggatccggaattatagtcatatctgttctgataccaactgatgtgcacccgttgggtgattgcccgatctttcgatga

SEQ ID NO: 2967 - DNA, 2040 bp, Zea mays
  Peptide Sequence Number=SeqID_46342
atgcaggcggcatgcaaccgcgccaggtggacgcgcttctccgacttccgacacgccagcttggaggcccaggcccacgcgtcgcgcaaccagcgcgccagttgctgcatgcaagcaaccgcaccgccacttgtgccgccgtcgcacctcttcggttgcggagcctatgccgcgactcgaggcgacccagcgcacgacccagcagcgccagcctggcgcgttggtcaaagcgaccgaaaggaccgggaaagggggataccccgaaaaggatccttctccgcgaaggaaccgggctccgagcccctccctactgatcagaggttcgaagactggccctccgaagggttcaacagtcgcctcagatcgcgtgggcccgacacccactactggctggcccccgaagggttcacagtcgcctcagacaccgagcgagggatgaccggggctcaccggagacaccatgttcggtgcccatcgaggaggctcgggggctgctctcgcaaacccggctccggccaaaccgttgacagcgtcaacataccagcccgagagcttgggccccgaccgtgcacccgggctacggccagttcgcatgaggaaacgactagaccagccgaagcattacgcaaggcattaagacctcgaaggagtgtaaccactcctccgaggcctcgggggctacacccggcgggtgcgctcgcgcgcacccaccggaacgaaatgcaaccgagaaaggctggtccccttgcaaaaaagtgcgatggaagcctccaagcgagtgctaacactcccttcgaggctcgggggctactgtcggggaccataattaggggtaccctcaagacgcctaattctcagctggtaacccccatcagcataaagctgcaaaggcctgatggcgccgcctgcgccactccgactgcagtgccactcgacagagtgagtctgacaggcagtcgggccctgccaaaggcgccatgggaaactccgctccgcccgaccctagggctcggacttgggctaagacctagaagacagcgaactccgctccgcccgaccccagggctcggactcgggctaagacccggaagacggcgaactccgctccgcccgaccccagggctcggactcgggctaagacccggaagacggcgaactccgctccgcccgaccccagggctcggactcgggctaagacccggaagacggccaaacgatctccgcctcgcccgaccccagggctcggactccgccctggcctcggccaaacgatctccgcctcgcccgacccgggggctcgggctcggcctcggcaacggaagacagactcgacctcgacttcggaggagcccccacgtcgccctgcctagggcacaggtccgccacgtcaacaggaagcgccatcaccaacctaccccgagccgacttgggtcacgaaggacaagaccggcgtcccatctggccagctccgccggatgggcaatgatggcgcccccaagctctatgacgacggcggctcttagctctcttacggcagcagaacgacgtcagcaaggactcgaccgctccaacagctgtccctccgccaggctccgtcgctcctccgacagccacgacatcacgccagcaaggtgccaagacctctccggctgccacattggcattgcaaggggtcaagcagtctcattagctgcgagaagcagacgattagaatcgagttttaaccttgcacgccggagattcttcggcgacaagttcgggagctggttcccgaacttcctcctgttgttcctctggctcttgaatcaagacgcggtcgagcttgttggcggcgagaagctcgacttgaacacggtggtagagtttgatccaggccttggatcaagcttgggaaggcttcacggcctctcagggaagctgtccaagggctcggacgaggttgggggtctacgagaatggctagccatgtcggccgtgctcgggcggtggtgcctgctctttgcggcgaactccgacgatctttggctctggcgggagtga

SEQ ID NO: 2968 - DNA, 372 bp, Zea mays
  Peptide Sequence Number=SeqID_46343
atggaccgacctactccgaccaccaccaccgacgatccgcacctcaacgtgttcgccagagacccccagacctcgcccgacccttcaccagagcaacctcgccgccggaaaataagaaaggcactagaaaatagtgaacattggatgcaaatatttttcctagtctacttaagtaatgaagaatctagcaaaaataaaaggaaccctagtccagaacaaattcaagattgcaatctcgctgacggagagtacgtgctcatccctgagcaaggagctgtccatgaggaagatcaggagctagctcccgagcctgccatcgaggatctccccgcagccccaacaattgaaggcaagccccggttttatgcataa

SEQ ID NO: 2969 - DNA, 1413 bp, Zea mays
  Peptide Sequence Number=SeqID_46344
atggacaaggatcgccagggagctgcacaaatgcgccaggcggttgtcaggctcgttgaagccaggccgaagaggcagcgggggtctgcgaaggctgcggctcccggcggaggcaagccgccgctggcggcgaagtcgggcgtccctgcatctagcaaagcgccggaggcaacggcaggcgccggaggctccaaatcgacgaaggctatgccgccgtccagcagagtgccggaggtcgcgaaggcggcccgagcgttgccgttggcgggcaagcgtgtcaccgacttcgccaccgatattagtgtggacgactatcttggtgctaagtcattggctcgtttttttttaatttatttgttggtggctgacttcgccaaccgcacagcgtcgggggccctcacggcagctgtgtctgccgaagtcgagagacttcggacacaacatgccgacgccgtctgtgaaaaatcggccgccgacagcaagtgtcgcaagctggcggacaaggtggccgcgctggagggagagaaggctgacctccggcgccaattggcgggggagaggagggagaccaacgaggccctcgccaaggcacaggctgcgcaggcggaggctaatctggcacgggcggagggcaatcttgccagggagcgcgccgagcagttgcaggagcggctcatcgccctggagagccgcgtggagagggccgaggccgcgacgcgcgcggaggccgaacggacgcgcaaacagcttatggatacataccatgagctgggcgcgcggaccggtgacttcgaagtgccggaccgagagcccggacttcgctgcctggagtgggtgcaggaggagttgcaggcgctccccactgtcgtgggggggtttatgtcgtatgcctccctggtcacctgcgagggggcgatgaacgtgctctctcgcgaagggtgccggcacttcgaggtcttcgaccaagctgacgaagactttgagcgagatatctacaaggttgaggaccccatagtgaaggaatccgccggagccatctacgaccggatgtggggtccgcacggtcgcgaggtggttagggagcgggccgagacggcgagggctcaggcggcgcgtggcgagagggtggatgacttcggggcgttgaacagcgcgatgcctgacccggagccgaccccggcggaggccgtgtccggggccacactggagccgccgctgacgaccgcagaaaacgcaccggatacctccgcatctgctgtggccggcggagacctgcccccagagaccgccgaaggcgcgcctgatgcccccgcaaccgctgcgccgagtgctgaagatcctgcgatggtggcggcggaggcgacggcggaggcaacggcggaggcaacggcggaggctccgcaggtggcgtag

SEQ ID NO: 2970 - DNA, 726 bp, Zea mays
  Peptide Sequence Number=SeqID_46345
atgaagaggaaaattgccaagtacatatctgaatgtgacacctgccagagaatcaaggccagtcatttgaaggtagcaggaatcacttgggacccatgtaataagaagctcagcataccatcctcaatgagatggccagatagaaaggattcgcacgcttgtgatctcggcgagctgttgaacacgggcagaagaacacttccacgtgttcgacgcgctctgagcgcgccagagcacgcccgcgcccgaccccgcgcgccctacgccgcgccgagccgcaccgtgtcccctgctcgcgcccgcgcctataaagcctccttaggcgtcgaccgtactcctccgcgcacgctcgacctcaccggagccagagaccaccggcgtttgccctgcaaacggcgtgcccgcggccacccgatcccccgccaccgtagaccggcctgcagagcccttcccagccacgcccgaccctcggaagagaccgtgcatgcctcggtgaagctccccgagcaaggaatcggactttgcctcgccggagaagccagtccacggtcgccggacttcacccgaccgccggtgaacgtagaccggccggaacacccgccgccgacgggatcacccgcttgcgcactttcggccaccaccgccgtcaagccgtacctcgctgtgaccgccaggacctcccgaagccaaccccgcccctcgccggacctctctcaccaccggtaa

SEQ ID NO: 2971 - DNA, 729 bp, Zea mays
  Peptide Sequence Number=SeqID_46346
atggccatgatgggttcaacctcagaaaagatgtacctctgccaggtaatagagtgcaaaatagaggaagtaggatcaacaaaggttgattctgtaattatgcatgcatcacgtttaaaaaccccactaataaattttcccccttatggagatatgccgtgtacgaggaaaaccacatgtaagtccactggacccattggtgtgcctcgtcatcggttggctccaagacatgaagagagcagcagcggcagcaacgatccaatcggagacttggaggcccaagtggagcagcttcggacggagctacatcaccgaaacagggtgtgggcagaagacagtcagcgtatagctgagttatcaaccgaagccggccgcttgcggtttgagctctccgaaagagactcggtcgttgattgggccatcaactcgcgctcaatcacttggcatcgtgaagcaaaagctcgagctcgtgtggatgagctcatcatggcccttgataagctgcaagtatattgtaatactctacatgaggaagtacatgtactatatggtcgactacacccggacgtaactgccgactctgttgcaatgggagccagaccatcggggacagcaggtgaaggacctgatggggaactggatctttttaagccccctccttctatgaacctggctgatgagcagtctcctgcagcagatagtgaagcaacaaaagataacgaagactag

SEQ ID NO: 2972 - DNA, 729 bp, Zea mays
  Peptide Sequence Number=SeqID_46347
atgggtgttgcaccagcgggcgccgtgacacctccagggggaggggcgatggaggaagcagtggccacgcaacatgttcaggacgatggtacggtcgtggatgacctctccaagatcaccaagggcctcagccatccccttcatcttgcgacaatagtcgccgacggagagatcgccctacatgaaaacatgaaactcggcgtcgaggcgaaatgcgcgagcttcgcgattgccgaggaactgctcctcgatggacagccaggcgcggcgcgcagtgccatcagaggtgcgagcagactccatcagctcgggggagagtgtgcccaacacccaggacaacacaacgacattcatgcgccgccaggatggcatggcggggcaagcgtccgagaggacatggttggcaatgagggtggcctcgtagtcgaggtcttcaacaacatcgacgttgttgttcgggacaccgccctggggtggtgggaaagcggcgttgtgggcgacgatcgcaacgcgctcaaggttggaggcagcctagcgttccctggcgagggcgtcctgggcggcggcgaccaggacctagcgagctgtctcctgcgcagcatcaacgacgggcggaggctctgcagaggccatggtggcgcaacacaggcagtggcaggcagtgtaggtagggaagagtttagcgaaagcgataggtcacaggactgtgactgtctcgtgataccatga

SEQ ID NO: 2973 - DNA, 300 bp, Zea mays
  Peptide Sequence Number=SeqID_46348
atggggaagcctgtcccatcactcctcatgctcctcctgagccgaggcgggcagcatggatcaagcagtctcattagctgcgagaagcagacgattcgaatcgagtttttaaaccttgcaagtgaccgcacttgtacccaccataaccggaatgggagacctcgtcttaggtcgcgtgaggagggcaatctgctgccaggttcaatcaggttatgcataaaccggggcttgccttccaaagctgtggcaggcagatcctctggtgcaggctctggtgctggattcggggctacttcctga

SEQ ID NO: 2974 - DNA, 738 bp, Zea mays
  Peptide Sequence Number=SeqID_46349
atggcgaaagggctcctccctagggaccgcatgaaacctcatacctggacttctctgaaacgcgtcccccactctttgttaaagctgaagatcctcttgaagctaatgagtggatcaggcagggctgtcagcacggcgctggcagtagaagccaagaatacaggccaaggaaaatccaagggatttggaggtgacagatccaatcagggacctgagaagcgaacaaggttggtaatccgacctttcaatcaaaatcgttcttcgtctcgtccaccctcctatccattcaaacagcctgttttcattcgccctgccactgcccccacttctacaaatcagccgagtgcccctggtgctcatttccccgccatccctagttcctcaactggctgcttcaactgtgggaagtttggtcattttatcaaagactgcccatatccgaggcagaataagtccaccaatcagcagaactcggggagctcaaatcaaggcaaagggaacatggcaaataattcagcgggcaaatatgtgaagaagactgggcgaatttattacactcaagtggccactacaccggaaggagagccgataatgatggtgagctgggcggccagggaggaagggggctcggccatgggcgacggcgactcgctgcgggtgccgtttggtggggaagatggggaggaaatggagcagcagcgctgcgcatggatgctgctgggcgccggacaggggtag

SEQ ID NO: 2975 - DNA, 288 bp, Zea mays
  Peptide Sequence Number=SeqID_46350
atggcgcgacccgtcggattgaacaagcgtgccgcggctcgcatctaccatacgcaagttctaacgcttagggagatacgggcgaggaagattatgggagcacaacttaccgtggcgctgccaggatcaccgcctggtactgcgatcgaccagccgggatcacgacgcgcggcgatgaagctctgtttcccccccgatgtgattgtggacattactccacaactaatcacactcaatcaaggatccaaatcagacatatatcataagaacaaacactcaagcgtatag

SEQ ID NO: 2976 - DNA, 144 bp, Zea mays
  Peptide Sequence Number=SeqID_46351
atggctactacagccgccgaggacaatttgttcctaccacggcacaaggttgatcttgccctcatcgattggattaaagaaataccttatgaaccaagggtagaagttgtgcttatcgatgatgcctttgtggaaagaaaatag

SEQ ID NO: 2977 - DNA, 330 bp, Zea mays
  Peptide Sequence Number=SeqID_46352
atggggctcggtgtatgcggctcgctctgccaaggtggttatgagattgatggttttggttatgactatggtgctgctagtccactacagccaaacaggatacttgctgagtatgttgatgtgtactcacccttgctctacacaccaaaccccccccaggttgtcagcattgcaaccactgctcaggcgaagatgaagctgtggaaggagacttccaggagttccaagactacgacgagttctaggtgtgggttagcggcaacccccagtcggctgcctgtgaaggccgcagttatctacgtttcttttccgcactttgatttattgtaa

SEQ ID NO: 2978 - DNA, 459 bp, Zea mays
  Peptide Sequence Number=SeqID_46353
atgggcaagagcaagaaaggtggtagttcttcgcatcactctagagataagcggaagcgtgagccgactcctccctcggaggacttcggcgactcggagtactcggagggctcaccggtccatgcctctcccccggcgtcgtctgatgactcagacgactcccaagggctcgccgcagaggtgtggacctacattcgggccgtcgagcgtgccgggctcgagggctcggatgagtcggagtactccttggacgaggagaactcctcggactcgtccgaggagggcggcagcgacggcgatggcggtgatgacgacgacgacggaggcgatggtgacggcggcgaaggcgacggtaagggcggcgacggcggcggcaagggtggcgacggcggcggcaagggtggcagcggcgacggcggcgatggcagcagtaggggcagcaacaaggacagtggctag

SEQ ID NO: 2979 - DNA, 261 bp, Zea mays
  Peptide Sequence Number=SeqID_46354
atgtactccaaggtggcgacagtgggtccggacccccacgggaaagtgtcggagccctggatgcacagcccagacctccgggcgaggttcaagacctccacaggtggcgtgcccgtccgctctggtggcaggcagtacgcccgcgctgcggcatacactgtgctcatcatcactcatacgtcgctaatgaagcttccgctgcacgccgatactacgcaggttgcggatgtcagggcgcaaggagattgccctggcgactag

SEQ ID NO: 2980 - DNA, 885 bp, Zea mays
  Peptide Sequence Number=SeqID_46355
atgacttctcacgtacccacggatgaagggaacgggcattcccacacagacggtctggagcgagagggatttccccgcattttgtgggaagtactgcagggggcaagttacgctacgcctccccaatacgcggtgcagttgttcgaggagcaccgggtaccccgctatagggtgaggatgaccttggagcctcatcccttgcagcccggctggcgttccttggactcgaagtctttcggtttcagggccgaggatactattgagtccattgctctgcacgtgctgacaaccttctacggttttcaccccttagagttgtcaacccaccccattggcttgttcctcgctaaaaaggaggacgacccaatgtggaaggatcgggttgagcacgccaaggatgtgtgggctctctaccctggacataccgctcacctgacggttcagtgcatgagtgcactgtatcgtctgcaggccctgcgaggtgaggcgatgtcccagcttatgggcctagtggagtctaccaagatcaccctggataacagggaggaccttgttgtagacttgtccactgagctggtggaaaaggatctccaggtggagcaaatggtcactcaaatccaagagcttgaagatcaggtggaggctagggaaaacactattgaggttctggaagatcagctccagaccacccagcaacagcttgatgaagtcaaccagcatctggatctgcaccatcaagagattcaggacatggaggcagaaggggccgaggagcatgtagaaatcgagggaggagaggagccggagcctacatccagcttggacactgctggctcaggaagaccaccttcccccgagtctagtgttgcctcgtttgttcattag

SEQ ID NO: 2981 - DNA, 423 bp, Zea mays
  Peptide Sequence Number=SeqID_46356
atggcgccaacggcattctcatgcgttgcatcacccaggaggagggccgtgagctgctcgcggaaatccatggaggagagtgcggaagtcattcatcatcccgcacactggttggtaaggcctttcggcatggcttctactggccaactgctctccaggatgcagctgagttggagcaacgaccaagctgagagggcaaacacagaaatcctcaagggactcaagacacgcacctatgactgcttaaaaagcatggtgcaaattgggtcaacgagcttccgtccgtactatgggggaactggaccacacccagccgagctaccggggagaccccgttcttcctggtctatggggtcgaagcctgccttccctcagaaatcattatgggctccccacgagttcagtctttcgatgagtctatga

SEQ ID NO: 2982 - DNA, 203 bp, Zea mays
  Peptide Sequence Number=SeqID_46357
gtagcgctaggaagtctggaagcagagtcgtcggaggggctggcggcacggtcaccatcaacaccgttagcttcagcgcaccggaggccttgttggtatgcgagaggagcccagcgggcggcacagaggtcatcaacgacctggccgacggactcaagcctgttagagatgacagacacgccgacctccagcgcgtcaggtag

SEQ ID NO: 2983 - DNA, 102 bp, Zea mays
  Peptide Sequence Number=SeqID_46358
gtggtaatgaaatttaatggttttggttatgccaatggtgatggcgaagatgaagctgtggaaggagacttccaggagttccaagactacgacgagttctag

SEQ ID NO: 2984 - DNA, 156 bp, Zea mays
  Peptide Sequence Number=SeqID_46359
atgcctgagattgacttgccgaagcaacagaagctgcagggtggttacccacatactctgggatataaggcgagtgcttctgctatttcttttttgtttctggatggtgacatggcacatcttggtggtatggcccttgtcctcaccacagaataa

SEQ ID NO: 2985 - DNA, 513 bp, Zea mays
  Peptide Sequence Number=SeqID_46360
atggtcgacggggccacacgtggcacaagtagaagtgacggggccacgcgcgaaggcatcgaggccgtgcatggcacatccgaagacacgaaggtggtcgtaggagggggatgtgccatacagagcaaagtggggagtgggatggctcaccgccttcgaggggaggcggttgaggagatgggtggcggtgttcagggcctctacccagtagctggcagggagagacgcctgaaagaggaggcagcatatcatattggtggtggtgcgaatcatgcgtttggcccggccattctgggaagtggtgtaggggcacgagagacgcaactggacgtcatgggtgaggaagaaagagcgagaggcgttgtcgaactcgcggccatcatcacactggagggcacgaaccgggcaatggaactaggtcgagacccaggcgaagaagtgggtgagggtggtgaatgtgtcggacttcaggcgaagagggaaagtccaaagaaagtgagagaaatcgtctag

SEQ ID NO: 2986 - DNA, 1461 bp, Zea mays
  Peptide Sequence Number=SeqID_46361
atgaacagcttgattcgtttgcaccgcgccaagtgggcgcacttctccgactctaaacgaccgacatggaggcccaggcccacgcgtcatgcaaccggcatgccgaatgcttcgtgcatgcaagtgcaccgccacttgcgccaccaccgtgcctcctcgactgcggaaccaatgccgcgactcgaggcgacccagtgcacgacccagcagcgccagcctggcgcgacggtcaatgcggccaaaaatgggccggcagtaatggcggtggcaggcgggcaggagcagcggtcacgtcgtcagccgagctcacgtcccctccgggggcagcgagagaaccctctctcacggcgtgaagacaacgcgcccgtgatccgttcctcgaacggctcgcgcacgcacaacggccgccccgccaaccactcgccccgtcgcattaactccgcggcgggacaggcgcgcctctggcaggaggagcggacgacgcttcgccttcgccataatgaccgcatcaaaaaagaagggttcgacagccgcctcagatcacgtgggctctacacccactactggtcagaggttcgaaggccggcccctcggaagggttcaacggccgcctcaggctactcgggctccacgcccactactgatcaggggttcgaaggctggcccccgaagggttcacagccgcctcagacgccgagagagggattaccatgggtacgtttgatacataaccaaggctcgggctgcgctcccgagctcaccggagacaccatgttcggcgcccatcgagggcaacatggcgctttccccccctcctccttgcggaaaggcgacggatcagtccataagagggactcgatcacgcctcgcccgagcctagcctcggacaagggcagccgaccccggaggatctccgtctcgcccgaggccccctccagcggcgaacgtgttcccggctcgcccgaggccctgtcttcgccaagaagcaaccctgaccaaatcgccgcgccgaccgaccaagccgcaggagcatttaatgcaaagccccagaagacgacgaactccgcaccgcccgacccagggctcggacttgggctcagccctagaagacgacgaactccgcaccgcccgacccagggctcggacttgggctcagccccagaagacgacgaactccgctccgcccgaccccagggctcggactacgccccgacctcagccaacggtctccgcctcgcccgacccaggggctcggactcgacctcggccacggaagacagactcgacctcggcttcggaggagcttccacatcgcccaacctagggcgcagaccagccccgtcaacaggaggcgccatcatcaccctaccccgagctgactcgggccgcaggaacaagaccggcgtcccatctggctcgctccgccagataggcaatgatggcgccccgcatactctgtga

SEQ ID NO: 2987 - DNA, 246 bp, Zea mays
  Peptide Sequence Number=SeqID_46362
atgggggccgagccctggggtcgggcgaggcagagcttcctatggcacccgaggccggacttggctgctgtcagcctcactctatcgagtggcacagcagtcggagcgatgcaggcggcgctgtcttcttgtcaggcgatctggccaaggttgcttctctgcgaagactgggcctcaagcgagccgaagagaagcaaatgtctaggaatcccttacctacgatctgaactaccatatgcttactaa

SEQ ID NO: 2988 - DNA, 1227 bp, Zea mays
  Peptide Sequence Number=SeqID_46363
atggccgatgcggaggacgccgccgccgcgcgccgacgggccgccataaccgactaccgcaagaagctgctcaactgcagggagctcgagtcgcgcgtcggcaccgtgagagaaagccttaaaaatgcaaagagggattttaccaagactgaagacgacttgaaatctctgcagagcgtggggcaaataattggagaggttctccgacctcttgataatgaacgctttattgtgaaggccagcagtggtccccgatatgtggtcggttgccgaagtaaagtagacaaggagaagttgacatctggaactcgtgttgtacttgacatgacgaccttgacaataatgcgcactcttccacgggaggtggatccagtggtatataacatgcttcatgaagatccaggaaatgtcagttactctgctgtaggcggtttgtctgatcagattagggagctcagggagtccattgagttaccacttatgaaccctgaactctttcttcgggtgggaattaagcctcctaagggtgttctactctacggtcctccgggaactgggaagaccctattggcaagggctatcgccagtaacatcgatgccaactttttgaagattgtttcaagcgctattattgacaaatacattggagaaagtgctcgtttgattagagaaatgtttggctatgcacgtgatcaccaaccatgcatcatcttcatggatgaaattgatgccattggtgggcgaagattcagtgagggaactagtgctgatcgtgagatccagcggacgttgatggaactccttaatcaattagacggttttgatgagctcggaaagatatactgcaactgcaagcatcatcctgtgtcccaaggaaacgttgcacagcgaagaggagggcacgagctggaaccacggagtgcagcccctcatggtcctgcggccaccaatgcacaaagggtggtgtggctggagcagatggtggcgaggccaatagacccccttgtacgaaggagagtagtcatggtagttgcccggtcgacgcagatgagggccagcgccggacggagcgttgcagaggggcgccatgtcttgcagcctcctttacgcggaggtgaacaaccaccacgttgctcaggcacgctggtgcagctacgactcccccgcaatggagcacccccatcatctgcttcacccgccgacgtgctaggaaaccgcgtgctgtag

SEQ ID NO: 2989 - DNA, 756 bp, Zea mays
  Peptide Sequence Number=SeqID_46364
atgcagcccggctgcattccctcaccaatggtcatccgtagggatgatcaccagcctagtggtggggagaagcaagccgggctgcgacctctaccccgccctcagcttcaaggatcttcgtcatccgggctgaggcggaggagtgcaccgagtggggggttgcctccgcgtgggtcggtgacccttttcttcccccagcgttcgggggagaagggcatcctccagtcctgcggaggcgtcctccagccatgcaggggaaggcgaactgctgctccctggccagggtgcagctttctgtccttcatccgggcggcggtcgtgccgcgcgtgggtcggccacgtccgggtcctcctcgcgtcgtcagctgcaccggggggtcactcaacacgtcgtacgccgcgagggcggtactcgtgttctgggacggccccagcgaggacgggagtgaggacctgtcggtgcgctctggggcggccgctgttcgccggcgcagtgtcgatgggttcgatcccacggacggcgccctccgactcttcggccttaacggcttgtcctcgcccctcgtgtggggacaggtcaccggcgagacacttggagttcgttatcccgcgggccccctgaacctttggccgctttgtgatgagttgaagccgaaggcagcggtgacgtggacagaggcagtgtcgactcgaacagaggtcttctcgatgcgggggcagatggcttcccaggccgaggaggtgcagcagtggtag

SEQ ID NO: 2990 - DNA, 564 bp, Zea mays
  Peptide Sequence Number=SeqID_46365
atggccgaggcttgggctacgctcccgaggtaccctaggacatttccgagaccagcgggaatgactcataatggaatcccaccggagggaggcatcgagccctcggaccctgtcgaaaaggggtcgggtccagcgaatcacctgcaggaaaacaacaccgctcgccctgctccggctgctgtgccaactacccgggcgaaaccgacaacggtcgagttcagcctcaggcgcaacaggaagctccgcctcgcccgaccccagggctcggccttggcctcagggggaaatctccgcctcgcccgaccctgggtctcggccctggccctagcctcggaggagtcgccgcctcgcccgacctcaggctcagatcaaccacgccaagagggatgcatcattaccctactcctagctagctcaggctacgaaggaacaagaccggcgtcccatcaagcttaccccggtaacaagcgatggtggtttcccacatgcaaccatgacgtcggtggccctcaagccccctacggaagcaaggagacgtcagcaagatccatgcagcgccaatag

SEQ ID NO: 2991 - DNA, 2796 bp, Zea mays
  Peptide Sequence Number=SeqID_46366
atgcgacacggaggcggaggcaggggaggtggaggtaaaagaggtcgaggaagaggagcgggctccggacgcagagacgcgcgccccggcaacgattcgtaccgcggcgaccgtggtaggcgccacgactaccgctcccgccgcaccgcttccccggaccaccgcccacgccgcccgaggggcgaggacaacgaccgcgatccgccccgcggcggtcgcatcggctacggcgaccgtagccctccccgcggcggccgcaccggctacggcgaccgtagccctcccggcggcggccgcaccggctacggcgaccgtagccctcccggcggcggccgcaccggctacggcgaccgtagccctcccggcggcggccgcaccggctacggcgaccatagccctccccgcggcagccgcatcggctacggcgaccgcagcccgccccgcggcgaccgcattggctacggcgaccgcagcccgccccgcggcgaccgcattggctacggcgaccgtagcccgccccgtatcggccgcatccgcatcggctacggcaaccgcagcccgccccggcgcgagcgcgctggctacggccaccttgacgcgtcgccccgccgcgggcatgcgccgtacaaggacgccttcggctcgccgggcggcgaccgccacgcttctccccgcgggcgcagggaatacggagatagccgcgtctcgccccccgggggtagggactacgaaagggcgccctgccgcgaggagcgcgaccggtacggccgccctggccgcggtgccgatctcgggcacaactccccgccagcccacatgctcccagaccacccgtccgacctgggacgttcagcatccctacgcgctgacgaccatagccttctcaaggacgactaccctaggggaggccctcatcggagcatcagaaaggagaacgagttgtttgcgaacggtgacctgactctcagaataagtgcaactgaaatgggaaggactagcgccatgtactcccaagaccgcaggctctcacctccaccacctatttatccctatgtgccacgtgagacgggattcttgacaggcggatctgccatgaaggccagtgatggttatggtgctggaactggaagcgcccagcggctgcatgatgatgacgattttaagtaccacaaggatgccccacacattgagaggagtagagatattgataggcattattctggcagtagggacttagttgttgagaaaggtggagttgctgaaaggtatgcttctgctgatgatctgccttctgggaggattcgagaaacagagagtctttactctagtagaggtatgctggagtctgacctggtgccgtgtaggcagttgaaggttcttggtgatccttcctcagctttgcctgccaaggaccaccatccatacaggatgtacactgaacctggctacgagacaagcaacagatacatcatggagggccttggcaggtcatctcatgactcactggggcatgggagtgaccatcctcataggttttcaggaggttcattagagcatgtaagcggtcatggtgatgaaacattattggatattgcaaggcaggcacactctaagcatacaccaagagctgcatcattggagtacgatgtacatgatacgcatagtgaaccagagaacttacgtgggaatgtctcaatgacttcaaggcacacatctgtctcaacatctttgagaggtcttagggatgaaaggattaacgacaatctgaggttatcccgtaggattgaagaagatgagggtagcattgaatccatgcatcaggacacagagcacttaattcgtcattgttacaacggtgacgcttctgtacagtaccaaacagcaaggggtggtgatgatcactattcccactcccctggaactgaacctattggaattgcaaggcggctagctcatcaacatgagtttgattcctttggttactcaagtgatcaagaagcttcccttatggtttctaggaaaagatgcaggagtcctgaatatcatgatcatgagattgatatgtatcaagctgatcatgggtttgcaggacatgagcactatgatgatgatgttgttgatgaatatgatatacccccaccaagaatgtcacggtttgatgatgaatatgatgaaatacatgatgtgctagctaatcgtgatgttttctcaaggatttctttgccacatgaaaccaatcaggaatggactgatatggatcaggggaaccatcctcattctaacatcttgggttacgggtgttcaaaacacgtacctatgcatcagaggttgtctaaacccaattaccactcacaatttggggaaactcccatgcatggaagaggaagaggaagaggaggattgactaaaagtgccaaaaagggactgagaactgctcctcatcagttgcatgatgggtacccatcaggtagaaatgaatttgttagaccaaataaattttcaaagtcgtcaaaagatgaacttaatggttctgaagtgaagcatgaagatgctccagagtatgaggatgttcctctgcagaaagatccaccagaaggttcagaggagttcagtaaacaggttgatgaagcctttcttaagtacacaaagatattaaatgagagtccagctatgcagaagaaataccgggaggcgccaaaaggatctttgccatgctgtgtctgtggcagcagttgcctacttgctggtatggttactggaatggagaaatccaaggaaaagttatgtcttctgtag

SEQ ID NO: 2992 - DNA, 297 bp, Zea mays
  Peptide Sequence Number=SeqID_46367
atggcgcttcctgttgacgtggcgggcccgcgcccgaggtcgggcgacgtgggggctcctccgaagccggggttgagtctgtcttccgtggccgaggccgagtccgagcccctgggtcgggcgaggcggaggtcgttcgggagaggccagggcggagttcgagccctagggtcgggcgaagcggacccgagtccgagccctgggtcgggcggagcggagttcgccgtcttccggggcttagcccgagtccgagccctgggtcgggcggagcggagttcgccgtcttccggggcttag

SEQ ID NO: 2993 - DNA, 1260 bp, Zea mays
  Peptide Sequence Number=SeqID_46368
atggcgccccgcgtgccctgtgacgacggcggctctcagctctcttacggaagcaggaggacgctccgccgctcctccgacggccacgacatcacaccaactgggtgccaagatctctccggctgccacatcggcatggccttcttagagaaggttggccgcgcggggacgaggacgagacaggcgctctcttggggccactcgcttccctcccccgcgtggacgcttgtaaccccctactgcaagcgcacccgacctgggcgcgggacgaacacgaaggccgcgggatttccgcctctctcacgcccgcctccggccacctcgcttccccccttcacgctcgcccacgcgctcgacccatctgggctggggcacgcggcacactcactcgtcggcttagggaccccccggtctcgaaacgccgacactatccgagcaccctcaccctctctctcgctctgcgcgcccatgaagctcgtcgtgcacctctggttcacccggtccacgctcatcggcttcctcaccttacagccacagctccgccgtcgtcggcctgaggggcagcaggactcttccccctcgcctcagcaggaggtggagtctgggaggcagccttcccctgcacttcagccagagatgcctcttgcaccacaacagggcatctcgactgctagaggagaccctaacggagacggagacgacgacgacggtggcagttcgagccacaacacgaagctctcggaggagcaggagccagaaggatggatcgctagacccatcactcatgacaccgctcgcggttgtcacttccatgatgctctcgacaccttgctgcgtcgggccttcgaccgacacacttggtccattgagtaccattacgatgatctccacggtgcagaggccttctcagagcactattctatcactgtgagggacattgctgaggcaaccaagcaagatgatgcacgatatgcgctttcgcagtactgctcattgttcagcagggtagctaacggcctcgacttgaagtactaccctcgccattcgatcagcagtgctagaggtgtgattgtctcactagatggtgagggcaatcttaggctgaacaacatggtcaacctggtcaccatgctcaacaccaagctggaccacacccttgacgagttgggcaaggctcggacggagattgaggaactgcgggctgagcgcgcagcgtgccactatcaggatgctggttccctcactcttgtcgtgatttaa

SEQ ID NO: 2994 - DNA, 840 bp, Zea mays
  Peptide Sequence Number=SeqID_46369
atgcaggtggcatgcaaccgcaccgagggggcgcaccctttcgacttcgacgcatccagcatggaggcccaggcccatacgtcatggaccgggaaaggggatactccgaaagggatcctcttccgcgaaggaagcgggccacaagcccccctactgatcagaggttcgaaggctggcccctcggaagggttcaacagccgcctcagagcactcgggctccgcgcccactattggtcagaggttcgaaggctggcccctcggaagggttcaacggccgcctcaggccactcaggctccgcgcccactactgatcaggggttcgtaggctggcccccaaagggttcgacagtcgcctcagagcacgcagagcgagggatgaccctgggctcgggggctgctctcgcaaacccggctccggccaaagcgtttacagcgtcaacataccagcccgagaacttgggactcgactatgcacccgggctacggccagaaaacagcgccgcctgcgtcgctccgactgttgtgccactcgacagagtgaggctgacagcagctaagtccagcctcgggcgccataggaagctccgcctcgcccgaccccagggctcgggctcaacctcgacgctggacgacggactccgcctcgcccgaccccagggctcggacacagcctcggcctcggaagacggtctccgcctcgcccgatctagggctcggactcaacctcgacctcggaagacggactccgcctcgcccgaccccagggctcggattcagcctcgacctcggaagacgaactcgacctcgacctcggaggagcctccgcctcgcccgacctag

SEQ ID NO: 2995 - DNA, 654 bp, Zea mays
  Peptide Sequence Number=SeqID_46370
atgccggggaaggcgaactgttgctgcccagctaggatgcaacattccatcctttggcctcgctttcgtggcgaggacgggagtgaggacctgctggtgcgctttgaggtggccggcgctcgctggtgcggtgttggtgggcaggtggacaccgccatcggtgctgaggtggtggcggctggagaaagcttctccgccgttgagactatcagtgccacctgcggaccgacctccggctctttggatttaatgtctcgttcttgtcccttgagtggggacgcgaacgagagccttccggtggcagcgtccgtcctgggaccatcgctgctgctgcagaggtcgctggcgggtcgcctggagttcgtcgtcccgcaggctctccgatgtggaggttgttcatacccacgggagtggaaccggagttccgtttgtaatggcaccttgagtgccgcgtggacagaggcggagttggctcaaaaaaggaagcttcgtcggccggagcctggccgggtcgtccactggtgggaccagcaccggagtcgggttgccgaggccatgagccgggctgacttcgccgaaggtggagttgacgccgagggtgctgctgctccccctccatcgacgtctgagcctgcaggatcggttcgcctgtag

SEQ ID NO: 2996 - DNA, 468 bp, Zea mays
  Peptide Sequence Number=SeqID_46371
atggaggtgcgcggggcgccggacctgaccgacttcatgaacgactggttcttcggcaaggtcggcgcgcagcacagcagcggcgtcggctacgacctgactcgcgagagcagcaagacgccggcatcgtctgcacaggggattgcaacggataaactatcagcggatagtgtctctggacatccatatctgcgacttatattcgatatccgaacccgtacccgttacctgctacgaataaaaaacagtatccacatccgttacccacggttgtggcaacgagagtacgggacttgggcagttgggctggctgtggtccgtgaagtggttccaaattccagtgactccacatgtcaagttactttaaaggtgtcggggaccataattaggggtaccctcaaggctcctaattctcagctggtaacccccatcagcataaagctgcaaaggcctgatgggtgcgattaa

SEQ ID NO: 2997 - DNA, 579 bp, Zea mays
  Peptide Sequence Number=SeqID_46372
atggcgcctcccgttgacgtggccggcccgcgccctaggttgggcgatgtggaggctcctccgaggtcgaggtcgagtctgtcttccgtggccgaggtcgagtccgagcccctaggtcgggcgagacggaggccgttggctgaggccagggcggagttcgagtcctggggtcgggcgaagcggacccaagtccgagccctgggtcgggcggagcagaattcgtcgtcttctggggctgagcccaagtccgagccctgggtcgggcggagcggagttcgtcgtcttccgaggcttagcccgagtccgagccctgggtcgggcggagcggaattcgctgtcttccggggcttagcccgagtccgagccctgggtcgggcggagcggaattcgtcgtcttctggggctgagcccaagtccgagccctgggtcgggcggagcggagttcgccgtcttccggggcttagcccgagtccgagccctgggtcgggcggagcggagcttcctatgaccggtcagtggagcggcgaagtgacggcggtcacttcggctctgtcggctgaaaggcgcgcgtcaggataa

SEQ ID NO: 2998 - DNA, 1272 bp, Zea mays
  Peptide Sequence Number=SeqID_46373
atggcgccccacacgctccctgacgacggtggctctcggcccccttacggaagcaagaggacgtcagcaaggactcgacagccccgacagctgtccttccgccaggctccagcgctcctccgacggccacgacatcacaccaactgggtgtcaaaacctctccggctgccacaacggcatgcactggcaacctggcgatatcggcaacgagatcatgcaacgcgcgtccatcacctcgtcccctatgcgccccgaccccttcgcctcctccgccccctcctcctcatcccctccctacctccaaaccctcgccgcaagtgccgcttccgcgacgcccctactcccgattctcctcatggtcgcgccacctccatctcgcccatctctgccgttcactctcgccaccgctgccacacctccgcgtcctccgcccccgctttcgccgccgatggatccagcgacggtgtcgcccgccttagctccttccttcgccgccagcgcgccgtggtcgccgtcctagcagcaggggaccgtaccgcgtcgaggcccaccaagctcgtgctctctgacgcctccaaaagcgtgagctcgattgtggcggcaatatgctacgcgtggatgctaccaagcaagggggatggccaggctgcagtgccggtggtgaacatgcgccggagcaggatggcttggtgcaggcaggcggcttggctcctgtatcacgttggggtcgatgcatcggcgctgctcttcaccgatgaggttgacatggatgggctaataatggaccagcgagttagcttgcttgtggtggggcaagatgttttgaaatcaaaagctgaggtggcttcagtttgtacaaccctgactcatacctattgcgaggatgcgtatagcttgcttcagaacttggacataaagaaacttctggcattgatctctaactatataatcaagaagttgaaaattcatacattaatggccgttattaacttctacctttcattttgtccagtgatgcttgttcacaatgatcactcctttgtggagtacctgaaaaacacctacagatattcaaccacagatgataatgaggacaggcctcgagagaaaaaacaatcaagctcagcctcagggtcatcccaagatgctaaaaaatcaaattcaactaaccaaaggacaacacgtggaagtggtggaagagcatcagatgaagcttctcgtgggaaaaataagttcttcttgacgaaatggtttggttttggttcaaaatag

SEQ ID NO: 2999 - DNA, 666 bp, Zea mays
  Peptide Sequence Number=SeqID_46374
atgtcgcgcacgaagaatgtgttagcgccagggggaggagatgacgaggaccctcctcgcccctttaggcaggtcaaggggaagactgtgtatttggagcagcaggaaggctgcaagaagcagcgtctggacagagcagcccgagtagcgatagtagcagcagcagccgctgagcaggcagagcgaggagctcagttacagattccttccgatcagattgcctatcgagttcgtcgcctcgcctctcatcctcgctcctccgctcctaccactcccaccactgctaccactctaccacccacttcgcctgctccagtcactcctgcgccatccaccacctcagccatacccactacctccactactccagcttccactgctcctcctcccgcttccgctcctcctatcccacctgctcgcttccgagagcgcgatgagactgaggagtccttcagagctcagatgtctgcacagattgttctgcgagtgcaccggcttctggaccttcctgcatttctgctggccaccggtgctagggatggcagcaggtcgggtaaaatgcgggtaagccgtttacccgcccgccaacatatccgcgcctctagtgcttacccgtgctcgcgagagcttgcgggtaaaattttcgacccgtgcccgtacccgtag

SEQ ID NO: 3000 - DNA, 765 bp, Zea mays
  Peptide Sequence Number=SeqID_46375
atgaggttccgctttgagcgagaggatgttaccattcatgccagccagattcgccagttgtttggattcaacgagtcatcgactcgtcttcatagcttgtgctatggcacctctgatcctcctcgtcgccctcacaacggagttggtcctggtacaactcacatcatggctttgttccgaccgcccttcacagatgggtcgcgatgttcttcgacagatttcaccacagcggccaagtttctatatcagctcatgagatggacgcttctgccacggatgggttacagggaggctgccactcatattcagctttggctccttggtgccttggtctctcactccgagattaacgttgtggatttcctcatttgtgagatcgaggacaccgtactggatggtctacgtgctcgtcgacagctgccgtatgctcactatctctgtcacatcttcgctcagctgattcggccaccacagttccagggtactcttgaggcctctcgcctcctctttggggcctaccgtccagctctagaggatcctgtgccggcacctgctccagtgattaatactcaggccgaggataccacttttcaccagttcgagactcagggcgcagcagtccctgacgatgatgtctttggggttccacctccgcctctgcctcctatgccttcatgcactcacgatcatgaggctgggagttccagtggtgctgcccctgctgcccctcctgccattgaccctgctcttgctacgatcctctag

SEQ ID NO: 3001 - DNA, 552 bp, Zea mays
  Peptide Sequence Number=SeqID_46376
atggcgggcggaaatgagctcgccggagctaaggaacggtggctggccggtgagggtgagtgcggggcgaagagagtccgagccctggggtcgggcggagcggagttcgccgtcttccgggtcttagcccgagtccgagccctggggtcgggcggagcggagttcgccgtcttccgggtcttagcccgagtccgagccctggggtcgggcggagcggagtttcctatggcgcctttggcaaggcctgactgcctgtcagactcactctgtcgagtggcactgcagtcggagtggcgcaggcggcgctgtccttctgtcagactgctttatgctgatgggggttaccagctgagaattaggcgtcttgagggtaggggcttaggctttaggtttttgcttgttcttctgctcgacgccatggtccacatcgtcgagcaccatgatttcatgcccgaggacttcatgctggaggaggaggctgcctcttccacaccgcgggccaccaacctccctgcgcctggtgcagcccctgcggtgcactctgcgcggtag

SEQ ID NO: 3002 - DNA, 462 bp, Zea mays
  Peptide Sequence Number=SeqID_46377
atggccttgctagaccctcccgagtgcttccagtccgaggtggcactcaacttggtgcgcaacctactcggatggggtgcaccggcgttttccggaaggatccatgtcggcgactctccccttggcgatcttgccgccggggagttcgtgctcttcgtctccaacctcccctgtgggttggtgctgccgatctcgtctttcttcctgctgctgctggaggagctcggcctccaacctcatcacttcacaccccacttcatcctccaggcggtcatcttcgcctacctctgcgagatgtccgtgggggcgacgctggacgaaagggtgttgcgcggcgaccttccagaggtggaaagcgagctgagctgcggctccatctttcgcgtgagcttcaccagcgtcccatggtacacctccatgaactggtctagctccaactccatgaggtgggaagcgagctga

SEQ ID NO: 3003 - DNA, 759 bp, Zea mays
  Peptide Sequence Number=SeqID_46378
gcacgccgcctgcaggatggtttggtcgccgcccgccagcggagtggacaggacacattaaatgctgaggcggcacatcgcctaggacgcgcgactcagaggccttacgtcaggctccgcccgctggcttacgtcatgggcagtgggccacgtggcagcatcgggtctccgcctgagaggggagcagaagcgtacacggtatggtccggacacgtgtcggcttcggacccccgcctgaccttgactaaggccccagaattctttgtcccagaatcccgggaccctgccgtgagtggcccggaccccacacagaggggtccagggaccggtgaagaggcgcactaccgcgggcggtggctcgctcctcacgcggcagttcgccttctttgcactcggagaccgacgcccaaggagtatgactcgtgggcccgggcctccgtgtcagaggcgctagtttcggcggagatgaagaggtgcggcggttcgctcctcgcgtggcggtttgccttcttcgcactcggagaccgacgcccaaggagtatggcgcgtgggcccgggcccccgtgtcagaggctggtccactgctttcggcggagatggagaggcacgacggttcgctcctcgcgtggcggttcgccttcttcgcactcggagacccgccacaagctgtatgactttgtgggcccgggcccccatgttagaggctgggtcgccttggtgcgcatcgggcgagattttctgtggcgtctcgaggcgtga

SEQ ID NO: 3004 - DNA, 246 bp, Zea mays
  Peptide Sequence Number=SeqID_46379
atgatgcagggcacctgcgagcatcaagctattaaatgtagctgcgcatcaaatccggctcaaaaacctaacccagagaagcaagctgcagctagcgagtacgcgacggaccacgcggcggtgggtcatgggggacgggagacccgggccacgatggattttagcaaaagtgaactccctgctatcaatggtgatcaggagacatgtgaagtctaccctaaattatataatataactgccatatag

SEQ ID NO: 3005 - DNA, 1546 bp, Zea mays
  Peptide Sequence Number=SeqID_46380
atgacgccggtggttctcagccccttacgacagcaaggagatgtcagcagggtcccagccgcatcgccagctgtgcttcatacagggctcaggcatttctccgacggccacgttatcacgcatacagggctcaggctctcccccgacagccacgttggcatggacccccccgggtccgaaatgccgacaggtcttgaacaagattatggtgcagggtcggatgcggggcagctggctattgtcccgtctcaggtggcggccacttcacctgcggcggcggttggagcgaagggcacttcgcaggacccatggtccaaattctgcgctagcggcaagatttcgtcggtcgccgcctctagggacatggcgggcattgtgtcccagcagctaaagcatgacaagtcgactgtggaaaacaagagccgcaggctggcgaagaggctggcggctgcggaggccgagaatgagggcctcaggcgtcggttggcggaggagaggagggacgcaaacaaagcttgtgctgaggcgcagtccgcgcaagccgaggccaagcttgcgagggtggaggccagtctcgcccgccaacgcgccgaggagatggagactaggctcggcagcctgcgtgaccgcctggacaagacggaggcctcgacgcgtgcagaggttgagcggacgtatactcagcttgtggacgcgtaccgggagctgggtgcgcggaccgcgcccttcgaagcgcccggtcaggaggtgggcctccacttccttggatggctaaaggaggagctggaggtgctcccgaccattgtaacgggcctcatgtcatttgcctcccttgtcacctgcgagggggccgtgaatgccttgtcccgcgaggggtgcgggcacttcgaggccttcgaccagtctgacgaaggcttcgagcgcgaaatcttccaggtcgaggacccgatggcgcatgacgaagaggttgaggaccttagtgatctggacagcacgttgcccgaggcgtcgggggtggaactggcgctgccatcctatgcgggcgagggcccctcggcgacccccgcgtcgactggagctagcgaagaccccgtgccagctactgcgctgacgggtgcagacgcctcgaaggtggtggccgaaccagctgccgaagacctagggccttcgcaggttccgacgtttgggcctgcgcaagcaaccgctgctgacaatactgattttgtggcggcctcaaccgtagtgcctgccgatgataatttgtttggctctgtatctgagtgttttgagtctgatggtgaatctgggagttcattttcttggacggaggagtcctcggatgaaggcttggattattttgttgcgttggatgtggctgcagcggagacttcgccgcgtgtggagggtgccagggatcttcctagtgcgagtactgggtataggcggcgaagggtggtggcgaaacatagtgtgggtgaattttcgcgaagtggtaggcgccgtcgtatggggatggagcgtgaccgtcttcgagtggaccggattg

SEQ ID NO: 3006 - DNA, 369 bp, Zea mays
  Peptide Sequence Number=SeqID_46381
atggccgaggctcgggctacactcccgaggtaccctaggacatttccgagaccagcgggaacgatttgtaatggaatcccaccggagggaggcatcgagccctcggaccctgtcaaaaaggggtcaggtccagcaaatcacctgcaggaaaacagcgccgctcgccccgctccgactgctatgccaaccacccgggagaggctgacaacagccgagtccagcctcaggcgcaacaggaagcttcgcttcgcccgacctcaggctccggcctcgggaggagatcttcgcctcgcccgaccccaagactcggactctgcctcggcctcaggaggaattgcgtcctcgcccgaccccggcctcggcctgtga

SEQ ID NO: 3007 - DNA, 342 bp, Zea mays
  Peptide Sequence Number=SeqID_46382
atgaggttgcggaaaccgaagcagaaggcaggcgcaaatggaagggtaaaggaccaccgccggcccctcttccgggtatataaaggcccgggcgagaaccgttcaaaacttcgcccgaacccaccgcggaattcaaactcgaagggactgggaaaggggatgtttcgaaagggatccttctcggcgaaggaagcgggccccgagcccattactgatcaggggttcgaaggctggcccctcggaagggtttcgacagctgccccagagcactcgggcttcacgcccattactgatcaggggttcgaaggttggcccgtcggaagggttcgacagccgccctag

SEQ ID NO: 3008 - DNA, 558 bp, Zea mays
  Peptide Sequence Number=SeqID_46383
atgaggttgcggaaaccaaagcagaaggcaagcacaaatggcagggtaaagaaccaccgccggcccctcttccggggcaagcgacacctctggcaggcgaagcgggcgccgtttcacctccgtcatgatgaccgcgtcaaaaaagggaccgggaaaggggatatttcgaaaaggatccttctcagtgaaggaaacgggccccgagccctcctactgatcaggggttcgaaggttgtgccctgcggagttcggcaaccgccccagagcactcgggctccgggccctttactgatcaggggttcgaaggctggcccctcggaagggttcgacagccgccccatagcacacagagtcagggatgaccctgggtacgtctgttacatggccgaggctcgggctacgctcccgaggtaccctaggacatttctgagaccagcgggaacgatttgtaatggaatcccaccggagggaggcaccgagcccttggaccctatcgaatgggtccgggtccagcaaatcacctgcaggtacttttggagcgcgcctctgggccactag

SEQ ID NO: 3009 - DNA, 1596 bp, Zea mays
  Peptide Sequence Number=SeqID_46384
atggacgagacgctcgcctcccttcgccgcccgaagcgcggccgcccgccgcggccgcgggaggactacaccgcgtactttgaggatgtggctgaggcgggagggctcgcgccgccccagtccaagcggaagcgcgcggcctccgccgctgccgccgcgtccctggaggacctgccactcatcgatataatcaaacataatggtaggctgatcagccatgctgtcaaaaggctggttgaggattacgaatcaaagaaaaattcagtgacgtttcagattttaacaatgatatttgaggcttgcggcgccaagcatgagatttatcctgactaccttcgcgagtctgatgtggatgacgttgtggtctctcttgtcgacctagctaagaaaggtctggtggaagataattacaactcaaagcataaggatctcaaaaacttcaaagaaaacatggtttctttttgggacagcttagttattgaatgtcagaatggcccactgtttgatgacctcttgttccaaaaaatcaaagactatgtggttgctctgtcatgtgctcctccaagggtatatcgccaagtagcttcaatgattgggctccaacttgtaacatcattcatttctgttgctaagactctcagtggacaacgtgaaaccactcaaaggcagctgaatgcggagaagaagaagcaaagtgatggatcgcttattgaatctctcaacaatagactagcctttacacatgcaaacattacatacttggaggaattgatgcgcaagatattcagcgggttgttcatgcaccgttatcgtgatgttgatcctgagattcggatgtcctgtatcagatccctaggtatttgggttgtctcttatccatcactctttttgcaagatatatatttgaagtatcttgggtggacactaaatgacaagaatgctggagttaggaggacttctgttcttgccttgcaaagtctttatgaagtggatgagaacataccttctcttggtctctttactgagaggttttacaccaggattatccagcttgctgatgatattgatgtttcagtagctgtgtcagctataggtttgatcaagcaattgctgaggcatcaactgttgagtgatgatgatttaggcccactatacgatctgcttattgatgagcctccaatgattaggcgtgcgattgatggggaaaatgaatcttctgaggttcatattggtcgaatgctgcaaatccttagggaattttcagacgacccagtcctcagttcatacgtcattgatgatatttgggatgacatgaaggcgatgagagattggaggtgtatgatttctgtgcttcttgatgaaaatcctgcaattgagcttactgacattgatggaacaaatctagttcgcatgctgcgagcctctgcaaggaaggctgttggggaaagaatagttcctgcagtggacaacagaaagttgtattacaataaaggcgaaaaggtggtggacggccagaaacagaatggaattgcggggcagctgaagacatgggctgcatatgtgatggccagtgttttcttagacggaaaacggtag

SEQ ID NO: 3010 - DNA, 966 bp, Zea mays
  Peptide Sequence Number=SeqID_46385
atggcgccggtgttgggcggcggctccgcgaggacaggagagctgcgacggccaatgtcggtgctgggcggcggctccgcgaggacgagagagctgcgacggccaacgccggtgctggacggtagcttcgcaaggacaggagagggcggcgcccttgaggataggagaggcagagaacgaagtgaggcacgggatgggcaggccacgacaacgacgatgttgggaggcggtctcgcaaggacgagagagggcgagaggcggcttcgcaatgacaggagaggcggagaacgaagcgaacgagagaggaagagagagaagcgaccagggctcatgcggacgctgaagattcgatgctacgttgagatcggacgtctccctttctccgggcgacgtggccgctccgagggaggaaaatgggagcaccgggtgcagctcgacttctcgtcctccatcgtggagcagttccttctgcgaccattccttgccgggatattcttcgacccggtgctcgacaagtcgtcccgcctcttcgagcttgtgttcaagcgcctcagcctaggtgacaacgtcctgtcggaggacgacatcgacgccatcgtggcgcagctcgcctgcccacgagtgttggggtgggggtttgaagagtggagacatgagcgaagaaggcggcgaccacggtgttctcccccgtgggcaccctctccaaacaaggtccttgttgggctcacgcgcctccacgcggccaccaccccagacgacgtcatcctctcgccgccggagacggccacaaggatgtggatgatgggggtgccgaggatgcgaggaggatgggcgcggggtgggggctacacgcgcggtggcatgggcaggcatcgcggcgacgacgctggatctgcccatgccaccgcggatctgttgtggcggcggcagatttggacgacgcgggcgcgattggaccgcaggtag

SEQ ID NO: 3011 - DNA, 150 bp, Zea mays
  Peptide Sequence Number=SeqID_46386
atggaggagaccaaaccatggtacggtggtgcatcggaccggtccgggggtgagtacaacatgccatgccagctcaaccccagagtccatggtggttatggaaacatcggcaagatcctaacaaacttcggtatggaggggcccacataa

SEQ ID NO: 3012 - DNA, 567 bp, Zea mays
  Peptide Sequence Number=SeqID_46387
atggggtctcatgaactgtgtcgacctccaggtggttcacctttccatactgagcacgcggctggccacagttgtttgccccttgctggggtgcattctgtcttgctagggcattggaagctgactgttgctgagatgctttctttgggcaatgcgacgcccagtggccttgttctccacaatggaaacattctcggcctcctcgttgctctggggttgtctgactattctgattatttgctggggcaggaaggcgaggtgcctggttgttttgtctctggtactgacttccacccggttggttgtgctggcggggttcttgcttcagtgccagaaatccttccttactatcatcaggccttctggaacatgatatcgacggaagttgtctctgaactcctcccaagtgatagcttcaaggtcgacataggtggcgaggatgtcatccaagtggtcgtgccggagtggttatcgggcatgactagaaatcatgtgggctttgcccgcgcagttccatcaaacatctctagtaaatctctagcattcaatcaccccatttctcattaa

SEQ ID NO: 3013 - DNA, 276 bp, Zea mays
  Peptide Sequence Number=SeqID_46388
atgaggttgacaatgcgatggccttcggcgtcgttggttacttgtaatccctctgggttgcggacggctggtggtgacaccgagcgctctcaacttgcgaaggcccaggatgatagcttcgtattctgctatgttgtttgtgcatctgtcagattccaaagcgaagctaagttgcgcctgcccccgcatggcaccgtgcgtcatcgcagtggatggtccacacattctctggaggttcttcttgctgctatgtcggcccagtcctgtagacgatga

SEQ ID NO: 3014 - DNA, 549 bp, Zea mays
  Peptide Sequence Number=SeqID_46389
atgacggtgcggctgactccgaccaggtcgagggcagaccaggtgaagacatccttgtttctggagagacaggagatgagtttctctggtggtgttgatatgtgtgcgcgacaactctttggttgtcggctggttgtgcccgagacatcctgtccctggtggcctttgtttctgggcaatctcttgttgggtgcgcacagtcttcaccatgaaataggcaataatatctgcgcggttgctgcacccgtcccaggcctcggccacgcgtgccattgccgcggccctggggggatagtcttgacggcgagcggcttcgccggcggggtgctagttggctatgttgtgcacctgctgctgactgcggttgtcccgtccggagtctgtctccgaaggccttgtccaggttcggctggactacagagggtccttgggctttctctaagactcgaccttacgctgatggagctctttggatctggcatacttctcgaacaactgatagagctcttggatatttttgggtgggtccctgatgcagtgactgtatag

SEQ ID NO: 3015 - DNA, 1311 bp, Zea mays
  Peptide Sequence Number=SeqID_46390
atggcggaagacggcgcatccgcgacacaggctatggtggcgcagacgcgcccaacggggccgtgcaacggcgagggctgcccaggtggtgctgtccatggtggggaaggggggaggagtcgatttggtaaatttgttgaaatccaatttgacaagagcggtaagatatctggtgctgccattagaacttacttgctcgagagatctcgagtttgccaaattaatagtccagagaggaactaccattgcttttacttcctatgtgcagcaccatcagaggatctcaagaagtataagctcggggacccatcgttgtttcactatctcaaccagtcagcttgtattaaagttgatggaatcaatgatgctgaagaataccttgcaacaagaaaagcaatggatactgttggcattactgatcaagaacaggaagctatattccgggttgttgctgctgtgcttcatcttggaaacataaattttacaaaagggagagaagcagattcatccataataaaggatgacaaatctagattccatcttaatacagcaggagagctcttaatgtgtgattgtgagaagttggagaatgccttgataaagagggaaattaatacaccagaaggagtgattaccacaacagttggtccgaattctgctactattagccgggatggtttagcaaagcagatatactctcgattgtttgactggcttgtaaacagaataaatgcatcgataggacaagacccaaactctaacaaactgattggggtacttgatatatatggttttgaaagttttaaaaccaacagttttgaacaactgtgcatcaattttaccaatgaaaaactccagcaacattttaatcagaatgtcttcaaaatggaacaagaggaatacacaagggagcaaattaattggagttacatagagtttgttgacaatcaagatgtacttgacctgattgaaaggaaaccaggtggcattattgcgcttcttgatgaagcctgcatgtttccaaagtccacacacgagacattgtctcagaagctgtacgaaaagttcaagaaccacaaaagatttaccaaaccaaagctttctcgtactgcatttacaattcaacattatgctggagatgtaacatatcaatctgatcaattcctggacaagaacaaggactatgtggtagcagagcatcaggaattacttaatgcttctaagtgctcttttgtatcagggttatttccacaagcaacagaagagaacacaaaatcatcaaaatcctcaattgcaactcgctttaagtag

SEQ ID NO: 3016 - DNA, 567 bp, Zea mays
  Peptide Sequence Number=SeqID_46391
atggatgaaggttgcactcgaccccttccaagtgattcagatatcaaacttgagtaccattggagacacagttctgattcgcccgaagccaacctcggagggagatgcggtatcgatttgcctgaggccaacctcagagggagacatggtttcgattttaccgaggccaacctcggggggagacacagtcatagttcgcctgagtgcagtcacgactcgcccgagcgcagtcatgagtcacccaagcgtagtcccgactcgcctgaggccatctcgggtgactatccgatgctcgggactcaaggcatcatcaccatccacgccgactttcaaggagccgcggagtgctttcgaggggccattcatatggctcacacagcgagaccctcgatggcaccatggacacagagcgacggcacaccagcatgggatgacctcacaattctctcgaacgaagcatccacctctacctatatgcggccgactgaagaaaccaagaggatcaaccttgggttctccaatgagcgcaagactgcggtcatcagatccagcctcaccaacaaatag

SEQ ID NO: 3017 - DNA, 330 bp, Zea mays
  Peptide Sequence Number=SeqID_46392
atggatgtggacgatgtcctgaagctcgatagtgagcgtgccaaggagccacgagaggaccacactgtccatccggtgctaggatgggagcaactaggagatggcatcgacgaggatgtggtcgtcgagggcgtagggctgaagggtgaggaacgcctggtcgtgccagcaagcgtagtgggtggacgtagggttgaggacaacgaagacgagcaaccggattctctggataccaaccacttaagtgtggaggttagcgatgaccgcgacctcgtactccgtgggaggggtagcactggggccaccggagagggttcagcggcggagtag

SEQ ID NO: 3018 - DNA, 1002 bp, Zea mays
  Peptide Sequence Number=SeqID_46393
atggagaagctaacagagccaggatgcctcggtaacgctattggccacagtgcgatactcggccttagcgctggagcacgaccagctcagaagttgcagaggaacaaagaaggccttagtcgaggtgccgcggaggaagcgaagaattttcttggcagcgacgaggtggggctcacgcggggtgtgcatgtgaaggcgcacctgctggaccgcgtaggtgatgtcgagccggtgaaggtgagacatgccagcctgctccagaatgtcgatggtgtagtggcgctggtgaaggaagaggctctaggcgccatgcttcacgccacgggccgcgatcctgcggtgaaggagtacgacactggaggctgtgagcacaacgttgtcgacgtagagaagctggtggaccagagggcgaggcagaggacggtccgaatagtggctggcttgacggcggggctgaggtctcatcgtagtcactccgggatgcagcggatgctgagtgaagcctcgaaggacacaataggccctgtactgatccagagtaccatctgccttgagcttgtgacgaaagatccacttgccggtgatcatgttggtgtcaggaggacactgcaccaagtcccagacggaggagggtacagacgagggagccgtagtagtggtgatcatgagcaccagctggtcaacatgttggataacactgacggattggcttgtgaccatcgggtggacgtggcgggggtcatgatggatggtgacatgatggtgaaccgacggctctcacgagattgggttggggcacgaggtgacgcgtcagaggaggggaccggtggactgcgcgggcgggatcatcgcagcgaactgaaggtggctagggcgatggggccactcatggagcaggtagagacgacggggccacgcacggtgcagaagaggtcgccgagactgagagttaatagttactacataaatgccaagtacagacttactattgacctaaactag

SEQ ID NO: 3019 - DNA, 543 bp, Zea mays
  Peptide Sequence Number=SeqID_46394
atggaggcccaggcccacgcgtcacgcaaccggcgcgccggatgcttcatgcaagcaactgcaccgccacttgcgccaccaccgcgcctcctcgattgcggaaccaataccgcgactcgaggcaacccagcgcacgacccagcggcggtcaatgcggccaaaagtgggccgacagtaatgacggtggcaggcgggcgggagcagcggagaagcgggcaacgcttcgccttcgccgtaataaccgcgccaaaaaagggaccgggaaagggggataccccgaaaaggatccttccccgtgaaggaaccaggctccgagcctccctactgatcagaggttcgaaggctggccccccgaggggttcgacagccgcctcagatcgcgtgggccctacacccactactggtcagaggttcgaaggccggcccccgaagggtttcacggccgcctcaggctactcgggctccgcgcccattactggtcaggggttcgaaggctggcccccgaagggttcacagccgcctcagacgctgagcgagggatga

SEQ ID NO: 3020 - DNA, 294 bp, Zea mays
  Peptide Sequence Number=SeqID_46395
atggccgacgacaaaggaggcaagggcaagcgcgaacagggggaaggaaagcgtaagcgtcctccaacttctccatcggataactttggagactcgaagttctctaaggagaacatctcctctgagggcaacgactctccgccactggctccccccttgtcgtcgtccgattactcggatgactcaatggtgctattggtggccgagcaggcctacatccgatcaatcgagcgagcagggctcgaagtgtcggataactcggaggaggaggactcctcggaggcggactcctag

SEQ ID NO: 3021 - DNA, 231 bp, Zea mays
  Peptide Sequence Number=SeqID_46396
atggatcctaaaggcaagaagaaggtgaccgatgagaaggagaaggagatcctctccggcgataaggaaggaaagactgtcgactccaggtccggcaagaccaagaaggacatgaagaagaagcggatcaagaagataatcttcgtgatcatcttatccttcgtcgtgatcaccatcctagtcaagcttcgtcttgaccatgcttctgtatacccgcaacctgattcctga

SEQ ID NO: 3022 - DNA, 894 bp, Zea mays
  Peptide Sequence Number=SeqID_46397
cttgattcgttgtgtgacaatggtcacaagttcaaccactctgtctcttgccctttcttcctttctcacggggttcaactacggctctcgcacgtcgcgtctcttcccgccaactatagggtgaagctgaatactgatacccatctcaacttcctcccctctaaggcggtgtcaaaggttcacaacatagccaataaaatgaccaagtgttgggttcaacaaaagggcaaagagccaaccgtaggccctctggtctgggcgcaccggactgtccggtgtgccaccggacagtgtccggtgcaccaccggacagtgtccggtacaccaggggactccagctcgaactcgccaccttcgggaatttccaggggctctcgcgctataattcaccggactgtccggtgtacaccggacagtgtccggtgcgccatggagaagcggcctcaggaactcttccgcttcgggaaaagccaacggctcgtccgctataattcaccggacatgtccggtgtgcaccggactgtccggtgtgactccagcgcaacggctatcccgcgccaacggctacctgcagaggcattaaatgcgccgcagcgcgcgcagacgtcaggtttgcccatactggcgcaccggacaatgaacaggagctgtccggtgcgccaccggacatcaagggtggcccacaagtcagaactccaacggtcagattccaacggcactgatgacgtggcaggggcaccggacatgtccggtgtgcaccggactgtccggtgcgccatcgagcagactggctccccaacggccacatttggtggttggggctataaataccccaaccaccccacattcattgccatccaagttttccacttctcaaccacttacaagagctag

SEQ ID NO: 3023 - DNA, 1155 bp, Zea mays
  Peptide Sequence Number=SeqID_46398
gcatccacgggtgctgttctgcccgcatcccgcacgtcgtgctttctccagcacgcagcgctttctccagcacgccgcgctttctccacgtgcttcccccgcctgccatcgccagcgtgctccctctatgtcgcaatcaactccattgcccccgctatcccgccttcccaggaaacccttccatccatggcgcctcaccaaggatctccgcgatcaatttttacggagaaatcgcgcctccccagggtgcctttccatccatggcgtcgttgctgcaagtgcccctacggtccccttgcaccgacggcactccatcgacaaaacggctcttcctccattccaccgtccaccgccaagcgcagacgcaaggcggtgtcttccatgaagaagcccaagccaatgcccaagcaggccaaaccggccgtggtggggatgaagaagaagagggagaccgagaggatggagctcgttgtggacgacgtgtgcgccgaggagcccgacaaggaggagcgaatctctggctggaagcgctccgccatggccaaggagatccaccagaaccaggaggaggaggttgtggctgtgtccaccgccaagcgcagacgcaaggcagcgtcttccgggaagaagcccaagccaacacccaagaaggccaaaccgaccatggtggggatgaagaagaagggggagaccgagagggtggagctcgttgtggacgacgtgtgcgccgaggagcccaacgaggaggagcgtgtctccggccggaagtgctctaccatggctgaggagattcatcagaatcaggaggaggaggaggaggaggttgtggcgctggcgtccattgccagccgtcgaggccgagcgccctcggccaaggtccgtccagatcgcgcgggcgcgtccggcggtgtgtcgcagccgcaggcgggcgctgcgtgcgaaggcgtcgccgcgtcgcccaggcagcgggtacgggctcggcgtggccaggccaccgacccccacagcatcgcggagcggagcggctgcaccgcgctgtccatcgttaagcaggggggcctcatggttgtcgccaacgtcgacgactttcgggttattctggacaccggatccgacgacgacgccatcacgctgtccagctcattgtccacctga

SEQ ID NO: 3024 - DNA, 336 bp, Zea mays
  Peptide Sequence Number=SeqID_46399
atggcccccggcggcgcggcgagcgcggctcgcggccagcacgcagccagcgcgcggccagcctcggcgcggcctgccttatgccagtgcggccagccggctcgtgcgccccgtgctcccatagcccggtcggccgtggccgcgtcaccaccaccgttcgtcggcgtcacacagccctttcacgccgtgcgcaatgccctcgccttaccaagcgacgtcgtgtgcctgcgcagccccttcgccgtgtgtccacgactcaccatcgccaccatcgtgctcggctgttcccaagaatcgacgaaggaccgacgacgcgccatccatgtccgcacgtag

SEQ ID NO: 3025 - DNA, 237 bp, Zea mays
  Peptide Sequence Number=SeqID_46400
atgtgcgcggtgcaccgttacgcgaaggggcagcctattttcctgggccttctagccagctatctcggacacagtcctgaggccctgctgctgcttggtctctcctgggttttcaacgcggcatctgtaggtccgtttgccagagccgccgagatgttgatgggttctctcttctctgcaagtgcagtacagggaatctgcgagcaggagagtgaggttacggttgttgacctttag

SEQ ID NO: 3026 - DNA, 438 bp, Zea mays
  Peptide Sequence Number=SeqID_46401
atgggcaagaacaacaagcgcaagcgtgagccgactcctccatcggaggagtttggtgactcggaatactcggaggaggagttctcctccgagcccgaggggtctccggctcccgtctctcccccggcgttgtccgatgactcggacgactcccaggggatagccgcggaggtctggacgtacatccgggccgtcgagcgcgccgggctcgaaggctcggatgagtcggagtactcctcggatgaggaggactcggacggcggcgacgagggtgaagatgacgacgacgacgacgacgacgacggcgacggcagtggcaggggcggcggcgacggcagtggcaggggcggcggcgacggcagcagggacagcaccaagggcagcagcaggggcagcaccaagggcggcggcggcggcaggggcagggccagtggctag

SEQ ID NO: 3027 - DNA, 261 bp, Zea mays
  Peptide Sequence Number=SeqID_46402
atgtattttgtgaattatggacctccaaaatcgcctccaatggaagttggctgcgagcatacagttcactgtcgggggaagagggactacaacaagttctctgaaatctgcgcttcagcaagggtctccaacccattcccaaatgtagatctcttccctgtcgtctgtgaggatgctctcaagtggaagaccatcgctgccaagtctgtggcgaccaacggggttgaagaggaggaattgttggagaagaaatcaacttaa

SEQ ID NO: 3028 - DNA, 453 bp, Zea mays
  Peptide Sequence Number=SeqID_46403
atgggcaagaacaacaagcgtaagcgtgagccgactcctccatcagaggagtttggcgactcggagtactcggaggaggggttctcctccgagcccgaggggtctccggctcccgtctctcccccggcgtcgtccgatgactcggacgactcccaggggatagccgcggaggtctggacatacatccgggccgtcgagcgcgccgggctcgaaggctcggatgagtcggagtactcctcggatgaggaggactcggacggcggcgaggagggtgaagacgacgacgacgacgacgacgacgatgacgacgacggcggcagcggtggcgggggcgacggcgacggcagaggcggcaccaagggcggcagcggcggcagcggagacagcaccaggggcagcagcaggggcagcacccggggcggcggcggcggcaggggcagggccagtggctag

SEQ ID NO: 3029 - DNA, 240 bp, Zea mays
  Peptide Sequence Number=SeqID_46404
atggcggtggcgcgacggcggtgggcgcggcggtggtcgccacgggcgcgggaggccggcggcgcgacgatggtggaggggcgcggcggtgctgggcgcggtggcgcgacggccgtgggcgcggtggcgcgacggcggtgggcgcgacggtgctcaccgcgggtgcgagcgggtggcggcgcgatggcgggtggcggcgcgagcgggtggcggcgcgacggcgagcgagcgggtgagtga

SEQ ID NO: 3030 - DNA, 180 bp, Zea mays
  Peptide Sequence Number=SeqID_46405
atggggaaatggttaataaatctagaccaggcgctgagcagacagagtcgcccgtctgtgtcgattaaggaccgtactgttgactggcctgttgtggttgagactttgcaactagccacataccttagtatgggacaggtggaggactccgtgggaacggttgacataggcaagggttaa

SEQ ID NO: 3031 - DNA, 447 bp, Zea mays
  Peptide Sequence Number=SeqID_46406
atgcaggcggcatgcaaccgcgccaagtggacacgcttctccgactcccaacgcgccagcatggaggcccaggcccacgcgtcgcgcaacctgcgccggatgctgcatgcaggcaactgcaccgccacttgcgccaccatcgcgcctcttcggttgcgggaccaatgccgcgactcgaggcgacccagcgcacgacccagcggcgccagcctggcgcgacggaaccgggaaagggggataccccgaaaagaatccttccctgtgaaggaaccgggcttcgagccccccctactgatcagaggttcgaaggctggccctctgaggggttcaacagttgcctcagatcgcgtgggccctacacccactactggtcagaggttcgaaggccggccccccgaagggctccacggccgcctcaggctactcgggctccgcgcccattactga

SEQ ID NO: 3032 - DNA, 900 bp, Zea mays
  Peptide Sequence Number=SeqID_46407
atggcccctcctgcgacgtggtcggtccgagccctgggtcgggcgaggcggaggctcctccgaggtcgaggtcgagtctgtcttccgaggtcgaggtcgagtccgagcccctgggtcgggcgaggcggagaccgtcggctgaggccagggctgagccctagggtcgggcaaggcagagttcgtcgtcttccagggccgaggccgagtccaagccctggggtcaggcgaggcagagttcgtcgtcttccggggccgaggccgagtccgagccctggggtcgggcgaggcggggttcgtcgtcttccggggccgagtccgagccctgggtcgggcgaggcggagttcgtcgtcttccagggccgaggccgagtccgagccctgggtcgggcgaggcggagttcgtcgtcttctggggccgaggccgagtccgagccctgtggtcgggcgaggcggagcttcctatggcgcccgaggccggacttggctgctgtcagcctcactctgtcgagtggcacaacagtcgaagtggcgcaagcggcgctgtcttcttgtcaggccgtcggcgtggcgatttggccaaggttgcttcttggcgaaggctgggcctcgggcgagccgaagctttgtgctgattggggttaccagctgagattaggagtcttgggggtacccctaattatggtccccgacagtagctaccgagcctcgaagggagtgttaatactcgcttggaggcttttgtcgcactttttttgcaaggggaccggcctttctcggttgcgttttgttccggtgggtgcgcgcgagcgcacccgccggggtgtagcccccgaggcctcggaggagtggtttgactccttcgaggtcttaatgcgtttcgtgatgctttggccggtctag

SEQ ID NO: 3033 - DNA, 678 bp, Zea mays
  Peptide Sequence Number=SeqID_46408
atgggtcagcgcgagacggagcgcgaaggggggaaaaaccggagggagacaggcgtaaaaggggaaacccgcggccttcgtgtttgtcccgcgcccaggtcgggtgcgcttgcagtagggggttacaagcgtccgcgtgggagggagcgagaggcctgcacgcgccgtcccgtcctccccacgcggccaaccctctgtaagagggccctggaccttccttttataggcgtaaggagagggtccaggtgtacaatgggagatgtagcgccctgggtcggcgaggcggaggctcctctgaggtcgaggtcgagtctgtcttccgaggtcgaggtcgagtccgagcccctgggtcgggcgaggcggagaccgtcggctgaggctagggccgagccctggggtcgggcgaggcggagttcgtcatcttccagggccgaggccgagtccgagccctggggtcaggcgaggcggagttcgtcgtcttccggtgtcgaggccgagtccgagccctgggtcgggcgaggcagagttcatcgtcttctggggccgagtccgagccctgggtcgggcaaggcggagttcgtcatcttccggggccgaggccgaggccgagtccgagccctgggtcgggcgaggcggagttcgtcgtcttccggggccgaggccgagtccgagccctag

SEQ ID NO: 3034 - DNA, 444 bp, Zea mays
  Peptide Sequence Number=SeqID_46409
atggcgccccgcgtgctccatgacgacggcggctctcagcccccttacggaagcaaggagacgtcaggaccccccggggtcgaaacgccgacaataatgatcaagaaaaggaagatgatcaagaagaacagggtcaaagaccgcctcacccaagagtccaccaagcgatacaaagagatcaccccggtggaggatgcattaagagattcagattatgtgttggcaatacaagaggagctcaacaacttcacgaggaatgaggatgccaagcccatcaagacacccatgggaaccaatgggcatctcgaccttgacatgagaggtaaatccatagatcaaaagggggacctcatggtcgtcgccaacgccggcgactatcgggttgttatgggcaccacatccgacaacggcgccgtcacatcgtccagctcatcatccacttga

SEQ ID NO: 3035 - DNA, 708 bp, Zea mays
  Peptide Sequence Number=SeqID_46410
atgaaggctggggagcaccgggaggataaggagggggaatgttttgtccggtttggacatggcggtggtctgactccttccagtataaccgctaagaaaaaggagatcggcctcctagaactagtaattgtatcacatgagtcccagaggatctggggcgctttaggtggtatcagagctgttaggagccagccagagtatgatggtcgtgaattcatcgagcatggcacagagaagtgtgtcgtgactgtttacattggatccagtctgcaccatgtggaatggagtgtcactgctgctgggcacagattcagagacacctgccaagttgtcgcccacaaggcattgagggccctgtgtccgatctatgaagaagaagtggccgacaccccgctcagattctttctgcactttcagagaaaccgtccagtttggatggccaggatgcgtgcattggaagggaagcaactgcttgaggacgaccccatagtcgtgtacctcactgcatacctgctcaccctggatgcgcagtatgatttcttggctcggcaccaccgtcagatgattgctcgagcagaagatgcagagaagcgcaactgtaagctccatgtggatctcaccatagctcaagctcgtgtagctgccttggaaagtagtgaagccattgctgttgaagccctaaagcaagccaaggatgagcatgtctag

SEQ ID NO: 3036 - DNA, 267 bp, Zea mays
  Peptide Sequence Number=SeqID_46411
atgactgatatatacaacaactacaagagatccaataataatagattgttgcgctatatttatcatccgcaacagtggccatcaaactccatgaaagtgctccaaggtaggcaggaacctgttgagggcgagggtggcggcgatgtggctagggcgcactccgcgatcgacgaggccggtggcaaggctctgcacgcccccgtcgaactccacactggtgaggcgtcgaccgcctgggccggcagcgacgacgacagtgacaagtga

SEQ ID NO: 3037 - DNA, 144 bp, Zea mays
  Peptide Sequence Number=SeqID_46412
atggggaggctagaaccacaagcagaaagggaatcatggctcatgggttgtcattggtgcaatctatgctcaggtaaagaagaagaaattattatcgaggaggacctccaggagttccaggacttcgatgagttcgaggattag

SEQ ID NO: 3038 - DNA, 204 bp, Zea mays
  Peptide Sequence Number=SeqID_46413
atggctcgccttaacgccttaataaccttgggctcagccatggtgatggagtggtcggtggaggcggtgggcgtggaaggggatggtggagggcaagggtgggttgtcaagcgtctcgacgcccaacgtcgctggaccgcggctacgcagttcgtagtcgcgctccagaccttcaccgtgagggattcctcaccggtggcttga

SEQ ID NO: 3039 - DNA, 174 bp, Zea mays
  Peptide Sequence Number=SeqID_46414
atggggagtagctctctccgggcagaatgggaatcacagcttgtgggtggttatgagattgatggttttggttatgattatggtgctggttgtcagcattgcaaccactgctcaggcgaagatgaagccgtggaaggagacttccaggagttccaagattacgacgagttctag

SEQ ID NO: 3040 - DNA, 468 bp, Zea mays
  Peptide Sequence Number=SeqID_46415
atgggcaagagtaacaaacgcaagcgtgagccgactcctccgtcggaggacttcggcgactcggaatactcggaggaggagttctcctccgagtccgagggatctccggctcccgtctctccctcggcgtcgtctgatgattcagacgactcccaggggattgccgcggaagtctggacgtacatccgggccgtcgagcgctccgggctcgagggctcggatgagtctgagttctcctcggacgaggaggactcggacggcggcgaggacgaagatgatgacgacgacgacggcgacgacgacgacggtggcgatggtgacggtgacggcaacggcagcgacgggggcagcggcggcaagggcagcaccagaggcggcagcagcacgggcagcaccagaggcggcagcagcaagggcagcaccagggacagcggcggcaagggcagcagcagcaaggccagtggctaa

SEQ ID NO: 3041 - DNA, 1401 bp, Zea mays
  Peptide Sequence Number=SeqID_46416
atgaggatgatccgcaaaattaatctaatgggtgtgcccctgcaggtcgaagatcctctctttaacattgacaggaaaaagcaaagaaagagaggatgcttcgcatgcggggagaagggccacttcagggacaactgtccaactatggccgaacccaaaaaggagaggagcaaaggcaaggcgctaacaagtgtcagaacttgggatgagtcttcaagtgatgatgaacctccaaggacgcgcagccaccgatcctcatcacgctcatcacggtcatcacacaaatgccttatggcaagaggtaaaatgagtattccatcctctagtgatgatagtagtagtgatgatgatggtgaggggaagccctccgtagatgaacttgcggaagccgttaaatttttccaggatgtttgcactaagcaaaaagctcaatgtaaaactttgaaaaataggttgattagctcccaaaatgattataaaggtttgctagaaaaaattgaaacttttgcatacttaaattgtgagctatcaactaaaattgagctattagagtctagtgctccatccactgctactgatgatggtcttattaaaaagaatgaaaaacttaaggctaagttagctagctcccaagaagctattgaaaatttgctagagaaaatggaaactcttagcatacacaataatgagctaactaccaagctagagaacattagtagcacctcagcagcatctttagttgaaatacctgaaattattaagaaagatgcttctacttcctgctttgatttaattgatgattctaagccctgcaaccaagttcttgttgagaatattgttgtagaaacatgttcagatgaggttgcaaaggaaaatgaacaattaaagcaagaagtggctcgccttggcaaggccttgtatgacaagaaaggcaaagccaaacaaatccgacctccacaggataacaccactgcgggagtgaacaagcttatagagggagaaactgtgatttgtaggctgtgccaaagggaagtccataagtctttccaatgcaaggcgatgaccggggataaacaaaggcaagagctcaagcaaaatctccaacacctacatcaaaaaggtggacaaaaaggctgctacaccatatttgatcaagaagaaaaagaatggaaaggtgatagcaatcaaggccaacaagcaagccaacaaagaaaagggagccaaacgcatctgggtgccaaaggaaataatttcaaccatgaaaagcaccaagaaggtttggatcccgaaagggaagtgagtagaccaaaggtcaaacgggaaatttggagacttggcaaattagggatgtatatcatgggatacatcatattggaccaagtttattgccaagtgggttag

SEQ ID NO: 3042 - DNA, 297 bp, Zea mays
  Peptide Sequence Number=SeqID_46417
atggcgcttcctgttgacgtggccggcctgcgccctaggttgggcgacgtggaggctcctccaaagccgaggtcgagtctgtcttctatggccgaggccgagtccgagcccctgggtcgggcgaggcggaggttgttcggcagaggccagggcggagtccgagccctggggtcgggcgaagcggacccgagtctgagccctgggtcgggcggagcggagttcgccgtcttccgggacttagcccgagtccgagccctgggtcaggcggagcggagttcgccgtcttccgggacttag

SEQ ID NO: 3043 - DNA, 399 bp, Zea mays
  Peptide Sequence Number=SeqID_46418
atgtccggtgcaccagaggactccaactccaaactgctcaccttcgggaaattcgagaggcgactccgctataattcaccggactgtccggtgtacaccggacatgtccggtgctccaaggaagagcggcctccgaaactcgccagcctcgggaattcacttcagctgctccgctataattcaccggactgtccgaggtcaggcacgcccatgctggcgcaccggacaatctacagtgcatgtccggtgcgccaccggacatccaggcgggcccagaggacagagctccaacggtcggaacccaacggctttggtgacgtggctgtcgcaccggacatgtccggtgtgcaccggactgtccggtgcgccatcgaacagacagcctcaccaaacggctag

SEQ ID NO: 3044 - DNA, 117 bp, Zea mays
  Peptide Sequence Number=SeqID_46419
atgagggtggaatggggtggcaatgagattgatggttctggttatgattatggtattggagaagatgaagctgtggaaggagacttccaggagttccaagactacgacgagttctag

SEQ ID NO: 3045 - DNA, 249 bp, Zea mays
  Peptide Sequence Number=SeqID_46420
atgaacttaggaacacgcgaggatttagagtggttcgggccgccggagcgtaataccctactccactgcgtgttggattgctgtcaaagcttgagagctgagagtctaagtctaagttcggggaagcttccatggcaacacataagtgataatggacacagtgcaccttgcagcacgggcgtactgtttggcaatggactggacaggcacgccgcctgcaggatggcctggacgccacctgccagctga

SEQ ID NO: 3046 - DNA, 738 bp, Zea mays
  Peptide Sequence Number=SeqID_46421
atggccatccaagttccggccgcacctcccgaaaaagtacgacggtacgtcaaacccgtcggaattcctgcaggtgtacgtcaccgctatcacaacagcaggtggaaacaccgctgtgatggcgacatattttcatgtcgccttgtctgggcctgcccggacttggctcatgaacctcgccccagggtcaatctactcctgagaagagctctgcgcgcggttcgttgcgaacttcgccagcgcttaccagcaacacggtgtggaggcccacctccacgcagtgaggcaagagcccggagagactctccggacatcatctcccgcttcaccaaggtgcgaggtaccttcccacggggcggtaaaaagaaaaagaagaaggaccgcgaccaccagaagttgtggtccaccgctctagtcgtcgcagccgcgactgggggccgaggcgaccgcaacaaacgcccacgaccgaagagcggtaacagcggctcatgccctgtgcaccacaacggtcgccacagcgccgtggagtgtcgcgagatcatcgacctcgtgaaacgcgtcagcgagcgacacgagcagtcttccaaggacggctccccacctcgtcgccgacctggcatggaaagggtcgacgacggcgaggtggccgcggctgaacgggaccttgggtatcagtcacccaagggggacctgaaggatgtcttcgccggagactcctactccggtggcgacaactag

SEQ ID NO: 3047 - DNA, 885 bp, Zea mays
  Peptide Sequence Number=SeqID_46422
atggtgtgccgcctacttggatgggatgcgccggtgttcggtggaaggatttgcgccggcgccatcctccccggcgaacttgccgccagagagttcgtgctctttttgtcttcaacctccctagcgggctggtaccgccgatcttgcctttcctctgctggaggtgcacggccccgtgggggcggcgctcttccaccggtgcttggcgtcaaggatgttcatcagccttgcggtggtggagagcgagctgggccacgactctgtctttcacatgagctggtgacccgcatcttcctccagcattcggaggaaaaggatgatcaccagccttgtgaaggttggaggcgaacttcggctacgaggctccgggcagaccgcaagcgccgtctgtcgccgcgcttccagctccatggcttggatggtcttgtcctcacccttgtaggagggcgggggcgagggcctcttcgccatggtgcacgtgctgaggtggccatggcgcacgcgctgaggtggccgccgtcgctggcaagccgccgaccaacaggccgggcttatgagggcggacctcaccgcgctggactaggtcctgatcctaggttcccatctgcgtttgatgacggagtcctcgtcctcatgctaaagccatttttgcatggacttgttagaagcctcgacccgtggggagtccagaagggtttccgggcgaaggtcccgttcagccgcggccacctcgccgtcgtcgaccctttccatgccaggtcggcgacgaggtggggagccgtccttggaagactgctcgtgtcgctcgctgacgcgtttcacgaggtcgatgatctcgcgacactccacggcgctgtggcgaccgttgtggtgcacagggcatga

SEQ ID NO: 3048 - DNA, 432 bp, Zea mays
  Peptide Sequence Number=SeqID_46423
atggatgctcaatatgatgtgactcaagaatggcttgataggatgaagataacaaggaaagggcttcgaggaactaagcgaaggtgccaaaggttcatctataactatactaaatcaactgtccggaataccgtagattattccggacaggagaagctttttggaaaaacaggccaagcgcggaccgtccgggcccttgcggcggaccgtccgcgacacaaggatgaccctcggacagaaccaatgcaaaaacacaagtttccactacagactgtccggaggaaaagcaaagaccgtccgagccctcgcgcggaccgtccggcctcaggcgcggaccgtccggtcggtaagaaaccgaaaaacccgaaggggcggaccgtccgcaccaggagggcggaccgtccgcgctcggcagaaaggcccaacggctag

SEQ ID NO: 3049 - DNA, 522 bp, Zea mays
  Peptide Sequence Number=SeqID_46424
atgtcttctttctcccttaagcgtcgtgtcttcccatcttccaagcccccggatgggggcccggctgcttccctccgccggcggtcacctgagatggcgacctccgacttgatgcctcaaggattttcatcaccagggctggggaggggagtgcgcagagttgaggtcggcccccgcgtgggcggcggcccgccccttcactcagtgatggggggagaagcgggcattgcccgtggcgtccggcagctgcagcgtgcctggtcttcagccgcgagtggcttcggggccacttgcggcgccggcgtctgccacggcagctggaagaggttcttccgccggcgcggcggccgggaccggccacgggctgacctccaacttctacggccttctgcccgtccttgcctcacgagttttggcatgggcgggggcctcctggcagcggcatccaccctgaggtcagcgttgccgctgttcggccccccggagcagaagtcgtcgtcgtcgccgctgctggagcagtga

SEQ ID NO: 3050 - DNA, 130 bp, Zea mays
  Peptide Sequence Number=SeqID_46425
atgggggaaatatctggcatgaccgccgtctgggatatgcgggggtggaatgcgctcagatcccgccactggctgttgacgctggggcgcgccgctcgtccaacagtgctgcgtccgcgcaggagagcag

SEQ ID NO: 3051 - DNA, 735 bp, Zea mays
  Peptide Sequence Number=SeqID_46426
atggcggagccggccggcaaggcccgggagcggcgggtgtcgatcgaggaggtggcgaagaagctgtccctgtggcacacggccacgttccggcccatcctgacccacgccgagctggagcccatcctgtgtgcggcgggcttcgtggcgctgccgtcggcaccagcgacgcatcagaagcaggacgagcggcccggcgtggcgtggcgcgagtacgccttcctcggcggcggcaatgcgagccctgcggcggcggccccgcggcgctggctgggcccgcgcccccgcctcccgtacccgcgcgtcgacggcctccacctcaagacgtaccaggccttcctcggcgccgtcgaggcctacctcggcgcccaccgcgtctccaacctcttccacgtcaggctgatgccggtgacgagcccgcacgaccgcgcgttcgacaaggtgttccggccgatgcggaactgcagcccggaggaggacgggctcatcgtgtaccgggagggcaccctggacgacctcaccgtggagacgtgcagccgccacgccgccaccggggacgacggcgccgccggccacgtcatcccggggatcagctgcagcgacctcggctgcctccgcaaggtggacggcaactgcctcgaggagggatgcaaaagccgccgcggcactgcccgcggccatgacgacgacttcttcgtcgtccagctcaaggatctttttcccagctactactga

SEQ ID NO: 3052 - DNA, 201 bp, Zea mays
  Peptide Sequence Number=SeqID_46427
atggccgggctggcgcgctgccgagcggagagggagggagccagggcgggcgcgagcgccacggccgcgccatggctggccgcaccgagccagacgggccacgcgcgtcggacgggcgcgagggggagggagccgcgccgggacgttcgtgccgggccgaacagcgccgtggccggggaggatgggaagaagaggggtgag

SEQ ID NO: 3053 - DNA, 1188 bp, Zea mays
  Peptide Sequence Number=SeqID_46428
atggaggaccaagccatccctttcgccagagttcctgcccgtattggacaggatcaatgggtggttatgggtggcttgacatcgatgcacgtgaggagaccgcgcctgtgctgctggttcacaggcccgaacgacatcgacaggatccagcgcgggccgggcaccgatctgtcctgggatgagctggcagttcttgtgggagggattactggggaaactttcgtccctgagtccctgatactcccccagaacatccctacgctctgcgacgacccaggcctgaggacgtcgatcttggccacgctgctgaccctcgacgagagcggcgtggcggttcgccagaccggtggctgggacccccaccgtgggatccggatctccgatgcaccggctggaggtccccagcccaccagtgtggctcgcagcgccactcccgccgtggcccccagccccttggacaagggcaaaggggctgcaagcggtgcctccaccggtgcccccgccccgggggcaccagcagcagcaatagcagcagcaggatcggtgatcgcctcgcttccagggtcactggaaggtccagggccccaagtcacgcctcctccgccagataccaggcccaccgacgggcctggctctcagcagcaagaatctgttgggggtgatgccggcggtccatccccggctgctgccaagacagcgcctcatgtcctggccggggaagcagcgccaccagcatcgggtggcgtcgcagcggcggaggaggccctagctgggggatccgcgcccccttcgggcactgggggtgacgcaggaggcgcgtccagctccaaccccccgcctgcttcagaggagatggaggtggggttcgggcgacgactccggtctcgtgccgagcaagaagctgcgccaatccccctcccccgtatgctgtcccgtgcccaccaggtccttagtgacactggggcagcaattttgcgggagtgggaggcgcttgaggctgagcaccagcgcctgagcgacaggcgcacccaactggaggagcgcaccaagacggcatcccaccagttcatctccgagcggtcccaactcgagcgggaccgcaaggagtacaagaggcacctccagaaggtgtgtgccagggagctagaggcctcccggagggaaaagaaggtggccaggagggagtag

SEQ ID NO: 3054 - DNA, 528 bp, Zea mays
  Peptide Sequence Number=SeqID_46429
atggttcagattgtcgagcaccgcgacttgtctcctgaggacttcctgatggaggaaggggcaacatcttctatgccacggggctcttactgccctgcgcctggtgctgctgctatgcacactgcgcagcagcacacgctcgcgcagacatctagggctccgtcgggggctgctcatggtggggcgttgtctgcagccagggagttactgcgcaacccaccaagttccacggcctcaccggaatgcatgagacagtggcgcgaagatgttgaccgtctcctcggcatggcacattctggttcggccaggcccaggcctcggtcattccggcgtcaacgcgaggtgtcggcatctgtgtgctcaccctcagtgaggggtgcacggactgacgacctgcgggtagaactcaactgctggcgtgcgggcgaggatgctcgaatatctctggagaaggctgacgatctgcgggcagagctcaaccgtaggcgcgggcgaggatgcccgagtctctctggagaggacgcgtga

SEQ ID NO: 3055 - DNA, 528 bp, Zea mays
  Peptide Sequence Number=SeqID_46430
atggcactgggatcactgagttcggagaaatcccaactgaagtcggggtcgtcctcttcctcagaacccgcgggtccggaggttgagacaaccgtcagtcggtcccaagttgaccatatatggtaccctggaaggtcaggatatgccctcgcgaaagcgctcaccgaagcggggtcacttggtggatcgaagctgaatctaaagggaacagggtggaaaactgatgttacctcctggttgatggacggtggtgaagtcgcatcggggacagaatgcaccgttatctcaggggaggagtaccatgtcgtagctgccatcgcgggacatgaactcgagactcccaaagcggagcaccggcccgggctgaagaggctgccgaagattgtccatctggaacttaacgggaaggtatttgtcaacacgcagcagtcccctacctggcgcgccaactgtcagtgtttcgaacccacgaggacccttaaccgaccagtgaatttgtcgctgcgtgtccctgcccagatgggttga

SEQ ID NO: 3056 - DNA, 1476 bp, Zea mays
  Peptide Sequence Number=SeqID_46431
atggctgaaaggtaccaactcccacggagttgcgttcctccaacgacgaggcggaaagacaacggatatcccccatccgggggcttggaaggtggaaagacacgatgcataagggagcgcgaagacatggttgccttccaagggagtcaccccccttttaaaggcggctctccctacttgcgtccccagccgtcgtgggctgagtctcctccaacacactccaaggtcctcccctacggcgcgggggctgggtcccacacgtcatgcaagccggctcagagcggaagaagccaaaccgccgtgcgcggtgcgtacaaccgcccagcggttacaagcgactctccacttttgcccagaccaacgggcgaaaggggtgggcaaccatgcaggcggcacgcaaccgcgccaagtgggcgcgcttctccgactcccaacacgcccagcatggaggcccaggcccacgcgtcatgcaaccgtcgcgccaaatgcttcgtgcatgcaactgcaccgccacttgcgccactacctcgcctcctcgactgcggaaccaacaccgcgactcgaggcgacccagcgcgcgacccagcaatgccagcctggcgcgacggtcaatgcggccaaaagtgggccagcagtaatggcggtggcaggcgggcaggagcagcggccacgtccgggacaggcggcgcctctggcaggagaagcgggcgacgcttcgccttcgccataatgaccgcatcaaaaaagaggctcgggggctgctctcgcaaacccggctccggccgaaccgttgacagcgtcaacataccagcccgagaacttgggacccgaccgtacacccgggctacggccagctcacatgaaggaacgaccagaccagccgaagcattacgcgaggcattaagacctcggaggagtgaaaccactcctccgaggcctcgggggctacacccggcgggtgcgctcgcgcgcacccaccggaacaaaacgcaaccgagaaaggctggtccccttgcaaaaaagtgcgacaaaagcctccaagcgagtgctaacactccctttgaggctcgggggctactgtcggggaccataattaggggtaccctcaaggctcctaattctcagctggagcatttaatgcaaaggtggcctgacacctttgtcctgacgcgcgccccccagagccgaagtgaccgtcgtcacttcgccgctccactgaccagcctgacagaaagacagcgccgcctgcgccgctccgactgcggtgccactcaacagagtgaggctgacaggcggtcaggcccggtcgaaggcaccataggaagcttcgcttcgcccgacccagggctcggacacgggctaaagtcccggaagacggcgaactccgctccgcccgacccagggctcggacacgggctaagtcccggaagacgacgaactctgctccgcccgacccagggctcggacacgggctaa

SEQ ID NO: 3057 - DNA, 1188 bp, Zea mays
  Peptide Sequence Number=SeqID_46432
atggagagatctcaaccgcagcaccagcagtctcctccgtcgccgtcgtcctcctcgtcctgcgtctccgcggacaccgtcctcgtccctccgggaaagaggcggcggagggcggcgacagccaaggccaataagagggcccgcaaggacccctctgatcctcctcccgccgccgggaagaggagctccgtatacagaggagtcaccaggcacaggtggacgggcaggttcgaggcgcatctctgggacaagcactgcctcgccgcgctccacaacaagaagaaaggcaggcaaggggcgtacgacggcgaggaggcagcggctcgtgcctatgaccttgcagctctcaagtactggggtcctgaggctctgctcaacttccctgtggaggattactccagcgagatgccggagatggaggcagcgtcccgggaggagtacctggcctccctccgccgcaggagcagcggcttctccaggggggtctccaagtacagaggcgtcgccaggcatcaccacaacgggagatgggaggcacggatcgggcgagttttagggaacaagtacctctacttgggaacattcgacaagagttctgtttctgcagacactcaagaagaggcagccaaggcctatgatcttgcggccatcgaataccgaggtgccaatgctgtaaccaacttcgacatcagctgctacctggaccacccactgttcctggcgcagctccagcaggagcagccacaggtggtgccagcgctcgaccaagaacctcaggctgatcagagagaacctgaaaccacagcccaagagcctgtgtcaagccaagccaagacaccggcggatgacaatgcagagcctgatgacatcgcggagcccctcatcacggtcgacaacagcgtcgaggagagcttatggagtccttgcatggattatgagctagacaccatgtcgagatctaactttggcagctcgatcaacctgagcgagtggttcactgacgcagacttcgacagcgacttgggatgcctgttcgacgggcgctctgcagttgatggaggaagcaagggtggcgtaggtgtggcggatttcagtttgtttgaagcaggtgatggtcagctgaaggatgttctttcggatatggaagaggggatacaacctccaacgataatcagtgtgtgcaattga

SEQ ID NO: 3058 - DNA, 978 bp, Zea mays
  Peptide Sequence Number=SeqID_46433
atggagattgctgcacctgcgcaggcggaaagaaccccatgcccgatgactgaaagaatccagttgatgttggtgattgctgtgccgcctgaggagactgctgctggggctggctctgagctggtggaagtggaggtggaggagtattttgaccgaactgttgcaggagcggtggcagtagagacggcaatggcggtggaggtggtgggaatgagcctggagctggagctggcctcttatcaatgtggaaacctggtggtcctccagagaattccccagaagatgatccaccatttatggaagcagcttgctcagcagcaaaagatgagagaatggaggtcagcacctgcacagagccctgggctctgtataactattggaagccccgaccacccaccgaccagggcccacgatcccacccatgcgctcgcagttatccagtcccacgccgccactataaaaacacccccacgccgccagggattaggttttagcggcggcggcggttccctcgggcgtgcgagcgccggtgatcctgggggccagcagcggtgccgccctgaggcaggcgaccgacgacggcgctccaccaggaacgagcgacagcgacgctcccgaggcgggcgcgcaagcggcgacggcgttctcgaagcggacggacggcggcagcgcaccctaggcccaatggcaacggcgtttgtcccgtccgtctctgcgatggccaccgccgatgtcgctccagcgtctgaagcgccgtcccctgcgccaaaggccaacaacagcaggaaggcggtggtgcttgggatgactgggtacgagctgctcaagcgcgtcaaggagtcggtggcgctcagggacatcctcgtcgtcatcatgtcgtcggagaacgtgcccacctgcatcatcccgctgcctggaggaattcgacccgcgcctcgccgtaacttaggccctattcgtcgttacgaaataaattga

SEQ ID NO: 3059 - DNA, 108 bp, Zea mays
  Peptide Sequence Number=SeqID_46434
atggcggcggcggcggctttcgtcgtcgtcgttgtccaactccaagcatcatcaggagtttcgttcgccctgcagtctccgttccgtgatgagctgctcgccgtttga

SEQ ID NO: 3060 - DNA, 1275 bp, Zea mays
  Peptide Sequence Number=SeqID_46435
atgatgaccgcctcaaaaaaaggatcgggaaaggggacatttcgaaggagcccttcacagcaaaagaaacgggccccgagccctttactgatcaggggttcgaaggctggcccctcgaagggattcgacagctgccctagaacacgcagagtcagggatgaccctgggtacgtccgttacatggccaaggctcgggctacgctcccgaggtaccctaagacattttcgagaccagcgggaacgatttgtaatggaatcccaccgaagggaggcaccaagccctcggaccctatcgaatgggtccgggtccagcaaatcacctgcagggatcacctgacaccttatcctgacacacgtgcctcagtcggcaagcctcgggcgcaacagggagctccgcctcgcccgaccctaggcctcggcctcagcctcggcctcgagagaaggtctccgcctcgctcgaccccaggcctcggcctgccgaatccagcccaccgccgcggccgctcctcccctctcgcgcccgtgacttccttcccctcggcccacctccggcccactccgcgttcacgcccgcgcacactgacgcaccgtccccactcgtcagtccccaccccctcgccctcgctcgcgaccgctccccctggcaaactggccccaccggtcagccgccccgtcgtcctcgccgcgtacggcttcaccgcggtcacctccggccaccgtcctcctcctcgccccgtcccctcacccatccccttgccgcacaggaaagtttggcaccgtcccgtcctcgccgcagcgcccacgtccatgcacggcaccgcccaccgtgcggtctcgtcgtcgccgctgtgcggcattaattctagcgttgtgcacctcaccggcgtccgccgagctccaccgctccccttccctcgggcgcctataaaagggtcgcctcgagcacttccttgccccgcaccgacctcagccacccctcttccccctcgcctgagctcagtcacgaaagcgccgccgtcttcttcccctctggtaagccttccccctcttctcccttcccctctggtggttcagcgagaaattagaaaggcttatcagcttcgccacaccgacgtgaacttgggacaccactcccctaccctaatctccgcccaaacctcgtcgtcgacgactcccaccatggagctccgccacctccccgcggtcagccccctcccggccccctctagccaaattgagcccgcccctaagtttgccagcccctcctcgtgctag

SEQ ID NO: 3061 - DNA, 204 bp, Zea mays
  Peptide Sequence Number=SeqID_46436
atggcccaagggcacatttccctttcagaagtcgcgtcggagacggactgcaccgttatctcaggtacaaggctaacgcccagcaagtccttcgcgagtgtgctggcgtcatctgtccgcttggggctggcatgttgcggggaaacgacacccgtcgttgtctcagcagacccctacctggcgcgcgagctgtcggcgttttga

SEQ ID NO: 3062 - DNA, 324 bp, Zea mays
  Peptide Sequence Number=SeqID_46437
atgccggttactacgtgcgagaagctacaccgccacttgcgccagtaccgcgccttctcgactgagaaccagtgccgcgactcgaggcgaccctgcgcatggcccaacggtgccaaccgagcacatcgatcacgggtcagccagccgcgggagaaggcgcgacggacaggcggcacctttggcaggcgaagcaggcgacgcttcacctccgccataatgaccgcgtcaaaaaagggaccgggaaaggggatactccgaaagggatccttctccgtgaaggaagcgggccccgagccccctactgataagaggttcgaaggctga

SEQ ID NO: 3063 - DNA, 534 bp, Zea mays
  Peptide Sequence Number=SeqID_46438
atggggggcgcggagcccggttccttcgcggagaaggatccctctcgggcaactggcgtgccagttgctcgacgcgtgggcctgggccccaggctggcgtgtcagaagttggagaagcgcgtccatctggcgcggttgcatgccgcctgcatggctgctcgccccttctgcccgttggtctgggcggaaatgggggggtcgcctgggagggccttggagcgtgttggagaagactcggcccgcggcgcctgggggcgcacgggtaaccggttgagccgcctgctcgggccggattcctggaggagcccctggacctcggcgtcgcccgaggctgggtcgggctttgctgtagacgtcgtcgatgccgagggtgctacggctcccctcggcgtgaagacccgagcctgcaggatcagatcgtcttgtagcgtgtgttttctgcggccgccgaggccagaagaacacgccctcgccgcgcttgcgaagctgcgtccttttttcctcttgtttcgagcatctggactctgtcggtaa

SEQ ID NO: 3064 - DNA, 1122 bp, Zea mays
  Peptide Sequence Number=SeqID_46439
atggggagcacccgcgttgcctttgtcttgctgctgttggaggagcgcaacctcacggaggttggcacccttcagccatcgctcggcttcaaggattttcatcagacagctcggctgcattacctcaccaatgatcacacaggatgcggggggcaagctgagccggagttctacctcccgcatgggccggcgggccacctcttccttcaacattcaggggagagggcgctcaccggcctagcggaggggcgaactttgacaatgcggggccggtcggccgcaagcgtcgtcagctccaacatgcctggctcgctggctcagctagctcagctggctctggcgctgcttccggtgccacctcccaccgctggggcggagctgggggtcactcgcggacagacctccggctctttggctttgacggcttgtcctcgcccctcgtgtggggacatgggcaagggcctttccacagcagtatttgccctgaggtcattgctgctgctgtttagccgcctgaggcggaggtcgttggcgctgctgctgcagaggtcgccggcgagccacccggagtttgtcgtcccgcaggccctccgatgtggaggttgttcatacccgcaggagtggaaccggagttccgtttgtaatggcaccttgagtgctggttcggccttgccactcaaggcttctcttgctcagttacggaaccctcggctgctctgcgatgagccggagccggaggcagcggtgtcagcatggacagaggcggagttggctcgaaaaggggcttcgtcggcccaggagcaggtggcttcccaggccgaggaggtgcagcagcggcggctggagcctggccgggtcatccgtgagcgggaccaacttcggagtcacgctgccgaggccatgagccaggctgatgtcctcgggggacagctggctgaggctacggagcgggaccctggaggagtcacgtctgctcgggccgggaccctggaggagaccctggctgcgatggcccaagcgagaatcacttatccgagcgagagttacttatcgcggaaggtgatgagtgagaaaacgaggtattatggacttgaaaacatcttaagggtaaaagcgacgtag

SEQ ID NO: 3065 - DNA, 420 bp, Zea mays
  Peptide Sequence Number=SeqID_46440
atgggcaagaacaacaagcgcaagcgtgagccgactcctccatcggaggagtttggtgactcagaatactcggaggaggagttctcctccgagcctgaggggtctccggctcccgtctctcccccggcgtcgtccgatgactcggacgactcccaggggatagccgcggaggtctggacatatatccgggccgtcgagcgcgccgggctcgaaggctcggatgagtcggagtgctcctcggatgaggaggactcggacggcggcgacgagggtgaagacgacgacgacgacgacgacgacgacgacgacgacgacgacgacggctggggtggcggcgacggcagcagggacagcaccaagggcagcggcagggacagcaccaagggtggcggcggcggcaggggcagggccagtggctag

SEQ ID NO: 3066 - DNA, 138 bp, Zea mays
  Peptide Sequence Number=SeqID_46441
atgaagcattattctcttgaggataatgaaccttggacgaaggttaatgagaatatgattacgaagttatacctctgccttggcaaagattggttctcgaatgatgcgattgcaattacaggaatccgtgaacagtaa

SEQ ID NO: 3067 - DNA, 687 bp, Zea mays
  Peptide Sequence Number=SeqID_46442
atggcgttctgtagggcagaggcaaccttcagcgaggtcgaggagaagagactaggctgggcggcttggatactgaactgcaccatggcatcgttcgacgaggcagtgatgagggagtcgttggagcggtgggtctgggaatcggacttcagatacatgggctacttgtcctctgctggcagcacaaggctggtcatagaaagtttgccattgcaaggatatgtggtttcctttgtcacctgtgtagtattgtcgtgcagcggaagcttcactggcaacgtatcgagtgatgatgagcacagtgtatgccgtagcatgggcgtacaacctgccaccggaacggacgggcacgccgcctgcaggatggcctggccgccgcccattgtactcgtaccggttagagttggagaagaccaacctccacttcctagaactgcatcggtgcaattgatggcactcatgtgcccattacaatttcacctgacaaagctgctccttttagaaacaggaagggaactctcaatcaagaagtgcatatccattattggtacaatggaagttacaaaggaggaaaaagcgaaagcctacaatgtcttcaaggaccttgacaataggcaaattttcttgagtgcatgcgatgatgatgccgagtctgcactaatttggctgagaaacgagatggcttag

SEQ ID NO: 3068 - DNA, 90 bp, Zea mays
  Peptide Sequence Number=SeqID_46443
atggagatgagggtggcgaatgggatctcggtggcgtcggacgtggacctagagacttatttccacaaaaacagttccaagaaagagtag

SEQ ID NO: 3069 - DNA, 609 bp, Zea mays
  Peptide Sequence Number=SeqID_46444
atgatggtcacccggtcagccatcgccgagcgggaagggtggcggcgcgaaggaccgggagggcggttttcttttccctggctagatctctcaggctgcaaaaaacctaagagggagacaagaagcggagtcaagaaccgtcaccggaccctctccggggtatataaagaccaaggcgaagacggttccaacgttccgcccggaccggacgcggggttcaaaaaacgcgaagcgaaacagccgttcctcgagcggctcgcgcacgaaacggtggccccgccaactactcgccccgtcgcattaactccgcggctggacaggcggcgcttctggcaggagcagctggcgacgcttcgccttcgccaaaacaaccgcgccaaaaaagggaccgggaaaggggatacccctaaagggatccttccccgtgaaggaactaggctccgagcctccttactgatcaggggttcgaaggctggccccccgaagggttcaacagccgcctcagatcgcgtgggcccgacacccactactggtcagaggttcgaaggttggccccccgaaaggttccacggccgcctcaggctactcgggctccgcgcccattactga

SEQ ID NO: 3070 - DNA, 57 bp, Zea mays
  Peptide Sequence Number=SeqID_46445
atgggtatcttcggactcagaattatgaacatgaagcacggtcaggacgaagcctga

SEQ ID NO: 3071 - DNA, 288 bp, Zea mays
  Peptide Sequence Number=SeqID_46446
atgccgccgtggataggccggagcacacgtcgccgacgagcccgcccgcctgcacacgtggaccgggcgattccggccgtctccagcgacgagccgtacctcgacgtgatcgccagaccctccccgagccgaccccacccttcgccggacctccctcgccgccgagagtacatcctcgtgccggagcaaggagctgcccaggaggttgcccccgacccagcaccagagcctgcacctgaggacctgcctgccactacttttgaaggcaagccccggttttatgcataa

SEQ ID NO: 3072 - DNA, 300 bp, Zea mays
  Peptide Sequence Number=SeqID_46447
atggcggcgacatttacgctcgccaccgcgaaggggaaggacgcgccaacgtgcggaacccgctctccagtgcatggcacgcgcgagatactcggctaccgacccggcggcatcccgtggaaggttgttagcgcggtccgagattcgcgccagcagaggaagacagacccgcggcgttctgttggagctcgcgtgggagatggacctgacgcctggggcccacgcgcagcgaggacgcgagacccgcgcgcgcgggagcctgacccgtggggtcccctcgtcagcgccgggtgtagctga

SEQ ID NO: 3073 - DNA, 537 bp, Zea mays
  Peptide Sequence Number=SeqID_46448
atgacgacggcggctctcagctcccttacggaagcagggggacgtcagcaagggcccaaccgctccgacagctgtccctccgccaggctccgttgctccatcgacagccacgacaccacatcagctgggtgccaagatctctccggctgccaccttggcatggccttcttagagaaggttgggcccgcgggaatgagggcaggggcaggcgctctcttggggccgctcgcttccctcacccgcgtggacgcttgtaaccccctactacaagcgcacccgacctgggcgcgggacgaacacgaaggctgcgggatctccacctccctcacgactcggctccggccacctcgctctccccccttcgcgctcgcccacgcgctcaacccatctgggctggggcacgcggcacactcactcgtcggcttagggaccccccggtctcgaaacgccgacaacaccggacatgtccggtgctccaaggaagagcggcctcaggaactcgccagcctcgggttttcacttcggctgctccgctaa

SEQ ID NO: 3074 - DNA, 315 bp, Zea mays
  Peptide Sequence Number=SeqID_46449
atggccgtgatgggttcaacgtcgaaaaagatgtacctctgccaggtaccaaagaccctttatctggccacatacctcatcatgggtaagcttgaacccggctattccatacatgaaaagacaatcgcgcactgggagtggagagatggcgagagtggcacgtaccctcctggcaaaggaccgcctaaaaggggtgatccccagctgggtattaatctattcggatcgccgaacttctcggatatgaagactggatcttcgaccctcatcgtagataacaagcaaaacaaaggttggattttaaaagaaagctag

SEQ ID NO: 3075 - DNA, 276 bp, Zea mays
  Peptide Sequence Number=SeqID_46450
atggagagtagtgtagtaggcgccatacagcgtggtgagctgcgcgaggttcccgattgtagcaggcattcggccgtcgagaccgaggttgaaggaaacgtccctgtaggtggttatgctattgcttctgtgaaaattatacggaacaagcagactgggcactcagaaggctatggttttattgagttttcctctcgagctgctgcagaacatactctggtgaacttcaatgggcagatgatgccaaatgttgagatgacttttaagctgaactga

SEQ ID NO: 3076 - DNA, 189 bp, Zea mays
  Peptide Sequence Number=SeqID_46451
atggcgagtggggcgaaggcgtggctgatgtcgcggcatcgaatctcagcgtcgcgaatctcagggatcctcggtctctttgcccatgaggagaggcacgacaatggttgggaacgatgggccgaccaacttggagaaggagcagctgtattagttctcccccatgagcgagtcttggaggaaacataa

SEQ ID NO: 3077 - DNA, 141 bp, Zea mays
  Peptide Sequence Number=SeqID_46452
atggctaatatagcatcatctgtgcccaagcacttaagcaggacgtcgttgactgttcggcgctctatgattctcaactctagagatatgccaaatactgaattcgtcaaagaaatggattatgctccaacattttttaag

SEQ ID NO: 3078 - DNA, 3636 bp, Zea mays
  Peptide Sequence Number=SeqID_46453
atggagggtaagggggacgcgtcagtgacgccggtgaggactagtgaccggctgcggcagcgtccaaagtactatgctcgtggctatatgtactacaatccagccatgaggaagaaggttaagtctaagaagcgaactgctgcatcacagattgctaagaaactgcttcgcaagccagctgcacggccaccacctgccgatgtcgggcaaccagctggtcgttccagaggaccgaccaggcacctaatcgcgaatagggcgacgattaggacacctaatcggtcctggtcgacctctgcaaatttgcgccgttcaacgagaaagcgaaggatttctgtaaatctggagggctatgatacagatagttccagtatggaagatgacgatcttatgagacctagatatcgatcttcaaagagtaaggggggaaacaatgctgcacataatgaagtgtcagctagaccaaagcgccagaagttgtctaactccatacctcgtcgtgaaggtttacggcctagaagatctttgcgaggacaaagactgcatccataccatgaatctgaggatgaccaggaaagctctgatgaacaaggtgcagaagatcaaagagaaaatggcaatgagattgaagaggatgttggtgatgaggaggaggttgatggaggtgatgaagctgaaggagatggagatgacgaagatggtgaggaagagcaagaaggaaggaggagatatgatttaagggaacgttcagaggttcgtagaccatcccctcgtaaggaaggaaagcacagaccacaatctcctcgtagagtactagttcacggaattggtccaaagaacagcaagtatttaaaaaaaggtgggtcgcgcatgcataagcgccctcgtttctctttgccagatgattcagatgattcccttcttgtggatgagccggacgagggcccatccatgccatggatgcgcagtgggaggggaagtatgccatggttgatgggtgggttggacatgcatagtccagcagcatggggcctgagtgttggagcatctggttggggtcatcagggtgacacttctacttcactcatgcctggggtgcaaactgctggaccaagttctaagggaggagccgacattcaacctctgcaggttgacgagaatgtgagctttaaagatataggtggactttcggagtacattgatgctctaaaggaaatggttttctttccattattgtatccagatttttttgcaaactatcacatcactcctcccagaggtgttctgctttgtggcccaccaggcacaggaaaaacattgattgcccgtgccttagcctgtgctgcctctaaagctggccagaaggtcagtttttatatgcgcaaaggagctgatgttcttagtaaatgggtgggtgaggctgaaaggcagctaaagttactttttgaggaagctcaaaagaatcagccgtcaattatattttttgatgaaatagatggcctggcacctgtgaggtctagcaagcaagagcagattcacaattcaattgtttcgacattgcttgctttgatggatggccttgattcacgtgggcaagttgttttgattggagcaactaacagaattgatgccattgatggagcattgcgtagacctggccgatttgatcgtgagttttattttcctttacctggctatgaggctcgagcagaaatactggatattcatacaaggaaatggaaggatcctccaccgaaggaactaaagatggaacttgctgctagctgtgtgggctattgtggagctgatttgaaggcattatgtacagaagcagctattagagcatttagagagaagtatcctcaggtctacactagtgatgacaagtttgtcattgatgttgattcggtcagtgtcgagaagtaccactttttggaagctatgtctacaataactcctgctgctcacaggggatctattgtgcattcaaggccactttcaacagttatcgctccatgtctgaagagtcatcttgagaaaataatggaacatatttctgatattttccctttcctttcatccatagattttagcaagttctctgctctctcctatggatcttccatccctcttgtttatagacctcgccttttgatatgtggtggtgaaagtgtcggactggatcatgtgggaccagctgttttgcatgagcttgagaagttctctgttcactctttgggactgccgtctcttctctctgatccaagtgcgaagacacctgaagaagctcttgtgcatatctttggggaagccaagagaacaaccccgtccattctatacatacctcagttccatctttggtgggatacggcacacgaacaactaagggctgtgttgttgactctgttgaacgagttgccctccaaccttccagttttattgcttggaacatcatcagtggtttttactgaccttgaagaagagtatcaagtggatcaaccaagttttgacgatagattgaggtacttcagtatattgtttgagtcattgctctctttccaaatggaagaatcaagaaacaagtcaaagaaacagaagtctgctattgaccttcccaaagccccgaaagaagtggagggccctaaggtttctgagctaaaggctagggcagaagctgagcagcatgctgttcgtcgaatgaggatgtgcctccgagatatctgtaatcgcattttgtacaacaaaaggttcaatgtatttcacttcccagtattagaagatgaggtgcctgactatcgatcaataatccacaagcctatggatatggctactgtcttgcagcgggtggactctggacagtaccttaccagggcagcatttataaaggatattgatcttattgtctcaaacgcaaagacttacaacggggatgactacaatggatctaggattgtcagtagagcatgtgaactcagagatgtgattatcgttgttgtgtctaatgaacctctttttggccaggtccaaggcatgttgtcacaaatggacccatctttggtgtccttctgtgataaaattgcttcacaaggggggccactgcaggctgtggatgatgaagatagagctattcttcaagcagcacctgttgctcagctggtttctggtactagaataagtgcaaggcttcgaaatgtacagcctgaagtaaacctgtcacaaagttatgaagtgctaaggcggcaaaagaaaagtgcagaaaatgaacaaagcatgactagagatgaaaagtctcctgaagatgtagatttgtcgaagccaactgacgcagaagaagctgcaaaagaaccagagtcaaatggcactacgaaagaagccaacgattcaccagccaaagaaccagaagtatctacttcccctgaacccatggagagtgacaacggcaaaattgccgcggctactggcgacgacttgttagaacagctagaagccctgaagcaacgcttcatggaactcactgcaagctatggcgtgccgcagctcgagaggctgtattccaagataatgaaaggagcaatagagttgacaagtaaagaaagcaacgaggatcataggcgttacaatacgagagaatactaa

SEQ ID NO: 3079 - DNA, 837 bp, Zea mays
  Peptide Sequence Number=SeqID_46454
atgagactgctggttctggttatgttgatggtgctggagatagagtccgtgaggagctactcccctgtgcttcctctggaggcgccccctgcaccaccactgggcatcccagcctctggagtagctgctggaggagaccccgacgacggaggtggcgacgacagctcgagccacgacaccgacttctctgctgaccaggagccggaaggatgggttgctcgacccatcactcgcgacgctgctcgcgggtgtcacttccatgattcgctcgacaccctgctacgtcgggcacttaaccggcgtacttggtccatcgagtatcgctgtgtggtctaccagcatagtcgcggagtctactcggaccgctgggaggcgacctgcttggtgcaccgtccagagaacagtctccagggtgcgaaggcctgctcagagcactattccatctctgagcgggatgctgcacggcgtgcgctttcgtactactgctcggttctcggtggggtagctgacggtctcgacctgaagtattacccccgccgtccatctggcagcacaggaggcgtgattgtctcacctgttggtgaggacaatcctaggttgagcagcacagtcaacctagccgccgtgctaaacacggagctggaccatgcactagacgagctgagtagggctcgtgctgagatcacccagctgcgtgctgagcgcatggagcgtcgtcacctggatggtggttcccccgctttcgttgggactcagcacccgtaccgctcacctcggcgtggacaccagccttatggcaatcccgactgcaagaccaagatagacttggaaccatag

SEQ ID NO: 3080 - DNA, 609 bp, Zea mays
  Peptide Sequence Number=SeqID_46455
atgggcgggcggacgcaggcgccgtggccgcgccaaggccgagccgcggcgggacgggcgcgtcgcgccaagccgggccgaaacggcgccgtggccggggctggggatgccggggacgcgccgggcgccacgcccgcgccggccgcacgcgagggagaggggagggacgagggaggagaaggagatggggcttaccgtggaacggggtcgagcgaacggacgcgacggcggcggtttcgaacgacgagaacaatggggagagaggaaaggaatgtcatgggggaaagggatgaacaggggacgaccgcgaggcttacaggcgggccccacgcgcagaggcggcggcggctgggcaactgccccgcgcgcgcgcaggcggagggagcgggcgagccgttgggcggctgggccgcgcgccagccgaacggcccaaggcgagggggagtttttcgcgggcccgggggggaggagagcggctgggccacaggcaccgagccggcccaaaacgagagagaagaggggggaaaggaggccagactgggccgcgcgcaggagaaacggcccaagagagaggagaaggggtttttctatttatttttcctattctag

SEQ ID NO: 3081 - DNA, 510 bp, Zea mays
  Peptide Sequence Number=SeqID_46456
atgtgcgacgttggtctggccacgtcgtggctgtcgacagtccctgtcccagtggccaagcttgccgcagttgtgacaaccgtcgtctcgtgccggcttcttgttgccgacggcgccgccttgggcaccaccctcagcatgtcctcgcgccccggcctgggcgcctccacgcgccttgcgcgtgtaataccccaggtccagcgaacctgccccagccctatcccttacttaagtgctggtccatggagccctgttgtctcgagctttagctggttccttgggcatctctgtggtagtgtgtgcaggcctgagctcgtctccctagcctccaagtcagctttgttcagttcatcaagtgccactccattgtctggtgaccacagcaatcatccttccacctcgctgtggccagagtatctcgagaagtttgttacccaggtgctgggcaggggtagtgaagctcagtacttcgttaaccttggccgtaaacacgtgctagtggtggattag

SEQ ID NO: 3082 - DNA, 510 bp, Zea mays
  Peptide Sequence Number=SeqID_46457
atgccctggatccaccacctcctcctcctctccccatcactgcaccgcctgccccgccgcacactccaccgtgccccttcccctgctgtggatctcgcccatacgccagcgatctcgaactccttcctagggcggcagttacccgaggctgagctccttggcgctgacatcttcctcgtctccttctccatccacgcgcccaacgccgaggaggacggcagcaaggtacaggccttcctcgtggagatggagagtgccatcagggaccacccactctgggccaacaccaccgaccaggagattgaccacacactcgagggtctggaaaagtatgtcatgaccaaattgttcgaccgcacgtttgggacttccactgaggatgccgtttccgacatggacatctcggagaagattggtctcttgcagctgtttgttaagcctcatcacttggatatacccaaggtcgtgcataacgaggcatcgtggctggcgattctcatttctcagtga

SEQ ID NO: 3083 - DNA, 1317 bp, Zea mays
  Peptide Sequence Number=SeqID_46458
atgaatctcaaggggttatctgtcttcctcatctccagaacctttcttttccctctgtcctgcctctcaataaactccgtggagctccagcggtacccttttcctgatgttgagagatttgataatgaagcatttgatagagctgcagtcgttggaagagataatgacaaagcaaagataaaggacatgatcttgcaaagtaatgcacaaaagttctcaatcattcccattcttggcctcgtggggttggggaaaacaactcttgctagattaattttccttgaccagggagaaggttgggattttgatcttcgtatctggatatccttaaataggaaactaaacataaaaatgattgctagtgatataatctcgcaatgtaatcatagagaagaaaagcttttagatgttcgtacggacatggagatccaggaaaactttcagttgctaaagaggtgtttgcaagaggcactccatgaaaaacattgtctgattgtcttggatgacctttctagcacagataaaaaccagttggatgaattgaaggaaatgctgaagggtacaaatgagtctatcaaggttttagtgacgacctccagcgaaataactgcagaactactgcacaccattccaccgtacaagttgtgtcctttatctgaagacgacagttggaaaatattttctcaaaaggcttttgggaattgtgatggtgataacactgaccttaagaaaatcggaaaggaaatagtaaaaagcggctggttccctcaccacagcgcgtgttctaccaccgccgcctccgcactcgcctccgcggatccactgttcacagtccgcggcgatgacctgtgccatatacggtccacgagcacggatgcgccgcggtcgtaccatgtgccccttgccggtggctgtggcttcactccgtggctcggccggctccactccaccatctccatgccgcggtggccacaacccacagtgccgcgtcgggcgccagactctcctccgagtttcggccctccatgtcctgctgtccacgacgccaggcgccggctgttcctgctctcctcgatgtccaactgccccacacctctccatctcccctctctgttcaaactccgcaatgcacagtggacagtgttgcaaactgccagcgcaatgggctcaactggccaacaatccaaggccgcagatggcaagatgatcgacgacgtcaacctggattacatcagatgggtcgcgctcgagcaggtccttagcttcctcatgacatccatgactcaagaagtcatgggccagcttgccatctactaa

SEQ ID NO: 3084 - DNA, 447 bp, Zea mays
  Peptide Sequence Number=SeqID_46459
atggtgtctccggtgagctgcaagcgggtaatccgagtggatgtccgtgccccgttcgttgggggtcggctaggggcccagaggcacgcccaaaagtacctgcgggtgatctgccggacccggtcccctggcgacggggtccgagggctcgatgcctccctccgatggtgtaacaccccagccattcccaaccccgtccagccctcggagaagactgtgcacgtctccgtgaagctccccgagcgaggaatcaggctctgcttcaccggagaggccgacccaaggtcaccggatttcaaccgaccgccggcaaccgtggaccgagagtacatcctcgtgccggagcaaggagctgcccaggaggttgcccccgatccagcaccagagccagcaccagaggacctgcctgccactgctttggaaggcaagccccggttttatgcataa

SEQ ID NO: 3085 - DNA, 381 bp, Zea mays
  Peptide Sequence Number=SeqID_46460
atggtcaatgcggcccaaaaatgggccgccagtaatggcggtggcaggcgggcgggaacagcggtcacgtcgtcagccaggcttgcgtcccatcctggggcaggaccgggaaagggggataccccgaaaaggatccttctccgtgaaggaaacaggctccgagcctccctactgatcataggttcgaaggctggcccctcggtggggtttaacagccgcctcagagcgcgtgggctccacacccactactggtcagaggttcgaaggccggtcccccggaagggttcaacggccgcctcaggccactcgggctccgcgcccactactgatcaggggttcgaaggctggccctcgaagggttcacaaccgcctcagacatag

SEQ ID NO: 3086 - DNA, 759 bp, Zea mays
  Peptide Sequence Number=SeqID_46461
atggatgagtacatttgggcagataatgatttctgccaaagaagggaagaagcttataggttttctgagatgactaggggcttcgaaggaagaatccaccctagcatgtcagatcaatccacagatccagtcagagtgatgacaaaggaagccagtttcagaggccacaacatagctcacagtcttcagggcagcagcaaagttccttcaggccaccagctccaagaggcagaggcggcaggggcttcagaggaagatatggggatcagcccaggaaaatctattgcttattatatggtgaagacaagggccacactacaagaacatgccagattaccattcagaagtaaaaagagattgccgaagcagaagcccgacagaaccagccgaagcaggttttacatactgcttcgtgctactctccttacataccagaatatgtgggcaatcaacctgcagcttctattgcttcggcaagccattcacaagatttctggccccagcttccactgccacctccattgccacctgttcatacccaaagccaacagccagatgggcgccagcacccccaacagcaacgcgacttcagggaggagtctgaagctcgtacagtcaacaacactgtaccagaatcgaagcacatatattgaggaatatcctacttttgaaaacttataccgccgaaatacaaggcgaagaggttcaaaagtcgttcctaaggggatgcagaacttataccaccgaaatagaaggtga

SEQ ID NO: 3087 - DNA, 642 bp, Zea mays
  Peptide Sequence Number=SeqID_46462
atgccgccgcgcatgaggaaaaccgcgcgtaagtccactagaccgattggcgtgcctcagcatcagctagctccaaggcatgaggagagcagcagtggcagtaatgaccccattggagacctagaagcccaggtggagcagcttccaacggagctacatcacagaaaccgggtgtgggtagaggatggtcagtgtataaatgaattaagagctgacattagacatctgcaagatgagcttttcgaacgggatttggcaatcgattgggctgtcaactcatgttccattgcttgggatcgggaagccaaagctcgagcccgtgtggaggagcttagcatggccattgacaacttgcagatgccatcccgaactcgtgcacatgacggcgcgggaacgtcccgtggtcaagaagatacacccaatccaccgccggtaccgcccacgttggctgaggttatcgctgccttggtcaccgcaaccgctaacaacacccgctttctgcgtgaaatggcgggaaatcaatttcagcagcaaggcgggagggcttatccgcagggaccccgtgaaacttcatacttggatttctcggaaacccgtcccccactatttgtcaaagtcgaagaccctctcgaagccgactaa

SEQ ID NO: 3088 - DNA, 222 bp, Zea mays
  Peptide Sequence Number=SeqID_46463
atgcctgagattgacttgccgaagcaacaagagctgcagggtggttacccacatactctgggatataaggcgagtggtacgaagcacccctggcacctctaccccttggagctggaggccgaggataactctgctgctgccccgaagcctgggaagcctgggaggaatattgcggcctctgctgctggtttcccctgtcatcagtctgagtggaatgaatag

SEQ ID NO: 3089 - DNA, 678 bp, Zea mays
  Peptide Sequence Number=SeqID_46464
atgtcgatctgcttcgctgattgtccctccccaggcccacgaaagaatgaccttacgatttattgggcccttgggcctttcgtgaggtcttttactcttttagtggacccgggggatatctgtcccccacaagcccccgatctttgggttgattttgaggtaatcagcccaaagatcccaggtccagcttgcaggtattcactgcatgccctgcacggatgtgacagttttgaaaaatatactgataattcctgggcgtccccccaatgggtgtgggcaagggatggcttgagtactcagaggaggagttctcctctgagtctgaggggtctccggctcccatcccccctgcgtgagtcgtctgacgactcagacgactcccaggggctcgcggcggaggtctggacgtacatccgggccgtcgagcgctccgggctcgaagactcggatgagtcggagtactcctcggatgaggaggactcgtccgaggaggacggcggcggcgacggcgacggcgaggatgacgacgacgacgatgacgacgacgaaggcggtggcggcggtgacggtgacggtgacggtaacggcggcggcaggggcggcagcagcgacagcaagggcgacgacgacggcagcaggggcggcagcggtggcggcggcagcagggccagtggctag

SEQ ID NO: 3090 - DNA, 240 bp, Zea mays
  Peptide Sequence Number=SeqID_46465
atgtcagatcaatccatagctccagtcagaatgatgacaaaggaagccagcttcagaggccacaacacacctcatagtcttcgggacagtagcaaagctccttcaggccaccagctccaaggggcagaagcggcaggggctttggtggaagatatggggatcaacccaagaaaatttattgtttattctgtggtgaagacaagggccacactacaagaatgtgccaaatcactattctga

SEQ ID NO: 3091 - DNA, 717 bp, Zea mays
  Peptide Sequence Number=SeqID_46466
atgtggattaggaaaaagggcaatgtgtttcgtcaaataaggtctctttttaaaaggttatgcgatgaagggtactcaccctcatcaccttgggagtgggatgatcaaggactccctggtttaggggagggcctaagatggaagactctctggccattaggacatcctactgctcagaggtggaagggttcccacatctgttgcgaagttgtgcgcttcgcatgggaatccgcaagaagccggaatacgtctggaaggagtatcccgagagtggaatggagaaatgctctatggcagtctacctgggagaaagccgaaaccatccaaaccatccttctttccaagtcacttttatcggataccgctttccagatacttgccagaatgttgcccgaacggccctccgacaactatgctagaactacaacaagcaacaagaatacccccacctggaggaaaagacttcaggccctgtcaggaggagatcctattgaggatgatcccaccatcgtctacatggctggataccttcacacccttgataaccaatatgatgacctcaccctccactgcacccacctaacctcccgggtggaaagcctggagcaaaaagtcagggaacttttaagggaaaaggcgtcccttcaagagagcctcgcaatagcagaaggcgaggaaaccaatacccgtgaggcctaccgcaccctaaagatatga

SEQ ID NO: 3092 - DNA, 795 bp, Zea mays
  Peptide Sequence Number=SeqID_46467
atgcagcccgactgcagtcccccgccggcggtcacccaggatgatgaccgtcagccttgtggtggggaagagcgaaccgggctgtggcctccccctgccctcagcttcaaagatgttcatcatctgtgctggggaggagggcgagccgagtcggtgtcctgccctccgcatgggctggcgacccgcttcttcctccagcatttgggggagaagagcgtccaccagccttacggaggaggcgaactgccacctgctgcctggtcgaggtgtggctgcccgtccaccgcgcgggcgatggtcgcgccgtgcgcaggtcagccacgtccacggcccttcccgcgccgccagccgcaccgaggggtcgcacaacacgttgtacgccgcaggggcggtgtccgtgttctcgggtggtcttgtcctccctcccgtagcgaggacgggagtgaggacctccttgtgcacgctggggcgaccgccattcgccggtgcggcgtcggcgcgcgggtggccgctgtcgtcggtgctgaggtggtggtcaccatagtggtcgtcggcgagccacttggagtttgttatctcgcagcccctctggtgtggagagggggttcccccctttctagacccgaggagaccgctagggccgggacccttgcggagggcctggctgtggccgtcgggtctggccggtctgcccaagccatggcctcacagcagcgtgcctgggccgaagggctcgagacggctcttaacgagtccgtcaagaactacaaggcgctttcccaggcagctgagtag

SEQ ID NO: 3093 - DNA, 348 bp, Zea mays
  Peptide Sequence Number=SeqID_46468
atggaggcccaggcccacgcgtcatgcaacaggcgcgccgaatgcttcgtgcatgcaacagcaccgccacttgcaccactaccgtgcctcctcgactgtggaaccaataccgcgactcgagggaccgggaaagggggataccccgaaaaggatccttccccgagaaggaaccaggctccgagcccccctactgatcagaggttcgaaggctggcccctcggaagggttcgacagccgcctcagatcgcgtgggccctacacccactactggtcagaggttcgaaggccggcccctcggaagggttccacggccgcctcaggctactcgggctccgcgcccattattga

SEQ ID NO: 3094 - DNA, 390 bp, Zea mays
  Peptide Sequence Number=SeqID_46469
atgtggaaagaccgagtggagcatgccaaggatatatgggctctttacccagggcagactacgcacttgacagtgaggcgaggagaggtaatgtctcatctgatggcattgttggaggctaccaagattaccttggataatagagaggaagttgtggtagacctgtccactgagatggtggaaaatgacctacaggtgaaacagatgtccaatgagatccaggagcttgaggaactagtgggaaccaaggagaacaccattgatgtcctcgaggatcagctcatcaacactcagcaacaacttgcggaagctaaccaacatttggatatgcaccaccaggagatccaggacatggaggccaacgaggatgtcgacatcgagggaggatag

SEQ ID NO: 3095 - DNA, 162 bp, Zea mays
  Peptide Sequence Number=SeqID_46470
atgggtctcggtgtatgcagctcgctctgccaaggtcgtgacgaggatgatggttttggttatgactatggtactggttgtccacgttgcaaccactgctcaggtgaagatgaagtcgtggaggaggacttccaggagtttcaagagtacgatgagttctag

SEQ ID NO: 3096 - DNA, 954 bp, Zea mays
  Peptide Sequence Number=SeqID_46471
atgtggattgggaagaagggcaatgtgtttcttcaaataaagtctcttttcgaaaagttatgcgatgaagggtactcaccctcatcaccttgggagtgggatgatcagggactccctggtttaggggagggcctaagatggaagactctctggccattaggacatcctactgctcagaggtggaagggttcccacatctgttgcgaagctgtgcgctccgcatgggaatccacaagaagccggaatacgtctggaaggagtatctcgagagcggaatggacaaatgctctatggcagtcaacttgggagaaagccgaaactatccgaaccatcattctttctaattcacttttactggataccgctttccagatacttgctagaatgttgcccgaacagccctccgacaactatgccagaactacaacaagcaacaagaatacccccacctggaggaaaagacttcaggccctgtcagtaggagatcctattgaggatgatcccaccatcgtctacatggctggataccttcacacccttgataaccaatatgatgacctcaccctccactgcacccacctaacctcccgggtggaaagcctggagcaaaaagtcagggaactttcaagggaaaaggcgtccctccaagagagcctcgcaatagctgaaggcgaggaaaccaatacccgtgaggcctaccgcaccctaaagatggactatgacaagaaactgaagaagctcgcccctgcaagaaaaatccgcaagaagaccaaaagccaaggatgccagattgagcagaaggaagaagcccctccaaccctacgccctgccgggttaagaaactcgtccgacaccgaggagatgtccctggccagccttgatgaccttctcaaggaatttggggacactttagagaaggagttggggagtaccctagatagcactcgcgtgtaa

SEQ ID NO: 3097 - DNA, 528 bp, Zea mays
  Peptide Sequence Number=SeqID_46472
atggagggagaagatgacggcgcccaaatgaaactgcagcaacaacaacagtcgccttgcagtgacaacttgagcttgtccgccgcctcctcatggctgccgccacaggtaaggtcgtcgtcgtcgtcgtcgtcgtacacctgcgggtattgcaagaaggagttcagatcagcacaagggctgggaggccacatgaacatccacaggctggacagggccagactgatccaccaacagtacacttcacaccgtattgctgctccccatccaaaccctaatcctagttgcacatcagttcttgaccttgagctcagcttgtcgtcgctgctagcgcatggtgctgccagcagcgacggaggcttgtctgttccagtggcaaagctggcgggcaaccgtttctcctccgcatcgctccccacgaccaaggacgtcgaggggaagaacttagagttgaggataggagcgtgcagtcatggcgatggcgcggaagagcgtctggatcttcagcttagactgggctactactga

SEQ ID NO: 3098 - DNA, 216 bp, Zea mays
  Peptide Sequence Number=SeqID_46473
atggggcttagtgtatgcggctcgctctgccaagccaagggagctccattgattagagatactttgatcagagatggttggtttataggtggtgacgaggatgatggttttggttatgactatggtaatggttgtccgcgttgcaaccactactcaggtgaagatgaagttgtggaggaggacttccaggagtttcaagagtacgatgagttctag

SEQ ID NO: 3099 - DNA, 768 bp, Zea mays
  Peptide Sequence Number=SeqID_46474
atgggggaggggcctgcggagcagcagaagaccgacgggcggctcgccgtcgtccgctccgccagcaacgacaacgacttctgctccggggggccgaacagcagcagcgatgacctcagggcggatgctgctgccaggaggcccccgcccgtgcccaaactcgtgaggcaaggacgggcagaaggctgtagagttggaggcgactctccctacttgcgtccctggccgtcgtgggctgagtcttctccaacacgctccaaggtcctccccctacggcgcgggggctgggtcccacacgtcatgcaagtcggcccagagcagaagaagccaaaccgccgtgcgcggtgcgtgcaaccgcccagcggttacaagcggctctccacttttgcccagaccagcgggcgaaagggcgggcagccatgcaggcggcatgcaaccacgccaagtgggcacgcttctccgactcccaacacgcccggcatggaggcccagacccacgcgtcatgcaaccggcgcgccgaatgcttcgtgcatgcaactgcaccgccacctgcgccaccaccgcgcctcctcgactgcggaaccaataccgcgactcgaggcgacccagcgcacgacccagcggctccagcctggcgcgacggtcaatgcggccgaaaacgggccggcagtaatggcggtggcaggcaggcaggagcagcggtcacgtcgtcagccaagcttacgtcccatccgggggcagcgagagaaccctctctcacggcgtga

SEQ ID NO: 3100 - DNA, 1020 bp, Zea mays
  Peptide Sequence Number=SeqID_46475
atggaggagtgcttcccggctgcatcccctcaccaatggtcacccaagacggtgaccatcagttcgatggtggggagaagcaagccgggctgcggcctccgccccgccctcagctttaaggatcttcatcgtccttgctggggcagagggcgaggcgagccggggcctggcttcacgtgggctggcgtcccgcttcttcctccggcttctgggggtggaaaccattctccagctctgcggaggaggcgtcttccagccatgccggggaaggcgaactgctgctgcccagccagtgtgcagcattccgccctctgtctgggcgacggtggccagccgcaccagggggtctcacaacacgtcgtacaccgcgagggcggtactcgtgttctaggacggtcccattctcgttttcgtggtgaggacgggagtgaggacctgccggtgcactttggggcggccggcgctcgctggtgcggtgttggtgggcaggtggacgcagccgtcggtgctgaggtggtggcagctggagaaagcttctccgtcgacgagaccgtcagcgccacccgcggaccgacctccggctctttggctttaatatctggttctcgtccctcgagtggggacgcaaacgagagccttccagcggtagcgtccgccctgggaccatcgctgctgatgcagaggtcactggcgagtcacccggagtttgtcgtctcgcaggctcttcgatgtggaggttgttcatacccgcgggagtggaaccggggttccgtttgtaatggcatcttgagtgctggtttaaggaaccctcggctgctctgcgatgagccggagccggaggcagtggtgtcagcatggacagaggcggagttggctcgagaagaaacttcgtcggcccaggagcaggctgatgtcctcaggggacagctggctgaggctacggagcggttggtcaagctttctgctcgggccgagttcctggaggagaccctggcggcgatggcccaggcgctgtgctga

SEQ ID NO: 3101 - DNA, 402 bp, Zea mays
  Peptide Sequence Number=SeqID_46476
atggtgccgccagaaatcttgagtccactggcagaagcagaattgccgaaggttacaaaagctcccgcaacaactcctaagaggaggataatggctagcgtgctggacgctgtcatggagatgacaagggcaccagctcctcctgtgaagaaagttgctgaaactgtcacgactcgtgctaaaaccgaagctgggccctcagtgcccgcggaggcagagcctgtcgcaactgagcacaaggctgaacaagactttccagatactagcatggctctagagaaggatctcgaagctggcctctccgccatgtcgaaggatgacctcgcggacagcctcgcatacaacagtctgaagggcttaattcttagcaacgcgcgccctgagggcgcaaaagaatgctga

SEQ ID NO: 3102 - DNA, 165 bp, Zea mays
  Peptide Sequence Number=SeqID_46477
atggagagtcatgatctccgggcagaaagggaaccacggcttgtggagatgttcgaattacaggtggcaatgagattgatggttcttggtagtgactctggtaatggagaagatgaagccgtgggaggagacttccaggagttccaagactacgacgagttctag

SEQ ID NO: 3103 - DNA, 909 bp, Zea mays
  Peptide Sequence Number=SeqID_46478
atggagagtcatgatctccgggtagaaagggaatcacaacttgagggtaaagtgcacaacctctacagagtggcaatgagattgatggttcttggtagtgactctggtaatgcactgtgtgatgatttccagttatgtaactgctgtgtacgtgaattgctgatcctggcacatacatggttcgcattcggtttgccttctaaaaaccggcaggagacagagtctgtgaggagctgctcccctgtgcttcccctggaggcgccccctgcaccaccactgagcgccccagccgctggagtagctgctggaggagacccagacgacggaggtggcgacagcagctcgagccacgacaccgacttttctgctgaccaggagccggaaggatgggttgctcgacccatcactcgcgacgctgctcgcgggtgtcacttccacgatgcgctcgacaccctgctatgtcgggcacttgaccggcagcactattccatctctgagcgggactcacctgaggcggccatgcaagatgtcgcacagcatgcgctttcgcactactgctcggttctcggcagggtagctgacggcctcaacctgaagtattacccccgccgtccatctggcagcacaggaggcgtgattgtctcacctattggtgaggacaatcctaggttgagcagcacagtcaacctagccgccgtgctaaacacggagctagaccatgcattggacgagctaagtagggctagtgctgagatcgcccagctgcgggctgagcatgcggagcgtcgtcacctggatgatggctcccccgctcccatcgggactcagcacccgaaccgctcacctcggcgtggacaccagtcctatggcaaccccgaatgcaagaccaaaataaatttagaaccatag

SEQ ID NO: 3104 - DNA, 270 bp, Zea mays
  Peptide Sequence Number=SeqID_46479
atggggaggacaatgcttggtgaatacaagacacctgagcggttttggaacaacaagatcaagatcaaccatcttcctcagcattggtgcatcccccaaatcaagatgaggaataggtacctcaagatacagacatggatcaagggggagcacatgaagaaaaagataaagaggaagaagcacaacaagcacctaaaactcaagtccggacaaccattcaaagaaaccatccaatggatcaaattctgggtgacatcagcaaaggagtaa

SEQ ID NO: 3105 - DNA, 510 bp, Zea mays
  Peptide Sequence Number=SeqID_46480
atggcccaagggcacatttccctttcaagggttcgacagccgcctcagagcactcgggctccgcgcccaccattgctcagaggttcgaaggctggccctcggatgggttcgatagccgcctcaagccactcgggctccgcgcccactactgatcaggggttcgtaggctggcccccgaagggttcgacagccgcctcagagcacgcagagcgagggatgactctgggtacgtccggtacatggccgaggctcgggctacgctcccgaggtaccctaggacatttccgagaccagcagaagcgattctgtaacagaatcccatcagagggaggcatcgagccctcggaccctatcaaacgggaccgggtccggcaaatcacctgcagtcgacagggccgaagtaaccgcaatcacttcgccgctccactgaccgacctgacagggaaacagcgccgcctgccctgctccgactgctgtgccactcgacagagtgaggctgacagcagctaa

SEQ ID NO: 3106 - DNA, 201 bp, Zea mays
  Peptide Sequence Number=SeqID_46481
atgaggctcaacaagaatgttggactggctttagagaaactatttgaggatggcgtggtcaagcgtgaagatctgtttgtcacctctaagctatggccaggtaaccatgcacctgaagatgtgcaggaggatctttgttcggccctcgaagatttgcggctcgactatgtagatctgtaccttgtaaattcttgttcttga

SEQ ID NO: 3107 - DNA, 501 bp, Zea mays
  Peptide Sequence Number=SeqID_46482
atgggagcagggtggcggtcgcggacgacttcgggggacaggggcggggacaggcgagggcgcgacactggagcagagggggaggcgggcatgcgagagtcacgagctggcggtgtgggtaccagagggatgcctaggtgcagatttcgcggtggcggcgggcgtgcggcattgagtgccaagggctaccaatgttgcttgcgctacgtgtatggatggaaacagggaaacagcgccgcctaccctgctccgactgctgtgccactcgacagagtgaggctgacagcagctaagtccagcctcgggcgccataggaagctccgcctcgcccgactccagggctcggactcagcctcgacctcggaagacggactccgcctcgcccgaccccagggctcggactcagcctcgacctcgaaagatggactccgcctcgcccgaccccagggctcggactctacctcgacctcggacgacggacttcgcctcgcccgaccctag

SEQ ID NO: 3108 - DNA, 459 bp, Zea mays
  Peptide Sequence Number=SeqID_46483
atgaacgtatgtgagctcactcttgctgtctcacatacaccacaggtcaagaccagtaactcactttggtatatgaatctgcagagtgcattacctgtcaggccagccacaaaggcagagaggatgagggactgtctaagaaatctgaagcaacagaataaggatgatgatgccaaagtgaagagggcattccaaacactgcttacttacattggaaacgttgctaaaaatcctgacgaggagaaatttagaaagatcaggctgacgaatgcaacatttcaggagagggttggaaatctgcatgggggcatagagttcctggagctctgcggatttgagaaacttgaaggcgacgaattcttgtttttggcaagggaaaaagtcgacagtgctatcctgaacacagctggagccgagctgaattctgccatcaccaatcctttcttcggagtcctttga

SEQ ID NO: 3109 - DNA, 648 bp, Zea mays
  Peptide Sequence Number=SeqID_46484
atgctggaggtagttgtgctggctggccaagcaacagtgatggatggttggacagcaaatagtgcagggctggtaaatggctggatcatcgaggtggtgaagcgacgactgctcaacctcaggtgcagagggagtggccgaagatgcatcctgcagaaggaagtcaagcgacaccgctgcaaacagagtggcagaaaatggaaacacttactcatcaaagaccacatggcgggatataatcaccaccaagtagaaatgtcaagacaacggataacagaggcagccaaacacgcgaagctgagaataatctggtactcagcaatggaggagctggtacaggagttggttgccgacagaagaagagggccaccggttgagcaatgtgaagcatatgctcgcctttgccattatgtggagaggtttagggacaagatgcaggacaccgcgactccacaagaaagcagacgtggcatggttaacaaattccgtgccattgtcagcctgaaagcatttaggtacacaaccaaactgagtttgagcataggcaatgaaatcatcaaaatgagcatagacttcggatttctggcacagtgggaaaggccagcaataatgagtaaaatcatcaagcatgaccaagtaggaacgtga

SEQ ID NO: 3110 - DNA, 429 bp, Zea mays
  Peptide Sequence Number=SeqID_46485
atgtggagacgatcgcgagacagaaggcgagcttacctccgagaatcgtggcgtccggagctctgcccacggtgcggcgcggagtcacggcggcgcagcggctccggtgagcaatttgccggtgtagaccgccccccaacccgatgccgatgccgcggaaactcccgccgagtcgaggcgaagctccccgaccacacgcgcaaacccgagcgcgagcacaaaggagagtcgctggcggcgtggtcgacagggtgcggattcgcctccgtccgaggcacgaggaaggccgaacccgtgttcatcggcggctgttgcgcggatggcggcggcgatttcgtcgccgcggacttggggaaggggacgagtccgacagggcgggcccacggaccagagaaagggagtgaggagcaaacgcggtggagaggctga

SEQ ID NO: 3111 - DNA, 552 bp, Zea mays
  Peptide Sequence Number=SeqID_46486
atggcagcagcatccgccctgaggtcatcgctgctgctgttcggcccccccggagcagaagtcgtcgtcgtcgccgctgctggagcgggcgatgacgagtcgtttgtcgatcttccgttgctccttaaagggacccctcggctgctcttcgatgagccgaagccaggggtagcggtgtcagcgcggacagaggcagagttggctcgaaaagaagacttggttggccggagcctggccgggtcgtccgttagcgggaccgacgccggagttgatctgtcgaggcctcgggccgggctgatgtcttcgggggacagctggccgaggcctcggggtgaccagccgagccgcctgctcgagccggattcttggaggagaccctggcggcgatggcccgggcgtgatgatgacgtcgtccttcagagtggagatcctcggaccgcgtcgccgtccgaggctaggtcggacctcgccaaaggtgtagtcgacgtcgagggtgctgttgctcccttcagccgtcaagattcgagcctacaggatcggattatcttgtag

SEQ ID NO: 3112 - DNA, 543 bp, Zea mays
  Peptide Sequence Number=SeqID_46487
atgcaggcggcatgcaaccgcgccaagtgggcgcacctctccgacttccaacacgcccacgcgtcatgcaaccggcgcgccggtcgctacgtgcaagcaactgcaccgccactcgcaccactgccgcgcctcctcgactgcggaaccagtaccgcgactcgaggcgacccagcgcacgacccagcagcgccagcctggcgcgacggtcaatacggccaaaaatgggccggcagtaatggtggtggcaggcgggcgggagcagcggtcacgtcgtcagccaagcttacgtcccatcctggggcaggaccgggaaagggggataccccgaaaaggacccttcttcgtgaaggaaacaggctccgagcctccctactgatcagaggttcgaaggttggcccctcggagggttcaacagccgccttagagcgcgtgggctccacacccactactggtcagaggttcgaaggccggcccctcggaagggttcaacggctgcctcaggccactcgggctccgcgcccactactgatcaggggttcgtag

SEQ ID NO: 3113 - DNA, 588 bp, Zea mays
  Peptide Sequence Number=SeqID_46488
atggcgcctcctgttgacgtggtcggtccgcgccctaggttgggcgatgtggaggctcctccgaggtcgaggtcgagtctgtcttccgtggccgaggtcgagtccgagccccagggtcgtgcgaggcggagaccgtcggctgaagccagggctaagtccgagccctggggtcgggcgaagcggagttcgtcgtcttctggggctgagcccaagtcagagccctgggtcgggcggagcggagttcgccgtcttccggggctgagcccaagtccgagccctgggtcgggcggagcggacagtcggagcggcgcaggcggcgctgtccttctgtcaggccggtcagtggagcggcgaagtgactgcggtcacttcggctctgtcgactggaggacgcgcgtcaggataaagctttgtgctgatgggggttaccagctgagaattaggagccttgaggtgggtgcgcgcgagcacacccgccggggtgtagcccccgaggcctcggaggagtggtttgactcctccgaggtcttaatgcctcgtgcaatgcttcggctggtctggtcgttccctcatgcgagctggccgtag

SEQ ID NO: 3114 - DNA, 918 bp, Zea mays
  Peptide Sequence Number=SeqID_46489
atgtcgtcgtcggtgcccccgccaccgccccagcaggagctggagtcgccctccgccggcggcgacaaggtcctggccgcagcgcagcacatcgtcaagtccctcgccacctccaagaacgccgctgacgacatgatccgcatactctccggcttcgacaaccgcctctcctccatcaccaacgaccacctcttcccctcccccgaccttaccgccgcctccgcctccgagatctccgccgccgccgcctccttcgacgccgccgaccagctcatccagctctgggacgccaccccggacgcgctcgtcttcgaggcccccgaggacgacatcgcgcagtacctcgcggccgtggacgtcgccatcgaccacctcgcgcgcggcggccccggcggcgcgcgggccggcgaggagctgcgccacctcatggtccgccacgccgtccccatcgaccccacgggcctcttcttctcgctccgccgcctctcgctcgagtccatggacgacctcgacgcctgccccgacttcgacgccgccacgccgcacagcctcgacgccacccccgccggcccggagaccgcgcgcggcgcctccctcggatctaacccctttgaggaccaggtgttcgatcccgtgcgccccgaggccgtcgaagacctgcgcgccatcgcccaccggatggcgcgcgcgggatacgcccgcgagctcgccgacgcctactgtggcatccgccgcgacctgctcgacgagtacctctccgtgcttggcgtcgagcgcctcagcatcgacgatgtgcaacgcatcgagtggaagctgctcaacgacaagatgaagaagtgggtgcacggggtcaagacggtcgtgcgcgtgctgctggctgaaggtaaaggattcagagctggggaaggttttgggtga

SEQ ID NO: 3115 - DNA, 963 bp, Zea mays
  Peptide Sequence Number=SeqID_46490
atggatggcggcaaccacccccgcggcggtgagccctccttctcgcagctcctccaaggccttcaaaaggggctggagattcttctgtctctcgcgcggggtcccgtagcgccagttactgccgacggcggtcaccactcattgagaaaacgacgggagcctcccatcgtccttccggaggtaaaaccacctgcgctgccaccccttgttcgaagatacgaggatggcagggatgtactgctgcgcccgcgcctgcctcaactggaggatgcagccactggcccgcaccgccatgcgaactcttctctcccccgtcgtcgaggcaaaaagctccgcggagaagagatgggtccacaggtcccagtgggggcaatccccaaaaacccttcgcaaaccgccgcgaagatggctgcttgcgcgatggagttggggctgagattgtgcagctccaccccagacgaagctcagcacataccccggcggcggggacagggcggctccactcggaggggccatccactccggctgcgggtcaccggagagaggacgaagcaaaccatcggcgacaagggcctccagatcgtccgtcgtgacggtggagaaaggccacgggtcgcgcggcgaaacaacggttacccggtcggccatcaccaagcagaggaggtggcggcggagcggacaaggcggcacctttggcaggcgaagcaggcgacgcttcacctccgccataatgaccgcgtcaaaaaagggaccgagaaaggggatactccaaaaaggatccttctccgcgaaggaagcgggccccgagcccccctactgatcagaggttcaaaggctggcccctcggaagggttcgacagccgcctcagagcgctcgggctccgagcccacctactgatcagaggttcgaaggctggcccctcggaagggttgagagcacctagagggggggtgaataggtga

SEQ ID NO: 3116 - DNA, 933 bp, Zea mays
  Peptide Sequence Number=SeqID_46491
atggaacccgacgtcgatgaggtggtgttcgacgccccgggttacttccgtatctacaagaacggcagggtagatcgtttcaacgaaccagtgctcgtggccgcgggcgtcgacgacagcagcggcgtctcctccaaggacgtcgttctcgacgccgacaccggcctctccgtgcgtctcttccttcccaaccgccatggaccttgcggcgagaagctgcccgtcctcgtatacttccacggcggcgggttcatcatcgggtcggcgaagtccgccatgtaccataactacctcaccgccctcgcgtctgcggccggtgtcctcgcggtgtcagtcgactaccgcctggcgcccgagcatcagctccccgcggcctacgacgactgctgggctgcgctccggtgggcggcctccgcgcgggacggctggatcgccgagcacggcgacgcaggccgcgtcttcgtcgctggcgacagcgcgggcggcaacatcgtgcacaacgtgctgatgaaggcgtcgtccgcggacaagggcgcgccgaggatcgagggcgcggtcctgctccacgccttcttcggcggcagcacggccatcgacgtggagccggagcgcgcggtcgcgataacgaagaagctgtggtcgttcgcgtgccgcgacgcggccggcggcgcggacgaccccaggataaacccgaccgcgccgggcgcgccggcgctggagtgcctcgggttcttgttcggccgtactccggcgggagcgccgcctcggtcgcaactgtgccaccgtggcatgttgatgggtggaagacaggtctgtggccgtcgatcttatgatgggtggctaggattagatcttagtttaccctttcgttccatcgaggctatgccgttggattgggatcgggcgtatgagattccatcgctagtgttttaa

SEQ ID NO: 3117 - DNA, 417 bp, Zea mays
  Peptide Sequence Number=SeqID_46492
atgaagaagaagagcaagagagatttagagatgaagcacaaaaccgcagctctcaagctcactcaaagatttctctccaaagatttgaaatgggagaggcaagagatgtgtgtgagagagagggaggtgtttcttgggttggaaatggagttcaaatcgttctcactactatggggtgagaggggggcggttgaaccacccctgacagctcctggcgacctgtttgccagtctgactggcagagtgcagatcagaggtcagaggggtcaaagaccagctgaactgcccctcaggaccagttcaactggtcttgaccaccatggtacctcggtctacaagccgtcgcttggccttcaccttcgcctagttcctcgaagccctttccttgctatcttcaccctatcaagccattcttga

SEQ ID NO: 3118 - DNA, 297 bp, Zea mays
  Peptide Sequence Number=SeqID_46493
atgaaatcccacgtcaccacaaagcttgaagctaaattgggcattaatatgtccttggtccttggcaccagaagagccataagtcttgaccacgagattgacttcggcgactcggaatactcggaggaggagttctcctccgagtccgagggagacgacgacggcgacgacgacagaggcgacggtgacgatggcgacgatgacggcgacgacggaagcaggggcggcaacggcggcagcagcaggggcagcaacagcggcggcagcagcaagggcagcaacaaggccagtggctag

SEQ ID NO: 3119 - DNA, 1677 bp, Zea mays
  Peptide Sequence Number=SeqID_46494
atggtggctaccgtagtgccaaaggcaaagggcggtgctcttagtgccggcggcgagatgccggcactcactgctgtcagggacgaggcgggtgctgtgtcccgccggctgaaggagatgaaggaggcactgagtcaggcggctgactttgcagaccgcgcggcgtcgggggccctcacggcggttgtgtctgccgaagtcgagagacttcggacgcaacatgatgacgccgtccgggaaaagtcggccgccgacagtaaatgccgcaagctggcggataaggtggccgtgttggagggtgagaagactgtcctccggcgccaactggcggaggagaggaaggaggccaatgaggccctcgccaaggcgcagtctgcgcaggcggaggccaatttggcgcgggcggaaggcagtcttgccaagcagcgcgccgagcagttggaggagcggctcagcgctttgcgggctcgtgtggagagggccgaggcctcgacgcgcgcggaggctgagcggacacgcaaacaacttatggattcataccatgagctgggcgcgcggaccgctgatttcgaagtgctggaccgagagcccggacttcgctgccttgagtgggtacaggaggagttgcaggcgctccccaccatcgtggaggggtttatgtcttatgcctccctggtcacctgcgagggggcgatgaacgcgctctctcgcgaagggtgccgacactatgaggtcttcgaccaagctgatgaggatttcgagcgtgatatctacaaggttgaggaccctatagtgaaggaatccgccggagccctctacgaccggatgtggggcccccacggtcgagaggtggtccgggagcgggccgagacggcgaggggtcaggcggcacgtggcgagagggtggatgacttcggggctttgaacagcgcgctgcctgacccggagtcaaacccagcggcggctgtgtccgaggccgccctggagccgcccccggaaaccgccgaaggcgctcttgatgcccccgcagccgctgcggccggcggaggcccgcccccggaggccgccgaaggcgttcctgatgcccccgcagccgctgcggccagcggaggcccgccgccaactgctgcgtcgagggctgaggatcctgtgacggtggcggcggaggcgacagcggaggctcccgcgacggctgggtcttcgcaggttcaagattttgggcctgtgcacgcaaccgctactgctaattttttggcggcttcgaccgtggatgatgggaataaatcggatgagtctgcatctaagttttccgagtttggtgactctgggagctctgttgagtggaccgaagagtcgtcggatgaggacttggactactttgcggccttggatgtggcagcggcggaggctacgccgcatgcagcggatgctgaagctgtgcctggtccgagtgctgggcgcaggcggcgaagggcggttgcgaagcgtagagtgagtgaggcggacggcggtcgtcttcgtgtgagcagggctggcaggcaagaactgttgtccttgccggccactgtgagttcaagtgagggggagctgcgaagtctttttgcgggtgaggagctgaggataatgttgtttaactatagggagatgggaattattccgaaggttgagccgatgtaa

SEQ ID NO: 3120 - DNA, 48 bp, Zea mays
  Peptide Sequence Number=SeqID_46495
atgggcacaccggacagttcggtgggccaccagacaggaaaaggttaa

SEQ ID NO: 3121 - DNA, 651 bp, Zea mays
  Peptide Sequence Number=SeqID_46496
atggcgatgccgtcgagtacaccgtcggcagcggcggaggagcgggagctggaggacaaggccagcgacattgccctcaccaaggagaacctcaaggagaaggatacatccctggacaggcgggcggtggatctcgccaggcgagaaatagacctcgccttccaggagaaaatgcttgaaaggtggggcatgttgctggccgagcacaagctggaggcagaggagaaggagcagaagctggaggagcggatccggcagttccaggcggcgcaggtggcaccgggcctccaggcggtggaggccaccaggaaggcacttgaagaccttcgggcggagcatcgcgctggggttcagcgcatcgccgcatgggccggcgaggcgagcacgacactggtgccgctagggatgagtcccatcctggtgtcggagctgccgatgtccatctccgacgcgctcccggtgctggactccaccgtcgatcgcctccgatgcctggaccagattcttggtgcccgcctggaggccgagggcggcaggctctgccgggtggtgattgagtatatcttgacgtgcttccggagccacgacccggccatatccttggagccggtgatcgctggtccggggaccaacactgaagacgccgcctga

SEQ ID NO: 3122 - DNA, 960 bp, Zea mays
  Peptide Sequence Number=SeqID_46497
atgatcgccggatttggaccccgagataacggtcagttggcggagtccgaaggagttgcaggtgaagaccctgagcagcagtcggttggtgaaggcaagtgtcccttgacccatctatgtcctactcattcttataattcactccccgcatttacacagtttatacctaaggtggtgatgaggatgatgattttggttatgactatggtattgcaggagatagagtctgtgaggagctgctcccctgtgctcccgctggaggcgccccctgcaccaccactgagcaccccaaccgctagagtagctgctagaggagacccagacgacggaggtggcgacagcagctcgagccacagcactgacctttcagaggagcaggagttagaaggatgggttgctcgacccatcactcgcgacgctgctcgcgggtgtcactttcatgatgcgctcgacaccttgctatgccaggcactcgaccagcgtacctggtccatcgagtatcgttgtgtggtcttccagcacagtcgcgggatttacccagaccattgggaggcgacctgcttggtgcgccgtccggagaacagtctccagggtgcggagatctgctcagagcactattctatctctgagcgggactcagctgaggtggctatgaaagatgtcgcacggcgtgcgctttcgcactactattcagtgctcggcagggtagccgacggtctcaacctgaagtattacctccgtcgtccatctggcaacacaggaggcgtggttgtctcacctgttggtgaggacaatcctaggttgagcagcacaatcaacctagccaccgtgctaaacacggagctggaccatgcattagacgagctgagtagggctcgtgctgagatcgcccaactgcgggctgagcacgtggagcatcgtcacctggaggatggttcccccgctcccgtccggacttag

SEQ ID NO: 3123 - DNA, 177 bp, Zea mays
  Peptide Sequence Number=SeqID_46498
atggctgctgctcttgacaagaaccggccacttgaagttcctccgggagaaggaggagtcgtgggggctcttcgccatgatggtcctcatggttcctggtgtgggactgtgggcgagggtgaaacggtagacaacaagctgcagattctggcaggctgtgactgtgagcagtgctaa

SEQ ID NO: 3124 - DNA, 675 bp, Zea mays
  Peptide Sequence Number=SeqID_46499
atggctggagcacaccttggcactcaagactatgatcacatgtggaagaacttaaggagcaaaagccgtatctgccccggcgtctcacagttgagtgacagccctaggtgccaggaagaggtctgcgccggacttttgcaaagattcgcacgtttgcgacctctggcgacatttgaacactggaagaaacaaaccgccacgtgttcgacgccgtctgccgcgccagagcacgcccgcgcgcgcgcccgcgccgcgcccaagccaagccagtgccctgccattcccaaccccgtccagccctcggagaagactgtgcacgtctccgtgaagctccccgagcgaggaatcgggctctgcttcaccggagaggccggcccaaggtcaccggacttcaaccgaccgccggcaaccgtggaccgaggtacaccgtgcacctctcttcgattccttgcacggttagactccttagacctccacgaagctccctatgcccttggattgaactatgccgccgtggataggcccggagcacacgccgccgacgagctcgccccgcctgctcacgtggaccgggcgattccggccatccccgacgacgagccgtacctcgacgtgatcgccagaccctccccgagccaaccctacccttcgccggacctccctcgccgccggtaa

SEQ ID NO: 3125 - DNA, 1203 bp, Zea mays
  Peptide Sequence Number=SeqID_46500
atgcagacggcatgcaactgcaccaaggggatgcgccctttcgacttcgacgcatccagcatggcggcccaggcccacacgtcatgtaactggtgcgatagttactacgtgcgaaaaactccaccgccacttgcgctaatgccgcgcctcctcgactgcgaaaccagtgtcgcgactcgaggcaaccctgcgcacggcccagcagtgccgaccaagcgcatcggtcatgggtcagtcagccgcgggagaaggcgcgatggtcgatatggcctaaagtggaccgatagtaatggcggcagcaggcgggaggaagcagcagtcaaatcgtctgcaggctcacgtcccctcttggggcagcaggggagccctctaccacggcgtgaagacgacgcgcccgtgttccgtccctcgaacggctcgcacaactgctgccccgcgaaccactcgtcccgtcgcattgactccacggcagggcaggcgaagcggatgacgcttcacctccgccataatgaccgcatcaaaaaagggaccgggaaaggggatactccgaaagggatccttctctgcgaaggaagcgggccccgagccctcctactgatcagggccgcctcaggccactcgggctccgcgcccactactgatcaggggttcgaaggctggccccccgaagggttcgacagccgccttagaacacgcagagcaagggatgactctgggtacgtccgatacatggccaaggctcgggctacgctcccgagggtgaggctgacaacagccgagtccagcctcaggcgccataggaagctccgcctcgcccgaccccaaggctcggactcagcctcgaccttggaagacggtctccgcctcacccgaccccagggctcggactcaggctcgacctcggaagacggtctctgcctcgcccgaccccagggctcggactcagcctcgacctcggaagacggtatccgcctcgcccgaccccagggctcagactcagcctcgacctcggacgacggacttcgccttgcccgaccccagggctcggactcagcctcgaccttggaggagtctccgcctcgcctgaccttgggctcggaccgaccacgttacagggggcccatcattaccctacccctagctagctcaggctacggggaacaagaccggcgtcccatctggctcgccccggtgaacaggtaa

SEQ ID NO: 3126 - DNA, 519 bp, Zea mays
  Peptide Sequence Number=SeqID_46501
atgtcagcctcagtatcccgtgcaatatttccggctgcgcgtccaccaccatacccttatccctatcatttgtatcaatatccaccgtcttcatatggtcaacctccaacttccgaagctggaattcaagcttcattcccgatacgtctgtatgcccctcccccacctgctaccgatggaagtcaagcttctttccaggtacctccgtacgcccctcctccatatgctccacctccgcatgaagcacctcatctatatgctccacctccatatggagcacctcctccagttgcacctttatttgttggatctgaaaaccaagctgaggaaaatcttgtgccgaaggaaaatcgtccaaaaaggctagagtggacgactgccgacgagaaaaagcgggctgaggctgtagcctgctgcagtctgtgcactgtagcagcagaggatcctgcagaggctgacaagttgttgaaaattcagagggacttggatgaaaccaagattattcttgagcatgactaa

SEQ ID NO: 3127 - DNA, 867 bp, Zea mays
  Peptide Sequence Number=SeqID_46502
atggagaagcgacacggcggcggaggttgcaccctgctccacctcctcggcaccgccgccgccatggcgttcctgctgccgcggtccgccggagctgccaacgacgccaagtggcacgcccatgcccatccggtcgccggcgccgtcggccacggtgcccccgcgccccacgaacacgcggccggcctctcgccgctctcggcaccgccgcccaccgcgggagccgacgacgacttgctgccgccgccgagccgcgcgcccgtgcagaaggccgccccgcacttcggcttccctctgcagccgggcgacgcgtccgcggcggccccgtccggaagcgaggggtacccgtttatcggcagcaacccgacggtgccgctgcccaccggcatgaccgacacctccaccgtgctgccgctgccggacacggggaccggggacgccaccaccaaggcggtggggttggcagcgtccgttcgtgctcccgtctcctccatgattgggcttggggttttcctcgccaccctgttcctacacaaggaggtgcagagttttggctccagttacctggtccgtggtgttgatctggagcaggggcagacggatctcatccaacaaataaaggtgcaactggaggaggtgctccatatggaggtggagcatatagatgaggtgcttcatgcggaggtggagcatatggaggaggggcgtacggaggttgaccatatgaagacggtggatattgatacaaatgatagggataagggtatggtggtggacgcgcagccggaaatattgcacgggatactgaggctgaaacatcggagcgacgatgtagtggagaagactcatcaaacggaagggttgtag

SEQ ID NO: 3128 - DNA, 303 bp, Zea mays
  Peptide Sequence Number=SeqID_46503
atggctgaaaggtaccaactcccacggagttgcgttcctccaacgacaaggcggaaggactgcgggtatcccccatccgggggctcggaaggtggaaagacacgatgcataagggagcgcgaagacatggtcgcctttcaagggggaggctcgggggctgctctcgcaaacccggctccggccaaaccattgacagcgtcaacataccagcccgagaacttgggacccgaccgtgcacccgggctacggccagctcgcatgagggaacgaccagaccagccgaagcattgtgcgaggcattaa

SEQ ID NO: 3129 - DNA, 1590 bp, Zea mays
  Peptide Sequence Number=SeqID_46504
atgggttttcagttcacaatgaatcctatctctgctcatcgccgagctctctccaccagtaacccaattacctgtcagggcgttggccgctatggcggaatcaaggtgtacgccgtgctcagagacgacggagctgagtttgccaagaacaacaacctggaggccctgttccatgtggatgaccccgggccgagggtccccatcaagaagggcaagttcctggacgtgaacgaggctctcgaggtggtccgttttgacatccagtactgcgactggagggcgcggcatgatcttctcaccatcatggttctccacaacaaggtggtagaggtcctcaaccccctagcgagggagttcaagtcgatcgggaccttgaggaaagagcttgccgagctacagcaggagctggcaaaagctcacaatcaggttcatctctcggaaaccagagtctcatctgcgctcgacaagctagcgcatatggagaccctggtgaacgacaggctgttgccaccggacggagcctctagtacgtccacggcgcagcccacttccttggttccaagcacttcgtccaccgcccgtgtccgagccaagaaaccgccacgtcggggccttaacgtgtctggcccggtgaagccgtacaatcccagcctgaagaacttctggtacccagtcgccttctccagtgatctgaaagatgacaccatggtgccgatagcttgcttcgaggagcagtgggtgatattccgtggaaaagacggaaggcctgggtgtgttcagaacacatgtgctcacagggcttgcccgctgcatcttggttcagtgaacgagggtaggatccagtgcccttaccatggttgggagtactctactgatgggaaatgtgaaaaaatgccatcaacaaagatgctcaacgtgcgcatccagtcattgccatgctttgagcaggaaggaatggtctggatttggcctggggatgacccaccaaaggctacaatcccttctcttctgcctccttcaggatttacagtacacgcagagatagtgatggaactgccagttgaacatggactactcctggataacctcttggaccttgctcatgctccttttacacacacatccacctttgccaagggctggagtgttccaagtttggtgaagttcttaacacctgcgtctgggctccaagggtactgggatccttacccgatcgacatggagttccgaccgccatgtatggtcttgtcgaccattggcatctcaaagcctgggaagctagaagggaagagcacccagcaatgctccacgcacctccaccagctccacgtctgcttgccctcctctaggaacaaaactaggctgctgtaccggatgtcgctagacttcgctccgtggctcaagcatgtcttgaacgaggacctacggcttgttcttggtcagcaagaacggatgatcaatggcgccaacgtctggaactggccggtatcatatgacaagctcggggtccggtaccggttgtggagagacaccgttgagaggggctctgaacggttgccattcagtaaccaagctgagagtggatcatag

SEQ ID NO: 3130 - DNA, 528 bp, Zea mays
  Peptide Sequence Number=SeqID_46505
atggcggacctagaggtgggctcaattgggtcagaggaggtcgggagggggctgcccgcggggaggtggcggagctccgcggcggggatcgccgtcgggagagagaggagaggggaggaactcaccggagagaaggaagatgacggcgcttcccgaattgggctcgggcgaggggaggagggtagcggtcgaggctggtgcgaggaagacggggttcggggcgagctttttataggcgcgcgggggcgaggggagcggtggagctccctgactccggcgagcttcccggtgccgccattaatggcgcacagcgccgccgaggggacgctacggcggggcggtactggagaggacgctggtcaagggaaggaggacggagcggtgccaaactttcctgtgcggcgaggagacggcggtgaagagacggcggtgaaggacggcggtgaagggacggcgggcgtcgtatgcggggaggatgacgaagcggctgaccggtgggccggtctgccagtgggagcgagcgcgtga

SEQ ID NO: 3131 - DNA, 1149 bp, Zea mays
  Peptide Sequence Number=SeqID_46506
atggcccaagggcacatttccctttcacattccgtcctttgtccgggcgatggtggccagccgcaccggggggtctcacaacacgtcgtacgccgcgagggcggtactcgtgttctagggcggtcccattctcgtttttgtggcgaggacgggagtgaggacctgccggtgcgctttggggcgcccggcgcccgctggtgcggtgttggtgggcaggtggacgccgccgccaatgctgaggtggtggcagctggagaaagcttctccaccgatgagaccgtcagcgccagctgcggaccgacccccgactctttggctttaatgtctggttctcgtccctcgagtggggacgcgaacgagagccttccagcggtagcgttcgccctgggaccatcgctgctgctacagaggtcgccggcgagccacccggagcttgtcgtcccgcaggctctccgatgtggaggttgttcatacccgcgggagtggaaccggagttccgtttataatggcaccttgagtgccggtgtatgttcattgtggctgtcggggcctgaacatctaggtattttgggtgtaatactgaaacctcggctgctctgcaatgagccggagccggaggcagcggtgtcagcgtggacagaggcgaagttggctcgagaagaaacttcgtcggcccaggagcaagtgacttcccaggccgaagaggcatatcagcggcagctggaacttggtcaggtcgtccactggcgggaccgatgccggagtcgggctgccgaggccatgagccgggccaaggtcctcgggggacagctggctgaggctacggaacggccgatcaagccgtctgcttgggccgggttcctggaggggaccctggcggcgatggcccaggcgcgaatcgtttatccgagcgagagttacttatcgcggaaggtgatgagtgaggattatgttatcgatatagtcgagaaggcacgaaaaatcatttcggcagaaaagttttcgagcattaagacctgttcggtcaacggaatcgcttatccgagcgtgagttacttatcgcagaaggtgatgagtgagagggggttcccccttctagcccccgagggagggtcgggctttgccgaggcaaggctgacccttccttga

SEQ ID NO: 3132 - DNA, 342 bp, Zea mays
  Peptide Sequence Number=SeqID_46507
atggtaacccctggtgaagatgtcggtgaactgcagcgtggtggggacgctgagaacccaaacatcgctggtagccacacgctcacggacgaagtgcatgtcgatctccacatgctttgtgcactggtgctgcacaggtttggtggagaggtagacagcgatgacgttatcgtagtagataacggtggcgcactgaagggggctgtggagcttgtggaatacctagcacatccaggaggcctcggccacgtcgttggccacagcacggtactcgacctctacactggagtgggagacgacagactgtcatttggcggcccaggagacgaggttgacgcctag

SEQ ID NO: 3133 - DNA, 453 bp, Zea mays
  Peptide Sequence Number=SeqID_46508
atggaggtagcgcatgatccgcttgagagcggtgagatggggctcacgtggggtgtgcatatggaggcacacctactggacagcgtaggcgatgtcgggccgggagaagttgaggatgtcgatggcgtactgggggtggtgaaggaagataccctagggcatgcgctcagcagtaatgttgacaaagtggtggaggggccagtagacagtctccatcagagtgccatggaggaaggcattcttgacgtcgagctgatggatcgcccagtcccaggagagggcgaggacgatgcaaatggtggcaaacttgatgatgaggctgaaggtctcgtcgttgtcacacccggatttaggggtccaaacacgggcgcaattcacatgtatgttaggatcaagtctcacacatatgatgactcatggtacaaaaacgaatgttacatctttaatatttaa

SEQ ID NO: 3134 - DNA, 879 bp, Zea mays
  Peptide Sequence Number=SeqID_46509
atggacgtgagcaggaagaagaagtgggtggcctgggcggtggcggccgccatcttcgtcgtcctcatgctcgtcacgcccgccatcccgcaggacgaagcctaccacgacttcgcggaccagcgcacccttttcttagggattcccaacaccttgaatgtgatctcaaacatccctttcttctttgttggcgtcacggggctcatcctgtgccacttcaacaactatttcaggctaagctcgcagggggagctctggagttggacgctgttctttgctggtgtcacggctgttggatttggttcttcctattatcatctcaacccgaatgacgccaccctagtttgggacagactgccaatgacgattgctttcacttctgtcatggctatattcattattgaaagggttgatgatagagcaggggcaaaatcccttgcaccacttgtgattgcgggtgccttgagcatcatacactttgatgatcttcgcccgtacgcagtagttcagtttgttccatgcattgctttacctgtgatggctatagtaattccaccgatgtatacacattcaagctactggttgtgggcagcaggattttacctccttgctaaagtggaagaggctgctgacaaaactatctacaattggactcatcagattgttagtggtcatactcttaagcatctatgtgctgcgatggtaccggttttcctggctctcatgctagctaaaaggactaccgaaccagaaaggataagcttgctccagaagtggaagaccagttgggttgcggtgagagagaggcgtttcaaagatagcagtacagttgatgtggattgcggctacgctgttgtttcaagtatatctgaacagtaa

SEQ ID NO: 3135 - DNA, 438 bp, Zea mays
  Peptide Sequence Number=SeqID_46510
atgggcaaaagcaacaagcgcaagcgtgagccgactcctccatcggaggatttcggtgactcggaatactcggaggaggagttctcctccgagtccgaggggtctccggctcccgtctctcccccggcgtcgtccgatgactcggacgactcccaggggatagccgcggaagtctggacgtacatccgagccgtcgagcgattcgggctcgagggctcggatgagtcggagtactcctcggatgaggaggactcggacggcggcgacgaggacgaggacgacgacgacgacgacggcggcgatggtgacgacggtggcgacggcgacggcagcggcagtggcaggggcggcggcagcagcaagggcagcactaagggcggcagcagcaggggcagcaccaagggcggcggcggcggcaggggcagggccagtggctag

SEQ ID NO: 3136 - DNA, 525 bp, Zea mays
  Peptide Sequence Number=SeqID_46511
atgggacaacgaactgacttcaatgaactgactatcaagcaatttcttactactgctgaaattaatattcaagatcagttgattgtctggatgattgggtttaagcgttatgtggctacctttgttgaatttgccactgctaacagtctggactatgacatgatctctcagggggtagatctttacactaaggaccaatttgaagattatgctcaatattatgaacctgccaggctgggtatacctaggcatttcagtgagactccaggcctgcgacatcatccagcagtcatcaacaaaattgctaagatggacaaaaatcagaacctggcatatgctccttatattatggctctgattaaggccaaaaccaggtttgaagggcgacgtgaaacaactcacactccatttaggccatttaagaatgagattggttttcttactaggcccctcactccttttcctaatgatgaaggagttcaggcagatgattttgctactcagcttgaggcgcatccagcttag

SEQ ID NO: 3137 - DNA, 390 bp, Zea mays
  Peptide Sequence Number=SeqID_46512
atggttaaaaattttggcagcaaaacagtgcaaatagcaatgaatgctgtggtaacttcacaactacttgtcagtttatatagtgctgcagtggaccgcaaggatcaaacagtaactctgcaaggtgggaccgacgcgcgctcggaagtcggatcgtttctccgcaacgagctcagggaaggtgttttttggaccttcggcttcccgaagctgaagaggcttttttcacgggtcaagctcgttacgaagaacgatctagcaccgcgaaaggggctactgttggggttgtgcttcggtgcgccgaaggtctcacacgaagaaacagcttcggctgaagtcgtctccaagagatggccgaaggtcccttttcatggagcttcggcgttttaa

SEQ ID NO: 3138 - DNA, 957 bp, Zea mays
  Peptide Sequence Number=SeqID_46513
atggcggtggcaggtgggcggaagcagcagtcaaatcgtctgcaggctcacatcccctcctggggcagcagaggagccctctcccacggcgtgaagacgacgcgcccatgttccgtccctcgaacggctcacacaatggctgccccgcgaaccactcgtcccgccgcattgactccgcggcagggcaggcgacacctttggcaggcaaagcgggcgatgcttcacctccgccataatgaccgtgttaaaaaagggaccgggaaaggggatactccgaaagggatccttctctggcaaggaagcgggccccgagccctcctactgatcagaggttcgaaggctggcccctcggaagggttcgacagccgcctcagagcacttgggctccgcgcccactactggtctgaggttcgaagagcgagggatgactctgggtacgtccgatacatggccgaggctcgggctacgctctcgagaggctcgggggctgctcttggaaacccggatctggccaaaccgttgacagcgtcaacataccagcccgagaactcggaacctgactatgcacccgggctacgaccagaaaacagcgccgcctgccctgctctgactactgtgccacccgccagggtgagcctgacagctgccaagtccagcctcaggcgccataggaagctccgcctcgcccgaccccagggctcggactcaacctcgacctcggaagacggtctccgcctcgcccgaccccagggctcggactcaacctcgacctcggaagatggtctccgcctcgcccgaccccaaggctcagactcagcctcgacctcggaggagtcaccgcctcgcccgacctcgggctcggaccgaccacgccacagggggcaaggatccgacaaccccgacaactgtacttctacagggtttaagcgctcctccgacggcaacgacatcacatga

SEQ ID NO: 3139 - DNA, 141 bp, Zea mays
  Peptide Sequence Number=SeqID_46514
atggagaggctagaaccccgtgcagaatgggaatcatggcttgtgggtaaagtgtacaacctctgcaaagtgttagaaactggaggagaagctggcaacatggatgacttcgaggagttccaggaatatgacgagttttag

SEQ ID NO: 3140 - DNA, 219 bp, Zea mays
  Peptide Sequence Number=SeqID_46515
atgcctgtagagtgcttgttgggggccttcgtcctccgaaggtattttcggatccagaattatgaatatggagcacggccaggacgaagcctgaaccagacgaaggtcgagtgtagccgaagctgtgcgcagggaagcttcggcgcgatggcagaagggggaaccgacttaaagatgaaaagacttcgggggcctcgacagatttccataagccgttaa

SEQ ID NO: 3141 - DNA, 183 bp, Zea mays
  Peptide Sequence Number=SeqID_46516
atgggaaccaaggcaagcttgtcaagcagggaaacaggtgggaagctctcatcatgccaaaaatgtgatgactacatcaagacccctggagttacttcatatggacctcttcggacccgtcgcctatctgagcataggaggaagataaatctgaaacccaagggaccctcaagcgcttcctaa

SEQ ID NO: 3142 - DNA, 579 bp, Zea mays
  Peptide Sequence Number=SeqID_46517
atgcaagagttgatggcacaacagaatgagatcccgcgtcaggttgctcagcgtcagccaccaccgcagcactatggtggtggtgatcaccatcagcgtcccccggcggcagccacttatcaggagttcctcagtacctggccaccactgttcactcaggcagaggacccacttgatgctgatgggaaccggacagagttgcagtacgctcaggccttcaatgacctgtgccagtacgccggatatcatgtagacactgatgagaagaagagggacagattcaggagggggctcagcactaagctccgcgaccgtctcaacacagttagggccaacagctataatgagttagtcaacatggccatttctcaggaggattgtatcacagcccggcaggcagagaaaaagaggaagacccctgtggcaggacctttagctcagccacagcgcttaaggattgtatcggacacccagaacaggggaccccagcagcagcaaggacgttgggtgattcgaccccaacagcagcagcaggcacccgcccgctctcagcccccagtgcagaggaacaatcagtag

SEQ ID NO: 3143 - DNA, 597 bp, Zea mays
  Peptide Sequence Number=SeqID_46518
atggccgacaaggacaaaggcaagggggtcatcatcggtcaccctcgggccctcgatgtgcataagttcatctacaactattctaagttgattatccagaataccgtagattattctggacaggagaagctttttggaaaaacacctatgcgcgggctgtccgggcccttgtggcagaccgtccacgacaccaggagagctccgccaccgcccgccgacgcccaccgcatgttctgtcgccaccgttgcacctatgccccgtccagtgccacgccagagtctgccatcgtcgccccatcaagccccagcgcctccgccgtcgttttgctacgccagcgcttctgctcgagtgccgctgttagcccgctccgccgtggtctgcgccctctggtgctgctgcgccagcgtgtaggccatggccgagttcgccagaccgccctgattgcgcctaggctagtccccgagcctctagtgccccgctgtggccagtctgctcgtctccggcgaactctcaccgcgggaccgagcggcgccaccacgcccaagccagccctggccgttagatctcggtcgtttgtctcagatcggatggtttag

SEQ ID NO: 3144 - DNA, 141 bp, Zea mays
  Peptide Sequence Number=SeqID_46519
atggggaggctagaaccccgggcagaatgggaatcacggcttatgggtaatgtgtgcgacctctgcagagtgttaaaaactggaggtgaagctggcaacatggaggactttgaggagttccaggactacgacgagttctag

SEQ ID NO: 3145 - DNA, 81 bp, Zea mays
  Peptide Sequence Number=SeqID_46520
atggacaagctggaggccctcttgaggcccaaggagggtcagtccaatccggccgttctatctcagtgccaaggttattaa

SEQ ID NO: 3146 - DNA, 852 bp, Zea mays
  Peptide Sequence Number=SeqID_46521
atgtcgtcgattccgccgccggcgggcgggttgtcggccaccattgtcgttgtcgcgcggtggtggaaggagtatcatgtcgtagctgccgtcgagggacatgaactcaagactcccgaaacggagcaccgtcccgggttggagaggttgttggagactgcccatctggagcttgacgggaaactgctcgtcaacacgcagcaggcccctacctggcgcgccaactgtcggcgtctcgagaccggggggtccctcaggccgacgagtgagtgtgccgcgtgccccagcccagatgggtcgagcgcgtgggcgagcgcgaaggtgggaagcgaggtggccggagacgggcgtgagagaggtggaaatcccgcggccttcgtgttcgtcccgcgcccagccggagagatcttggcaccctgctggtgtgatgtcgtggctgtcggaggagcaacggagcctggcggagggacagctgtcggagcggttgagtccttgctgacgtccccctgcttccgtaagggagctgagagccgccgtcgtcacagggctagcggggcgccatcattgtctatctgggcggagctagccagatgggacaccgggtcttgctctctgcggcccgagtcggctcggggtagggtgatgatggcgcttcctgttgacgtggcgggtctgtgccctaggtcgggcgacgtggaggctcctccgaagccggggtcgagtctgtcttccatggccgaggccgagcccgagctcctgggtcgggcgaggcggaggtcgttcggcagaggccagggcggagtccgagccctagggtcgggcgaagcagagttcgtcgtcttctggggctga

SEQ ID NO: 3147 - DNA, 1203 bp, Zea mays
  Peptide Sequence Number=SeqID_46522
atggcccaatacggcctatccctctcccgcgcccgcatgggccacaggccggcccaacttcctacctatcccgccggctacgcttcctatttcgctgacacgttgggcccttgctccagcctctcaatccccacgagccagcatttggatttcttctctgaccggtgggaccctcacgtcaggaccttcttcacccgatcggactccgtaacaaactcaagcgaaggtcgcggtctctgctgtgatctcttcgcgcgcgtttcgggagggttggggcgaggctgggtttctgtatcggactctgccgctgagtataaaacgagtcgaaaccagcgccccttaccatgtccatcgcgtgctgggggcgttgtgcccaatctgggagccgccgcaagtgagactgtgatgggcgccgccgccttggcgccccctgcaccaccactgagcgccccagccgctggagtagctgctggaggagacccagacgacggaggtggcaacagcagctcaagccacaacaccgacctttcagaggagcaggagttggaacgatgggttgcccgacccatcaccagtgacaccactcgcgagtgtcacttccacgatgtgctcgacaccctgctacgccatgcactcgatcggcgtacttggtctatcgagtatcgatgtgttgtctttcagcatagtcgtgggggtttacccagaccgctgggaggcgacctgcttggtgcgccgtccggagaacagtatctgggtgcggaggtctgctcagagcactattccatctctgagcgggactcagttgaggcggccatgcaagatgtcacacggcgtgcgcttttgcacttctgctcagtgctcggcggggtagctgacggtctcaacctgaagtattacccccgccgcccatctggcagcacaagaggcgtgattgtttcacctgttggtgaggacaatcctaggttgagcaacacattcaacctagccgtcgtgctaaacacggagctggaccatgcattagacgagctgagtagggctcatgatgagatcacccagctgcgggctgagcgcgcggagcatcgtcacctggaggatggctctcccgctcccgtcgggactcagcacccgtaccgctcacctcagcgtggacaccatgcttatggtaaccccgactgcaggaccaagataaatttagaaccatag

SEQ ID NO: 3148 - DNA, 240 bp, Zea mays
  Peptide Sequence Number=SeqID_46523
atggcgaaaaatacacggagtcgacgtcagaagaaactgaaagcatatgacctctcagcactgtccaagtccctcccagaaccaggtgcaccaaagcagaaacctgaagcaaagctgaactacaagtcaagacagacattagtgttacaggaggctggtcatctcaaggttgtgctaggaaagatgcagttccagcttgacccatttgctgtgatccatcagcacctgctagcaacatag

SEQ ID NO: 3149 - DNA, 309 bp, Zea mays
  Peptide Sequence Number=SeqID_46524
atggatctccctcgcattcgtgtggagaacggtgttattctggaggacagctcggatgagtttctgcctacgcccaccccgttggcagaagaagaagaagaagaggagagcatcaacgaggaagccaacggggatagagggttcaggactctgtcagctcatgagtctctgacgccgctatccacctacgctgcttcggtcaacgatgctgctatgcgaactctgtggtccctcagccacacttacaggcagcagctgcacaacacgaagtacagacatcttcctctgcgtattcatggagaaagctag

SEQ ID NO: 3150 - DNA, 687 bp, Zea mays
  Peptide Sequence Number=SeqID_46525
atggagtgcgagccggaggagctgcagttcctgggcgtcgtcggcatctacggcttctccgcggagatcctccgaggcccgcaccgctcgctcttcgcgcgcatcgcgaccgccttcgcgctgcccctctccgcgctcttcctcctgcacgttgccatctcccatgtgctcttcacccacatcgacttcgacgacacgaccctggacgcatcctccccgggcaccgacacgcagcgccgcctgctgtcccgcctcgcctcctactggctcgccctgctcctcttcaagtccgcttacctcctcgcgctcctcctgctctcgctcctctccgtcgtcgcctccgtctactccgccaagcgcaacacactcaccttcctacgcatgctctccgtcgtgcctcgcgtctggtggaggctcgccgccatgttcctcgccgccttcgcgctcctcttcgcctaccactccttcgtcgtgctcgtcttcgtcggcctcctcgttgccatggacaacggctctagcctcgcgggcctgctccccttccttgtcgtcgtcgcctacctgctcggcctcgtctacctcggcagaagaaagggtaaaccaaaatcaaaatcaaaaccaaaggatacatgttcatggtttgatggcggcagaaaagccatgatccaactagctggagaacttttctag

SEQ ID NO: 3151 - DNA, 717 bp, Zea mays
  Peptide Sequence Number=SeqID_46526
atggagctaggagggtggtgcaacaactctctggccgctgacagcgccccaggcgcagccctagatgccctggatgtttgcacgggagtgtgctgccgcgcagagtgcacagcagtggtcgcaccaggcgccgggaggttggtggcccgcggtgtggaagaggcagccgcttcttccaccacaaagtcctcggtcaagaaatcatggtgctcgacgatgtggaccatgatgttgagcagaagaacaagcaaaaacctaaagcctaccccctacctgcgccgcacagcccagaggccttacatcaggctccgcccgctggcttacgtcatgggcagtaggccacgtggtagcatcgggtctccgcctgagcggggagcagaagcgtacatggtatggtccggatacgtgtcggctccggacccccgcctggccttgatcaaggcctgggtattctttgtcccaggatcccgggaccctgctgagggtggtccggaccttacacagagaggtccgggacccatcccggggatccggtctgtacccacggaggtcctggaccctgcccggtggtccggcccgcgtatgcaggggtccgtcactttcccatggggtccggacccaccgttgatatcttggaggatattgtcttccctggtcacgtggcgatcccggagccgtccacatgatggggtcgagcacagtttaccgcgcgactag

SEQ ID NO: 3152 - DNA, 630 bp, Zea mays
  Peptide Sequence Number=SeqID_46527
atgtcccctgcccgtgcccgcgcctataaagccagccaaggcttcagtcgtatgcccccgcgcgctctcgacctcaccgaagcacgagatcgccggagtttgccctgcacacggcgtgccagcacccgcccgagcacccaccaccgtaggtcagccaaccgagccatccccagccccgtccaaccctcgagagagactctacgtgcctcggtgaagctcccagagcaaggaatcgagctctgcctcgccggagacgctggatcaaggtcaccggacttcacccgaccgtcggcgagcgtagaccgagctccacgctcaaagttaaagaaaatagaaaaggtttgtaatgtgcacttaagtgtaggagttgtttggaaccttagttgcatgactcaggatacctttgagatggatactagtatgctaggtcgagtagctgctacgctaattagggatctcggtagaagtcgagtgatttttctagcactcgcgcaaggtcaggaaattggttgtatccattttgataacagaatgatgatggtatgtggacacggatccatggggatgcgtggtctacgagatgaaattggaataaggattaacgtgcggatacctgtgtcaagcgtttga

SEQ ID NO: 3153 - DNA, 441 bp, Zea mays
  Peptide Sequence Number=SeqID_46528
atgggcaagagcaagaagggcggaagttcgtcgcaccactccggcgacaagtggaaatgcgagccgactcctccctcggaggacttcggcgattccgagtactcggaggagttctcctctgagtccgaggggtcgccagtccacacctctcccccggcgtcgtctgacgattcagacgattcccaggggattgctgcggaggtgtggacatacatccgggtcgtcgagcgtgctgggctcgagggctcggatgagtcggaggtctccttggacgagggggactcctctgactcatccgaggaggggagcgacggcggcgagggcgtcggcgacgacggggcgacggcgatggcgatggcagcaagggcgacggcaaaggcggcagcggtagcggcaagggcggcagtggcggcggcaatgccagtggctaggcaccactag

SEQ ID NO: 3154 - DNA, 201 bp, Zea mays
  Peptide Sequence Number=SeqID_46529
atggttaagaattttggcagcaaaacagtgcaaatagcagtaaatgctgtggtaacttcacacctactcgtctgtttatatagtgccgcaggtcttcaagggagaagcagctttataatgtgtgagcaggtatcttcggacttgtatcagaaagggagaagctcaaaagatacaaaggttgacatagcgccgaagctgtga

SEQ ID NO: 3155 - DNA, 456 bp, Zea mays
  Peptide Sequence Number=SeqID_46530
atggaacacaaggggaaaacgcggctcgtattatctcgcaccaggggggtgctcgtagtaggggttacaagcgttcgcgaaagagagggagtgagcctgttcgttagctcgtccttcccccgcacgaccccctcacaggaaggccctggacctcccttttatagatgcaaggagagggtccaggtgtacaatggggggtgtagcttatgcgctaacgtgtctggcagagaggtgcctgagccctgtgtacatgccaacgtggctgtcagagaggtgctagagccctgtgtacgtgataacgtggccgtcggagaagtgcctgagccctatagaagcacagctggtggtgctgctgggatcctgctgacgtctccttacttctgtagggggctgagaaccaccgtcgtcatggacgcacacagggagccatcattaccatttaccgggacgagctag

SEQ ID NO: 3156 - DNA, 777 bp, Zea mays
  Peptide Sequence Number=SeqID_46531
atgcaggaggcgtgcaaccgcaccacggttgtgcaccctttcggcttcatcacgtccgggaccgggaaaggggatgtttcgaaaaggatccttctcggcgaaggaaacgggcccccgagccctcctactgatcaggggttcgaaggctggcccctcggaagggttcgacagccgccccagagcactcgggctccacgcccaatactgatcaggggttcaaaggctggcccctcggaagggttcgacagccgccccagagcacgcagagtgagggatgactctgggtacgtccgttacatggccgaggctcgggctacgctcccgaggtcaagacctcgtctaccaagggacgcaatctcgcctcgcccgaccctggcctcgggcgggaacagtagtcccggacgaattcacgcctcgcccgagggcctcctcaggcagtgggcgcaccctcggctcgcccaaggcccagctcggacaggcttcgtcgagaagcaaccttggccaaatcgcctcaccaaccgaccgtatcgcaagcgcattcaatgcgaggatcgcttgacaacttatcctgacacgcgcgcctcagtcggcaaggcctcggccttgggaggaggtctccgcctcgcccgaccccaagactgggcctcagcctcggcctcgggaggaatcgtgtcctcgcccgaccccggcctcggcctcaggagaagtctccgcctcgcccgaccttgggctcggaccgaccgtgccacaggggatacatcattaccctacccctag

SEQ ID NO: 3157 - DNA, 1398 bp, Zea mays
  Peptide Sequence Number=SeqID_46532
atggtcatccgtagggatgatcaccagccttgtggtggggagaagcaagccgggctgtggcctctgccacgccctcagcttcaaggatgttcatcatccgggctggggagggggcgcaccgagatggggcctgcctccgcgtgggccggcgacccgcttcttcctccagcattcgggggagaggggcatcctccagctgtgcggaggaggcgtcctccagccatgcgggggaaggcgaactgctgcttcctggacagggtgcagctgtttgtcctccacccgggcgacggtcggcggccgcaccgggggtcgcacaacacgtcgtacgccgcgagggcggtactcatgttccgggacggtcccgttctcgttcttgtggcgagagcgggagtgaggacctgccggtgcgctttggggcggccgccgcccccctggtgcattgttggtgggcaggtggccgctgttgtcggtgccgaggtggtggtagccagaggtgaggctgcctctgccgaagcggttgcttccgccgacgacaccgtcagtgccacctgtgctccgggcctctggctctttggctttaatggctggttctcgtcccccgtgagggggcgtgaacgagggccttccagcagcagcgtttgccctgaggccatcgctgcggctgtcttgccgcccgagacggaggtcgttgccgcgctgttggtgcagcggttgccggcgagccacccggagtttgttgtcccgcaggccctctgccttcggccgctctgcgatgagctggagccggaggcagcggtgtcggcgtggacagagacggagttggctcgaaaagaggcttcgtcggcccgggagcacgtggcttcccaggccgaggaggtgcagcagcggcggctggagctttgccaggtcatccgcgggcaggaccaaccccggagtcacgctaccgaggccgtgagccaggctgaggtcctcgggggacagttggctgaggcttcggagcggccagccgaggtgtccgctcgggctgggaccctggcggagaccctggctggcctgtttggtagcagaatccctcgtccgagcgtgagttactttttgcggaaggtgatgagtgagaaaacaaggtatatgaacgacttgaaacatcttaagggtagaagtgacgtagctgttggatgttccaagcgttgctgtagacctcgccttgttcgttggccagcttccgaagtaccaggtctcccacctggaagtctcgggaccagaccctttgggcgtggtagcgtcacagagactgctgataccgtgccgagtgtagtaaggccacgtcccgagcttcttccaactggtctggttgcttcggtcgtcgtacgcctttgtcctcgtggaaccgtattctaa

SEQ ID NO: 3158 - DNA, 570 bp, Zea mays
  Peptide Sequence Number=SeqID_46533
atggccggagttggtcgggcctcgtgcgctagcggggaagctcatcggcggcgaggattctggcctaaccacggtgacatagcacaatccagtgagtcggggaccttcacgagaggtcagggaggtcatgggtgcaaggaatcgaagaatggttcacctgatcatgatatccgagaggagacaatgtttcaaaggatgaagtccttaattcttaacaattgtgttgccttgttcttggcccacaacattcaagaacaagtgaccaacattgacgcccaccgtggggtgaactcacttgcacaaccttcggcaagcatccaccttcatcatgccaccgaagaaggcaatagtgccaggggctgccctgcagtcattggacaccaaccaagagacactctcgctgagagaagcccggagccagaaaaggaaggctaccgacccaacaccataggaggaggagttggaccaagaaatcagagaactggaagctatccaccaacaagtgcagagaaagagagagaagttgcttcggctagccgacatttagaggaacatcgacaaagctgctga

SEQ ID NO: 3159 - DNA, 111 bp, Zea mays
  Peptide Sequence Number=SeqID_46534
atgcagtctctccaggtgactggactgacctggcatcgtgcgacgcagtggacgcctcgccaggtccttacggagagctactcaggaaatagcctgcgtctcctaaagtaa

SEQ ID NO: 3160 - DNA, 552 bp, Zea mays
  Peptide Sequence Number=SeqID_46535
atgccccctgcaccaccacaggccatcccgattgctggagacagagacgacgatgacgctagtggcagttcgagccacggcacggagctctcggaggagccggagccgaagggatggatcgctagacccatcactcatgatgtcgctcgtgggtgtcacttcaacgatgctctcgacaccttgctgcgtcgggccttcgatcgacacacttgtggggtagctgacggccttgacctgaagtactaccctcgccgttcgaccgacagtgctggaggtgtgattgtctcacccgttggtgaaggcattcccaggctaaacagcatggtcaacctggtcgtcgtgctcaacacagagctggaccacgccactgacgagttgggcaaggttcgggcggaggttgcagaattgcatgctgagtgcacagcacaccactatctggatggtggttctcccgtccctgtcgggattcagcatccttaccgctcaccgccccatggtcgcttcgactatggtaccccagactgcaggacctggatatatttggatccatag

SEQ ID NO: 3161 - DNA, 102 bp, Zea mays
  Peptide Sequence Number=SeqID_46536
atgccgccggccccactcctccctcctctctcctccctccttcatctgccctccagggcaaagggatcacaactgcaccataatgactgcacagtaatgtga

SEQ ID NO: 3162 - DNA, 510 bp, Zea mays
  Peptide Sequence Number=SeqID_46537
atgaagctgtggaaggagacttccaggagttccaagactacgatgagttctaggcgtgggttagcggcaacccccagtcggctgcctatgaaggccgcgtttatctacgtttcttttccgcactttgatttattacacactgcacgaaagtcagtcatccccttcttaccctcccgccttgctgagcgtccgcttcgccgtcccgtggccggacagtccagccacttggagagactgcaccaccgcctgcatgaggagcaggaacgtcgacgacaggagcaggagcagcagggctcttctttctcgctccagcaggagatagagtctgtgaggagctgctcccctgtgcttcctctggaggcgccccctgcaccaccactgggcgccccagcctctggagtagctgctggaggagatccagacgacggagatggcgacgacagctcgagccacgacaccgacttctctgctaaccatgagctggaaggatggtttgctcgatccatgtag

SEQ ID NO: 3163 - DNA, 78 bp, Zea mays
  Peptide Sequence Number=SeqID_46538
atggccggctcggccgccgccctgccccgcgcccccgccggctcggccgccccctgccccgccccgccggcaggttaa

SEQ ID NO: 3164 - DNA, 354 bp, Zea mays
  Peptide Sequence Number=SeqID_46539
atggaggacttgagtgcaatgaccccgaccattgtgattgggaaaatcacgaccttcgagatgtcacaaaaaatgtgtcgaggagaggagccaacttcctcaaggccatatgcttttgcatatgatgaaaggaagggtaaaaagaaggctcccacttcaagttcctcaagtgaagaagaggaagaagaagaaagtgatgatgataaagataatcaaccatcaacatcatactccgaggacgaagaaacaatccgatgcgtcagaaaggtagaggatcttctctttaacattgatagggaaaaacaaagaaagaggatgcttcgcatgcggggagaagggtcacttcagggataa

SEQ ID NO: 3165 - DNA, 651 bp, Zea mays
  Peptide Sequence Number=SeqID_46540
atgccaggtgcccagatcttcgtcggccctgcccctgcttccttcaactccaccaccaggctcggtaccaatcctggtcgcgtgccgtctggttcgaatcttggcgagcttggcagtaccctaattctttacatgcatgtcttctccatctgcttcttgaatgaggggagcagaacccaagcaactagccttctctgctgcccttggtatcacgattgggatctttccgaaatattaggagcacctaaaggatcaactacgataaatgttttcagtgagtgtaccaaggccgaatcgtttcttccatttggttctggaagtcgagcatgtgttgggcagaagtttgttgttcttgcaatatcgatgttgattgccagtctgctccgcagctatgaggcttttctccagatccccaagaaagaagaagaatatccggtcacatatgtgttgatgctcatccccaacatacataaattatcaatggcatctgaagccagaaaacgtcatcgcctaaagcccagactgaccctagacttcggtccaaagttcaaggctggaaatcatagttcgcaattcagctatggtgcagcacccagaaagccatggaagcaacaacaatcaaacactcgattaagcatccccaagcactaa

SEQ ID NO: 3166 - DNA, 792 bp, Zea mays
  Peptide Sequence Number=SeqID_46541
atggcgcccccacaggccgtcttcgtctgctccatcgctggcgccttcgcctcacctctggtcccagcgttaacggttaccagcgagtcttcatcgttgtaccgctcgcccgctcccctcgcctctcaagtgttgtgcgatccttggtggcttggtccggtactccggtgtcccgtggccgtagtcggtggatctgttgcttcctctctcattgtttcctctccagctctcccaatcatttctgtaacccctagtccgctcccctcgtctctcgatttgctcaagctcaagtgttatgccatgatgacatccttggtccagtactgcagtgtcatagtcggtggatctggtgcttcggcagcgcatgtcgacgcttgtcgtgatgtagccggagacactgactacgtgggtggttcggtgatggcaagaatgtctggtggcattgtctggtgtttattaccctacttcacccttgaggctgcatcatattctaaaattgctagagaaatactcattctctatgcatttgctttcattcttgatcctagagctaagatgagagggtttcataaagttcttcataggttatctactctaaatggtaaggccacaaaggcttgggatgatatatatggtgatgatgaaacttacagtactagttctggtacttgtattggtagtatacctggtgaggactgggaactggctgaccaacataagaaacatactgtggagaaggaaaccaaggaccttgaggcagcttttgaagctatgtatctcgatgatgagtag

SEQ ID NO: 3167 - DNA, 87 bp, Zea mays
  Peptide Sequence Number=SeqID_46542
atggcgagtgcgcgccaggtcgtgtaccgagtcttcatcgggggaggtgggtgtgatgccaaggtggaggacggcaccccaagataa

SEQ ID NO: 3168 - DNA, 1074 bp, Zea mays
  Peptide Sequence Number=SeqID_46543
atggcattcattcttatatatatacctatatggttatatttagaaaacggagaagagagtgaagtgattgaagagaaggcacaaccacctttggaatctcgggcaaggacttggctctacttcgacatctgcgagtccaagcctgactcacctgtaaacgaaggcaagccccggcctgctagcgcaaggactatcttagctagccgcataccctggaaatgggacaggcatacccttgagagtcttttccttagtcggatgaatcaacaagaagctcctacaggagttggagagtttcttcgagatttcggtgttccagtggtcctgtggcgactacttcaagaagttggatatatcgaaacacccaagtaccagtggtcgcgcactgttcttagaggacaaccatggtatgaggtggtagtgcgtattccagaacgtgctagaaagccatcttggccacattggatgttccatgctgaaggaatgactccttgggaaggtgctcaggcccgattattggaaagcattcctattgggcaggattctgtagaatcggcatctgctcgagtattaatggccgtgctagagttacagcttactcgagggcacagtcggcaaatgtggcagcagttgtacactgggagttatgcagcatttaagatgatggaaatggccaagaatagggcttgtacccaggcacaagaacaacttgaggaaacaaaggttcaagcagaacaggttattggactaaagcatcaggtgacagaacttcagacgcaacaccaagttgatcagcttcgcattaaggaacttgagcatcagctaactaatgctcattctaaatcaaaagttttgagtcagcaacaagaagaaattcactcgtatgctgttactgttaaggaagaacttaaagaaaccgtgggcttcctaagtcatcaggatcaggtgcttgaggagttgcatcgtacctatccgatggaatttcaaaccgcgcagcgactggtcaaccatctgcaacaaacggtgcatatgctcaatggcgccttttattctgccccaacaccaacggactaa

SEQ ID NO: 3169 - DNA, 489 bp, Zea mays
  Peptide Sequence Number=SeqID_46544
atgaccatcaaaagggatgaaagcaaaaggcaaatgcattgcaaggacaagcaccacatttgttacaattgccgtgaaaagggtcatctattcaaggtttgtccaaagggtaaaaatcctaagcctaacttggcaatacattcaaatatgcttaggagacccaaatttgactcttgtgctagaaagttcctttcaagtgacattctttcaattggtaataatctattctatggaaaaaatgtcaatataaagctagttgcacccaagttcaagctaggttcatcatcaagaaggcaacacaatgatgtattaagaaaaggagaaaaggctcctgtggcagaacctcccaagttattgggcccacatgcacctgcccttgtctcaaagacctcagacggctatgcatgtgcaccagataacttaacaggatctgtccaagtgtcccaaggacctcagataaaccacttacaaccaggaccacaagattaa

SEQ ID NO: 3170 - DNA, 480 bp, Zea mays
  Peptide Sequence Number=SeqID_46545
atgggcaagagcaagaagggtggtagttcttcgcatcactccggcgacaaacggaagcgtgagccgactcctccctcggaggacttcggcgactcggagtactcggaggagaagttctcctccgagtccaagggctcaccggtccatgcctctccctcgacgtcgtctgatgactcaaacgactcccaggggctcaccgcagaggtgtggacctacatccgggccgtcgagcgcgccgggctcgagggctcggatgagtcagagtactcctcggacgaggagaactcctcggactcgttcaaggagggtggcggcggcgatggcggtgacggcgacgatgacagaggtgacagtgacgacggcgaaggcgaccgcaagggcggtgacggcggcggcaaaggtggcagcggcgacggcggcgatggcagcaagggcagcagcaggggctgcaacaagggcagcagcaaggccagtggctag

SEQ ID NO: 3171 - DNA, 378 bp, Zea mays
  Peptide Sequence Number=SeqID_46546
gaccccaagaagagattatgccctatagtctaccacctctcgttatttgtgggcttcaccgagggcgggaaacatttggtgacatcaaacgaccttcgggctgggaacgtctgcgagcttgttaaggggccagacgatggtgagccgaggcgcttgggctcggagatggagacggcgacgctcgggctcggagatggggacggggacggcggagttgggctcggggacggcgcggcctggcgggcgcccagctcggagacggtggcgcttgggctcgggctcggcgacggcgtggcgggcgctcacggctcggagacggggacgggaacggcggcgcagcagcctggcggcgtagtatcagctcctggcgaaaactaa

SEQ ID NO: 3172 - DNA, 441 bp, Zea mays
  Peptide Sequence Number=SeqID_46547
atgaaccgcacaaacagggagcggtttcctcctgccgtcttcaacctcaagaaaaagagcagagagcggcatggagggagaaagaaggagaggggatcggccaggggagtgagccgcgccggccacgcgccgcaagccgcgcccagcacgggcgagctcggccggccgcgcccagcacgggccgcaggggtggcgagcagcgcagaggctgtgagggcgcgcgccacggacaggcttcgtcgaccagaggttgccggggcacaggggcgaggggaaaggatcgagcagggaagggcagggctggacgagggcatgtggggcctgcacgccgaggcgctcagcggctctaggccacgctgccgcgccggccaggggcttggccgcggactcgcctgcgcgggcgctggccaccggtgtgggttcagctgtatacgggactag

SEQ ID NO: 3173 - DNA, 1836 bp, Zea mays
  Peptide Sequence Number=SeqID_46548
atgccgtcctcttcctcttcctccgacaccacgccgccggccgccgcctcgtcggaggagacgttgagtagcgtgatggtggaggagttgcgcgccggcgactccgttgattttggtgtgtcacggatgacgtcagcccgcgttgaagatatgcagcggttgggctactttggcggtggagttgctcgtgcttcggggacggaggaagtccccgagccggaggtgatggacaaggatcgccaaggggcggcgcagaaacgccaggcgactgtcaggattcacgaagctcggccgaaaaggccgcggggaactgcgaaggccgtggcctccggcggaggtaagccgccgctggcggcgaaggcgggcgcctctgcacctagcaaggcgccggaggcaacggcgggcgccggaggctccaagtcggcgaaggtggtgccccccgccagcggaatggcggaggcttcgaaggcggcccgagcgctgccgctggcgggcaaacgtgttgccgacttcggcaccgacattattgtggacgactatcttggtgggtcggacgagggccagcttgctgtggttgcgcctggcgcggagatcgcgacggcggccatagtgccgaaggcgaggggcgaggcccttgacgccggaggcgaggtgtcggccctcgccgtggtcagggacgaggcgggcgcggcgacccgccggctgaagagagtgacggaggcactgggtcaggcgacggaggcgctgagtcaggtggctgacttcgccagccgcactgcgtcgggggccctcacggcggctgtgtctgccgaagtcgagagacttcggacacaacatgctgatgctgttcgtgagaagtcggcctccgacagcaagtgccgtaagctgacggacagggtggccgccctggagaaggagaaggctgacctccggcgccaactggcagcagagaggagggaagctaacgaggctatcgccaaggggcaggctgcgcaggcggaggccaagctggcgcgggcggagggcaatcttgccaaggagctcgccgaacatctgcaagagcggctcaccgccctggagagccgcgctaaggaggccgaggccgcaatgcatgcggaggccgaacggacgcgcacgcagcttatggatacatatcgtgagctgggtgcgcggaccggtgacttcgaagtgccggaccgagagcccggccttcgctgtctgcagtgggcgcaggaggagctgctggaacttccagccgtcgtgggggggttgatgtcgtacgcctccctggtcacctgcgagggggcgatgaacgcgctctcccgcgaagggtgccggcacttcgaggccttcgaccaggcggatgaagattttgatcgagatatctataaggtcgaagaccccgtagtgaaggaatccgccggggccctctacgaccggatgtggggtctgtacggtcgtgaggtggtcagggagcgggccgaggctgcgagggctcaggcggagcgtggcgagcgggtggacgacttcggggcactgaacagcgcgctgcctgacccggagccgacccctgcggaggccgcgactggagtcgccctggagacaaccccggggcctgcggaagacgcgccgagcgtgcccacctctgctgtggccggcgaagacctgcccccaaaggtggccgaaggcgcgcctgacgcccccgcagctgctgcgccgagcactgaaggttccgcggcggaggcggcggaaactgcggcggaggccgtggcggggcctacggcggaaccaacggtggaggcttccgcagcgccagggccttcgcaggtggcgtag

SEQ ID NO: 3174 - DNA, 336 bp, Zea mays
  Peptide Sequence Number=SeqID_46549
atggcaggtgaggtgtttgtgtttgattcgacgatttcattaacaagaatgtgtccacttaatggctcaactatgtgtatcatgcaggacaataggtcaagggaaggcatcgtcttcgggagggagttctcgctcctccaggaaatgactactagactcggccctgatatgaacttgcccgcttttcgccctccccagggttcagtgtcaaatgctcagggatcggagggtgctgccaacgtccaaggcttcctcgtccatggttctggagggagtggccaccttcctggtggcggaggagggagtggccaaaactcccacagcccgcaggagtga

SEQ ID NO: 3175 - DNA, 1368 bp, Zea mays
  Peptide Sequence Number=SeqID_46550
atgcaggcggcatgcaactgcaccaagggggcgcaccctttcgacttcgacgcatctagcatggaggcccaggcccacacgtcatggaaccggcgcgccagttactacgtgcaaaaaactgcagcgccacttgcgccagcgccgcaccttctcgactacggaaccggtgccgcgactcgaggcaaccctgcgcacggcccagcagtgccaaccaggcacgccggtcacgggttagttagccgcgggagaaggcgcgacgggaccaggaaaggggatactccgaaagggatccttctccgcgaaggaagcgggccccgagcccccctactgatcagaggttcgaaggctggcccctcagaagggttcgacagccgcctcagagcactcaggctccgcgcctactactggtcagaggttcgaaggctggcccctcggaagggttcgacagccgcctcaggccactcgggctccgcgcccactactgatcagggattcgtaggctggccccccgacgggttcgacagtcaacccagagcacgcagagtgagggatgactctgggtatgttcgatacataaccaaggctcgggctacgctcccgagaggctcgggggctgctctcgcaaacccggctccggccaaactgttgacagcgtcaacataccagcccgagaactcggaacctgactatgcacccgggcaacgaccagaaaacaacgcctcctgcgctgctccgactgttgtgccacccgccagggtgaggctgacagcaaccaagtccagcctcgggcgccataggaatctccgcctcgcccgacccagggctcggactcgacctcgcctcggacgacgatctccgcctcgcccgacccccgggctcggactcagcctcaactccggaagacggtctccgcctcgtccgaccccagggcttggactcgacctcgactccagaagacggtctccgcctcgcccgaccctagggctcgaactcagcctcaactccggaagacgatctccgcctcgcccgacccccgggctcggactcagcctcaactccggaagacggtctccgcctcgcccgaccccagggctcgaactcgacctcgactccggaagaaggtctccgcctcgcccgaccgcagggctcggactcgacctcgacctcggaggagtcaccacctcgctcgggccgaccacgccacaaggggaggccatcattaccctacctctagctagcccaggctacggggaacaagaccggcgtcccatcttgctcgccccgggctcaagcgctcatccgacggccacgacgccacatgaacagggctccaacacctctctgataaccacgtcggcacgtacatag

SEQ ID NO: 3176 - DNA, 1455 bp, Zea mays
  Peptide Sequence Number=SeqID_46551
atggagctccctttacgctgcaccattaacttgggggctgggtggtcacccgcctcgccgactcgctacttcgacagctcgggggctgggtcgtcacaagcctcgccgactcgctacttcgacagctcgggggctgggccgttgtccgcctcgccgactcgctacttcgacagctcgggggctggctcgggggctgggttgtcacccgcctcgccggctcgctactttgacagctcgggggctgggtggtcacccgcctcgccgactcgctacttcgacagctcgggggctgggccgttgtccgcctcgccgactcgctacttcgatagctcgggggctgggttgtcacccgcctcgctgactcgctacttcgacagctcaggggctgggccgttgtccacctccccgactcgctacttcgacagctcaggggctgagccgttgtccgcctcgccgactcgctacttcgacagctcgggggctgggttgtcacccgccacgccgactcgctacttcgacagctcggggctgggttgtcacccgcctcgccgactcgctacttcgacagctctgggggctgggtggtcacccgcctcgccgactcgctacttcgacagctcggggcctgggccgttgtccgcctcgccgactcgctacttcgacagctcgggggctgggttgtcacccgcctcgctgactcgctacttcgacagctcgggggctgggccattgtccgcctcgccgactcgctacttcgacagctcgggggctgggttgtcacccgcctcgccgactcgctacttcgacagctcgagggctgggttgtcacccgcctcgccgactcgctacatcgacagctcgggggctgggtcgtcacccgactcgccgactcgctacttcgacagctcgggggctgggtcgtcacccgcctcgccgactcgctacttcgacagctcgggggctgggccgttgttcgcctcgccgacttgctacttcgacagctcggggactgggttgtcacccgcctcgccgactcgctacttcgacagctcgggggctgagccgttgtccacctccccgactcgctacttcgacaactcaggggctgcgccgttgttcgcctcgccgactcgctacttcgacatctcgggggctgggccgttgcccgcctcgctgactcgctacttcgtcagctcgggtgcttctgcccacctcaccaagaccactcggaggagtaagttgcttgatcctcgaatggagaataccatcagaaaaacttttgaagactacaaagaaaaatcttcagaaatcagaatttggatcttcaagctgattgtttctcaagtcaacttgaagctcgagggcttgtgggggatggatatcccctgggtccaaatgagacgtattatctacatgggccgaccgaccgactcaggcccgaggccaatgggctaa

SEQ ID NO: 3177 - DNA, 237 bp, Zea mays
  Peptide Sequence Number=SeqID_46552
atgtccgatcacgccaagagggagatcgtgaccggcgacaagcccacgagctcggggaagactccatcaagggagtccggcaacaagtacaaggaggaatcctcttcctccatcaaatcacatcggagggatgacaagaagaagaagaagaaagaagaaaatgaagaaggtggtctactacgagaccgactcttcaacaccctccacctccggcaccgagtcgtccactacttctaa

SEQ ID NO: 3178 - DNA, 378 bp, Zea mays
  Peptide Sequence Number=SeqID_46553
atgggtgtcggtgcagcgttgtgcctgtgcgggtctcttgcgagagtccgctacgtgggctctgtgtcccgccgtgagtcgtggccggaggaagatgcccgtgctgccgtcgatcgcgatttggtcatggaattaccactagacgcgcagagcagcggaagacgtctcgatgtatacgaacgcgtcgagcagtgccgtgcaatcgccggcgtccttcacgtcctcgcacggtccatccaagtgctccagatgcagcacctccgaggtatccacacgtacagggaggaagcgccgcgtaccgaactgctaggttcgcgacggcggcttggcgagggcgagaggtggccggcggctgctagttcgctagtggcgaattag

SEQ ID NO: 3179 - DNA, 1113 bp, Zea mays
  Peptide Sequence Number=SeqID_46554
atggcgcactccccccccctccttgcggaaaggcgacgtaggggcgtatgtaaaaagtcgagtctgtccctgatcgtcctctcgccctgtgcagaggctcgggggctgctctcgcaaaaaccggctccggccaaaccgttgacagcgtcaacataccagcccgagagcttgggccccgaccgtgcacccgggctacggccagttcgcatgagggaacgaccagaccagccgaagcattacgcgagagtgagtctgacaggcagtcaggccttgccaaaagcgccacggcgaactccgctccgcccgaccccagggctcggactcgggctaagacccggaagacggcgaactccgctccgcccgaccccagggctcggactcgggctaagacccggaagacggcgaactccgctccgcccgaccccagggctcggactcgggctaagacccggaagacggcgaactccgctccgcctgaccccagggctcggactcgggctaagacccggaagacgacgaaactccgcctcgcacgaccccagggctcggactcgggctaagacccggaagacgacgaaactccgcctcgcccgaccccagggctcggactccgccctggcctcggccgaacgacttccgcctcgcccgaccccatggctcgggctcggcctcggcaatagaggacagactcaacctcggcttcggaggagcccccacgtcaccctgcctagggcacagacccgccacgtcaacaggaagcgccatcatcatcctaccccgaatcgactcgggtcacggagaacaagaccggcgtcccatccggccagctccgccggatgggcaatgatggcgctccacaagctctgtgacgacggcggcccccagctctcttacggaagcagggcgacgtcagcagggactcgaccgctccaacagctgtccctctgccaagctctgtcgcacctccgacagccacgacatcacgccagcaaggaacattactgggtaaagaagagtgatcaagggcacaacttgccttcagcgagctgtgctccggcctcctcagtcacttgctcgtctactcgcaataatataaacaaacaatatgcatag

SEQ ID NO: 3180 - DNA, 453 bp, Zea mays
  Peptide Sequence Number=SeqID_46555
atgtcttcttcctcccttatgcgtcgtgtccttccatcttccaagcccccggatgggtggtatccgccgcctttccacctccttgttggaggaacgcaactccatgggagttggtacctctcagccatcgttcggcttcaaggattttcatcacgcagcctggccacaccccgccaccggcggtcacccaagatggtgacctccagttcgacggtggggaaagcgggccaggccgcggcctctactcctccctcggcctcaaggattttcgtcatccaggccaagatggaagatgaggcgagtcggggggctgcccccgtgtgggtcggctgcctttttcttccccccgcgcctggggggaggatggcgtcctcgagtcccacggagacttcctccagccatgccgggataggtagggcgctagtggccctgggtctccgtctccctgcctga

SEQ ID NO: 3181 - DNA, 375 bp, Zea mays
  Peptide Sequence Number=SeqID_46556
atgggggagaagcagatgttttcgtgctacgtcaagaacaaagattcccaagacaaaatcatattcggagatgggaatcaaggcaaggttaaagggttcgccctcatcacgcccctggcggccacacgtgcccccaccgccaccggcgtgccgccggggcacgtcctggtagccgtcgtcgcgcccccctcctgctgcgcccccaccaccgtcgggcccagcgccgtcgctcgcccctactccgtcgtcctctcctccgagcccggagctcgtccctgtggtgcccgcctcgccacccccggccgcggcgctgccaccggcaccggtgcccgtaggagcgagcgctcctccgctctcccaccagtacatcggtag

SEQ ID NO: 3182 - DNA, 1062 bp, Zea mays
  Peptide Sequence Number=SeqID_46557
atggtgaaggagaataagcggaagcagcctcctgccgacgcggcgccgcctccgggcgacgagggtgaggggaggagcgggcggaagggcaagaaggccaggaaggagaaggcggaggcgatactgccgtcgcagatcaagaacaaggacaagcgccgcgagccgccggagaggcaggtgccccgcacgatcgagaacaccagggagcccgatgagactgtgtgccggcccgacgaccaggagatgaatgtccatttggattgctgtgctactcaatccaatgttctgtattcaaatttgggggctatgtttgttgatttacttagaccacaatttcaactcagcacagttcagctgtttgcaggaaatgatgcggatgaattcagtgcagttctaaagcagcacataaccccgaaaatattgattacgacatgccgcttcaattcagggaggggacctgcatttattgatgagttaatgcaagtgataccgaattctcagtatgtgaaaagaggaacatatgaactcaagaaaattgtggaatatgcaaataacagggatttcacgtcacttgttgttgtccacacaaatcgaagggaacctgatgctctacttatcatcgggttacctgatggccctactgcacatttcaaactctccaaacttgttcttcggaaggacatcaagaaccacggcaatcctacgagccataaaccagagctagtactgaacaatttcactacacgccttggtcatcgtgttggaaggatgatccagtctctcttccctcaagatcccaatttccgcgggcgccgtgttgtgaccttccacaaccagcgagactacatatttttccgccatcacaggtacatcttcgagacaaaagaaaagaaggttgcttcgaaggaaaagacatctggaagcaaaagcggatctgagaagcagcaagtgatttgtcggcttcaggaatgtgggcctcgcttcaccctcaagctgctcaccttgcagcatgggaccttcgacacgaggagcggggagtacgagtgggttcacaaggaatag

SEQ ID NO: 3183 - DNA, 2859 bp, Zea mays
  Peptide Sequence Number=SeqID_46558
atgccgacctcctcttcttctgctgccgctacgccgccggccgacgcctcgccgttggccgacacctcgtctgaggagacgctgagtactttggtggcggaggagttgcgcgccggcgattcggtggattttggcgtgtcgcggatgtcgtcgaagaggatgattggagatgaagttgtgcaatttgggtcgtgtacgtttacaccaaagaccggcaagaccacgatgcaggtagtcgagttggttccttgcgcccgcaacaagtggggcaactggaatgagttttggttttacgtcgtggagggtaccgtcgaaggccatgaggggctccccgtgtccgagatgtgttcgcatttttactcagcatacccgccctttgaggtggcggaggaggatgcggatgaaggggcccttcggtgcgccgccggcctgagcagtgggcgcgatttggttgaagaattcgtggcgtacggggtatggcccttggcgcatggctgggcgttgggcgaagtgtgccctcgccagatgccttcccatggtgggaagatggtgcgaagtcctgccttcgcgctgaatctgcaaaaccgcgatccggccgcctttgtgcgtgaggcggaggatggggcggtgcggctcgttggtcggtacgtgccgaggacagagggccagcgtagctgggatatccgcgggtcgaatgaccgtttgaacagggtttttgaattgaatcaactgtcgtatgacggctatcccggccaggacgatgtggaccgccgtgggaagaagctggtggtggagactggatacgaccctgcgccggcggtcgctccatcctctaagaagaggaaattaggtactgctatgggaggacttggggtttccgatggttttgctagagaattgatgaggacatgcgcggccccggggggaaggatgtcttcgcccgagctccgggagtcttcggcacggatgctgagggttaccgggggttggtggcctaggaatgttcctatccccctcgcggccggcgaagacctttttacatctcgcatggttcgtgaatggaaggccgaagaggcagcggggggctgcgaaggctgcggccccggcggaggcaagccgccgctggcggcgaagtcgggcgtccctgcatctagcaaggcgtcggaggcggcggcaggcgccggtggttccaaatcgacgaaggctgtgccttcgtccagcagggtgccggaggtcgcaaaggcggcccgagtgttgccgtcgccaggcaagcgcatcgccgacttcgccaccgatattaatgtggacgactatcttggtgggtcggacgaaggccaacttgctattgttgcgcctgccgtggcgaccacggtggctgccgtagtgccgaaggagaagggcggtgctcttagtgctggaggcgagatgtcggcactcgaggctgtcagggacgaggcgggcgctgtgtcccgccggctgaaggaggtgaaggaggcactaagtcagtgccgcaagctggcggacaaggtggccgcactggagggggagaagactgacctccggcgccaactggcgggggagaggagggagaccaacgaggcccttgctaaggcgcaggctgcgcatgcggaggccagtctggcgtgggcggagggcaatcttgccagggagctcgccgagcagctgcaggagcagctcagcgccctggagagccgtgtggagagggccggggccgcgacgcgcgcggaggctgagcggacgcgtaaacagcttatggattcataccatgagctgggcgcgcggaccggtgacttcgaagtgccggaccaagagcccggacttcgctgcctggagtgggtacaggaggagttgcaggcactccccactatcgtggaggggtttatgtcgtacgcctccctggtcacctgcgagggggcgatgaacgcgctctcccgcgaagggtgccgacactttgaggtcttcgaccaagctgatgaagattttgagcgagatatttacaaggttgaggaccccgtagtgaaggaatccgccggagccatctacgaccggatgtggggtccgcacggtcgcgaggtggcggcgcgtggcgagagggtggatgacttcggggcgttgaacagcgcgctgcctgacccggagccgatcccggcggaggccacgtccgggtccgccctggagccgcccccggagactacggaaggcgcaacggatgctcctgcagccgctgcggccggcggagacccgcccccagagaccgccgaaggcgctcctgatgcccccacagccgctgcgctgagggctgaggatcctgcgatggtggcggcggaggcaacagcggaggctcccgcgacggctgggtcctcgcaggttcaagattttgggcctgcgcacgcaaccgccactactgattttttggcggcttcgaccgtggatgatggtaatgaatatgatgggtctgcgtctgagttttttgatttcgctgactctgggagctcggttgagtggactgaggagtcgtcggaggaggacttggactactttgcggccttggatgtggctgcggcggaggcttcatcgcacgtcgcggacacggaagatgtgcctggtccgagtaccgggcgccggcggcgaagggcggttgcgaagcgtagagtgagtggggcggagggaggtcggcttcgcgtgagtagggctggccggcaggaactggtgtctttgccagccgccgcaagtacaggtgaaggggaattgcgaagtctttttgcgggtgaggggcttaggataatgttatttaactatagggagatgggaattattcctaaggttgagccgatgtaa

SEQ ID NO: 3184 - DNA, 387 bp, Zea mays
  Peptide Sequence Number=SeqID_46559
atgcacccatccccacctcctattgcgctcggctgcctcgccggcgacctcactgccgcgagcacccgccaccgcgccgtggaccggccaccccaggcaccgtctggccaaattggacctacccccatgatcccctacccccgcccatgcctcgccaccactcctccgtcgcaaaaccgggctcccggcggagaaccgccgcggacttcaccggcggtcgagccgaccgcggaagagggatccgatcctccagaatttatagctccggaagaagggcaggaacccgacccctctgagataaatcttttgtgccaggaaagcttcgacgaaggcaagtccatctttcccttgatgcataatttacctattctttctaccactacctaa

SEQ ID NO: 3185 - DNA, 513 bp, Zea mays
  Peptide Sequence Number=SeqID_46560
atgatgaccgcgtcagaaaaggccctgagccctcctactgatcaagggttcgaaggctggcccctcggaagggtttcgacagccgccccagagcactcgggcttcaagcccattactgatcaggggttcaaaggctggcccctcggaagggctggcccctcggaagggttcgacagtcgccccagagcacgtagagtgagggatgactctgggtacgtccgatacatggccgaggctcgggctacgctcccgaggtaccctaggacattttcgagaccggcgggaacgatttgtaacgcaatcccaccggagggaggcatcgagccctcggaccctgtcgaaggggtctgggtccggcgaatcacccgcaggtacttttggagcgtgcctctgggccaccagccgacccctaacgaacagggcacgtgcgtccactcggatcacataggctcgggggctgctctcgcacccggctacgaccaaactgttgatagcgtcaacaaaccagcttga

SEQ ID NO: 3186 - DNA, 528 bp, Zea mays
  Peptide Sequence Number=SeqID_46561
atgacgggaaaacagcgttgcccgccccgctccgactgccgtgccagccacccaggcgaagctgacaacaagtcacaatcaaccaccgagttcgatctcgggcgcaacaggaagctccgcctcacccgacctcaagctccggcctctggagggggtctccgcctcgcccgacccccggacttggcctcgacctcggtctcgggaggaatcgcgtcctcgcccgaccccggccttggcctcaagagaagtctctgcctcgcccgaccttgggctcggaccgaccgcgccaacaggggatacatcattaccctatccctagccagctcaggctacaaggaacaagaccggcgtcccatctggcttaccccggcgacaggtaatgatggtgccccgcgtgcaaccatgacgccggtggctctcagccccttacggcagcaaggagacgtcagcaggatccttgccgcgtcgccagctgtgctcctacagggctcaggcgcttctccgacggccacactatcatgtgtatag

SEQ ID NO: 3187 - DNA, 156 bp, Zea mays
  Peptide Sequence Number=SeqID_46562
atggggctcggtgtatgcggctcactctgccaaggtggtgacgaggatgatgtttatgactatggtaatggttgtcctcgctgcaaccactgctcaggagaagatgaagccgtggaggaagacttccaggagttccaagagtacgacgagttttag

SEQ ID NO: 3188 - DNA, 78 bp, Zea mays
  Peptide Sequence Number=SeqID_46563
atggggacggacttactgacggttggtagcacagatgccgctgcccccagcgggaattattattttttgaatatgtag

SEQ ID NO: 3189 - DNA, 99 bp, Zea mays
  Peptide Sequence Number=SeqID_46564
atggggacggacttactgacggttggtagcacagatgccgctgcccccagcggtgagtggattcgcggcggcgatatggctccggggactaacctctag

SEQ ID NO: 3190 - DNA, 609 bp, Zea mays
  Peptide Sequence Number=SeqID_46565
atgcgggcggcatgcaaccgcaccaagggggcacaccctttcgacttcgacgcgtccagcatggcggcccaggcccacacgtcatgtaaccggcgcgccggttactacgtgcgagaaactgcaccgccacttgcgccagtaccatgcctcctcgactgcggaactagtgccgcgactcgaggcgaccctgcgcatggccctacagtgccaaccgagcacatcggtcacgggtcagtcagccgcgggagaaggcgtgacggtcgatacagccagaaatgggccagcagtaatggtgggaccgggaaaggggatattccgaaagggatccttctccgtgaaggaagcggaccccgagcccccctactgatcagaggttcgaaggctggcccctcgaaagggttcaacagccgccttagagcactcgggctccgcgcccactactggtcagaggttcgaaggctggcccctcggaagggttcaacggccgcctcaggccactcgggctccacgcccattactgatcaggggttcgtaggctggcccccgaagggttcgacagctgcctcagacgcagagcgagggatgacccagggtatgttcgatacataa

SEQ ID NO: 3191 - DNA, 312 bp, Zea mays
  Peptide Sequence Number=SeqID_46566
atggcgcttcccgttgacgtggcgggcctgtgccctaggtcgggcgacgtgggggctcctccgaagccgaggtcgagtctgtcttccgtggccgaggccgagcccgagcccctgggtcgggcgaggcggagatcgttcggcagaggccagagcggagtccgagccctggggtcgggcgaggcggagttcgtcgtcttccggggctgtccgagccttgggtcgggcggagcggagttcgccgtcttccgggtcttagcccgagtccgagccctgggtcgggcggagcagagttcgccgtcttccggggcttag

SEQ ID NO: 3192 - DNA, 1026 bp, Zea mays
  Peptide Sequence Number=SeqID_46567
atggtgtctccggtgagctgcaagcgggtaatccgagtggacgtccgtgccccattcgttgggggtcggctaggggcccagaggcacgcccaaaagtacctgcggcaactggcgcgctggttgcgtgacgcgtgggcctgggcctccaagctggcgtgtcagaagtcggagaagcgcgtccacctggcgcggttgcatgccgcctgcatggctgcccgccccttccgcccgttggtctgggcaaaagtgggggtcgcttgtaaccgctgggcggtcacgtgcaccacgcgcggcggtttggcttcttctgctctgagccgggacgcaactccgtgggagttggtacctttcagccatcgttcggcttcaaggattttcatcatgcagcccggccgcacccctccaccggtggtcacccacgatggtgacctccggcttgatggtgggggaaagcgagccgggctgcggcccctgcccctccctcagcctcaaggattttcatcaccggggctggggaggggagtgtgccgagttgaggtcggcccctgcgtgggcggtggcccgctccttcactcattgatggggggaggagcggttgttgtccgtggcgctggcagttgcagcgtgcccggctttcggacgcgagtggcttcggagccgctcgcggcgccggcgtccgccacgacagctggaagaggttcttccgccggcgtgatagccagggccggccacgggctgacctccaactctacggccttctgcccatccttgccttacgagtttcggcatgggcgggggcctcctggtagcagcacccgccctgaggtcagtgctgccgctgttcgaccccccggagcaggtgacggcgcgccgttcatcggccttccgttgctccacaggccttccccctcggagtggggttgttcgtacctgcggagggggaaccggagttccatttgtgatggcacttcgaatgccagtgtttttgttcattgtggctgtcgaggcctgaacatgctcctctag

SEQ ID NO: 3193 - DNA, 573 bp, Zea mays
  Peptide Sequence Number=SeqID_46568
atggcccgccctggctttcctcagggtacgaagctcataatgcccatccccgcgggtcagggagagggagcgggacgggatctcccagtggcttggggcttgggctgcgcccggtgggggagcgggtcgtccctctccgatccccccattgggtgggagcatcctcgatccccagggcttgccttgcgtcgagggccccagagctacgtcccacccggatctggatcccgcgggagcgagtggcgcggcgtggcgatgacgttgggggaggagatggaggcaaagggaggaggggaggcggagagaggtcgcgtcggcggtggaggccgcgaggcatctatcgcggcaggggctgaggcgggcaacgtggtagagagaggaacgtgcgggggagccaaagcaatctggctcgggctcccccgtatcatgttgcacgggggtcttgtttctccgaaggaaaatcagctttggatattgtcggggaccataattaggggtaccctcaaggctcctaattctcagctggtaacccccatcagcataaagctgcaaaggcctgatgggagcgattaa

SEQ ID NO: 3194 - DNA, 333 bp, Zea mays
  Peptide Sequence Number=SeqID_46569
atgggagcagcagaagcagttggagagtttggtaaatctactggcagagacaaacaggcacaagttaaaccttattcagttttgaaccgaaggcagatttcgctttgtagacctacttataggtatactgagacccattgcctataccaagatcctagcactcagatgccaattattgcaatgcacctggctacaacttgcaatctcgaagtgcctcaccctccaattggaatcatgatgagcagcagatgggtgaacacacctgaactgcatcagccactctcatggtcatgcaatcatgttgttgcagggataacagactacacaaattag

SEQ ID NO: 3195 - DNA, 660 bp, Zea mays
  Peptide Sequence Number=SeqID_46570
atggaagatgaaccaagtgatgactcagtaacggttgatgatgaagaacctcctcaaaagaagcagaaggaagcactttcagctgcaaaaaaagaaagcagcagtgaggatgaagatgacagtagtgaggaaagttcggatgatgagccaacaaaagttgaagaaaaaaaggagatttggcattctagagtaattcagtactggaagcacttgaagttcgagatacaaaaggattcctttcgaaacgttatggatatgagtgctaaccttggtggatttgcagcatctctgaagaaaaagaatgtctgggtaatgaatgtagttcctttcacggaatctggaaagctgaaaattatatatgatcgtggtttaatggggactacccatgactggtgtgaatcattctcgacatacccgcgcacctacgacctccttcacgcctggctcctgttttctgagatagagaagcagggatgtagcctggaggatcttctgatcgagatggaccgcatcctaaggccttatggttacgccatcatcagagacaaagttgatgtcgttacctacatcaagaaacttttaccagcgctaaggtgggacgattggacgtttgagatgaggcctaagaaagatgcgctcacgaaaatatacatcatctga

SEQ ID NO: 3196 - DNA, 630 bp, Zea mays
  Peptide Sequence Number=SeqID_46571
atgccagctaagtcgccccgcgctgctccattctcgccttcacgccctgcctacgcaccctgtccccaatccctccgtgcacccccgcttcgctcgctatggcaagactaccgcggccgccctccatttaaagggtctgatttgtggacatcgcaacaatggaggtgctccatcctcccaggcatctccgtcggtgacgggtactgtccatcctgccgcgccccacccgcatcttacatgcccctgcctctgtcaccaatgacgcgccaaacatcctccccacggcggcggcgccatcgactgcgccctccttccatcctcgctcccacgtctcgcccgcgatccacaggagctgcgcccgccatccgcactccgcatatcgtgccgcccttccatcacttcctccttgccttccgtgcctcgcggacgctcttttcggccgtcgtgcagctctcgctctcggccgcctctggcgtgaagttcctctgtctcttctcctcctcccggcgcatcgggcttgccttccagcttcgcctcaatccactcatcggtgactctgactggctcgtcatcgacgaggcagaaactgaagcagaggcgcctatgtcggtgccgacctaccacaagtag

SEQ ID NO: 3197 - DNA, 1803 bp, Zea mays
  Peptide Sequence Number=SeqID_46572
atgcaggcggcatgcaactgcaccaaggggggcgcaccctttcgacttcaacgcgtccagcacggggcccaggcccacacgtcatgtaaccggcgcgccggttactacgtgcgagaaactgcaccgccacttgcgccagtaccgcgccttctcgactgtggaaccggtgccgcgactcgaggcaaccctgcgcatggcccaacagtgccaaccgagcacattggtcacgggtcggtccgccgcgggagaagacgcgacggtcgatatggccaaaagtgggccgacagtaatggcggcggcaggcgaacggaagcagcgatcaaatcgtctgcaggctcacgccccctcctgggacagcgagagagccctctcccacggcgtgaagacgacgcgcccgtgttccgttcctcgaacggctcacgcacgcacaacggctgccccgcgaaccactcgtccagtcgcattaactctgcggcagggcaggcggcacctttggcaggcgaagcagggaccgggaaaggggatactccgaaagggatccttctccgcgaaggaagcgggccccgagccctcctactgatcaggggttcgaaggctggcccctcggaagggttcgacagctgcctcagagcactcgggctccacgcccactactggtcagatgttcaaaggctggcccctcggaagggttcaacagccgcctcaggccactcgggctccgcgcccactactgatcaggggttcgtaggctggcccccgaagggttcgacaaccgcctcagagcacgcagagcgagggatgactctgggtacgtccgatacatggccgaggctcgggctacgctcccgaggtaccctaggacatttccgagaccggcaggagcgattctgtaatggaatcccatcagagggaggcatcgagccctcggaccctatcaaacgggaccgggtccggcaaatcacctgcagaaaggcgacgcaggggcgtatgaaaaaagccgagtcagtccttgaccgtcctctcgctctgtgcggaggctcgggggctgctctcgcaaacccggctccggccaaaccgttgacagcgtcaacataccagcccgagaacttggaacctgactatgcacccgggctacggccagtcaaggctccatccattcaagggacacgatctcgcctcgcccgagcccagcctcgggaaaaggcagccgacccaggaggatttacgtctcgcccgagggtccgctcaagcaacggacgcaccttcgactcgcccgaggcccagctcgagcaggcttcgcggagaagcaaccttggccagatcgccacgccaactgaccgtatcgaaaacagcgccgcctgccctgctccgactgctgtgccactcgacagagtgaggctgacagcagctaagtccagcctcgggcgccataggaagctccacctcgcccgaccccagagctcgggctcaacctcaacgccggacgacggactccgcctcgcccgaccccagggctcggactcaacctcgacgccggacgacagactccgcctcgcccgaccccagggctcggactcagcctcgacctcagaagacggactccgcctcgcccgaccccagggctcggactcagcctcgacctcggaagacggactccgcctcgcccgacccctggggctcggactcaaccttgacctcggacgacggtctccgcctcgcccgacccccgggcccggactcagcctcaacctcggaggagcctccgcctcgcccgacctcgggctcggaccgaccacgtcatag

SEQ ID NO: 3198 - DNA, 288 bp, Zea mays
  Peptide Sequence Number=SeqID_46573
atggagcctggcggagggacagctgtcggagcggttgagtccttgctgacgtcctcttgcttccgtaaggggctgagagccgccgccgtcacaggcccggctgcatccctccgccggcggtcacccaagatggtgacctccagtttgatggtgggggaatgtgagccaggctgcggcctctgcccctccctcagcctcaaggattttcatcaccagggctggggaggggagtgtgccgagttggggtcggcccctgcatgggcggtggcccgctccttccctcagtga

SEQ ID NO: 3199 - DNA, 996 bp, Zea mays
  Peptide Sequence Number=SeqID_46574
atggagccgcgcatcggcaacaggttccgcgtcggccgcaagctggggagcggctcctttggggagatctacctcggcacgaacgtgcagacaaacgaggaggtcgcaattaaactggaaaacgttaagacgaagcatcctcaattgctttacgagtcgaagttatatagaatacttcaaggaggaactgggattccaaatgttaagtggtttggtgttgagggtgattacaatgttttggttatggacttactggggccaagccttgaagatctttttagctgttgtaacaggaagctgtctctcaaaactgttttgatgattgctgatcaaatgatcaatcgagttgaatttgttcattccaagtcattcttgcatagagatatcaagccggacaattttctcatgggtctcgggaaaagggcaaaccaggtttacattatcgattttggacttgcaaagaagtacagagatacatcaacacaccagcacattccatacagagagaacaagaacttgactggaacggcaagatatgcaagcgtaaatacccaccttggaattgaacaaagccgaagggatgacatggaatctcttggatatgtactgatccttccatggcagggcctgaaagctgggaacaagaaacagaagtatgaaaagatcagcgaaaggaaagttgctacttcaattgaggctccagcagtaggacaaagctctgggatggctcctgtggcaaacaacaatagacattcaggcagcctagccaagcagaaatcccctgttcggcctgaggcatcgacatccagagatgctgtgatgcctgactcctcggacggcaggcgctcgtcttccggcaggcgccactcatctaacccgaagaactacgagtctaccataaggggaatgcagggcctaaactttgacggcgatgacagggctagaacagctgctggtgaccaaccagttccattccatctgaatgctgctgcgtga

SEQ ID NO: 3200 - DNA, 1128 bp, Zea mays
  Peptide Sequence Number=SeqID_46575
atggctcgaagaagatcccaaaagaacaagaaaacaactccgaaggaaaacaaggaggtaactcttgaaatattactttccgattgttctaattatgcttcatggtctactagtgtagtaaatgcttttagaaccatagactcacgattagaacaaattttagacaagagtattataccctctagttataatgggaaaaacacttccgagaaagatcaaagatgtatacacttaaactatctagcttatgacatcttaagtaaatctcttagcaaaaaagattatcgtgccttcataatgaattataatgaacatatttctgatgcgcatgatatttggactagaattaaaagtaaatttaatgagtccaaacatattagttcatatgatgcttctacatcctttagtccttgtgaaactaaccctttgaaggaagaagaagaaaatgaacgttggagaccaaacgatgaatccatctctccaaaaggtttgtcttcccatttcgattcccacatatgttgtgtggctaatgaaaatgatagtggaagcacaaatgaggatgaggaggatgaaagaagcttcatgcaactctacgctcatctaagccaaatagataaggcggtcgtgctcaaacttctaaaaagagcgagagagcaaagcgaagctcttcacatgctagaagatattctcaccataaaaatacaaagctttgaagagttgactaaagaacatgaggagctaaagtgctctcatgttgatttggtccaaagcaaatcctcctttgagctagaatctccaggaacaaaagatgatacatgtcaaaagctcaaggaagaaaataagaggctaagaacgagcttgacacaacttaaagggaagtgcactgctcaaccttttcaagataaccgtgattacatgatgaagaagcttaagacgggaataaccgtggcatgcacaaaatcccttgaagaaaatgtcaaggacttgaggattgtcaagaggaaggaacaaaagaagaaagtcaatacctctgccaaaagcctcgaccatgcctccatgcaaggtaacatccaaggtaatgatcaagccacacttcacactaagaaaaataagaagtgtagtgaatga

SEQ ID NO: 3201 - DNA, 132 bp, Zea mays
  Peptide Sequence Number=SeqID_46576
atggttttggctatggctatggacagaggagccacatcggttgaggagaaggtgatgtctctccagaggttcaaggtgtcaatcgccaatgctgagaactccagctcgaagacaatgaacacaactgcttga

SEQ ID NO: 3202 - DNA, 504 bp, Zea mays
  Peptide Sequence Number=SeqID_46577
atgggtggggacctcctggcagcagcatccgccctgaagtcagtgctgccgccgttcggccccccggagcagaagtcgtcgtcgccgccgctgctggagcgggtgacggtgcgtcgttcgtcggtcttctgttgctccgcaggcccacccctatcgagtggggttgttcgtacctgcggagggggaaccggagttccgtttgtaatggcacttcgaatgccagggttttttgttcatcgcggctgtcgaggcctgaacatgatggttggccgaggccccaggggtaaccggccgagccgcctgctcgggccggattcccggagaagtccctggcagcgattgtccgggcgtgacgatgacgtcgtcctccagagtggggatccttggaccgcgtcgccgtccgaggctaggtcggaccttgctgaaggtgtcgtcgatgccgagggtgttactgcccccttccagcgtcaagacccgagcctgcaggatcagagtgtcttgtag

SEQ ID NO: 3203 - DNA, 591 bp, Zea mays
  Peptide Sequence Number=SeqID_46578
atgaggatgagtaagctgcttaggggagtgatggagagtgactggggacctcgtgtgaagcccctcagcttcaagagcctcggggtcatcaaccactatgcactaaggaacactatgcaagcactgacggggctgggcgggaggaacctagcgagacgccacccatcgcgtttactgaggctgaacgcgctgctgctcctctgcctgtgcgcgttccccgccccggcgcggtcgcagaacacgaccatggccacggccgcgccggcgtccgtcgaggggtttaactgcaccaccaaccgcacgtacccatgccaggtgtacacgctctaccgcgccggcttcgcaggcgtgccgctcaatctcgcggccatcggtgacctcttcgccgtcagtcgcttcatggtcgcgcacgccaacaacctctccacgacggccgcgctggccaacgggcagccactgctcgtgccgctccagtgcggctgcccctcccggtaccccagctcgtacgcgtcgatgcagtaccagatcggctcgggggacacctactggatcgtctccactaccaagctgcagaacctcacgcagtactag

SEQ ID NO: 3204 - DNA, 438 bp, Zea mays
  Peptide Sequence Number=SeqID_46579
atgctgaggcggcacatcacctgccagtggaatgggcaggcggcgcgccttatccgtaataaatgcaaaggtcgcgcagcccagaggccttacgtcaggctccacccgctggcttacgtcacgggcagtaggccacgtggcagcatcggggctccgcctgagcggggagcagaggcatacacggaatcccgggaccctgctgtgagtggcccggaccctacacagagggattcaggacccgtcctaggggtccggcttgcggccgtggaggtcctggaccttacccggaggtccggtctgtatatgcaggggttcgacactttcccatggggtccggacccactgttgataccttggaggatattgtcttctccggccacgtggcggccctggagccgtccacgtggtggggtcgggtgctgttcaccatgcgactag

SEQ ID NO: 3205 - DNA, 330 bp, Zea mays
  Peptide Sequence Number=SeqID_46580
atgaagaggcgcactaccgcgggcggtggttcgctcctcgcgtggcggttcgccttcttcgcactcggagacccgcacaccagattcaccatggcctcgctactctatctcgagcgtttccagtccgagggggcactcaacctggtgcgcaacctgctcggatggggcgcgccgacgttcgccggaaggatccgcgccggcgcctctcccctcggcgatctcatcgccggggagttcgtgctcttcgtctcctacctctcctacgggttggcgctgccgatctcgcctttcttcctgcagctgctggaggagctaggcctccagctttag

SEQ ID NO: 3206 - DNA, 420 bp, Zea mays
  Peptide Sequence Number=SeqID_46581
atgtcttcttcctcatctgttgcgagtgtgtcaccggccgatccgtcgtctgaggataccctgagtgatttggtggcgacggagttgcagccgggctacacggtggagttcggcaccttgaggatttcctcggttcgcgtgcaggagatgcagcaacttgggtactttggtgacggtggggaagttgaagatctcccttggctctctgcggctgttatgtgctcccactgttacgtggtgttcccaccgtttgaggtggcgaaggacgatgaggacgagggggccctccggtatgctgcccgcatgagtagcgggcgcgatctggttgaggagttcattggatatggggtatggcccttggcgcacggctgggtacttggcgaagtgtgccctcgccagatgccgaccttgggcgagtag

SEQ ID NO: 3207 - DNA, 537 bp, Zea mays
  Peptide Sequence Number=SeqID_46582
atggcggcggcgcgtcttatccgcaataaatgcagaggacacgcggcccagaagccttacgtcaggctccgcccgttggcttacgtcacgggcagccgaccatgcggcagcatcaggtctccgcctgagtggggagcgaaagcgtacgcaatatggtctggacatgtgtcggctccggaccccctcctgaccttgatcaaggcctgggtattctttgtcccggtatcccgggaccttgctgtgagtggcccggaccctgcacaggggggtccgggcacgcccgtggaggttctagaccttacccggaggtccggtccgtatgtacaggggtccgacactttcccatgggggtccggacccactgttgatatcttggaggatatcgtcttctccggccacgtggcggccccagagccgtccgcgtggtggggtcgggcgttgtttgccacgcgactagagatagccgcatggactccgcgccttcatactgtagtaaggggtacccctgtttcagggtaccaacaaatacttacttaa

SEQ ID NO: 3208 - DNA, 822 bp, Zea mays
  Peptide Sequence Number=SeqID_46583
atggaaccccccaacgcgcacccggggcgacgactgattcttgcgctccggggtcgcgggatagcacgaagaggtcgcgcaggggtcccacgtcatcgctgtccgcggcgacagggtgggggaggacgcggatgcgataagaggcgagcacccgaggcgggagatggcatcgtggcgcatcctgacaatggcggacccccggtgttccgttttctagggcgatggatcggtcgtggccacgtgggagacgagaggggcatggcactgggttttatatttgtggagggcgagctggccaggtcgcgcgacggttgcgggaggtccaccgcgcggattccacggtccgcccgtcagtaccgcggccgcgctgagagtgagagactgccaaaccgggcccgcctgtcggcaccggctggcgtgagggtagatgatgggtcgcgggagttgactggagttgggctaagagggatggagggtgcatttgtcattaatacgtcctattgctcggatgtagaagggttctcttatcttcttcagagttgtgcgcttcacgtgggagttcgcaagaagccgaaatatctccacacccttgacacccactttgatgaccttttctcccattgcacccacctaaactcccaggtagaaaacgtggagcaccagatcaaggaactgaaggaagagaatgccactctccaaaacagcctcgagatggcagagtgtgatgacgccaacacacgtgaggcatacaggagcctgaaggactatgccagaaagctgaagaggttcgcccccgtcaagagggttcggaagcacttctag

SEQ ID NO: 3209 - DNA, 960 bp, Zea mays
  Peptide Sequence Number=SeqID_46584
atgagttcatcttctggagagtttggtcgtcgccatcaggataatgttgaggtgatcttcccagaatcacaagttgtgggcagcggaaggcaattagaggagtctggagttcttaacggggcccttaaagctcaaggcaattcatggggcttgcacatgccactcgtttgtccagatggtgctgttgtagcttatgcttggaagcgtcaactagcaggtcaggctggtgcatctgctgtggacaggactaggttagctctcaaggctttcactgaccagaaaagaagattctttcctcatctagaagatgaagttgttagccatctccatgatggtcaacctggtgacaccaaaaagtcaaagttgtttaccagcaatggatatctagaggaaaaatctttgtctgaaatactgaaaaatttagaacatgaagtacctaacataaaaatattcacatactggcatctggattggtcaaaaagagcttcatcattagcatctctgttggatgatgactttgtggatccatctaaagagctgaacctgcaaaatatggacaaatcgagatctgatgctctgacaactaccatagaccaagttgctgttattgaattgctggttccttcaatatttagagctgtagtgtcattgcatcctgctggatctactgatcctgatgcagtggcattcttctctcccactgaggaacatgctgacaaggcattgcagtacttcatcaatgcggagccgagtaaagcactacctcttcttttgcgttggattgccagctatcagactctgtttacgaaggtttgcagcaaatgcagacggcttctgatgatggacaagtctttggctttgctgttgcctcctgtccaccgcccctatcaccagacttcaaatgttggaccagatcttcaagaggcctaccacattggatgttcctcctacgatggctag

SEQ ID NO: 3210 - DNA, 426 bp, Zea mays
  Peptide Sequence Number=SeqID_46585
atgggcaagaacaacaagcgcaagcgtgagccaactcctccatcggaggagtttggtgactcggagtactcagaggaggagttctcctctgagtctgaggggtctccggcctcgtccccctgcgggctcgcggcggaggtctggacgtacatccgggccgtcgagcgttctgggctcgagggctcggatgagtcggagtactcctcagatgaggaggactcggacggcggcggcgaggttgaggacgacgacgacgacgacgacggcgacgatggtgacggcgacggcagcggcggcggctggggcagcggtggcggcagcaaggacggtgacggcggtagcagcaggggcagcaaccggggcggcagcagcaagggcagcaccaagggcggcggcggcggcagcagcagcagggccagtggctag

SEQ ID NO: 3211 - DNA, 447 bp, Zea mays
  Peptide Sequence Number=SeqID_46586
atgggcaagaacaacaagcgcaagcgtgagccaactcctccatcggaggagtttggtgactcggagtactcagaggaggagttctcctctgagtctgaggggtctccggctcccgtccccctgcgtgagtcgtctgacgactcagacgactcccacgggctcgcggcggaggtctggacgtacatccgggccgtcgagcgttccgggctcgagggctcggatgagtcggagtactcctcggatgaggaggactcggacggcggcggcgaggttgaggacgacgacgacgacgacgacgacgacgacgacgatggtgacggcgacggcagcggcggcggcagcaaggacggtgacggcggcagcagcaggggcagcaaccggggcggcagcagcaagggcagcaccaagggcggcggcggcggcagcagcagcagggccagtggctag

SEQ ID NO: 3212 - DNA, 912 bp, Zea mays
  Peptide Sequence Number=SeqID_46587
atggaggtgggcctccgcttccttggatggttgcaggaggagctagaggtgctcccgacgattgtgacgggcctcatgtccttcgcctcgctcatcacctgcgaaggggccgtgaatgcctggtctcgcgagggatgcacgcacttcgaagtctttgaccaatcggacgaaaggcttcgaacgcggaatcttccaggtcgaagacccgtgatgaagcgatatgctggggcactttatgataggatgtgggaccctcacgtccgtgatactgtctgggagaggtttgaccgggcgatggagcagatggcgcatgatgaggaggtcgaagacctcggggacctggagagcacgctgcccgcgttgtcaggtgcgaaggaagggattggggggcagctggcgccgccgcccgatgctggcgaaggccccgtgatgacccccgcgccgacctgtgctggcgaggaccctgtgccggccgctgcgccggcttgtgaggacacttcggtggaggcagtcggaccagctgccgaagactctgcagcatcggccggcccttcgcaggtattttcatctgatggcgagtttgggattccgttctcctggaccgaggagtctgcggatgaagacttggattattttgctgcgttagatgtggccgcggcagagacctcgccgcgagtggaggctggcgaggtgtcggatcttcgcagtgcgaggaccgagtgctggcgacgaagggtggtgttgaagcataggttggcgagatttcgcgaagtggtaggcaccatcggatggggatggagcgggaccgccttcgagcagatcggtttggtaaacgagagctactgtcttcgccgattggggcgagcattggtgagggggatctgtggaatctttttgagggtgaggaattga

SEQ ID NO: 3213 - DNA, 954 bp, Zea mays
  Peptide Sequence Number=SeqID_46588
atgaggattgtggggcggtacgcgccgaggacggagaccttgtggagttgggatattcgcggttccaatgttcgtttgaaccgtgtttttgagttggaccgtttgccatatggcggttacctgggagacgacactgctgttactgtcgatcgccagaaaaaagggcggcggctgtggatgaggaaggtccttcacgaagagccgtgccggctgcggccactaaaaagagaaactagggtcggggaccctagtcgcgaggtcaagaaggcacaggggatctcgaagtctaccgcccccggcagcggcaaaccaccgcctgctgcgaagcctgccgtccccggccctagcaaaccttcatcgggtgcgaaggccgtcgctcccggctcgagcaagccgccttctgctgagcccacgcaggagcgaggcccatcgtctcggctgcgcactaccgaggcggtggtgggtggggccgaactctccatggacatctgcgtggatgactaccgtgtgggtggggtcatgatgtttgatgcccgcacagggcgaggacttgtcgtggcagctgcgtcggtcgcggcgccgaccaaggcgaagggtgcttcgcaggacacatggtacaaattttgcgccagcggtgagattacttcggccgccgctgctaaagacgtgccgggctcagttgcgcagcagctgaagcatgcggctgccttcgccgatcatgttgcatcgggcactctgacctcggagtttgctgccgagagaaaacgactcgaggggatgattgagcgcctccgaacgcagcacacggaagctgcgcgggacaagtcaactgcggaaaacaagagccacaggctgatagagaagttgtcggctgcgaaggccgagaaagaggacctcagccgtcggctggtggcaaaaaagaaggatgcggacagggcctgtgctgaggcgtag

SEQ ID NO: 3214 - DNA, 150 bp, Zea mays
  Peptide Sequence Number=SeqID_46589
atggggaagaaatatcccccgcaaacgttcgtgggaatcaccacggggaaatatttttgtcgcggggacgaggaactaaaatctgacaaggaatcccacattgccatctctaccaactttggggtactcccagtcaaggttagggactag

SEQ ID NO: 3215 - DNA, 441 bp, Zea mays
  Peptide Sequence Number=SeqID_46590
atggtgcagtgggttacccgatccatgcgctccggcgtggttacaaactctggcgagcgtgagcgcactgttccggtggggctggtcctcggctcaagctcgggaaagcttcacggcctctcgaggaagctatacgagggctcggatcgagcaaaggtgggcgggggtggtttgatcacggtgggcatcctcgggcggctctggtgggtcgcggggaggtcgccggagctgcgggcgagctcgggaaagccaggcgtggtgcggagggggcgacagggaagatggtcgtgcatgagggcgggctttatagccactcgcgggcacgacacgggcgtgggcacgggggcagccgagggcgagcggggcgcgcgtgcgggcgtgctctgggcgcgttcccgaatgactgcccacgtcgaacacgtggtggtttacttctgctag

SEQ ID NO: 3216 - DNA, 2385 bp, Zea mays
  Peptide Sequence Number=SeqID_46591
atgtcgtcttcttcctcgtctgctgcaaacacgccgccagccgacgcatcgtccgaggataccttgagcaatgtggcggcggaggagctacatccgggtgacacggtggagttcggtgtttcgcggatttccttggtccccgttgaggatatgcatgagcttgggtattttggcagcggagtggggcatgtcccaggggcagaggaggttcccgagcccgagggcgagttggtcgtgtttgaggcgtttttcactactggccttcgtcttcctgcacatcgctttgtggcggaggtcctgcagagatttgaggtccaagtccaccagctggcgccgaatgccgtggtggccctggcgaagtatgtctgggcggcgacttcgtatggtggcgaagtcaaagaccacccagggctccccgtggccatgatgtgctcgcattattatgtggcgtacccgcaatttgaggtggcagaggatgatgaagacgaaggagcccttcggtgcgctgcccgcatgagtagcgggcgcgatttagttgaggaattcatcgggtatggggtatggcccttggcacatggctgggcgttgggcgaagtatgccctcacgagatgccctccctgggcgggcagcgggtgcgaagtccagccttcgcgttggatttgcatggtcgggatcccgccgcattcgtgcgtgaagcggaagacggtgcgacaaggattgtggggcgctatgtgccgaggatagagggtctgtggagctgggatatctgtgggtccaacgttagattgaatcgggtcttcgaattaaattgcttgccatacggtggctatcccggggatgacgctgccgaccgccgcgagaagaaaccggtggacgtgaccgaggaagggcctttgcagggggctgccccggccactaagaagagaaaattaggtactgcagtgggggagtggggcaaaccggtgccggctgcgaaaccggccgcccctgagcacaacaaggcgtcggcgagtgcgaaggctgccgcctctggcgggagcaagccacccctgggcgggctctatcatggtgcaggttcgggtgaggggcaactggctgttgtcccgcctccggtggtgaccacttcgccaacggcggtggtgggggcgaagggtgccgcgcgggatccgtgggccactttctgcgtgagcggtgagattctgtcggccgctgccgctaaggatgtggcggccgacttcgccgacctcgtcgcgtcgggtgccttgactgcggacgttgctgccgaggtcgagcatctctgggcacagcatgcgaatgctgtgcgggagaagcccgaggccaaagtggcacgggcggagggcagtctcgtccgccaacgtgccgaggagctagaggcaaggttcaacgccctgtgcagccgcgtggacaaggtcgggtcctcgacacgcgcggaggtcgagcggacgcacgcgcagttcgtggacgcgtaccgcgagctaggtgcgcggactactgaatggttgcgggaggagctgctggtgctcccgaccattgtgacaggtttcatgtccttcgcctccctcgtcacctgcgaggggggcgtgaatgctttgtcccgcgaggggtgcaggcattacgaggtattcgaccaagcggacgaaaactttgaatgtgaaatcttcaaggtcgaagaccctatggtgaagcagtcggcgggggcactctttgaaaggatgtggggtccgcacggccgagaggcggtcaggaagcggtccgaccgggcaatagagcagatggcgcatgtcgaggaccttgttggtctggatggcgtgctgcccgaggccgcggaggtcgatccggtgccgccctcggatgccggtgaaggcccctcggtgacccctgcgcccgctgcggccggcgaagaccccgcaccagcccctgcgcctacaggcgaagacgccctaaaggtggtggccgagccggctgctgagccggcagccgaggaccccacagccgcggccgggccttcgcaggttcttgggtttgggcctgcacacgcaaccgctactgacaatgctatttttgtggtggcttcgaccgtgcctgctgatgacgattcgtttggctctgtgtctaagtgttttgagtctgatgattctgggagttcgattgcatggacggaggagtcttcagatgaggacttggattattttgtagcattggatgtggctacagcggagccttcgccgcgcgcggagggttctgaggagctcccgggcgcgagtgagggggagctgcgaaatctttttgagggtgaggaattaaggacaatgttgttcaactacagggagatgggtgtcatcccgaaggttgagccaatgtaa

SEQ ID NO: 3217 - DNA, 357 bp, Zea mays
  Peptide Sequence Number=SeqID_46592
atggactccctcggactcccgacgccgagggctatcggcgactgttcacccaagcagccaaccatcttctacctcttgctcacccgccgaacgatctgcgacacgccatcaacagtcgccgggacgtgtgaagctccatcaatgcttcgcgtgagcgacgacatgagaacgagatccgccgtcgggaggagtacgacggggatcatggcatcccagctcggagtcaggccaccagaaccaagtcagcaacggcctcgactggtggtactacccggggacggtcgaggaaccgcaacgactactcccctccccgggacagacatcatccccgacgacaggagtacacgtgtggagtga

SEQ ID NO: 3218 - DNA, 339 bp, Zea mays
  Peptide Sequence Number=SeqID_46593
atgaccgactcaccccgtacccgcgtcgacgagcgtcggtcggctcgcggctgtgaccgtgggcgggggcagcaggttggggtggaagaacaggacgaaggtcgggaagacgaacatgacgtccgacgatggcgaaaacgatggtgcgcgcatgatgtgaaacgtcctcgtggacatgcaatagccactgcgcgagtcggtgtcggcgctggtgttggacgaatacggggaggaggcgcctgctcttacgccctctgccgagaatggggtggtgcggaggtggaggcaggatgggagagagaaaataagcaggatggtgaacgaggtggtggcaactaa

SEQ ID NO: 3219 - DNA, 939 bp, Zea mays
  Peptide Sequence Number=SeqID_46594
atgggcacacaatccacacgctccaacaggagcaaggtggagaagcgacacctcaaaaggcgcatcgacgccaccaagaagaagacaatggaagcctcgtcatcaactctggtggctgtcatcagtcaccagccgacatccgtcctcgatctactcaaggacgattcgagtcacagctccaccagggctaattcagactccgacgaaacactagagggcctgcttcatggcgacaccgccgcgaaacgacaatggtgggggacgaggagacccgcaactaggagaaggtgtaccaacgccaatgctaggcacacatcctcacctgcgaggccgccctccgctagcagcaggaagagctcgacaccctcttgcaaaagctcgaccgcatctatggggacgtcgagcagaggcgcctggagactgagaggccctagccaagaaagttcctccccatccacctcgcggagggggcaagagcctagctcgagcacctgccagccggaaccatccatgattgggccgacctccaaaaggccttcatcgggaattctagggcaccgacaagcgaccaggaagctcctagtacccaaagaagtgcacccagaagagtggggaaagtctacgagactacatccgatggttttcctagaaaagaaacgagctcccagacaccaccgatgcgacatagtgagcgccttcacctatggctccatgaacaaggcattcatccatgagctcgagcgggggataccaaagacaaccgcggaccttcttgagatagcgaccaagtccgctgatgggaaggatgcggtagggaccattttccataagagaaagagcccgcacgacgctgacgtgcctagcagcgagaatggggagggttgggaacatttcaacaagcgatggaggaaccaccgagctcggcatgacgatgaataa

SEQ ID NO: 3220 - DNA, 825 bp, Zea mays
  Peptide Sequence Number=SeqID_46595
atggacgagggttgcactcaacccctttcaagtgatccaattgttggggcgaaggcgaagacgctacccttcgctccagccttcatcaatctcgctgcaccaacggaggcaaaacaaccgacgaggtccacccttcgtcctctacactacaagacgaaggcctacgacgacgtcgccccgtcccacgtcctcacccgacctggaggcccacgtgggattcggcccattgagagaaagttccaacatttggcgcccatagttcgtgctacgaacaaaacacccgcgatggcacccaagagagctagctcgaaggcagccccatccgttgacgaagcagcgaaggcggcactgctagctaagaaaaagggcaaggcccttgcagacactacccatcaagaagcctgcgaagacgacactgtcaacaagagacaacacaacgaccaacctactcccgagggcagcctccgcacctgtagctccgaagggcagccacagcaaccacccccaggcttcgctccgctagagggcgaggatgccacagaggacgatgaagtcatcggcgtttcagcaaaagaacaactacaactgcgggccctccgcatcaagaaccgcaacctccagatcagaaagaaatcctcgaggccaagcgctaacgtgtttccgcgcaagccaaacgcgaaggccaacatgatctgcagcacggcccgcccctccaacagcgcgcgccaatcggagtcctattcattcctcagcgcggactcgtcgtcccgcacgccgcagcattccaaggcgtcaactaccttgatgagcggagtcccctggtga

SEQ ID NO: 3221 - DNA, 276 bp, Zea mays
  Peptide Sequence Number=SeqID_46596
atggatcatgtgctcgcaggactgatgggcgaccatctcgcgttgatcgtggaccggctgctgatagagtcgacgttggaggcggcgatcggcggtgggaagcatatggtcgatctgtgtcaggagacgatggacgtcgagtacttccatcgtgggctaggcggcggctcggtgacgaaggtggtggagtgcaggatttgccaggaggaggactgggacacctgcatggaggccccctgcacctgctgtggcagcctcaagctaggtttggtttag

SEQ ID NO: 3222 - DNA, 129 bp, Zea mays
  Peptide Sequence Number=SeqID_46597
atggccgaagctctggcggcaatggcgggtggaattgagctcgccggagctaaggaaagggggctggccggtgagggattcgagttagggatcaaggtgaacatccctgatctttggctcaaggtctga

SEQ ID NO: 3223 - DNA, 333 bp, Zea mays
  Peptide Sequence Number=SeqID_46598
atggccagcccactccagccaccctcaagtcgagccagcgcttcggctagctccgccagccggactcctcgccgccgacgagcatccccgcctgcgcgcgtggaccgaccgactccggccatctccgacggcgacccgcacactgttgtgatccccgagacctcccctacgtcctcgaccacttcaccagagcaatctcgccgccgagagtacgtgctcatccccgagcaaggacctgtccaagaggaggaccaggagcaggcttcagaggctgctattgaggatctccccgcagccccagcaattgaaggcaagccccggttttatgcataa

SEQ ID NO: 3224 - DNA, 285 bp, Zea mays
  Peptide Sequence Number=SeqID_46599
atggcgggcggaattgagctcgccggagctaaggaaagggggctggccggtgagggttggtattggagagaaaccctaggtgacactggggtgtcacagccttccccccttaaaggaatctcgtcccgagattcgggccagagtcctcccagggtgaagcgaaggattcgaagggcaggaggaggggttgggtgtgattacgtatcagcttccttaggtaggcaatcggggaagttggatctcaagaattcctcggtttcccaagtagcttcctcctctgagtga

SEQ ID NO: 3225 - DNA, 324 bp, Zea mays
  Peptide Sequence Number=SeqID_46600
atgacgggatttgggcgcgcggttgtgcgggtcgcggcgggctgtgcgggcggttcccaagcgcgtagggaggtggccgttgcgggcgtgcgcttcgtcatcttgctcctcagcttcgtcatcctgtacatattcaagtatcgtaaggaaaattcaagtttaaaggaaaaggtaagcacaagatttcaggaaggcgacagctgtgccccgagaagctaccagggcacagaaatcaccatgtccggctataatttcatcaaggtcatcaacttcaccctcgatatgttcgaaggccctatggcaggtcttgagccgaaggactaa

SEQ ID NO: 3226 - DNA, 144 bp, Zea mays
  Peptide Sequence Number=SeqID_46601
atgggttgccgcgggtgttcgctgccgccgtccggcaaccagggaggaagaaaagccgtagaagaacttgtgactaaggatcctggtgaccagcagatagaagtagctgagcaggagctcattgaaggcaagttgtgcccttga

SEQ ID NO: 3227 - DNA, 408 bp, Zea mays
  Peptide Sequence Number=SeqID_46602
atgtcgcgcacgttcgacgactactatatcgaggattgtggcatcattttggcgccaaaagtgacgcagaggaggatcgacaacacctcccggatcggaagctccacgtggcgcgacatctcgtctctgtcgtctatggcggtggcagaggtgtactcgccgaccgcggcggcggcggcgcagcagcagcgggagaaggcgacgtcgcagatctggcgggcggtggtggggtggatcgacgaaacgtcgctcccgccgggctcccgcctggacgtccgcgcctacaccaccgtgctgcacgcgctctcccgcgcgggccagtacgagcgcgcgctcgagctcttcgccgagctccggcgccagggatacgagataaagcgagattcaatgtttcataaagcgagataa

SEQ ID NO: 3228 - DNA, 384 bp, Zea mays
  Peptide Sequence Number=SeqID_46603
atgcgcctcatcctatggtacctgttcttgacctgtggggggtgtgagacagcaagagtgagctcacatacgttcatcgctcaacaagttgtggggaataatgtgcatgaactcgccaaaggtgggagctcacgtgaagtctatgagatcgttggctcgagaatcactacaatcggagtcatggttgaaaagggcccgtttggcacagctccagctcctgattctaagcgaggatctggaggagccgtgccaaacgggagaatcaggaggatcagctcctcacgaggatcaggatctagagctaaagaagcaggagctggagttttgccaaacaggcccttaatatatcatattacatttgatttagagaggttaatctactaa

SEQ ID NO: 3229 - DNA, 759 bp, Zea mays
  Peptide Sequence Number=SeqID_46604
atgccgtcgtgggtgtcggagaggttttggcgccctgttcatgtgatgtcatggctgtcggaggagcgcttgggccctatggaacctgaggtcgggcgaggcagtgactcctccgaggtcgaggctgagtccgaaccctggggtcgggcgaggcggagaccgtcttccggagtcgaggctgagtccgagccctggggtcgggcaaggcggagaccgtcttccagagccgaggctgagtccgagccctggggtcgggcgaggcggagatcgtcttccgaggtcgaggctgagtttgagccctggggtcgggcgaggcggagtccgtcgcccggggtcgaggttgagtccaagccctggggtcgcgcgaggcggagaccgtctttcgaggacgaggctgagtccgagccctggggtcgggcgaggcggagaccgtcttccgaggtcgaggctgagtccgagccctggagtcgggcgaggcggagtccgtcatccaaggtcgaggttgagtccgagccctggggtcgggcgaggcggagtccgtcgtccgaggtcgaggttgagtccgagccctggggtcaggcgaggcggagcttcctatggcgcctgaggccggtcttggcggctatcagcctcaccctgacgggtggcacagtagtcggagcagcgcaggcggcgctgttttcctgtcaggtcagccagtggaggggcgaagtgactgcggtcacttcggccttgtcgactgaagagcgtgcgtcatga

SEQ ID NO: 3230 - DNA, 942 bp, Zea mays
  Peptide Sequence Number=SeqID_46605
atggatcccgtcgggacctcctcgccctccgtcgtggatatcgtcgcagccacctccaccacccccggccatggatcccgtcgggcctccccctcctccgccatggatcctgcagcagccacctcgccccccgccatagatccagtcagggcctcctcgccctccgacgtggacctcatcggagtcgcagctgcctcgacccatgccatgtacctcgtcggagccaccttgcccccccccccccgccatagatccagtcggggcctcctcgccctccgacatggacctcgatggagcctcctcgccctccgccatggatcccgtcagagccgcctcgaccaccaccatggacctcgtcggagccacctcgcccgcgactacaactcatcgcgctcgcggcagcagcactggggagtgacgacggcacgcgcgcagcagcagtggggagcgactgagagcgaccgagcgagacagggaaaagggggtgaagaggatagctgcttgcctgcttctgtgacacatgcaacaaaatgggaaagtgaagaggcacccgagtgtccaccgtcctttggcaatgacatttatgccctcagtgggccgaatcccacacaggcctcccgatgcaatgaggacgtgggactagcagacttcgacggggccttgccttcgtcttcaaggcgacgaaggcttcgagtgaagggtagtgtcttcgccttcgccccaacatttgccctccgagggactagttcgactaagtcatctggttcgggccgcttagagatgcgtaacaccctacgtcctgtggacccgggggatatctgtcccccacaagcccccaatctttgggttgattttgaggtaatgaacccaaagatccctaggtccagcttgcaggaccctgaacttcattgggtgcaccggaggtgcacccaatgggtgtag

SEQ ID NO: 3231 - DNA, 663 bp, Zea mays
  Peptide Sequence Number=SeqID_46606
atggtgtctccggtgagctgcaagcgggtaatccgagtggacgtccgtgccccgttcgttgggggtcggctaggggcccagaggcacgcccaaaagtacctgcggcaactggcgcgccggttgctcgacgcgtgggcctgggttcccaagctgacgtgtcagaagttggagaagcgcgtccacctggcgcggttgcatgccgcctgcatggctgcccgccccttctgcccattggtctgggcgaaaatggggggtcgcttgggagggccttggagcgtgttggagaagactcagcctgtggcgcctgggggcgcacgtagggagagttgccttcaaaaggagggagactcctttcggaaggcaaccatgtcttcttcctcccttaagcgtcgtgtcttcccatcttccaagcccccggatggggggtatccgccgcctttccgcctcctcattggaggaacgcaactccatgggagttggtacctctcagccatcgttcggcttcaaggattttcatcatgctgcccggctgctcccctccgccggcggtcacctgagatggcgacctccggcttgatggtgggggaaagcgagccgggctgcggcctcttcccctccctcagcctcaaggattttcgtcatccaggccaagatggaagatga

SEQ ID NO: 3232 - DNA, 1257 bp, Zea mays
  Peptide Sequence Number=SeqID_46607
atggcgcactcccccctcctccttgcgaaaaggcgacgtaggggcgtatgtaaaaagtcgagtctgtccctgatcgtcctctcgccctgtgcggaggctcgggggctgctctcgcaaaaaccggctccggccaaatcgttgacagcgtcaacataccagcccgagagcttgggccccgaccgtgcacccgggctacggccagttcgcatgagggaacgaccaggccagccgaagcgttacgcgagcgccgcctgcgccactccgactgcagcaccactcgacagagtgagtctgatcggcagtcaggtcttgacaaaggcgccacggcgaactccgctccgcccgaccccagggctcggactcgggctaagacccggaagacggcgaactccgctccgcccgaccccagggctcggactcgggctgagacccggaagacggcgaactccgctccgcccgaccccagggctcggactcgggctaagacccggaagacggcgaactccgctccgcccgaccccagggctcggactcgggctgagacccggaagacgacgaactaccgctccgcccgaccccagggctcggactcgggctgagacccggaagacgacgaaactccgcctcgcccgaccccagggctcggacttcgccctggcctcggccgaacgacttccgcctcgcccgaccccatggctcgggctcggccacggcaacagaagacggactcgacctcggcttcggaggaacctccacgtcgccctgcctagggcacagaccgccacgtcaacaggaagcgtcatcatcatcctaccccgaatcgactcagaacgacgccagcagggactcgaccgctccaacagctgtccctccgccaggctccgccgcacctccgacagccacgacatcacaccagcagggtgcccagatctctccggctgccacattggcatggccttctcagggaaggttggccgcgcgggaccgaggacgggacaggcgctctcttggggccgctcgcttccctcacccgcgtggacgcttgtaacccccctactgcaagcgcacccgacatgggcgcgggacgaacacgaaggccgcgggacttccacctctctcacgctcgactccggccacctcgcctctccccccttcgcgctcgcccacgcgctcgacccatctgggctggggcacgcagcacactcactcgtcggcttagggacccccctgtctcgaaacgccgacaatcatagataa

SEQ ID NO: 3233 - DNA, 828 bp, Zea mays
  Peptide Sequence Number=SeqID_46608
atgcgatccaaggaggtagcgtttgctcgtgaggatcatttgaggggccattttcaggatttagttatggcctacaatgatctggaggactactccaatgtgctgcatgaagaagttcaccaactgtattaccagctgcaccccgatgacgcaccaggagccacagaggcagagggtggcgttgtgttagccgatgggggtgaaccggatgcagactcagaggaagaagtagcgcctgtgtttgcaccaggtggaaattctctagggggtagtgatatgcctaggcgtgttcgactatctgatatagctggcacctctcagggcggtgtggaagatgactctgatcctccaccgccaccaattcctccaaccctagctgatgcaattgccgcgttagtaaatgcgacggctaacaatgcacgtgttttgcgtgaagtgcttcagaaccaaaatcaacatggggctcgggtacctccaaataatgctagaaatgcttcttacatggaattcatggagacccgacctcccacttttataaaagcagaagagccacttgaagccgatgaatggctttgggtggaaaagaccaactggaaatgccttggctcgagcagccaagactttgctcagtctggagcaccggactgtccggtggtgcaccggacagtgtccggcgaactcgtcgctctcgggaattcatcgtcgacgtacggctataattcaccggactgtccggtgtgcaccggactgtccggtgagccaacggtcggcagggccaacggtcggccgcgcgatctgcgcgggacacgtggccgggccaacggctag

SEQ ID NO: 3234 - DNA, 852 bp, Zea mays
  Peptide Sequence Number=SeqID_46609
atggcgcaccggacagtccggtgcacaccggacatgtccggtgcccccgccacgtcattagtgtcgttggattctgaccgctggagttctgacttctgggcccgcctcgatgtccggtggcgcaccggacatgcactgttcactgtccggtgcgcctgcttccgcgtgcctgacgactgcgcgcttctggtgcgcattaaatgcgtcgcaggaactaggtgtaggcctaattccctttcaccgggcgacgtgggggctcctccgaagctggggttgaatctgtcttccgttgccgaggccgagtccgagcccttgggtcgggcgaggcggaagtcgttcggcagaggccagggcggagtccgagccctggggtcgggcgaggcggagttcgtcgtcttccagggccgagcccaagtccgagccctggggtcgggcggagcggagttcgccgtcttccgggtcttagcccgagtccgagccctggggtcgggcggagcggagttcgccgtcttccgggtcttagcccgagtccgagccctggggtcgggcggagcggagttcgccgtcttccgggtcttagctcgagtccgagccctggggtcgggcggagcggagttcgccgtcttccgggtcttagcccgagtccgagccctggggtcgggcggagcggagttcgccgtcttccgggtcttagcccgagtccgagccctggggtcgggcggagcggagttcgccgtcttccgggtcttagcccgagtccgagccctggggtcgggcagagcggagttccctatggcgcccctggcgaggcctgactgcctgtcagactcactctatcgagtggcactgtag

SEQ ID NO: 3235 - DNA, 1758 bp, Zea mays
  Peptide Sequence Number=SeqID_46610
atggcgcaccggacagtccggtgcacaccggacatgtccggtgcccctgccacgtcattagtgccgttggaatctgaccgttggagttctgacttgtgggccacccctgatgtccggtggcgcaccggacagctcctgttcattgtccggtgcgccagtatgggcaaacctgacgtctgcgcgcgctgcggcgcatttaatgcctctgcagtgaaggtgcacgtacctgtcaccaaccttgctaatgcagcagtgtcggccacaaatgatgttcctggcatcaccaacatcatgccatctctagtccttgctgaaggccctagcgtcaaccatgtaaaggcggcatccgatgacatcaactcggataagttgtgcgtgaaggttgctgcaaggggtgcacaagcagtggctgctgatgtcgcacttgttcctactacaccagcgacctcgttggctgcaccgacttccccacctaagagtgtcaacgacgactgcaagagcaacaatgatgttgcggtgcctagactttctgcgactgtgttacatgacatcaccaaactcatcgagcccctaccagttgtggtgagggttgtttcaagcacacctccaccagctccattgggtattcagctagtgttcgaaagcatgcctagtaggtgcaaagcatcggttctctggatactattggcaattccctggccaccttttgtgcctatgtatttggttggagatgcagttgttgtggctgtggtgacagttatttcaagtatgcctctgttattgcagtgctatcacagtggagtagcatgtgtgctgacggatgcaaattcatcattatctacatttcagcttgagagaaatgttgtctggaagccaccttggcagtaccataacactagctctgagccgctggtgctgatgaagtttgtatatttctctactggagtccatggcactctggacatggtcagtacaatttctgagcagtgctatgtcgtcttgcatttattgatcacaagtgaaacatgcatgtcttggacactatctcttgcccaagaactgaagaccgatgatgtgagccttgttgcatctgacgaaaattcctatgggttaatagttccaagctatacttcctgctcctttcatgagggcctctctgagatgctatgccaattggtgatattttttgttgtagtattatctgaacgtgaagaagacaaacaccttcattgcgcacaacaaatgtactcggtttcagaaatatctattcgtcgtgtggggttcttggctagcataatgaaggagaaaagtggtattgatctggttgacatggttgttcagttattcctgtttttcgaccacaacttgaacgaaatatttgcaactttggctagtggaccggaaagaagcttttgtgcaatgttcagtgctgcatatattgagttgtatctagtggtgcagcaacaaggggcattattccacatagctgatgggggatttgcaagcttgttttgcatctacttgtggaaagtatcatggccttctttcaccatcagtggtacaattatcgcaatttggtgttgtgacctgttcaagaagctcccatggcagcctccaaatcaagagggagtacaccagcagcaatgtgatgctccctgtcagctggaaattgtatactatggaaatgatgtcgtatacaatcaggatccttttgtgagtcacgatgtaattaagaataagttcaccactttcccttag

SEQ ID NO: 3236 - DNA, 414 bp, Zea mays
  Peptide Sequence Number=SeqID_46611
atggcggaggggcttaccgacggcgagattgctccgagaggttcacgggatgccagagaagatatgggtgcaaggaatcggtcggagactcactggatagctcggtccacgcgcggcggcggaagaccgaagtccggtgaggtcgatctcgggcctccggtgaagtctggccgggtccgagggcttggcaagcttcacgggctactggcgaagctagccgaagcactggctcgacttgagggtggctggagtgggctggccacggtggccgaagctctggcggcaatggcgggcggaattgagctcgccggagctaaggagagggggctggccggtgaggagatatggagccaggaaatccagtctgtctccctgctcaaacccgaggcaaatccatggttttgtcgtgtctag

SEQ ID NO: 3237 - DNA, 444 bp, Zea mays
  Peptide Sequence Number=SeqID_46612
atggagatggtggctcaagaaaaatcctggggaggtcagcgcatggcggctggcatggatttataccccggtggatcccgattagctagcaaagcaccggtcaagcgcccgcggatttcacgcgcgcgcagagaagaactcgcgctttctgttgaggaggaagagcgagctgcaccagcggtcccacgtgccagagaaacacaacacaggcgcgggcgcaagtggaatcaggctgatccactgggatgtgggtcacacaggcagcgcgcggtacatgtctggctctggccgcgcgaaggtgtactgggccgagttccagcaggttgcaatgagtatgggcaaaaacacagtgggatctactctcttcagattgtttacatattgggtattacaaatcctaccccccttaaaaataatctcgtcctcgagattaagaagatctag

SEQ ID NO: 3238 - DNA, 564 bp, Zea mays
  Peptide Sequence Number=SeqID_46613
atggagatggtggctcaagaaaaatcctggggaggtcagcgcacggcggctggcatggatttataccccggtggatcccgattagctagcaaagcaccggtcaagcgcccgcggatttcacgcgcgcgcagagaagaactcgcgctttctgttgaggaggaagagcgagctgcaccagcggtcccacgcgccagagaaacacagcgcaggcgcgggcgcaagtggaatcaggctgatccactaggatgtgggtcccacaggcagcgcgtggtgcatgtctggctcttgccgcgtgaaggtgtactgggccgagttccagcagattgtaatcttgccgacggagagtacgtgctcatccccgagcaaggacctgtccaagaggaggaccaggagcaggcttcagaggctggtattgaggatctttctgcagccccagcaattgaaggcaagcctcggtttatatgcataaccgtattattatatgctactttactacacttaatgcttgtaggattgcaatgtgcacttaagtgtaggagttgcttgaaacctctagttgcatga

SEQ ID NO: 3239 - DNA, 879 bp, Zea mays
  Peptide Sequence Number=SeqID_46614
atggcggaccctatagtgaaggagtccgccggagccatctacgaccggatgtggggcccgcacggtcgagaggtggtcagggagcgggccgagacggcgagggctcaggcggcgcgtggcgagagggtggacgatttcggggcgttgaacagcgcgttgcctgacccggagtcgaacccggcggaggccgtgtccgaggccgccctggagccgcccccggagactgccgaaggcgttcctgatgcccccgcagccgctgcggccggcgaaggcccacccctggagaccgccgaaagcgttcctgatgcccccgcagccgctgcagccggcgaaggcccgtcgccaactgctgtgccgagggttgaagatcctgcgacggtggcggtggaggcgacggcggaggctcccgcaacggctgggtcctcgcaggttcaagattttgggcctgcgcacgcaaccgccactactaattttttggcggcttcgaccgtggatggtgttaataaatcggatgggtctacatctaagttttctgattttggtgactccgggagctcggttgagtggactgaggagtcgtcggatgaggacttggactattttgcggccttggatgtggcagcggcggaggcttcactgcacactgcggacacagaagatgtgcctggtccgagtactgggcgcaggcggctaagggctgttgcgaagcgtagagtgagcggggcggagggcggtcggcttcgtgcttgtatggtgaagttgtgtgccctcacacatttggctatgctcgcgaaggcgttcgtccggctgtgccctcgggcaacttctgcgcggatggtctttgcagtggacttcggtttttcgcacttgctgtgctag

SEQ ID NO: 3240 - DNA, 105 bp, Zea mays
  Peptide Sequence Number=SeqID_46615
atggggtccaggcacagtgcttgctctgccgaggctgagtgccgaggtaaagaagaaggcgtcgaggcggatctccaggagttcctcggcgagttcgaggattag

SEQ ID NO: 3241 - DNA, 204 bp, Zea mays
  Peptide Sequence Number=SeqID_46616
atggcggacccgggcatgggcgcgaactcactgcgagaacaccacaacccggtcaccgacggcgatgacggaaaacgcagccagacgagctcgatctcgcggccaccgtgtggtagaattccaatcaaaggcgtggagagtatcactgatctaccatggccatggtgcatgcaagaatccgagcggagagacacgaatctctag

SEQ ID NO: 3242 - DNA, 306 bp, Zea mays
  Peptide Sequence Number=SeqID_46617
atggagcaccgtcccgggctggaaaggttgctagagactgcccatctggagcttgacgggaagctgttcgtcaacacgcagcaggcccctacctggcgcgccaactatcggcgtttcgagaccgaggggtccctggaccgacgagtaaattgtcgtcgcgtgccccagcccagatgggtcggcgcgagacggagcgcgaaggggggaggcagccggagggagacgggcgtgagaggtggaaatctcgcggccttcgtgcgcaaggagaggatccaggtgtacaatgggggtgtagcagtgtgctaa

SEQ ID NO: 3243 - DNA, 897 bp, Zea mays
  Peptide Sequence Number=SeqID_46618
atggcgcctcctgttgacgtggtcggtccgtgccctaggttgggcgatgtggaggctcctccgaggtcgaggtcgagcctgtcttcagaggccgaggtcgaatccgagcccctgggtcgggcgaggcggagaccgtcagctgaggccagggctgagtccgagccctggggtcgggcgaagcggagttcgtcgtcttccggggctgagcccgagttcgagccctggggtcgggcggagcggagttcgtcgtcttccagggctgagcccgagtccgagccctggggtagggcggagcggagttcgtcgtcttccggggctgagcccgagtccgagccctggggtcgggcggagcggagttcgtcgtcttccggggctgagcccgagtccgagccctggggtcgggcgaagcggagttcgtcgtcttcaggggctgagcccgagtccgagccctgggtcgggcggaacggagttcgtcgtctttcggggctgagcccgagtccgagccctgggtcgggcggagcggagtttcctatggcgcctgaggccggacttggttgctgtcagcctcactctgtcgagtggcacagcagtcggggcgacgcaggcggcgctgtcctcttgtcagaccggtcagtggagcggcgaagtgactgcggtcacttcggctctgtcgactggagggcgtgcgtcaggataaaggtgtcaggccacctttgcattaaatgcccatgcgatttggtcggttggcgtggcgatttggccaaggttgcttcttggcgaagactgggcctcgggcgagccgaaagtgtgtccgttgctggaggggggtctcgggcgagacgtagatcctccagggtcggctacccttgtccgaggctgggctcgggcgaggcgtga

SEQ ID NO: 3244 - DNA, 603 bp, Zea mays
  Peptide Sequence Number=SeqID_46619
atggatgaaggaactcccttcggtgatctggagtttgaggacgacgccgagccgagccacgggcttcatgccggtctttctagtctatgggtccgaggctatcttgcccacagacttagaatatggttccccgaggacaagggcgtacgacgaccggagcaaccagaccaaccgagaagactcactggaccagctggaggaggctcgggacatggccttactacactcggcgcggtatcagcagtccctgcgacgctaccacgcccaaggggttcggtcccgagacctccaggtgggcgacttggtgcttcggctatgacaagacgcccgagggctccacaagctcactcctccctgggaggggccattcatcatcgccaagattttgaagcccggaacatacaagctggccaacagacaaggcgaggttcagacatcagtgaggggagcagcagcatcctcggcatcgactccaccttcggcggaatccgacccggcctcggacagcaacacggtcggaggatctccacctcgaaggaagatgtcaacactgcgcctgagccatcgccgccaggatctcctccaggaacctggcccgagtag

SEQ ID NO: 3245 - DNA, 822 bp, Zea mays
  Peptide Sequence Number=SeqID_46620
atggtggggagaagcaagccgggctgcagcctctgccccgccctcagcttcaaggatctccatcatccttgctggggcggagggcgagctgagccggagctctacctcccgtacgggccagtgggccacctcctccttcagcaatcaggggacagggcgctcaccggcctagcggaggggacggacttcgacaacgcggggccggtcggtcgcaagcgtcgtcagctccaacatgcctggttcgctggctcagctggctctagcacagctttcggtgccacctcccaccgctgggcggagtgtggccatctgcccaccgtacgggcggctgttgcaccgcgcgcatcgggggactacccaagacgtcgctcgctgctagggcggcgttcgtgttcttgggctgtcctgcccttgctccggcatgacgcctccgtgcgacggctggtgctcgcccgtccgggaggacttgagtggggatctgccggtgggcaggtggctgctgtcgtcggtgctgaggtggtggcagctggagaagtcttcgtcgccgacgagatcgtcggtgccatctacggaccgacctccggctctttggctttgatagcttgtcctcgcccctcgagtggggacgtgggcaagggccttgtcgcggcagcgtctgccccgaggtcatcgctgttgttgtttggccgcccggagcggaggtcgttgtcgcttctgcaggagtgggcggcggcgagccacctagaatttgtcatcccgcaggccctccaatgtggggggttgttcgtacctgcgggagtggaaccggagttccatttgtaa

SEQ ID NO: 3246 - DNA, 195 bp, Zea mays
  Peptide Sequence Number=SeqID_46621
atggcggacccgggcatgggcgcgaactcactgcgaggacaccacaacccggtcaccgacggtgatggcggaaaacgcagccagacgagctcgatctcgcggccaccatgtgtgcactccaccacagagctagcagatgagatttttactgctcacaggccatacaacagtccaaaactaaatatttcgcagtag

SEQ ID NO: 3247 - DNA, 534 bp, Zea mays
  Peptide Sequence Number=SeqID_46622
atgtcaaaaggaaaagaacaattggaaatgtcttggctcgagcagccaagactttgctcagtctgggagcaccggactgtccggtggtgcaccggacagtgtccggtgcgccaggctggctcgtgcgaactcgctgctctcgggatttcatcggcggcgtatgactataattcaccggactgtccggtgtgcaccggactgtccggtgagccaacggtcggccgggccaacggccggctgcgcgatctgcgcaagacacgtggccgagccaacggtcgggagggggcaccggacagtgtccggtgcgccaacggctcccaggcgccaacggtcggcttcaccgggaaaggaaagaaatccgcaccggacagtgtccggtgtgcaccggactgtccggtgcgccaggcgacagaaggcaagatttgccttccaggaatgctctcaacggctcctagctgccttggggctataaaagggacccctaggcgcatggaggagtacaccaagcattctctaagcattcctaagcactaa

SEQ ID NO: 3248 - DNA, 384 bp, Zea mays
  Peptide Sequence Number=SeqID_46623
atggatgaacaaagtgcaaatcaagagcaaagaaaagaaaagagtgccaagaagtttcaacatgtgattcctgcatacattgaacaattagcagaaatgttccatggaattgttgttgatgggtctagttcctgtatccctagagatgtacacagaccatcacaagaggtgtacgaagaacaagaaggagaagatggatacggggaagaatttttgaattctaacttggcagtagaatctggagccgacaaagagttagatgagtactttgtggcaaccaaactattcaaggatgagtacaacaagactattttcaatcgctttgatactacaacacaaaggatgaaatggctacaaaggttttgcaaggaatattgtggttga

SEQ ID NO: 3249 - DNA, 101 bp, Zea mays
  Peptide Sequence Number=SeqID_46624
atggaagcatcggagatacagggtatagtacctcgtaccttggtgaagcgggagatgaaggcccggagagtttccccgggctcttgcctcactgcatggag

SEQ ID NO: 3250 - DNA, 1335 bp, Zea mays
  Peptide Sequence Number=SeqID_46625
atggaggcacgacaccgcacggcgctcggcgacctggccgctgaggtggagccggagctggaccagtccatggaggcgtaccccgaggtgctgaaggtcgctgcgcaacaccctttcgtccgggcgctgacagaagaagtgccaccccactgcatcctcgtgctaaagctggaggccgaactcctccaacaacagcaggaagaaaggcgagatcggcagcgccaacccgcaagagatgtaggaggtgaacaaaacaaactccccggcggcgaggccgccgagggggacggcgccagcgcggatccgcccggcgagcgccggcgtgcttcatccgagcaggtggtgcaccacgttgagtgtcgcctcggtctagaagaggtcgggttggccaagcgaagccatggtgactacggcggcggaaagcagaagaacgcgaatgcaaaggggcgcggagaactcgaaggcgaaagggcgcaacagttggggaaatgcgagagcataactgttgcacgcggggtgaatcccttttcaaggaagactcccccgctcctggtgtgcgggtctacgagtgctgagaaggcgaaccaccacgcgaggagcgaaccaccgcccgcggtaatgcgcctcttcatctctgccacaagaaacaacaacccagtctctgacacgagggcccgggcccacgagtcatactccttgggtgtcggttcccgggtgcagaaaagtcgaaccgccgctcgcgccaacgtggcagttggcgtgaccaaaggcgggctggcagtgattacgtcagcacggaagtggcgcgccaatcgccaatcaagctttggccccacctgcaggctcgtatcctcccctgagggccgccacgtggacggctccagggccgccacgtggccagagaagacgatatactccaaggtatcaatagtgggtccggacccccacaagaaagtgtcggacccctgtatatacagaccggacctccgggcaagatccaggacctccatgggtgcaaaccagacccttgggacgggtcccggacccccctgtgtggggtctgggccactcacaacaaggtcccgggattccgagacaaagaattcccaggccttaatcaaggccaggcgggggttcggagctgacacgtgtccggaccataccgcgtacgcttctgctctccgctcaggcggagacccgatgttgccacgtgatgtgtcgcctcaacatttaatgagccctgccactccgctggcggcacgtccatactgccgcatgcactacgctcatcatgactcgcgcgttaccgaggaagcagcggcgacatatcaataa

SEQ ID NO: 3251 - DNA, 147 bp, Zea mays
  Peptide Sequence Number=SeqID_46626
atgtgggggggacaccaaaaggaaggggcgtgggcatggttggcagttagtagcgagtgctggggggtccaggtctttggtgaaagggaggatgtggtggcggtggaaagggagaatgggggggattgtagatttagatcagagtaa

SEQ ID NO: 3252 - DNA, 435 bp, Zea mays
  Peptide Sequence Number=SeqID_46627
atggccgagaggccttacgtcaggctccgcccgctggcttacgtcacgggcagtaggccacgtggcagcatcgggtctccgcctgagcggagagcagaagcgtacacggtatggtccggacacgtgtcagctccggacccccgcctggccttgattaaggcctgggtattctttgtcttggaatcccgggaccctgctgtgagtggcccggaccccacacaggggggtccgggacccgtcccaggggtccggtttgcacccatggaggtcctggatcttgccaggaggtccggtctgtatatacaggggtctgtcactttctcgtggggtccgaacccactgttgataccttggagtatatcgtcttctctggccaagtggcggccctggagccgtccacgtgatgggatcggatgttgttcaccacgcgactag

SEQ ID NO: 3253 - DNA, 1032 bp, Zea mays
  Peptide Sequence Number=SeqID_46628
atgtcgcgccttctcgactgcggaactggtgccgcgactcgaggcagccctgcgcataacccaacagtgccaatcgagcacaacggtcacgggctcgcgtcccctcctgaagcggcaagggagccctcacccacgggcaagcgacacctttggcaggcgaagcgggcgtcgtttcacctccgccatgatgaccgcgtcaaaaaaggggttcgaaggctggcccctcggaagggttcgacagccgccctagagcactcgggctcaaagcctattactgatcaggggttcgaaggctggcccctcggaagggttcgacagccgccccagagcactcgggctccgcgctcactactgatcaggggttcaaaggttggcccctcggaagggttcgacagccgccccagagcacgcagagtgagggatgactctgggtacgtccgttacatggccgaggctcgggctacgctcccgaggctcgggggctgctctcgcaacctggctacggccaaaccgttgacagcgtcaacaaaccagcctaaaaactcggaacctgaccatgcacccgagctacaaccaggctgcatgagggaacaacaaggccggccgaggcctcaggggctacacccggcgggggtacccccaacactcctaaacacggctggtaaccaccctcagcacaaaccgcaaagactgatgggcacggttcatgtcaaggcttcgtctacccaagggacgcgatctcgcctcgcccgagcccagcctcaggcgggaactgtaatcccggatgaagttacgtctcgcccgagggcctcctcaggcagtgggcgcaccctcggcacgcccgaggcccagctcgggcaggcttcgtcgagaagcaaccttggccagatcgcctctccaaccgaccgtatcgctggcgcattcaatcgccgctcaccccacttcgactgctgtgccagccacccgggcaaggctgacaacaacaagttcagcctcgggcgcaacaggaagctccgcctcgcccgaccttag

SEQ ID NO: 3254 - DNA, 2394 bp, Zea mays
  Peptide Sequence Number=SeqID_46629
atggcggagaaggtgccttcagtagagctcgagagatctttgaagatcaaggagcgacttgagacttcatctatgctaaaaaagctgcttttgatgcttgttctttttggtacttcgatggtaatagcagatggtgttgtcacatcagcaatgtcagttatgtctgctgttaatggcttgaaggttggaattgctagtgttaacgaaggtgaagtggtcatgataactgttgcatttcttattgttctgttcagtctgcaacggtttggaacaagcaaagtagggcttgctgttgggccagctttattcgtatggttttgctgccttgctgggataggaatgtataacctcagagtatatggtccagaagtactccaggcattcaatcctgtttatatctactattattttgaaagaaatcccactgaagcttggatgtccctggggggctgtcttttatgtgcaacaggatctgaggcaatgtttgctgatttatgctacttctctgttaaatctgttcagcttacctttgtgttccttgttctgccatgtcttctactgggatacctagggcaagctgcatttcttatggagaacttagataaaagtcagcaggtcttctttttgtccattccaagtcaggcattttggccagtggtattcatagctactctggcagcactaattgctagtcgtgcaatgacaactgctatattctcaactataaagcaggcaacagctctgggctgtttcccacgcctcaagattatccacacctctagaaagttcatgggccaaatatacatcccggtgatgaactggttcttgctggtttcttgtctggcatttgtcgcagtatttgggagcataaatgagattggaaatgcatatggcatagcagaacttggggtcatgatgatgaccactgtcctggtcaccattataatgcttctgatatggcaggtcaacatcgtcatagttctatgctttctcaacctctttctggggctggagttatttttcttttcctcagttttgggaagtgcagcagatggaagttgggtgcttttggtatttgcagctgtattgtatttggtaatgtacatatggaactatggaaccaaattgaagtacgaaactgaagtcaagcaaaaactttcaatggatttattgatacagctaggctgcaatcttggtacagtgagggcgcctggtattggattgctctataatgaactggtcaggggtgttcctgcaatctttggtcacttcctcactacactgccagccatgcattcgatgatcatttttgtctgcatcaaatgggtcccagttccagttgtgcctcagaatgaaaggttcctcttccgtcgtgtgtgcccaaagaactaccatatgttccgctgtattgctaggaagggccacaggctggtgctctttttggagtgtgcagtagttttactgccccctctgaagttctgtagcgctgagtttgctcttatagtgaacccagatgcatttatattaattgaagtcattagctcgtttcatctcctgatatttgccggcactgttatcatgttgctaagagttctgttcatgaaatggtatgggtataaggatgtacgcaaggagaaccaccaagcattcgaacagcttctgatagaaagccttgaaaagttcatacgccgagaggcccaggaacgctccctggaacgctccctggagagcgaccataatgacgacaaagactctgaagaggagattgcttcttcatcatcaagagttattgacgagtcaggcggtgctgacaactcagccctgggatcaagcatgtcgttggaggagggatcaagcatggacaacgagctatctttcatccacaaggccaaggagtcgggcgtggtgtaccttcttgggcacggagacatcagggcccggaaagagtcgttcttcgtcaagaagctggtgatcaactatttctatgctttcctgaggaggaactgcaggaggggcatcgcgacactgagcataccccacacgaggctgatgcagcaaggtaacaagcctgctgctgctcacacatattcatcctaccctgatgtgcctggtggtttctgcttggctgcttgtgctgagaggcgggaacagacactgatattgattgcccagctgcgcctatcaggattcgagatcggcgttctgagctgtgcatgcataccgcagactggtcctgctagtactttggcgtggctgacttatacttgtcctcctgctggcgcagcagaagcaccggatcacatcgcaatcgccgggctgcggggtggatggatggatgggtggcagggtgaggcgctagtgtccccgagaatctccgggaattgcgagacctga

SEQ ID NO: 3255 - DNA, 978 bp, Zea mays
  Peptide Sequence Number=SeqID_46630
atgccagtcgtccagcctgccggaagccacgccaggccaccccgagctccgccccaagacaacgagcagtctgtggttcctgagtgtgttgctgaagaccttcctgagcaacaacctggcttatcttctacgttccgttttccgcactttgatattaatgttgaatactatggctatgtattagactctgtggatgtcttggacatcttgatatggctcgtattagatgcacgacacggtatcccagctgctggaggagaccctgatggagacagagacgacgacgacgctggtggctgttcgagccacgacacagagctctcggaggagctggagccagaggggtggatcgctagacccatcactcgtgacgccgctcgtgagtgtcacttccacgatgctctcaataccttgctgcgtcgggccttcaaccgacacacttggtccatcgagtaccgttgtgtagtctaccagcaccgtcgtgggttatacccggaccagtgggaggctacttgcttggtgcaccgtccggacgatgaccttcggggtgcagaggccttctcaaagcactattctattactgagagggatactgccgaggcagcaatgcaagatgcaacacgacgggcactttctcagtattgctcgttgttccgtggggtagctgatggccttgacctgaagtactaccctcgccatttgactggcagtgctggaggtgtgattgtctcgccagttggtgagggcaatcccaggctgaacagcatggtcaacctggctgtcgtgctcaacaccgagctggaccatgctcttgacgaattgggcaaggtttgggcagaggttgtggaattgcgtgctgagtgcgcagcatgccactatctggatggtggttctcctgcccctgtcaggattcagcacccttaccgttcatcgccccgtggtcgcttcgactatggtacccctaactgtaggacctag

SEQ ID NO: 3256 - DNA, 477 bp, Zea mays
  Peptide Sequence Number=SeqID_46631
atgggtcagtcagccgcggggacacgcgtggtagttgacgtgaccgaagacggactggcagtgcttacgatagcaagcgcacggaagcagcgcgccaatcgtcgttcaagctttggccccacctgcaggctcgtatcctcccttgaggtgggcccgagggccactgtcggtaccctgaatcaggggtaccccttactacatcacgcggtgaactgcacccgacccctccacgtgggcggctccagggccgccacatggccagaagagacgatatactccaaggtggcgacggtgggtccggaccccaacgggaaagtgccgaacccctggatgcgttgcccggacctccgggcaaggttcaagacctccataggtacaaaccagacccctaggacgggtcccagacccttctggaggggtccaaggtactcacagtggggtcccgggattccaaggcaaagaatacccaggccttaa

SEQ ID NO: 3257 - DNA, 567 bp, Zea mays
  Peptide Sequence Number=SeqID_46632
atggagccgcagctcagcttgctctccacccccgcaaggctcatgaacatccttgaagccaggcaccggtggaagagcacaaactccccaacggcgagatcgccgagggggatgccgttggcacgaatcactccatccaagcaggcgacacaccatgtcgagcacccactaagtctggacatgctcgggatgaacttacaaggccatggcgaactacggcgatgcaaagcagagaccttgaaggcaaaagggcacagcgagtgggagagaagcgaaggcatggctgctactcgagggatgaaccccgttttaaaggcagactcccccgctcgtgccccaaaatgccacaagaagtctccctcgatgcacatcggcccacatgtcatgcacctggcatgccggttcctgggtgcgatgaaggcgaaccaccacgcaaagagcaaaccgccgcgcctcttcgtctccgccgaaagcagcggcccagcctctagcacgggggcccaggcccgcaagtcatactcttcgagcgtcggcctccgtgtgcggagaaggcgaaccgccgtgtga

SEQ ID NO: 3258 - DNA, 579 bp, Zea mays
  Peptide Sequence Number=SeqID_46633
atggagtggtcgcgccccggcaacgccgcaacagcctcgatgtcacctcattcggagggaaggatgttcaccagccttgtgaaggtggacagtgggctgagctacggctccaaccttcacgccccctcctctttggctttgatggcttcggtgccgcctccaatggtgaccgccggcctggctactgaagacgccccacggggggtcgtacaagacgtccggcccccaggaggcagcctcgactgggacctgggcctgaacacggcttcagctagggagcgcttacggtacggaaccaggctaagcggctacacggctctggaccaccctaggagacaaaggggtcctaaactgcaggcctggctattcaattcggatgtcatcatatcagcaagggtgggagaccgtatgggtgggttaggccaacaagccaggtttatgagggcggacctcaccggactggcgaagaggttccccttctggtgcggcaagacggatacacccgggtcggcatacttccgtcaccttgaagggtccttcccagctgggggagagtttgaggagcccttcttggtttag

SEQ ID NO: 3259 - DNA, 510 bp, Zea mays
  Peptide Sequence Number=SeqID_46634
atgggctggcggcccgcttcttcctccaacattcgggggagaagcgcgttcaccagccttgcggaggaggcagactttgggtacgcgggaccggtcgactgtaggcgtcgccgaccaccgtgtgcccggttccccggtttggatggcctcggcgctgcctccgacgctgcctcctgccgtttggtcggggtgtggctgtccgtccactgcacgggcgatggtcgcgccgtgcgcagtgaggacgggagcgaggacctcttcgcgcacgctggggcggccgccattcgccggtacggcactggtgcggaggtggccgctgtcgtcggcgctgaggtggtcgccgccgctggtggatggtgggccatgatgcacaattcagctgatttgtgtatgcgcatccgagagctactggaaagtggaatcaacccgatcaacgctaggagggcaaggggggagcaggaaggtcaaccggagcggagcaaaggcagggcgtgccatctaggaggatag

SEQ ID NO: 3260 - DNA, 1095 bp, Zea mays
  Peptide Sequence Number=SeqID_46635
atggctgaaaggtaccaactcccacggagttgcattcccccaacgacaaggcggaaggactacgggcatcccccatccgggagctcggaaggtggaaagacacgatgcataagggagcgcgaagacatggtcgcttttcaagggggtcaccctccttttaaaggcgactctccctacttgcgtccccagccgtcgtgggctgagtcttctccaacacgctccaaggtcctccccctacggcgcgggggctgggtcccacacgtcatgcaagccggcccagagcagaagaagccaaaccgccgcgcgcggtgcatgcaaccgcccagcggttacaagtggccctccacttttgcccagaccagcgggcgaaagggcgggggaagcgagcgacgcttcgccttcgccataatgaccgcgtcgaaaaagggactgggaaagggggataccccgaaaaggatccttccccgtgaaggaaccaggctccgagcctccctactgatcagaggttcgaaggctggcccctcggaggggttcaacagccgcctcagagcgcgtgggctccacacccactactggtcagagaggctcgagggctgctctcgcaaactcggcttcgaccaaaccgttgacagcgtcaacataccagcccgagaatttgggacccgatcgtgcacctgggctacggccagctcgcatgagggaacgaccagaccagccaaggcattgcgcgaggcattaagacctcggaggagtcaaaccactcctccgaggcctcgggggctacacccggcgggtgcgctcgcgcgcacccaccggaacaaaacgcaaccgagaaaggctggtccccttgcaaaaaagtgcggcaaaagcctccaagcgagtgttaacactcccttcgaggctcgagggctactgtcggggaccataattaggggtaccctcaaggctcctaattctcagctgaaggacagcgccgcctgcgccacaccgactgcggtgccacttgacagagtgaggctgacaggcagtcaggcccggcctcagaccccattggaaactccgctccgcccgacccagggcttggactcgggctaa

SEQ ID NO: 3261 - DNA, 2118 bp, Zea mays
  Peptide Sequence Number=SeqID_46636
atggtgcgaagtcccgccttcgcgcttaatctgcgaaaccgtgatccggccgccttcgtgcgtgaagctgaggatgagggggtgcggcttgttgggcgttatgtgccgaggaccgagggtcagcgcagctgggagatccgcgggtcgaatgaccgtttaaatagggtcttcgaattgaaccaactgtcgtatggcggctatcctggtcaagacgacgcggaccgtcgggggaagaaaccggtggtggaggcgaaagacgaccctgcgccggcggtcgccccgtcctctaagaagaggagactaggtactgccatgggaggactcggggtttccgatgggtttgctagagagttgatgaggacatgcgcggccccgggggaaaggatgtcttcgcccgagctccgggagtcttcggctcggatgctgaaggttaccgggggttgctggcctaggaatcttcctatcccccgcgtggccagcggggacgtttttacatctcgcatggttcgtaaatggagagtgtttccttacgggcgaaatattgctgctgttgtgtcggcagtgatggacaaggatcgccagggggctgcccaaaaacgacaggcggctatcaggattgttgatgctaggccaaagaggcaaaagcgggggtcggcgacggctgcggcccccggcggagggaggccgccgctggcggcgaagtcaggcgtccctgcatctagcaaggcgccagaggcagcggcgggcgccggaggctccaagccggcgaaggctgtgccgccgctcagcggggtggcggaggccgcgaaggcgtcccgagcgttgccgccggcaagcaagcgtgtcgccgacttcgccaccgacatttgtgtgggtgactatcttggtgggtcggacgagggccagcttgctacagttgcgcctgacgcggcggtcgcgacggctgccataatgccgaaggcaaggggcgaggctcttggctccggaggcgaggcggcggccctcgcggttgtcagggacgaggcggacgcagcgatccgccggctgaaggaggtgtcggaggcgctgagtcaggtggcggacttcgccagccgtactgcgtcgggggccctcacggcagcggtgtctgccgaagtcgagagacttcggacgcaacatgctgacgttgtccgtgagaaatcagcctccgacagcaagtgccgtaaactggcggacaaggtggccgcgttggagagggagaaggctgaactccggcgccaactggcggcggagaggagggaagccaacgaggccgtcgccaaggagcaggctgcgcaggcggaggccaagctggcacgggcagagggcaatcttgccaaggagctcgccgaacatctgcaagagcggctcaccgtcctggagagccgcgcgaagggggccgaggccgcgatgcgtgcggaggccgaacggacgcgcacgcagcttatggatacatatcgtgagctgggtgcgcggaccggtgacttcgaggtgccggaccgagagcccgggcttcgatgtctgcaatgggtgcaggaggagctgctggaactcccagccgtcgcgggggggttgatgtcgtacgcctccctggtcacctgcgagggggcgatgaacgcgctctcccgcgaagggtgccggcacttcgaggccttcgaccaggcggatgaagattttgatcgagatatctataaggtcgacgaccccgtagtgaaggaatccgccggggccctttatgaccggatgtggggtctgtacggtcgtgaggtggtcagggagcgggcggaggcggcaatggctcaggcgttgcgtggcgagcgggtggacgacctcggggcgctgaacagtgcgctgcctgacccggagccgacccctgcggaggccgcgtccggggtcgccctggagccaaccccggagaccgcccccacacctgctgcggccggcgaagacctgcccccaaaggtggacgaaggcgcccctgatgcccccgcagctgctgtgccgagtgctggagatcccgcggcggaggcggtggaaacaacagcaggaacgacggcggagccagcggcggaggctcccgcagcgtcagggccttcgtag

SEQ ID NO: 3262 - DNA, 465 bp, Zea mays
  Peptide Sequence Number=SeqID_46637
atggagaaacttgacctggagttgactctcaaaaaattagttgatgaggagggaactaagctcaaacagaaagctcgtgataaattcatcctggatggagatgaagattcaagacgttctgaggacgttctagttactagtgggtcttcctgggctttaggtactcggctactcgctttcgcttcgaaccagcgctggaggccgcccagccgcgcttgcgactgcagattgcgcctcctcactcctcagccagcgctggagatctcccggtcggccgcccagtcgcgcctacgacagtgcgaccgccctcctgcccccagtgcccacttgctgccgctgcatccagttgcccggccaagctcagtgcgtcgccacatccacttgctgtcgctgccctcgacggcccagatccaaccgctgccctcgctgcccctcacagtgaatcacctctgcggctcggactag

SEQ ID NO: 3263 - DNA, 846 bp, Zea mays
  Peptide Sequence Number=SeqID_46638
atgcagggccaaactgttatcgaaggcttactagcaaaatttcaggcatgtggcttatatgagttcatgggtcaaagaactgactttaatgaattaactgtcaagcagtttcttgccactgctgaaatcaacattgatgaacagctcattgtttggacgactggttttaaacgatatattgctacatttgctgaatttgcagcgacaaataacctggattatgcacttatatctcagggagttgatctttatactgaggatcagtttgaagatattgctcaatattatgaacatgccaggctaggtatacctaggcggttcgagcagcacaagccaccacctccacctccacctccacaacagcaaggtcagtactggcagcctgtctatggttactttgatccttattttaaccagatgcatcaagggctccagacacatattggtggtcagtttcaaggcatgatgtcacatgtagatgaccggttcaatcatttgcactccacatatgatggtcagttctctaacttacatgagagatttacagttgtcgacactcgactggatggggtccatacacagtttaatgatcttcgttcacatattcacactattgtgcatgatcctattatgaacagaatgaacaatatgcaacaaagctttcaggacaatatgggtgccttgtcttgtcagtttgaaaatctctctacgagtgacagtgtccatgctctgggtgacagacaacagcaacttcaaaatgattttagtcagttcacttccatatttgacagctttagctctcatttttactccatgtatcctcgtcctccaccgggtgcacagtga

SEQ ID NO: 3264 - DNA, 836 bp, Zea mays
  Peptide Sequence Number=SeqID_46639
atgggtggcggcacggtggtgtgtgtcaccggcggcagcggctacctcgggagctggctcgtcaggaagctcctcggcagaggctgcgtcgtccacgccaccctgcggagcctcgcggacgagaagaagacggggctgctccgggcgctccccggcgcggcggagcggctgcggctgttcgaggcggacatgtacgacgccgacaccttcgagcccgccatcgccggctgccacttcgtcttcctcgtcgccacgcccctgacgcacgaccccaccagcaccaagtacaagaacacgacggaggcggcggtggacgcggcgcgcatcatcctccggcagtgcgcgctgtccggcacggtgaagcgcgtcatccacacggcctcggtcacggccgcgtcgccgctcaaggaggacggcagcgggtacaaggacttcgccgacgagtccaattggacgccgctcaacctctcctacgaattcaccaacgcttacctggacgtacgaagcgaccggccccaggcgttggaggtggtcaccctagcgtgcgggctcgtcggcggcgacagcatccagacgtacctgtggggcagctacgccgcgatcgtcgcgccgctgacggggcaggcggtcagtcacaacgccctcctcttcttgcaggcgctgctgggctccgtgccgctggtgcacgtggaggacgtctgcgaggcccacgtcttctgcatggagcaggagtccatggccggccgcttcctctgcgccgccgggtaccccaacatgcgtgacatggtcgaccactttgccgcaaagcaccccgacctcaagatacagctgactca

SEQ ID NO: 3265 - DNA, 717 bp, Zea mays
  Peptide Sequence Number=SeqID_46640
atgtggaagactgtacctcacaaccctgagataaactacaacgagaagtcttttgtctgcatgtacaaaataacgttggagcagttcaatgacatcttgtttcaggagaactggttagtgctggaggatggcaaagacaggaaacgttgcgtgattgaagctggcatgtttatccagctatccgcccctcctgcaagtctgcaagatatttacgcgtacgactgtggggccgagtactcctccttagcttgcatttcaaacttcaaaccggaccaaacgccctgctccaacccaaaaccatcatcccttttttcgcagcagacgcatttattaagcgcgcctccgccaaccgcactctgcccgccgaaagcgtcgtcgggccacctcgcactcgcgcgcgcctcaaagatgcacaggcagctcagcctctccgccagcccgaagcagcagcagccgcctcctgacggcaccagcaccggcggcggcgacgcggcgaaggcgatggcggcggcggaggacgagtcgtcggcctcgcactccagctccaaggccagcagggggtggtcggcgagggacgagagggccatccacctcgtcccgctgctcaccttcctctgcttcctcctgctcttcctctgctcccacgacccgtcccccgccgcttcgctggaggcggcggcggaggaggaggagcgagatctgggaaccggaggttaa

SEQ ID NO: 3266 - DNA, 432 bp, Zea mays
  Peptide Sequence Number=SeqID_46641
atgggcaagaacaacaagcgcaagcgtgagccgactcctccaccggaggagtttggtgactcggaatactcagaggaggagttctcctctgagtccgaggggtctccggttcccattcccctgtgtgagtcgtctgatgactcagacgactcccaggggcttgcggcggaggtctggacgtacatccgggccgtcgagcgctccgggctcgagggctcggatgagtccgagttctcctcggacgaggaggactcggacggcggcgaggacgaagatgacgacgacgacgacggcgacgacgacgatggtggtgacggcgacggtgacggcggcggaggcagcggcggcaagggcagcaccagaggcggcagcagcacgggcagcactagaggcggcggcggcaagggcagcagcagcaaggccagtggctaa

SEQ ID NO: 3267 - DNA, 264 bp, Zea mays
  Peptide Sequence Number=SeqID_46642
atgaagggaagcgacgcaggcggcgtcgcaccctcctttgtccttggtgttgccaagacactgcacggggaaagtgctcgtgggagcttcctcctccgtggtgggaatggcggcgcttctagcggcgccgccgcctccggcacctccggtggtcacccgaaaaaaggcataaacaggaatatcattgaattacaagtgtaccttcaactggaaggagatgatagtacaagcgtgacacaaaaagcgaatgcccagtcagcgtga

SEQ ID NO: 3268 - DNA, 438 bp, Zea mays
  Peptide Sequence Number=SeqID_46643
atggcgtcccagcctctagagcggcgggcaatgcgtgaggctggtttcacagagcaacgaataccgtccgcttccaacggtggaaggataacatatcttggaaaacattatggggcagatggagagggaaacacagctaacaacattgcttggctccttgcccacacatcggtagcatggaacgagtggggaataaaccagggctctggtctggtcatgcgttgccaaggggggtgtaggtattttagcgtcatagtgtaccaacctgcctggtggctagcattcctcgtggcggttgtcgcgggactccacgtttgttgcccccgcgtgggaggatgggtgaaggcgacacatggagaggtacacgatgggcagaatggtgttgaggacatcgcacgtggtccccgtaaatccccccgtatgggcgataacgtttga

SEQ ID NO: 3269 - DNA, 372 bp, Zea mays
  Peptide Sequence Number=SeqID_46644
atggaggagagagtgggagaaggggggagagagagagaggctgcacaggggcggttggggaagacgagcaggggagaggcggcctggagctcgagaccaattgataacattcttgaggatgccttggacctgtgggttaggacccacgcacgctttcgctgcgccacttcaatcttgttggttgatgttgatcgtattgtcttcattgggaggttggagggtgccaaccggacaggtgcaagaggaaaggccacagatagaaaaggacgaggagaagaacaagacgtgtgggatagggacacaagcaccataaaggatggagttaaagcaagcattgtgagcgacctagaaaaggtcacaaccaaggcataa

SEQ ID NO: 3270 - DNA, 117 bp, Zea mays
  Peptide Sequence Number=SeqID_46645
atggttggttttacagatggtgacaaggatgatggttttgactatggtaatggtaaagaacaaggcgtcgaggcggatctccaggagttccaggacttcgacgagttcgaggattag

SEQ ID NO: 3271 - DNA, 486 bp, Zea mays
  Peptide Sequence Number=SeqID_46646
atggctcaccggattgctcggtctacgcgcggtcgcgggcgaccgaagtctggcgaagatgatctcgggtctctggtgaggttctgtcgggtccgagagcttggaaagctccacgagccattggtgaagctaaccgaggggcaagcgcaacttggacgtggctggagtgagctggccgcggtggccgaggctcgggcggtgatggcgggcggaggaaagctcgccggagctaaggaggggcgtctggccagcgaggactggatcaagagatatggaggggtgaagttgggtttgtctcactaccgagcacagagagaagatcccgggtttgacgtgtccagagcacgcgtcccgatgccatcttctgtgtccccaacaattctcgagagcaacgagttcgtcaacgcgccagcctgggcaccagacactatccggtgcacactggacactatccggtgcacaccggacagtccggtgaacccgtag

SEQ ID NO: 3272 - DNA, 1341 bp, Zea mays
  Peptide Sequence Number=SeqID_46647
atggaggcccaggcccacgcgtcatgcaaccggcgcgccgaatgcttcgtgcatgcaactgcaccgccacttgtgccaccaccgcgcctcctcgactgcggaaccaataccgcgactcgaggcgacccagcgcacgacccagcagcgccagcctggcgcggcgggaccgggaaagggggataccccgaaaaggatccttccccaggaaggaaccaggctccgagcctccctactgatcagaggttcgaaggctggccccccggaagggttcgacagccgcctcagatcgcgggttcgaaggctggcccccgaagggttcatagccgcctcagacgccgagcgagggatgaccatgagtacgttcgatacataaccaaggctcgggctgcgctcccgaggctcaggggctgctctcgcaaacccggctccgaccgaaccgttgacagcgtcaacataccagcccgagaacttgggacccgaccgtacacccgggctatggccagctcgcatgagggaacaaccagaccagccgaagcattacgcgaggcattaagacctcgaaggagtgaaaccactcctccgaggcctcggggactacacccggcgggtgcgctcgcgcgtacccaccggaacaaaacgcaaccgagaaaggctggtccccttgcaaaaaagtgcgacgaaagcctccaagcgagtgctaacactcccttcgaggctcgggggctactgtcggggaccataattaggggtaccctcaaggctcctaattctcagttgcctcggaagacggcgaactccgctccgcccgacccagggctcggacacgggctaagccccggaagacggcgaactccgctccgcccgacccagggctcggacacgggctcagccccggaagacgacgaactccgctccgcccgacccagggctcggacttgggctcagccccagaagacgacgaactccgctccgcccgacccagggctcggacttgggctcagccctagaagacgacgaactccgctccgcccgacccagggctcggacttgggctcagccccagaagacgacgaactccgcctcgcccgacccaggggctcggactcgacctcggccatggaagacagactcgacctcggcttcagaggagcttccacatcgcccaacctagggcgcagactagccacgtcaacaggaggcgccatcatcaccctaccccgagctgacacgagccgcagggaacaagaccggctccatcgctcctccgacggccacgacatcacaccagctgggtgccaaaatctctctggctgccacaacggcatgtacgtagggcgctag

SEQ ID NO: 3273 - DNA, 441 bp, Zea mays
  Peptide Sequence Number=SeqID_46648
atgaacatatgtgagctcacccttgatgtactcacaacccccgtaggtcaagatcaggaggtggagtctaggaggcatccctcctctgtgccccagctagaagcgcccattgcaccaccacacgacaccccaaatgctggaggagaccccgatgaagacgacgacagtggcagctcgaggcacatcacgaagcctttggaggagcaggagccgaaaggatgggtcgcccgacccatcactcgtgacgccgctcacagttgttatttccacgatgttcttgacaccttgctgcgtcgggtcttcgatcgacacacttggtcaatcgagtatcgctgtgtagtctaccagcacagtcgcgggttatacccggaccaatgggaggctacctgcttggtgcgccatctggacgatgatctccagagtgtagaggcctactcatag

SEQ ID NO: 3274 - DNA, 414 bp, Zea mays
  Peptide Sequence Number=SeqID_46649
atggcggcgctccgcacgctcagcacacagttccacaatcttcgcacgagccttgcccaactcgtcaagggtgtgctccagctcggtgttgagcacagcgaccagattaaccatgctactcaacctgggattgccctcacccacaagtcagacaatcacactcctggcctctacactctggagatcatcgtccagatggcgcaccaagcagacccgacgcagcaaggtgtcaagaacatcgtggaaataacaactgtgagcggcgtcacgagtgatgggtcgggcgacccatcctttcggctcctgctcctccaaaggcttcgtgatgtgcctcgagctgccactgtcgtcgtcttcatcggggtctcctccagcatttggggtgtcgtgtggtggtgcaatgggcgcttctag

SEQ ID NO: 3275 - DNA, 489 bp, Zea mays
  Peptide Sequence Number=SeqID_46650
atggcgcctcctgttgacgtggctggtctgcgccctaggttaggagatgtggaaggtcctccgaagccgaggtcgagtctgtcttccgtggccgaggtcgagtccgagcccctgggtcgggcgaggcggagttcatcgtcttctgggctgagcccaacccgtgtccgagccctgggtcgggcggagcggagttcgctgtcttccggggctgagcccgagtctgagccctgggtcgggcgaagcggagcttcgtatggccggtcagtggagcggcgaagtgacggcggtcacttcggctctgccggctggggggcgcgcgtcaggataaagggcctcgggcgagccggaaatatgttcgtcgctggaggggggcctcgggcgagacggaaatcctccgggctttatgctgatgggggttaccagctgagaattaggagccttgagggtacccctaattttggtccccgacacaaagtaaagcagcaatag

SEQ ID NO: 3276 - DNA, 708 bp, Zea mays
  Peptide Sequence Number=SeqID_46651
atgtcttcgcgctcccttatgcatcgtgtctttccaccttccaagccctcggatgggggatacccgccgtctttccgcctcatcgttggaggaacgcaactccgtgggagttggtacctttcagccatcgttcggcttcaaggattttcatcacacatcccggttgcacccctccgctggtggtcacccaagacggtgacctccagcccctggatggggagaggcaagccgggctgtgatctcggtcccgcccttagcgtcgagggtgttcgtcatccttgctggggcggggagcgaggcgagccggggctctacctcccgcgcgggccggcgggccacctcttcttccagcttctggtggtggcaaacaccctccagctctgcggaggagatgtcctccagccatgccggggaaggcgaactgttgctgcccagctaggatgcaacattccgccctcttccttgcattcgcggcgaggacggcagcgaggacctgccggtgcgcttgggagcggcccactctttggctttaatagctggttcgcgtcccttgagcgggaacgcgaacgagagccctccggcggccgcgtacgacctgggaccatggctgctgctgcagaggtcgctggcgggtcccccggtgttcgtcgccccgcaggctcgaggttgttcatacccgcggggacggaaccagagttccgtttgtaa

SEQ ID NO: 3277 - DNA, 504 bp, Zea mays
  Peptide Sequence Number=SeqID_46652
atggcttgcgagagcgggtctctttcggcagggaatctgggtgaacctatccgttcagtgctcatcagattttcccatcaactcggtccttcctgttcggttccaagatcccctgaaggaaagatggattcaacagactccatagccgacaaggcaattggaaggatgcaagagattgcggacaagatattttccgtagctcgtgaaacaatccgtccaggacgcgggttgacctcatttgaggctaccaaattacgtgtagcattggaggacattgcttgcatgcttgagcaagactctctggtgttgcaagagaatttggacaacgtgaacaacgtaaacaaccctggtgaaagcagctacgaaccgtcagccttgtcctcaccaccccctgctgacgagttccttagtccggattgggactttgctgagcacttcgaaaacttctggggtcttgaatatgactccgaccaaatgccatcgtttagtgacaatgaagtttaa

SEQ ID NO: 3278 - DNA, 210 bp, Zea mays
  Peptide Sequence Number=SeqID_46653
atgacgacaaaggaagctagcttcagaggtcacagcacacctcacagtctttgggacagcagcaaagctccttcaggccaccagctccaaggggcagaggcggcaggggcttcagaggaagatatgggaatcaggccagaaaaatttattgcttattctgtggtgaggacaagggccacactacaagagcctgccagatcactattctga

SEQ ID NO: 3279 - DNA, 2121 bp, Zea mays
  Peptide Sequence Number=SeqID_46654
atggctgggcactgggcgaaagtgtcccctccccagacccttccccggggggggatgctggtgcgaagcccccctttcgcacaggatttgcatatctgcgatcccgtcgcattcgtgcgtgaggcagaggatggggcggtgcggattgtcggtcggtacgtgccaaggacggaaggccagcgtagttgggatattcgcgggtccaatgatcgcttgaacaaggtcttcgagttgaaccgtctaccgtatggcggttatcccgggcaggacgatgtcgaccgtcgcgggaagaaaccggtggcggagacaggagacgaccccgcgccggcgaccgccccatcctctaagaagaggaagctaggtacttctatgggaggactggggatctccgatagctttgctatggagttgatggggacatgtattgcccctgggggaaggatgtcttcgcccgagctccgggagtcttcggcgcggatgctgaaggttaccgggggttggtggcctaagaacgttccgatcccccgtgcggtcggcgaagacttttttacatctcgcatggttcgtgacttcagagtgtttccttatggacggaatattgctgctgttgtgttggcagtgatggataaggatcgtcaggaagctgcgcaaaagcgccgggcggtcgtcaggctgcccgaggctaggccaaagagggcgcgggggaccgtgaaggctgccgcccccggcggtagccagccgacgctggcggcgaagtcggccggccctggttccagcaaggtgtcggatgtcgtgaaggcatctggcgccggcggagccaagtctacctcggccgaagtcgcgaaggcccgagaattgcctccgccgggaaagcgcattgccgatttcggcactgatattagtgtagatgattatctcaccggatcgggcgaggggcaactggttgttgttccgcctgcggtggcgacaacggtgtctgccacagtgcctgtggcgaagggtggcgctctcagcgctggcggtgagatttcggcgctcgctggtgtcaaggacgaggcgggcgctgtgtcccaccggctgaaggaggcgttgcagcggctaagtcaggcggctgacttcgctaactgcgtggcgtcgggggccctcacggcagttgtgtctgccgaagtcgagagacttcaggcgcaacatgttgaggccgtccgggaaaagtcggccaccgatagcaagtgccgcaaactggcggagaaggtggccgtgctggagggcgagaggactgagctctggcgccagctggcggaggagaggagggaagctaatcaggccctcgccaaggcgcagtctacgcaggcggaggccaatgtggcgcgggtggagggtagcctcgccaggcaacgcgccgaggaattggaggagcggttcaacgctctgcaggcccgcgtggagagggtcgaggcttcgacacgctcggaggttgagcggacgcgcaagcagcttatggactcataccacgagctgggcgcgcggaccgctgacttcgaagtgcctgaccgagagtcaggccttcgttgcctcgagtggttgcaagaggagttgctggcgctcccgaccattgtagagggatttatgtcctatgcctccctggtcacctgcgaaggggcgatgaacgcgctgtcccgcgaagggtgccgtcactatgaggtcttcgaccgatctgatgaggatttcgaacgcgagatttacaaggttgaggaccctgtggtgaaggaatctgcgggagccctctttgaccggatgtggggcccccacggtcaggaggtggtcagggagcggtccgacacggcgaggggtcaggcggcgcgtgacgagaaagtggatgactttggggctttgaacagcgtgcggcctgaggcggagtcgaaaccggtggcggctgggcccgaggtcgctacggcgccgcccccagaaaccgtcgaaggcgcccctgatgcccccgcagccactgcggccggcggtggctcatcgccaaccgctgcgccgagggctgaggatcccccgaagacggcggcggagccggcagcggaggatcccgcggtggctgggtcttcgcaggtggcttag

SEQ ID NO: 3280 - DNA, 546 bp, Zea mays
  Peptide Sequence Number=SeqID_46655
atggtgctggcggttgtggtgctgctgggcgtcgtggccgtccttgtggtggtgctgctgctgcagccccgcgcgccgtacgtggcggtgcgggcggcgagcctgtacgcgctggtgtacgggcagacgggggcgctggacgacgtgcaggtcacggtccgggtggaggtctgcaacggcaacgcacactcggcggcctacttctcgcgcctcgagtgttgcctcgcgttcgccggcgcgacgctggcggtgctccgtgcctacccgttccacgtgcccgccaggggcgtcctcccgctggcgtacgtggcgcgcgcacagggtgccccgctgggcgacgctggcagcgccgccatggaggccgcgctccacgacggcgtggtgccgttccgggtggagggggaggcccagacgcgatggaaggtcgcagggatcatcggcgtcgaccagtggacgcgcccggcgtgccagctccgcttcttctggcccaacggcaccgtgctccccttcagatgcagctccaagtctaagttcttgttcttctga

SEQ ID NO: 3281 - DNA, 828 bp, Zea mays
  Peptide Sequence Number=SeqID_46656
atggaaaaagggccacttgacatggttgagagctcagttcaagtcatcgagacacatgtcgacatcattcgcagtctagtgactgatggggttgtggatactagtgaaccggaatcagtgtacacacttaagaccaatttgtttcaaattggagatgtatgcgacatgcttgagaagtgtgctttgtccatcaaaaatgcataccgtttttattggaaagatcttggcggcgaacatccaaaggacaagcctaatttgtcaatatcattatttccatatggtgacaaacaacctccgggtaatgtcctgtgcggttattatgtatgcgaatggtgttgtgtcaccttccattacatggtcaatcgtgaggatgttcctaaatccaagatcaatgttgaatggtttccatcggcgtggctaaggtttgtccggtgcgccaacggctccaagtcttcaacggtcggctgcaccaatttaggaaggcgatctacaccagacagtgaacatgggatgtccggtggtgcaccgaactgtccggtgcgccacccgacagaaggcaagaattgccttccaagaatgcctccaacagctcctagctgccttagggctataaaagggacccctaggcgcatggaggagttatccaagaatactttgagcattcttaatcattcacactccgtcttcgcgcactcgattgactttcttagtgatttgagctccgttctagtgggcgagagactccaagttgtggagactcctcgcaaacgggaaagagtaaagaaagaagaacaccgtggtattcaagttgatcattggatcacttga

SEQ ID NO: 3282 - DNA, 840 bp, Zea mays
  Peptide Sequence Number=SeqID_46657
atggccgcctttcaagggggtcaccctccttttaaaggcgactctccctacttgcgtccccagccgtcgtgggctgagtcttctccaacacgctccaaggtcctccccctacggcgcgggggctgggtcccacgcgtcatgcaagctgacccagagcagaaggagccaaaccgccgcgcgcggtgcatgcaaccgcccagcggttacgagcattcctccaccttcgcccagaccagcgggcgaaagggcgggcagccatgcaggcggcatgcgaccgtgccaagtgggcgcacccctccgacttccaacgcacccagcatgggggcccacgcccacgcgtcatgccaccggcgcgccggtcgctacgctcaagcaactgcaccgccactcgcaccactgccacgcctcctcgactgcggaaccagtaccgcgactcgtacgacccagcagtgccagccaggcacgacggtcaatacggccaaaaatgggccggcagtaatggcggtggcaggcgggcaggagcagcggtcacgtcgtcagccaagctcacgtcccgtccagggaccgggaaagggggataccccgaaaagggtccttccccgtgaaggaaacaggctccgagcctccctactgatcagaggttcaaaggctggcccctcggaggggtttaacagtcgcctcagagcgcgtgggctccacacccactactggtcagaggttcgaaggccggcccctcggaagggttcaacggccgcctcaggctactcgggctccgcgcccactactgatcaggggttcgtaggctggccctcgaagggttcacagccgcctcagacatag

SEQ ID NO: 3283 - DNA, 676 bp, Zea mays
  Peptide Sequence Number=SeqID_46658
taatgaatggtgtgagagcaaattgaagaacaccgaagtaggaaatgcttgtgttgtttgtcactttgttgcattttggcaagcagacgaagtaattcctattgttgataagaggagaactgcgccccttatattaagaaaggatgggggcccaagaggaccccgatacaaagcactacttacggtaccaggtgttttggaacatcaaaatcaatatggcaaccaggcggaaggtcattataaccagggaccaggtgtccaatggtctcaaaaccattacgcctaccagacacagccataccctcagaagattaattccaattattcgcaactaagcaaccctgaagatcaactgaggactgtagattctaacggtccaagcacaaatctttcgtctaaccatgtttctgaaaattttaaaccaaacttgctggattctgtgacaatgaacacttccagcgaaagcaaaatacaagttcctataaatcctcgaattgcccaaggtttctctatggtgataccaaagaatgagaagaaaagttctggacttgatttatcaaggaaacctgcctatgttagtgtgtccatgccggcgaacgatgctaaagcaagtcaagttggtcctgatgctgtaatattcttctctcttctcgacataggaattgacactacatga

SEQ ID NO: 3284 - DNA, 2652 bp, Zea mays
  Peptide Sequence Number=SeqID_46659
atgcacaagacaaacagacgagaaggtatgtcttctccccctatcccagcccctccccccgaccccaacccctccccttcctccaccagccaccacagcccctcgacggctgctactccggcgccggcgaccacacctctgccctgttctcttggcttctgcacctctcaggtggggcggtccaagttccagcgatgggatgacaacgcttcgggttcctcctctggtggtacggtgcactcctataaagaggccctcctttcctcttctagcgccacctccctggagttggacgtacacacttctaccatagcaaggccgaagctctgtgacaaggaaaggaggttgtgccggcgtgaagacctggtgccggtcgacaaggaggatggctggcaggccggccctctgcaactgaagaccccaggtcgcttgcgtgaccgtctggaatttgacaagtcataccccggtgggcaagagaggctatcttctcagaaggtctcccccccgcagtgcagagctgggagtgctgctcctccaaagaagaagaagtcagtttgggtgcgtatctctcccgcaccccaaacatccgaccagaagactaatcagccatctccaatgttgaacaactgtgccccggatgttgatcaacgttcctttcgcaacaagaggaaaagaagaaggtccaagagcaaaaaaggaaaaggtcctgctgaagctgcgggttcgggtgtgtgttcagattcccctccctcatctcctgaagctcatttctcccagtcgaggatggaattccataccgcatctcccccaaccgttgaagcttcacgtgttcttacgttcactgatgagatggcaagggaagagatcaatctacgaaaagccctgttcgtcaccatcgcaggtactagacctgtggtacagggatcggaggtgttggatgaggtggctcgcagctttggggtatgtattgataacatgtccatccaacattccacaccagaggattttctgcttttcctgccggatgaggacactgcctccaggattttcaatgggggcagattattcactggacctcgtttctgcttaatgttcaaaagatggtctcgtttctctcatgcttctatgtctcgcatgtctcacttagtggatgtgcagattaggggaatccctgaacatgcatggtcttgctccactgcggaagctgttcttaacgactcatgtcatattgttgagatccattctgataccctgatgaaaaagagtctctcatcctttacagtgcgagcatggtgttttgattttaaaaagttacaacggcagatgacgctacacattattgagagagggttgcagagcaatgacaagggttgtttatcatacaagatcaatatcagcgcaaccatggtcaatcctgaggacacggatttggggggattgcactcctcgcccccagatgacgctcatcagccagaagattttgaagatcaggatattggcaacaatatcctggcgccggagcatttaagtatcttggacgacggggaacatgcggctgatttcctgaagctggggcatttaaattccttggacaatgggaaggatgcggctggaggaaatctcttgtgtattcccgaggcaacagttctggacccaaggtcggctgatgaagatatcctggcgccggcggctggacttaactgcctgggtattcccgaggcatcaaggctggacccaaggtggaagacaaacagtaccctaggcatggcccccactgtcttcatgagtgaggcacgcgggtcgctgaaccctcccaggaatatttcgccccagtccatggtgactgggccgctggaattaattgggttgggatcgccccatgcgccaactcctgttctccccccgactgggctcgtccctgggtcgccggagatggtcagtccatctgtggtctcgccccacataattgggccgctggagacacacaatctcagatcagtctcgccccagggactcgagtttgaaggggacgcctctgtttttgagtctgggccgcctgagacggttagtgtgcatgcgatcttgacccttactgggcaggtcgagaccaagtgcgcagtaccagtctcgccccaactccagttgaagcagagttcttgtaagccactgctcaaggtatactcaagaagaaaatgtggaacaactcagctgatggaaaggaccactgatcttcaggacagtgaggaacccagtcaaggcatttcggatgggataattaactcggccactgacatctcagaacaactgacgattccatcatcatccctcatcaacatgattagcagaaagccttcacacctcctccctgcacccgggactggactgaagaggcaaaaggacctaactgtgactatgcctcgacgcagtaggcgtgtggctggaattggcgtggagttctccatgcaggattggcgcagcaaggcatccaagaaagcaatgagggctttacgtattatcaatgagtctgataagattacttctgatgctatcatggagtatgctttactttttaaacgcccgcttatccagtctcatgttgatgccttagctgctctgtttgggtggtctacacctgaagacttaaggtcttag

SEQ ID NO: 3285 - DNA, 429 bp, Zea mays
  Peptide Sequence Number=SeqID_46660
atgaacaaaagaccggcattcaaggtgccatcacaaacggaactccggttccgtccccgcgggacggacgcggccaccggaaggctctcgttcgcgtccccgctcaagggatgcgacccagccatcaaagccaaagagccggagccggcccgccgctccaaagcgcaccgacaggtcctcgcccccgtcctcgccacgaaagcgaggaagagggcggaatgttgcatcctagctgggcagcaacagttcgccttccctggcatggctggaggacgcctcctccgcagagctggaggatggtttccaccaccagaagctggaagaggaggtggccagccgacccgtgcggaggtagagccccggctcgcctcgctctccgccctcgcaaggatggagctggtggtcaccgtcttaggtgaccaccggtga

SEQ ID NO: 3286 - DNA, 633 bp, Zea mays
  Peptide Sequence Number=SeqID_46661
atggccgtgatggattcaacatcggaaaagatgtacctctgccagaaagatgccgccacgcacaaggctaacggcacgcaagttaacgggaccaattggtgtgcctcggcatcaactgccccccgacatgaaagcagtagtagtggaagtaatgaccccatcggagatcttgaagcccgagtgagtcgacttcaagcggcgcttcaacacaggaccgatgcttgggtcgccgacggagatagaatcaatgaactaagaagggacatccgtcacctgcaggatcagcttgctgatcgagacttagcacttgactgggcagtacagtctcgtttgctagcatgtgctaaggaagcaagggctcaggcccgaattaaagaacttagctcaactgtcgacaacctgcaggtctactgcaatacgttgcatgaggaagtccatgtactatactcacaattacaccctagtgtgcctgcacaccctgctgaggcggaagccggaccctctcatgttgcgggacgcgcgctgggttgggagttagacctttttgagccccctccttccttgaggttggttgatgtctggactcccacacctgacgatgaggccgccaagagtaatggaaagcaggattaa

SEQ ID NO: 3287 - DNA, 1074 bp, Zea mays
  Peptide Sequence Number=SeqID_46662
atggcgccgctggcatcgcgcatcgcgcgcgcgttccccggcctcgccaccgccgccgcgacgcgcttcgctccctcctcgtccgcgtcctcgccgcggcttggcctcgtcccgcgcctccgatccgcgcgctccttctccggcgcccgtgcgtctcccgttagcggcgcggtttctggctcctcgacgtcggaggagggccagcagctgcagtcggagctcatcttcctgggcacgggcaccagcgagggcatcccgcgcgtcagctgcctcacgcaccccaccaagatttgccccgtttgcaccaaggcggctgagccagggaacccgaacaggaggcgcaacacctctatccttctgcgccacgccaccccgtctggcaccacaaacatcgttgttgatgccggcaatttgtttggttgcaaagttggtcatgcaaagtgtttactcccacttttcagtttgaggacaatcgatggtgtcattattacccattctcatgctgatgccattggagggcttgattgtcttcgtgattggacgaacaatgttcagtcatcgatcccaatttatgtggcagaacgtgattatgaggtgatgaagatgacccactattatctcatcgacacaagtgtagttatacctggagccgcagtttcagcattgcaatttaacattataaaagaggaaccatttatggttcacaatcttgaggtgattcctttacctgtttggcacggtcagggttaccgctctcttggttttcgttttggtgatgtatgctatataagtgatgtcagtgatatacccgaagaaacatacaagcttctggaaaactgtgaacttcttataatggatgctctaagacctgatcgttcttcatcaacacacttcggactaccaagggctcttgaggaagttaggaaaatcaaaccaaagaaaacactgtttactggaatgatgcatttgatggaccatgagaaagtaaacagtgatcttgccaggctgattggaacagacggtcttgacatccagcttagctatgacggtctcaggatacctgtaaggctctag

SEQ ID NO: 3288 - DNA, 249 bp, Zea mays
  Peptide Sequence Number=SeqID_46663
atggagtctgctccctacttctcaagtgtttatccagaaccgaagcagtatcttcagcttcatcaccatccgtcaagcttcggatcattgctcttcggattcgtcatcctgtacataacaaaacgttataaggtaaactcaagtttcaaggagaagggcacaaaaatcgccatgcccagctataacttcgtcaagagcatcaacttcgccctcaatgtgttcgaaagtcccgggcaggtcttcaactga

SEQ ID NO: 3289 - DNA, 384 bp, Zea mays
  Peptide Sequence Number=SeqID_46664
atgcgcaaaggctcacgatctgtcgaagtgaacgcatcaattacaagctcaccactgtggcaacatgcaactgttttgaaactacgaacaaatatgaggctctccaacccgtctttacatgggaaggaacgtgcagacatggaacaatttagcaaatgggtcttagatatcgacgatggtgctctgtcggccatgacaagaggagatgagtccgaacctacatgggttacgattcctgaagatttgttgatacacatggatggtgatgcagctgcgtccctcatatccgaggtctacccaaatttgttagagagatatatggaccctacatacttagctacacgcgccattgtatgtcctaataaccttacaagttacaactga

SEQ ID NO: 3290 - DNA, 438 bp, Zea mays
  Peptide Sequence Number=SeqID_46665
atggccgtgatgggttcaacatcggacaagatgtacctctgccaggtaccaaactttgggattgtaaatgataaagctgagactgggcggtacgagatatctgaacgagattcggccattgattgggtcgtcaactcgcgttcgatttcttgggaccgtgaagcaaaggctcaagctcgtgtggcggagcttagtgtggcccttgacagcctgcaagtgtactgtagtactttacatgaggaagtacatgtactgtatgctcgactgcacccggacgtgccttccaacgctgctgcaatgggagccagaccatcgggaatagcaaatgaaggacttgatgaggagttggacctttttaagccccctacttccatgaaccttgccgacgaacggtctcctgcagcacgaaacgaagcgacaagggatgacgaagactag

SEQ ID NO: 3291 - DNA, 219 bp, Zea mays
  Peptide Sequence Number=SeqID_46666
atgagaatcgccaagtattccttttcatatgttgaaaggccgcgggttttgggtccaagggccttgctgatgccaattgaccaccacattgattttactaggatcggtttgcacaccttatttgctgatgacatggccaaggtgatcctcaagggaagagctgtacaccaagatgtcatcgaaaaaaacaagagcaaacttgtgaagtactggagataa

SEQ ID NO: 3292 - DNA, 798 bp, Zea mays
  Peptide Sequence Number=SeqID_46667
atggacatgatgggttcaacatcggaaaagatgtacctctgccagatgccatctcgaactcgttcacatgacggcgcaggaacatcccgtggccaagaagaaacaccaaatccaccgctggttccacccacgctggccgaggatatcgctgccttggtcaccgagaccgctgacaacacctgcttccttcgtgaaatggcgggacaacaactgcaacaacaaggcgggagggcttatccacaaggaccccgcgaaacttcgtatttggatttctcggaaactcgtcccccactattcgtcaaggccgaagatcctctcgaagctgacgaatggattcagtatgccattgaccaggtcaacactgacctaaagaagaggaactgttttatgaggggccataatgaccgactacaacggaagatggccacctgcctcgacctctcctacagcagggctatcagcacaacgctggcagttgaagctaagtatgcaggccccggaaggtcaaagggctatggaggtgataggtccaaccaagggcttgaaaagcgacaaaggttggtgatccgacctttcaatcaaaaccgttcttcacctcgtccaccctcctacccctttaaacagcctgtattcatccgctctgccactgcccccacttcaacaactcagccgagtgcccctagtactcgttttcctgcactcccaagttcatctactggttggttcaattgtgggaagtctggacatttcatcaaagactgcccatatccgaggcagaacaactccaataatcagtag

SEQ ID NO: 3293 - DNA, 1149 bp, Zea mays
  Peptide Sequence Number=SeqID_46668
atggtggcttcgacaaccctaggaaggcgtcggaagagagcacccatatatgtagcagtcgccactgccacatgcgaggagaagaagcaagaaggcgctcaggctctaggcgggtgcgtcgccggcaagcgcaagaaggtcgccacgagtgatgtcttctttgttcgtgttggtggatcaggtgagcaaggcagcaagagaaaagtggcatgctatgtcagattaagacacgtgtggtggagaagggcaactggccttggctctgtgggcaacacactggctgaaggtgactatctatttgttccttcggaatgtcagggtggcattcaaagagttcatattataaaaggatgtgtacatggatcacttctattagaattgtttacaggagatggagaaggaacaatgatcgctagcaataaaaacatttggaaatttagcatctacagtatgccatgggaattccctaattgtacttttcttatggatcagaccctcactacgcttcgctttacaaggaatgattttactgaggatgataaagcgacgttcaatgattttactgaggacaataaagcgacattcaatgaagctcggtgcatgactaaagcaagaaggcttggtgttcctaccccagtactttatgttgtggatccagttctgcatactttgacctttgagcatgtggatggcttgtttgtcaaggatgcacttcttaggtttggttcaaatggggtcaatgaggaatgtttgaatgatattgccacacaaataggaaatgccattggcaaactacatgatggaggccttgttcatggtgatttgaccacgtcaaacatgatgattaagaacagtaacaatcaattggttcttattgattttggtctgagtttcacatcgacaattcctaaggacaaagcggtggacctatatgtgctagagagagctttgatttccatgcaatcgtcctgtggggaagtgcaaacttatgtgggtaacagcactgatcttgatgatgaaccagatggagaaaatccttgcggcatacagaaaggcttcgaagcaatggtgctctacccggaacaagctggctcaaggtatggcatggtcttgtcggcccatgtggaagcgcatggccttcgttgctag

SEQ ID NO: 3294 - DNA, 534 bp, Zea mays
  Peptide Sequence Number=SeqID_46669
atggacacgattcaggtcaaggcttcgtctactcaagggaagcgatctcgcctcgcccgagcccagcctcgggaaggagctgaagtcccggacaaagttacgtctcgcccgagggcctcctcaggcagtgggcacaccctcagcacgcccgaggccccgctcgggcaggcttcgtcgagaagcaaccttggccaaatcgcctctccaaccgaccgaagctccgcctcgcccgaccttgggcctcggcctcaggaggaggtctccgcctcgcccgaccctagggctcggcccccacctcggcctcggaaggtggtctccgcctcgcccaaccccagggctcggcctcaacctcggcctcggaaggtggtcttcgcctcgcccgaccctagggctcggcctcaacctcgacctcgggaggaatcgcgtcctcgcccgaccccggcctcggcctcaggaggagtctccacctcgcccgaccttgggctcggaccaaccgcgccactggggatacatcattaccctacccctagctag

SEQ ID NO: 3295 - DNA, 438 bp, Zea mays
  Peptide Sequence Number=SeqID_46670
atggccagatacctccacactcttgacaaccattatgacaaccttttctcccactacacccgcctaaactcccgggtggagagcctagagcaacaaatcaagaaattaaaagaggagaaggcgccccttcaagaaagtctcaaaatagcagaaggtgaagaggccaacactcgtgaagcctaccgaaccctgaagatggactacgataagaagttaaagaagctcgcccccactaagaagatccggaagcggaccaagagccaaggatgccagattgaacgaaaagaggaagccccaccaacattgcctccctccaggatagaaaacttgtcagacgttgaggatatgttcctagctagccttgatgaccttctcagggaatttggggacaccttagaaagggagtttggaagcaccttagaaagcgctcgcgcgtag

SEQ ID NO: 3296 - DNA, 408 bp, Zea mays
  Peptide Sequence Number=SeqID_46671
atggatggtggcaacacacttccaactacactggcctcacagccatcgtcgaccatactttctcaagcaggacaaggattaggtgtcacacaaaacaagggggctgccttcatccgcgagccgtcactaacaccgaagagtcacaaagtttcatctagcgctaagacgccatcaggagcccacaacacccctggtgccaatactctccggttgctgcctctaaaactagcaaattcgcaggttgacgcttacagtgtgctagatggatctacaaacaagactcacaaaagtgttaccggaaaaaggtctcgcacatcaccttccaagaaggctgccaagaaactttttaaagatgaagacataacagatgacgatgctgctggttccacagacgttgatgctgagtaa

SEQ ID NO: 3297 - DNA, 546 bp, Zea mays
  Peptide Sequence Number=SeqID_46672
atgtcgcttatgaatcgaggccggtattttcacctttcattgctttatccatgtgttgctttgacatggtttggtgggggcaagcttgtagatgaagctaacaaaactcaactcagccaagtggacgctgaagttgacattgtctgttgtagagccgagttcgtgatccgcccatatcttgctaggtggtgtaatttatttgccctgcgactgattggacatttgatggacgttccctggctagtcttcacgtcgcttctgtcggggcttgtggcggaggtctggacttacatccgggccgtcgagcgctccgggctcgagggctcggatgagtcggagtactcctcggacgaggaggactcgttcgaggaggacggtggcggcgatggcgaggacgacaacgacgacgaagacggtggcggcgatgacggtgacggcggcggcaggggcggcagcagtggcagcaaggatggcgacgacgacagcagcaggggcggcagcggcggcaacggcagcggcaagggcagcaacaaggccagtggctaa

SEQ ID NO: 3298 - DNA, 630 bp, Zea mays
  Peptide Sequence Number=SeqID_46673
atggacaaggatcgtcaagatgcggcgcggaagcgtcgggcagtcactagggtcggggaccctatgcacgaggtgaagcaggcacggggaggtgcgaagtccatcgcccctggcagcagcaagccaccgccggcggcgaagcctgccgtccctaggcccagcaagtcttcagcgggtccgagggctgccgcttccagcgcgggcaagctgccctcggctgagcctgcaaaggagcgaaggccgccgtcgccggtgcgcaccgatgaagcggcggcaggtggtgccgattttgacatggacagctgcgtggatgattacctcgttgggtcgggtgcgaggcagctggctgttgtcccgggtttggtggcgggctacttcgcctacggcggcgggtggagcgaagggtacttcgcaggacccatggcggacgccttcgccgaccatgttgcctcgagcgccttaacttcggagttcgctgccgagaggcaacgactcgagggcaggatcaagcgcctccgagtgcagcatgtggatgttgttcgggacaagtcagttgcagaaaacaagagccgcaggctgtcagagaggttggtggctgcggaggccgagaaggcggatcttaggcgttag

SEQ ID NO: 3299 - DNA, 171 bp, Zea mays
  Peptide Sequence Number=SeqID_46674
atggcacacagtggcaacgggacggcttgggcacagtgcgcgggggacaaggcaccaaaccgagctgagtatgttgatgagatggttgctgagaatggtgttgcaggcgaggtatgcgacaccaacggaggaagcaaggaggtgatggtggatgaggcgagcctggaataa

SEQ ID NO: 3300 - DNA, 330 bp, Zea mays
  Peptide Sequence Number=SeqID_46675
atggggcgcaatacaggtcaaagctctgtccactcaagggacacgatctcgcctcgcccgagcccagcttcgggcaagaacagcagacccaggtggattcacgtctcgcccgagggtctcctcaagcaacgggcgcaccttcgactcgcccgaggcctagctcgggaaggacctcaagcaaagtcgaagtccaccatacttaaagcttcagatgctggacaatgtctaagcatgcatgcacagagggaaataaagcttcaaagtcttaggatggggcctcgaaaaaggaaggcaaagaaggtggccagggagaagaaaagacatacctga

SEQ ID NO: 3301 - DNA, 1539 bp, Zea mays
  Peptide Sequence Number=SeqID_46676
atggtggcgtcggccgtcgcggccgtgctggcgtcgtgggcgttcaacgcgctggtgcgcctcgtctggcgcccatacgccgtcgcccggcggctgcgcgcgcagggcgtgcgcggcccggcctacaggttcctcgccgggaacctcgccgagatgaagcggctccgcgccgagggcgcccgcgccacgctggacgtcggcgaccacgacttcgtccccatggtgcagccgcaccaccgcaagtggatctcgctctacggccggacgttcctgtactggaacggggcgacgccgaacctgtgcctggcggacgtgaacctggtcaggcaggtgctcttcgaccgcaccggcctctaccccaagaaccacatcaaccaatacgtcacccgcctgctcggcaggggcctcctcctcaccgacggcgacgagtggaagcgccaccgcaaggtcgtgcacccggccttcaacatggacaagctcaagacgatgacggcgaccatgtccgactgcgccctgtccatgatttccgagtgggaggcgaagctggccaaaggcggcgacgcggaggtcgtcgagctcagcagccagttcgaggagctcaccgccgacgtgatctcgcgcacggcgttcgggagcagctacagggaggggaggcaggtgttcctggcgcagagggagctccagttcctggccttctccaccgctttcgacgtccagatcccagcgctcaggtacctccccacccggaataacctacggacgcgggagctggacaggcgggtgaggggcatgctcatggacatcatcaaggcacgcctcgccgtcgccggcaaggacaccgccggcggcggctacggccacgacctgctcgggctcatgctggaggcggcggagcacggcggcgaggcgccgacgctgagcatggacgagatcgtcgacgagtgcaagaccttcttcttcgccggctacgacaccacgtcgcacctgctcacctgggcctgcttcctgctgagcacgcacccggagtggcagggccggctccgggaggaggtccggcaggagtgcggcgcggacgaggtccccactggcgacgcgctcaataggctgaggctggtcaacatgttcctcctggagacgctgcggctgtacggcccagtgtccctgatccagaggaaggcggggacggacctcgacctcggcggcgtccgggtgcccgagggcgccatcctgaccatcccgatcgcgacgatccaccgggacacggaggtctggggcgatgacgctggcgagtttaggccggagaggttccagaacggggtgaccagggcggccaagcaccccaacgcgctgctggccttctccagcggacctaggtcgtgcatcggtcagaacttcgccatgatcgaggctaaggccgtggtcgccatcatcctgcagaggttcgcgctcgagctgtcccccacgtacgtgcacgcgcccatggacgtgatcaccctgcggccaaggcacgggctccccatgctcctcagaagcctgtag

SEQ ID NO: 3302 - DNA, 230 bp, Zea mays
  Peptide Sequence Number=SeqID_46677
atggccgcgtggcagccggagttagtgccctccactgcggcggtcttatccggagcaaagaggtcttcgcggggagatgctcgccgcccgatcatctcgaccccggcgcaaatcgcggcgcggaaaggtcgtcggcgctctgcagaaaaatgtagagcaatacaccatcagcactttgtatatgatgatgccacaaaacccattgatcagctagatttagctgagatgag

SEQ ID NO: 3303 - DNA, 219 bp, Zea mays
  Peptide Sequence Number=SeqID_46678
aggatccggggtgtagttcgcttcgccatcgtgccgtcaatggggctcggtgtatgcggctcgctctgccaagagacattttgggttataggtggcgatgagactgatggttttggttatgcctatggtgctggttgtccgcattgcaaccactgctcgggagaagatgaagtcgtggaaggagacttccaggagttccaagactacgacgagttctag

SEQ ID NO: 3304 - DNA, 234 bp, Zea mays
  Peptide Sequence Number=SeqID_46679
atggctccaaattgccaacggtcggctccgccaaaacaggaaagaaatctgcaccagacagtgtccggtggtgcaccggactgtccgggtgagaggctccaagttgtggagattcctcgcaagcgggatatagtgaaacaaagcaaaacatcgtggtattcaagtgggtctttggaccgcttgaaaggggttgagtgcaaccctcatccgttgggacgccacaacgtggagtag

SEQ ID NO: 3305 - DNA, 285 bp, Zea mays
  Peptide Sequence Number=SeqID_46680
atggagttcctgctgggcgccatggaaggagaggaaacggcggccaggaaggaagcgctctgcgcacgtacaggaaaaacagagggaagagacgtggggggaaaatggagaggggcgctggcttcttgctgctggaggtacaagaaagggggcgctgcgcagggaggaatgagggcgcccgctggcttgaggaagaagaagggcttgggcgccatccatgggagcggctgctccctgcttgcagctgtgtgcgcgctgaatagaggagaagagagccgtgcgtga

SEQ ID NO: 3306 - DNA, 735 bp, Zea mays
  Peptide Sequence Number=SeqID_46681
atggattgctacaattgtggagaacatggtcatcttaatcatcaatgcaacaagcctaagaaaaacaaattcaagggcaagaaagatgatgaaagtgatgatgagaagaaagaaaagaagttcttcaagaagaaagaaggcaagcacaataggtttcacaaaaataagaatggaaaagcatatattgttggtgattggctcaccgacattgaatcctcaagcggctcttctttaagtgatgaagaagatgatgaaaaggtcgtcgccatcacttgtgatttctcttcaccaccatcatcaccttcatctacttcacacctatgcctcatggttaaaggtgaacggaagtctaaagctaaatgtgacaagctaaaatatgaaaatgaattcttaactgctaagcatgacatagttgataaagctagtaaagaaatgaaggaagaaaacaaaactatgtcatccaccaaaaatgagctcaagacctcccttaaagatgctaaagaaaaatttgagaaattaagtgaggcaaatagggagctaaaagataggcttgtcaaaataaaggaagataacacaaagattaaaattgattatgataatcttcttatttcaaatgagcttttatcttgtgacacacatgaggctattaaccttgttgttaagcttgatgtagcaacttcatgtgatgatcagagcaatgttgatcagtctagtctccatgatgaattgatttaa

SEQ ID NO: 3307 - DNA, 228 bp, Zea mays
  Peptide Sequence Number=SeqID_46682
atggaggccctctcccccgccgggccaaacttgggggagagcgagacggacagaagggccgtagaagttggaggcgactctccctacctgcgtccccagccgtcgtgggctgagtcttctccagcacgctccaaggtcctccccctacggcgcgagggctgggtcccacacgtcatgcaaactggcccagagcagaagaagccaaactgccgcgcgcggtgcatgtaa

SEQ ID NO: 3308 - DNA, 1074 bp, Zea mays
  Peptide Sequence Number=SeqID_46683
atgcaggcggcatgcaaccgcgccaagtgggcgcacctctccgacttccaacacgcccacgcgtcatgcaaccggcgcgccggtcgctacgtgcaagcaactgcaccgccactcgcaccactgccgcgcctcctcgactgcggaaccagtaccgcgactcgaggcgacccagcgcacgacccagcagcgccagcctggcgcgacgacggcgcgcccgtgttccgttcctcgaacggctcgcgcacgcgcgacggccgccccgcgaaccactcgccccgtcgcattaactccgcggcaggcggcgcctctggcaggggaagcgagcgacgcttcgccttcgccataatgaccgcgtcaaaaaaaggaaacaggctccgagcctccctactgatcagaggttcgaaggttggcccctcgggagggttcaacagccgccttagagcgcgtgggctccacacccactactggtcagaggttcgaaggccggcccctcggaagggttcaacggctgcctcaggccactcgggctccgcgcccactactgatcagggcgggaacgatcttgtaacagaatcccatcagagggaggcatcgagccctcggaccccaacgacaggggaccgggtctggcagatcacccacagaggctcggggctgctctcacaaacccggctccgggccaaatcgttgacagcgtcaacctaccagcccgagaacttgggacccgaccgtgcacccgggcctacggccagctcgcatgagggaacgaccagatcagccgaagcattgcacgaggcattaagacctcggaggagtcaaaccactcctccgaggcctcgggggctacacccggcgggtgtgctcgcgcgcacccactggaacaaaacgcaaccgagaaaggctggtccccttgcaaaaaagtgcgacgaaagcctccaagcgagtattaacactcccttcgaggctcgggggctactgtcggggaccataattaggggtaccctcaaggctcctaattctcagctggtaacccccatcagcacaaagctgcaaaggcctgatgggtgcgactaa

SEQ ID NO: 3309 - DNA, 2208 bp, Zea mays
  Peptide Sequence Number=SeqID_46684
atgaacaagacaccagcactcaaggtgccattacaagcggaaccccggttccacctctgcaggtacgaacaaccccacatgattggggggcctgcggagcaacagaaggccgacggatggctcgccgtcgcccgctctgacagcagcgacgacgacgacttctgctccggggggccgaacagcagcagcgatgacctcagggcggatgctgctgccatgaggccctcgcccatgccctcactcgagaggcaaggacgggcagaaggccgtagagttggaggtcagtccgtgggcggcaccggctatctcgtcggcggagaaatctcttccggctgtcgtggcggaaggcggccccgggagcggctccgaagccactcgggtcagagagccaggcacgcggcagctgccagcgccacgaacagcgaacgcccttccccccgatcactgagggaaggagcgggccgccgcccgcgcagggaccgaccccaactcggcgcactcccctccccagcactgatgatgaaaatccttgaagctgagggaggggcagaggccgcagcccggcttgcttttccccgccatcgaactggagaccagcgggtgaaagggaggacagccatgcagtcggcatgcaaccgcgccaagtgggcgcaccccttcgactccaacgcgcccagcatggaggcccaggcccacacgtcatgcaaccggcacgccggttgctacgtgcgagcaactgcaccgccactcgcaccactgccgcgcctcctcgactgcggaaccagtaccgcgactcgaggcaaccctgcgtacgacccaatagtgccagccaggcgcatcggtcacgggctagtcagccgcgggaggaggcgcgacggtcgatgcggccaaaaatgggtcggcagtaatggcggtggcaggcgagcagaagcagtggtcacgtcgttagccaagctcaccgcctatggctggagaagcgagcgacgcttcaccttcgctataatgaccgcgtcaaaaaagggaacgggaaagggggataccccgaaagggatccttctccgtgaaggaaacaggccccgagcctccctactgatcagaggttcaaaggctggcccctcggaggggtttaacagccgcctcagagcgcttgggctccgcgcccactactggtcagaggttcgaaggccggcccctcggaagggttcaacggccgcctcaggccactcgggctccgcgcccactactgatcagggcgggaacgatcttgtaacggaatcctatcagagggaggcatcgagccctcggaccccgtcaaaaggggaccagctcgctggagacaccatgttcggcgccctccaagggcaacatggcgcttctcccctcctccttgtggaaaggcgacgcaggggcgtatgtaaaaaagtcgagtctgtccttgaccgtcctctcgccctgtgcagaggctcgggggctgctctcgcaaacccggctccgggccaaaccgttgatagcgtcaacataccagcccgagaacttgggacccgtccgtgcacccgggctacggccagctcgcatgagggaacaaccagactagccgaagcattgcgcgaggcattaagacctcggaggagtcaaaccactcctccgaggcctcgggggctacactcggcaggtgcgctcgcgcgcacccaccggaataagacgcaaccgagaaaggctggtccccttgcaaaaaagtgcgacaaaagcctccaagcgagtattaacactcccttcgaggctcgggggctactgtcggggaccataattaggggtaccctcaaggctcctaaaactcagctgcctcgggcaagggcagccgaccccggaggatctacgtctcgcccgaggaccccctccagcaacggacacaccttcggctcgcccgaggcccagtcttcaccaagaagcaaccttggccaaatcgccacgccaaccgaccaaatcgctggggcatttaatgcaaaggtggcctcacacctttatcctgacgcgcgccctccggccaagtccggccctaggcgtcatgggaaactccgcttcgcccgaccccggtgctcggactcgggctcagccccggaagtcgacgaactccgcttcgcccgaccccagggctcggactcgggctcagccccggaagacgacgaactccgcttcgcccgaccctag

SEQ ID NO: 3310 - DNA, 357 bp, Zea mays
  Peptide Sequence Number=SeqID_46685
atgacttctcacggatcctcggacgaagggaatgcacagtcccacactgacgagcttgcacgagagggttttccccgtattttgtgggagcagttcgagaagcaccgagtgccccgctgtagggtgaggatgaccctggagcctcatcccctgcagctaggctggcgttcgctggactctaagtcctttggatactgggctgaggatacgatcgaggcgattgctcttcacggactgaccactttctgcggattccaccccttggagctgtccactcaccccattggcttgttcctcgctgagagggaggacgacccaatgtggaaagaccgagtggagcatgccaaggacatctag

SEQ ID NO: 3311 - DNA, 306 bp, Zea mays
  Peptide Sequence Number=SeqID_46686
atgtcccatctgatggcgttgttggaggcaactaagatcaccttggataacagagaggagcttgtggttgacttgtccactgagatggtggaaaaggacttacaggtggagcaactgtcaaatgagatccaagagcttgaggaactggtgggaacaagggagaacaccatcgaggagatccaggacatggaggccaacgaggatgtcgacatcgagggaggagaggagcctgcctctagcttggacactgctggctcagggagaccaccttcccccgagtcgagtgttgcctcgtttgctcactag

SEQ ID NO: 3312 - DNA, 630 bp, Zea mays
  Peptide Sequence Number=SeqID_46687
atgcgcatggaaaaatcaagacagagaggtggtgcttaccaaggattgtggggtacgggagcccgaccacggcggtatgcgggtaacggggacagagctacgccgacgagaaatcccgccgacgaccgaagctttccgggcctcaatccgccacagactagttccacgggcctaggagaattaccccgaccaccgggcaacaccgaaacaatggcgccgaggagagtcagcggcggcgatggggttgtcactacgcggcggcgcactgaaatcttatcggcggcgtggacatggctgggtggggcgaggagtagtcacggcaccgagcgcccttattatatgggtcaaccccaaacgtccgagcgagtcctgcgccggccgtggcggcgaggtccgtccgcgccgcgcgacatccgcggaggagacgactgcgacccagagaccggtcaaacggccccaccggtcagcggaaccacatcgttggtgcgcgcgcggggcgatttccagccggctgacgacccgggcccggttggcagcgagtggccaagcacgcagtgggcagatcaacgtgggccgcgcggtggcaattcggagatgggccaaaatgaatacgccggcccattgttttga

SEQ ID NO: 3313 - DNA, 630 bp, Zea mays
  Peptide Sequence Number=SeqID_46688
atggcagccccgtgtagatcgatggggttcgctgctgtggaccggcaccgctgcgcagatcagttgacgccgcacgaggagggccgagcacaagtgtggatggtggccagggcaagaacagggaaggggaggctgcgtgctagtggaggaagtggctggagcagggaggagtatggcgttcaaggagctaggcgccatggggagagggaagagatccttgctgccggcacccatgggaggaggggctggagaagggatgaagcagagagcgcgatgaagtacgagctagtgctccctgttgccgacgccatggatggagcttggtggggtaggggtgccggacgtaggcaagaggaggccggcattgagggagttgaggaggtgagaggctgctccctggaagcttctgcgcgctgggcgttgagggtcgcggtagggggagcaggggcgagggggcaccaggaaggaagggagtcgaactccctgcgctggggaagaaggggaggacgccatggctggccggtctccctgctagccactgtggggaagaagggtgccatggataagagctggaggcgcctgctccaagggctcggccagcgcccaagcagggaggtggaggcgccatga

SEQ ID NO: 3314 - DNA, 435 bp, Zea mays
  Peptide Sequence Number=SeqID_46689
atgggggagagggaagagatccttgctgccggcgcccatgggaggaggggctggagaggggatgaagcagagagcgcgatgaagtacgagctagtgctccctgctgccgacgccatggatggagcttggtggggtaggggtgccggacctagggcagaggaggccggcgttgagggagttgaggaggtgagcgactgctccctggaagcttctgcgcgctgggcgttgagggtcgctgtagggggagcaggggcgagggggcaccgggaaggaagggagccgaactccctgcgctggggaagaaggggaggacgccatggctggccggtctccctgctagccgctgtggggaagaagggtgccatggataagagctggaggcgcctgctccaagggctcggccagcgcccaagcagggaggtggaggcgccatga

SEQ ID NO: 3315 - DNA, 870 bp, Zea mays
  Peptide Sequence Number=SeqID_46690
atgacttcccacggatcctcggacgaagagaatgcactgtcccacactgacaggcttacacgagagggctttccccgtattttgtgggaggtacttcagggggtcggttacacgacgcctcctcagtacgtggtgcagcagttcgagaagcaccgagtgccccgctgtagggtgaggatgaccctagagcctcatcccctacagccaggctggcgttcgctggactctgagtcctttggataccgggctgaggatacgatcgaggcaattgctcttcacggagtgaccactttctatggattccaccccttggagctgtccacccaccccattggcttgttccccgccgagaaggaggacaacccaatgtggaaggaccgagtggagcatgccaaggacatctgggctatctacccaggtcagactgctcacttgatagtgcggtgcatgaatgccctgtaccgtctgcaagtgatgcatggtgaggcaatgtcccatctgatggcattgttggaggcaactaagatcaccctggataacagagaggagcttgtggttgacttgtccacggagatggtggaaaaggacttacaggtggaacaactgtcaaatgagatccaagagcttgaggaattagtggggaccagggagaacaccatcgaggttctcgaggatcagcttatcaacactcagcagcagcttgcggaggctaacgagcacctggatatgcatcaccaggagatccaggacatggaggccaacgaggatgtcaacatcgagggaggagaggagcctgcctccagcttggacactgctggctcagggagacccccttcccccgagtcgagtgttgcctcgttcgctcactag

SEQ ID NO: 3316 - DNA, 876 bp, Zea mays
  Peptide Sequence Number=SeqID_46691
atgggtcggatcacacgcgggcctccattctggacggggtcgcaagatgagacgacctcgtcacaggtcttcgtccggtggcgtatgaggcgaaggaccaacgactgcagcgaaggcgtcgagcgaagggtggcgtctttgccttcgccccaacagactgcactgttatctcagccgacgagatgtcgcctcctgcctagccatgattgccccgtctcctcctcctgcggcgaggaaggtggcgggacaaacccggatgctgctcttccgccacgggggaaaacgtcgtcgagtccgccgacgccgggcgagctgacgaccgtcgttgtcgctgtcgcgctgtggaggaaggagtaccatgtcgtagctgccgtcgagggacatgaacttgacactcctgaaacggagcagcgtcccgggctgaagaggttgctggagactacccatttggagctcaacaggaagttgttcgtcaacacgcaacaggcccctacccagcgcgccaactgtcggcgtttcgaccccgtggggtccctggaccgacgaggggatgcgcttgcagtaggggttacaagcgctcgcgagggagagagagcgagcctgttcgtcagcccgtcctcccgcgcgaccaccctctcgcatgagggccctggaccttccttttatagatgcaaggagagggtccagggtaatgatgtatcccatgtggcgcggtcggtccgagcccaaggtcgggcgaggcggagactccttctgaggccgaggtcggggtcaggcgaggacgcgattcctcccgaggtcgaggttgaggccgagccccagggtcgggcaaggcggagaccaccttccgaggccgagggtgaggccgagtcctag

SEQ ID NO: 3317 - DNA, 681 bp, Zea mays
  Peptide Sequence Number=SeqID_46692
atggttgcggcctcgccagagaagctccactgcggcgcggcggggtcaagtgacaaagaaaaggaggtggcggggagggatgatgccgaggttatgttgccgcagctctcggatgagccgctgcgggagaaggcgcagcgcatccaggtcatgctcaccggaggcatgtccgaacgcctccctgaccgcggcaagaagctgctcgccacactcgatgccatccaccgggagcaagaccgccgccaggcccaaggcgacggggcacgagcgccgggctttgtggccaagccggcgatgctgccggatggttctgtcaatctcatgctctggaactgcgtcgtccccggcaaggaaggcactgattgggaaggtggatatttcccggtcactctccatttcactgaaaattacccaagtaaccccccaacctgcaagttcccacgaaggtttttccatgtcaatgtctatgattctggggatgtatgcctgtcaatacttggtgatgcatgggcgccttctatcacagtgcggcaaattctaataggcatccaggagctgctggagaacccaaacccagcctctcccgcacaggattttgcttacgatgtttttgcagagaatatgccagaatacaagagacgcgtccgtgagcaagccaagaggtatccgtcgctcgtgtag

SEQ ID NO: 3318 - DNA, 1740 bp, Zea mays
  Peptide Sequence Number=SeqID_46693
atgccgtcctcttcttcttccgccgacaccacgccgccgaccgccgcctcgtctgaggagacgttgagtagcttaatggtggaggagttgcgcgccggcgactctgttgattttggtgtgtcacggatgacgtcggcccgcgttggagatatgcagcggttgggctactttggcggcggagttgctcgtgcgccggggacggaggaagtccccgagccggaggtgatggacaaggatcgccaaggggcggcgcaaaaacgccaggcggctgtcaggctgcatgaagctaggccgaagcggcagcggggggctgcgaaggctgcggcccccgacggaggcaagccgccgctggcggcgaaggcgggcgcctctgcacctagcaaggcgccggaggcaacggcgggcgccggaggctccaagtcaacgaaggtggtgccgccggccagcggagtggcggaggcttcgaaggcggcccgagcattgccgttgtcgggcaaacatgttgccgacttcggcaccgatattaccgtggacgactatcttggtgggccggacgagggccagcttgctatagttgcgcctggcgcggcgatcgcgacggccgccatagtgccgaaggcgaggggcgaggcgcttggcgccgtaggcgaggtgtcggccctcgcgttggtggctgacttcaccagccgtactgcgtcgggggccctcacggcagctgtgtctgccgaagtcgagagacttcggacacaacatgctgacgctgtccgtgagaaatcggcctccgacagcaagtgccgtaagctgacggacagggtggccgccctggagagggagaaggctgacctccggcgccaactggcggcggagaggagggaggcaaacgaggccatcgccaaggagcaggctgcgcaggcggaggccaaactggcgcgggcggagggcaatcttgccaaggagcttgccgaacatctgcaagagcggcttgccgccctggagagccgcgcgaagggggccgagaccgcgatgcgtgcggaggctgaacggacgcgcgctcagcttaaggatacatatcgcgagctgggcgcgcggaccggcgacttcgaggtgccggaccgagagcccgggcttcgttgcctgcaatgggtgcaggaggagctgcaggaactccccgctgttgtggggggatttatgtcgtacgcctccctggtcacctgcgagggggcgatgaacgcactctcccgcgaagggtgccggcacttcgaggtcttcgaccaggcagatgaagatttcgagcgagatgtctataaggtcgaagaccccgttgtgaaggaatccgccggggccctctacgaccggatgtggggtccgcacggtcgtgaggtggtcagggagcgggccgagattgcgagggctcaggcggagcgcggcgagcgggtggacgacttcggggctctgaacagcgcgctgccagacctggagccgacccctgcggaggctgtgaccggggccgccctggagccaaccccggagaccgcagcgattgcgacggctgcccccgcatctgctgcggccggcgaagacctgcccccaaaggtggccgaaggcgcccccgatgcccccgcggcagctgcgccgagtgttgaagatcccgcggtggaggcggtggaaacaacggcggaagtggcggcggagccaacggcggaggctcccgcagcgtcagggccttcgcaggtggcgtag

SEQ ID NO: 3319 - DNA, 1107 bp, Zea mays
  Peptide Sequence Number=SeqID_46694
atgccttcgcactcccctcatgcatcgcacccttccaccttccgtgcccccgaatggggagcgcccgcgttgccttcgctttgttgttggaggagtgcaacctcacagaggttgacacctttcagccatcgctcggcttcaaggattttcatcaggcagctcagctgcattccctcaccaatggtcacccaggatggtgaccaccagttcgatggtggggagaagcaagccgggctacagcctctgccccgccctcagcttcaaggatcttcatcatccttgctgtggtgggggcgagctgagccggagttctacctctcgcatgggctggcgggccacctcttccttcagcattcaggggagagggcgctcaccggcctagcggagggggcagacttcgacaacgcgtggccggtcggccgcaagcgtcgtcagctccagcatgcctggctcgctggctcagctggctctggcgctgcttccggtgccacctcccaccgctggggcggagcgtggctgtccgcccaccgtacgggcggctgttgcgccgtgcgcaccgggggaccgtccaagacatcgcacgtcgctagggcggcgttcatgttcttggattgtcttgtcctcactccggcacgacgcctccgcgcggaggctggggtggccaccattcgttggcatagcgccgacgcgcaggtggccgctgtcgtcggtgctgaggtggtggtcaccagaggaggtttctctgccgacgagattgtcggcgccacctgcggtcggacctccggctcttcggccttgacggcttgtcctcgcccctcgtgtggggactggtcggcggcgagccaactggagtttgtcgtcccgcaggccctcctatgtggaggttgttcatacacgcgggagtggaaccggagttccgcttgtaatggcaccttgagtgccggtaaccctcggctgctctacaatgagccagagccggagacagcggtgtcagcgtggaaagaggcggagtcgactcaaaaagaggcttcgtcggccgaggaggtggcttcccaggccgaggaggtgcagcagcggcggccggagcttggccaggtcgtccgctag

SEQ ID NO: 3320 - DNA, 183 bp, Zea mays
  Peptide Sequence Number=SeqID_46695
atgaccgctgggggcggctgtctgttcgatggcgcaccggacagtccgccccacaccgcaatgtacgtgactacagccacgtcaccagtgccgttggaatctgaccgttggagttctgacttctggccctacctcgatgtccggtggcgcaccgagatgaactgttcagtctccagtgctccg

SEQ ID NO: 3321 - DNA, 345 bp, Zea mays
  Peptide Sequence Number=SeqID_46696
atggacaggcacgccacctgctggactggactggtcgccgcctgcccgctgaatgggacaggggtcgcacggcctagaggccttacgtcaggctccgcgcattggcttacgtcacgtgcagcatgccacgtggcagcactggggctccgcctgagcggggagctgaagcgtatacgggtaccgacagtggcccccgggcccatctcaggggaggatacgagcctgcaggtggggccaaagcttgattggcgattggcgcgccgcttccgtgcatttgctgacgtaatcactgtcaatccaccttcggtcacgccaactgccatgtctgtccccgcggcttactga

SEQ ID NO: 3322 - DNA, 447 bp, Zea mays
  Peptide Sequence Number=SeqID_46697
atggcgctacctgttgacgtggcgggcccgcgtccgaggccgggcgacgtgggcgttcctccgaagctggggtcgaatctgtcttccgttgccgaggccgagcccgagcccctgggtcgggcgaggcggaagtcgttcggcagaggccagggcggagtccgagccctggggtcgggcgaagctgtaacaccccagccattgcctccggcgacctccccgcagcccgccagtgccgcccgagagcaaccgccgtggccgacccctctcccgtcctcctccgttcgattcaagcccccagatagcttcctggagccgccgacgatccccgccgcctgtgctcgtggccagggtagctccgaccacctctggcgtcgacccgcacatcgacgtgaccgtcgcgacctcctgaacatcaccgaccacctcgccggacctccctcgccgccg

SEQ ID NO: 3323 - DNA, 174 bp, Zea mays
  Peptide Sequence Number=SeqID_46698
atggattacagaggtgttgctaatattaattcactgacatccagggttcatagggaggctgttggaacaacatctctgagggatggacggttcgaggatcctgtgtctgcggcagaagaggccacgttctgcaatgttgcactgaacataaccatctggctaatttgtggatag

SEQ ID NO: 3324 - DNA, 564 bp, Zea mays
  Peptide Sequence Number=SeqID_46699
atggcggttcttccttctaattacaggcatatctatgactcttttttaccagatgaagcagttttacgcttacgcttaagggaagaaatgttcttggtggatgcaggccttggtaccccaaaaatttgtatgcaagatgagcttacaggactgccaatcaagcgagccaccaggtttgagaataaggtgggatccaagaatgtagtggctggtgaatcactgatcaaaaagcggatttttgagagattcttcatcgatctagtggccggtgaatcactgatcaaagagcgagcagccgccgggtttaatgattttgtgggatccctggatgtagcggctggcgaaccgcttcttcttccacaaagattcagacaaaaccgagcttggatagaactgaagaagatttggcgaacgaagaaaaagccaagaaaggctctggtgatcatgcgtgactgcggagcgcctatcgccctggcacggcactcaaaaatgctgggttgggccagcaagaagacttcgactagggagacgaagaatggaattgaagaaggcagcatagtctaa

SEQ ID NO: 3325 - DNA, 141 bp, Zea mays
  Peptide Sequence Number=SeqID_46700
atgggggttggttgttcacaagatggaaaatggagttctctggaggagatggttgctgggataacttggccgtccaccttgccaccgggttggactgtcgagtgggaccctgcctcggctgaggaggagcatgaggagtga

SEQ ID NO: 3326 - DNA, 1425 bp, Zea mays
  Peptide Sequence Number=SeqID_46701
atgaagccaatgaagccgagcttccagaaagacggcgccgacaaggttgatggcggcacaggtggcgtactctggccgtcgcggatctgctacctcgtcgttctcgccaccactttgtgggccgtggcgtccatcttgttcccgccgtcggcgttcccccaccccctggtgtccagcgtcaccgtcagccaccaccctgctccgcacgattcggcgtcggaggacaaccggaccgcgaccgagaccgccgaccgttgcgcggggcggtacatctacgtgtaccgcctgccgccgcgcttcaacgacgacatcgcccgcggctgccgcacgctccgcccgtggatggacatgtgcccgtacatgcccaactgcggcctgggccgcctgctgggcgacgagggcggcgtcttcccgggccgcggctggtacgccaccgaccagttcatgctcgacgtcatcttccgctgccggatgaggcgctacgagtgcctcaccggcgaccccgcccgcgccgcggccgtcttcgtgccggcctacgccagcctggacggcgggcggtacctctggaacagcaccgcgacgcgggacgcgctggcgctcgacctcgtcgcgtggctggcgcggcgcccggagtggcgcgccacgggcggccgcgaccacttcctggtggccggccggaccgcctgggacttcctcaggaagaccgacggcgacgacgactggggcaccaaactgctcagcatcccggccgtccggaacatgacggcgctcgtcctggagatcgacccgtggacccggtccaacaacctcgccgtgccttacccgacgaacttccacccggccacggccgccgacctgcgcgcctggcaggagaaggcgcgcgcgctggaccgcaggtggctcttctcgttcgcgggggcggcgcggcccgggagcaacaagaccgtccgcgcgcagattttccagcagtgcggcgcgtcgagtcgctgcgggatgttccggtgcaaaaaggggtccgaatgcgaggcctccccgggcgccatgatgcgcctcttcgagagctccaccttctgcctccagccgcgcggcgacacgacgacgcggcggtccacgttcgacgccgtcgtcgccggggtgcatccctgtgttcttccaccccgactcggcgtacacgcaaggtggtcggtgctcatcatgcacaccgacgtgacggaccggaacgtgagcatcgaggaggcgctcgccaagatcccgccggcggccgtgaaggcgatgcgcgaagaggtgatccggctcatcccgagattggtgtacgcggacgcgagatcggcgcgtgcggacttcaaggacgcttttgacattgcgctggacgtcgtccttgaccgggtggccaagcggcggcgacgggatgtggacggacgctga

SEQ ID NO: 3327 - DNA, 1214 bp, Zea mays
  Peptide Sequence Number=SeqID_46702
atggacaaggatcgcaaagatgcggtgcagaagcgtcgggcgttcactagggtcggggaccctaatcgcgtggtcaagagggcgcggggaggtgcgaagtccaccgcccccggcagcagcaaaccactgccggctacaaaggcagccatccccgggcccagcaaatcttcgtcgggggcgagggttgccgcctccggctcgggcaagccgacctcggctgagcccacgagggagcgaaggccgccgtctccggtgcgcactgatgaggcggcggcaggtggtgccgacctcggcatggacatctgcgtggaagattactatgtgggtggtgtcatgatgtttgatgcccacacgggtcgaggactcgttggtgagttttctctttctcttttttttgaattggttttgaacaagatatgtggtgcagggtcggatgctgggcaattggctgttgtcccggctccggtggcggccacacaggcgaccgcctttgccgaccacgtcgtgtcgggcgctctgactttagagttcgctgccgagaggcaacgactcgagggcaaggtcgagcgcctccgggcgcagcatgcggatgctgttcgggacaatggagagggaggacgcgaaacagagcctgtactgaggcacaggctgcacaagccgaggccaaactggcacgaggagctagaggtgctcccgacaatcatgacgggcctcatgtcctttgcctccctcatcacctgcgaaggggccgtgaatgccctgtcccgcgagggatgcgggcacttcgaggtcttcgaccggtcggacgaagacttcgagcgcgaaatcttccaggttgaggacccggtgctgaagcggtcggccggggtgctctatgataggatgtggggccctcacggtcgtgagaccgtccgggagaggtttgaccgggcgatggatcagatggtgcatgatgaagaggtcgaagacctcggggatttggatggcgcactgcccgagccgtcgagtgtgaaggaggggactgggggagctggcgccaccattcgatgctggtgtttttcgtctcatggtgagcctgagagtctgttttcctggaccaaagagtcttcagatgaggacttagattattttgccgcgttagatgtggccgcggcggagtcctcgccgcgtgtggaggttggcaaggcatctgatcttcctagtgcgaggaccag

SEQ ID NO: 3328 - DNA, 381 bp, Zea mays
  Peptide Sequence Number=SeqID_46703
atgggagaggaaaaccaaatcgtgagcacaagcacaaacctcacacccaagagctcctccaacaaggttgaatctttaggaagatttaagtgcgggtcagacaggccaggaccggttgaaccgccccctagggcggttgaaccgccccctgacacccctggcgacctgactgccagtctgactggcagactgcagatcagaggtcagagggtcatagaccagttgagctgcccccaggaccagttcagctggtctagaccagagagttttggagagaaaaccccagctcagctgccctggggcaagttcagctgggtatggtcagagaggtccacaactgaagttgaagttcagctggagttgaaagttcaactcagctga

SEQ ID NO: 3329 - DNA, 507 bp, Zea mays
  Peptide Sequence Number=SeqID_46704
atgacgaagctgcaaaaagtcgttcctaagggagcgcagcgtaagttttctgctcaaaagtcgttcctaagggaatgcagagccaaaagcatgatgaagctgcaaaaaagtcattcccaagggagtgcagcctttgataacaatgcttcgatgagcatgaagaagcaaggatacacttcgttgtgtacaaaaagaagggaaggtgtttttcgccttcggctcaaaagatacaagtttcgtccacaacaaagcaattcatacatggatgaaaaggttttaatgggaatgtcaaccaaatctgatggagataggctgaagtttggcctatttacaatttttgcatgcgtacaaccagccttcagaaatgttgcagctgtgccacgagaagctagcaaggcacagaagtcaccatgcccggctattacttcgtcaagcgcctccacttcgccttcaatgtgttcgaaggtgcttgatatgttttcgactgaaggggagttccttgtttaa

SEQ ID NO: 3330 - DNA, 573 bp, Zea mays
  Peptide Sequence Number=SeqID_46705
gaaggcgacaagggtgctgttcttgggagaggggctctgcgcaaggctgctgtttttggatcgaagggctgggtgcagggacttggacgctgtggctgcagtccgagcaggggctccttgctgccgcaccagggaaaaggaggaaggggcgagcagcagcaggggagggaagctggctgggaggaagatgaacagggaggcgctagaaaaatttctgggcgccatccatgggagttgctgctccctgcactgaaccagatcagaggggagctcggcgtgtgctgcgggagatggccggctggagcagagggacccgcgcccatggagcaggggaatagggagctcggccatggcaagaacagagaaaggggagggagatgtgctggtgttgggcgccggcaaggggaagctgcaggggtggcgcccatgggagcttctcccactgcgccagggaggagatgggagcagagagcttgggcgccatggctgggggcgcgatggagagggcagctcactggtggctgttgctgccgtgaagaagaagagacagggaaggaagaaggtggcgtctag

SEQ ID NO: 3331 - DNA, 675 bp, Zea mays
  Peptide Sequence Number=SeqID_46706
atgtggtgccaatatagaattcaagctcttgttcaccgattcattgatggtcatgccagaatcaagcgatcacatgctacaggggatgtggaagcagcaggtggcaagaataaagtcatatatgaggatgttttcatggagagatggacttttgtggcgcaacaagctgatatgtggatgtatttgttagagggtgacaagttcaacgaatttgctaatgaggacacatttatttggcatgaggcaaacatacaatatgcatgctatgatactaatttcagtaacataaacattatttcatgcaactatggcctatttgttttgaattttgtgtatttgctgttacaagctattaagcatattgcatctttgtttccccatgtttactttgccatcttgggtcaccctgtggacctaacagatcgtgagtatgatcagaagtctatatttgggaggatacattctgttgtggtattcttgccaaaatcaaaagctggtaaaaagaagagcttgcttggagattcagaagagcctgaagagcaagcaccacataaggttgcttctaaaatggatgagtgttggggacttgttctcaaatgctatgagtcaagaacaaggcagcacaaagtattaaatgttaatttcctttgtccttcgaaacattatttcccttag

SEQ ID NO: 3332 - DNA, 453 bp, Zea mays
  Peptide Sequence Number=SeqID_46707
atgggtaagagtaacacatgcaagcacgagccgactcctccatcggaggacttaggcgactcggaatactcggaggaggagttctcctccgagtccgaggggtctccggctcccgtctctcccccggcgtcgtctgacgattcagacgactcccaggggcttgccgcggaggtctggacttacatccgggccgtcgagcgctccgggctcgagggctcggatgagtcggagtactcctcggacgaggaggactcttcggactcgtccgtggagggcagcggcggcgatggtggggacgacgacgacgatggaagcgacggtgatgacgacgacgatggcggtgatggcgtcagcaggggcggcaagggcggcggcaagggcggccacggtggcagcagcaggggtagcaacggcagcggcagcagcaagggcagcaacaaggccaatggctag

SEQ ID NO: 3333 - DNA, 429 bp, Zea mays
  Peptide Sequence Number=SeqID_46708
atggacatatggttacctgtgaaaggcaactggctgttggggtcgatggggggaatcaccgcagcggatgaactcgaggcctttcgcttgggtgccatctcaactccaacggtgaacagagcgggagctgaattgcaaaaggacagagaagatctgaaggcaggaaagcaagaactaggacacggaaagcagaggcggctgaaagcgcagtacatatgggatattcccgggtcagataccatttccaaaaagcgcctagtcatcacccggcggttacttctaaaaacatcggtgtgccatgtcatcacccggcggttacttctaaagcaccgaagcgtaaatgttgacaataatagctcgaccatcacccccaaaagcgacgatatgatgaccgagttactcagccagaggaatcgacttcacagataa

SEQ ID NO: 3334 - DNA, 1017 bp, Zea mays
  Peptide Sequence Number=SeqID_46709
atggggatgatccacaagattaatctaatgggtgtgcccctgcaggtcgaagatcttctctttaacattgacaggaaaaagcaaaggaagagaggatgcttcgcatgtggggagaagggccacttcagggacaactatccaactatggccgaacccaaaaaggagaggagcaaaggcaaggcgctaacaagtgttagaacttgggatgactcttcaagtgaagatgaacctccaaggacgcgcagccaccggtcctcatcacgctcatcacagtcatcacacaaatgccttatggcaagaggtaacaaaagcattccatcctctagtgatgaaagtagtagtgatgatgaaggtgagggaaagccctctctagatgagcttgcggaagccgtagaatttttccaggatgtttgcactaagcaaaaagctcaacttaaaactttgaaaaataagttgattagctctcaaaatgattacaaagatgcttctacttcctgctttgatttaattgatgactctaacccctgcaaccaagtcgttgttgagaacattgttgtagagacatgttcggatgaggttgcaaaggaaaatgaacaattaaagcaagaagtggctcgccttggcaaggctttgtatgacaagaaaggcaaagccaaacaaatccgacctccacaggataacaccactgcgggagtgaacaagcctgtagagggagaaactgtgatttgtaggctatgccacatggaaggccacaagtctttccaatgcaaggcgatgaccggggataaacaaaggcaaaagccatcaagcaaaatctccaacacctacatcaaaaaggtggataaaaagactgctacaccgtacttaatcaaaaagaagacgaatggaaaggtgatagcaatcaaggccaacaagcaagccaacaaaggaaagggggtcaaacgcatctgggtgccaaaggaaataatttcaaccatgaaaagcaccaagaaggtttggatcccgagagggaagtga

SEQ ID NO: 3335 - DNA, 1392 bp, Zea mays
  Peptide Sequence Number=SeqID_46710
atgggcattttggttgaaccacaccgagtcaacaggcgactccccaggcgatttccgcgccagcgcagcgccaatccaccgccgctccaatccagcgcccttccattccaccttacatccttcaatctcccagcattggagcgcgattcaagaagttccagatttattcagtatttaatcatgaagtttgttgatcgcccgcccagtaatccaaaaagattaaccattgaatccagtcaggagaaactgaatatccgctgcattccctatgatgttattgtatcatcttggataatgagcgatcggcagcgcgatgctgtcgctaggttgggattttcaagcatatttgatttgcgaactgatgccttagagagcagatcactcatcaggtggttgatggataaattggatccacatgacatgaccatacgcccaggggctggcaaggaactgaagataacaaaagatacggttcatctgattttgggtttgccatgtgctggaggaggcagggagtttactgattggtatggtgaagtggatgctgctgcaaaactgagacgtgatctcaatgttggtaaagaagaatttgatgttgtcaagcttcaagacaagatagtgcttggcaacgatgatgagctatcaattagatgcttttttctgattttattcaatcggcttctttttccttctgcttcttggggcattacaaacaatgaggtactcatgacttcaaacatggcccgaatgtctgatattgactggtgtcaactagtttacacggatttgtgtgatgctgccgcacgttggcataaaaggaacaaaacaaacatcacaacaacaatatatggatgctcactcattgttctgatttactatcttgatcacctacatcaccctgcatctcctgttaacaaatatggtactccacgcattaagttttttgacaatgagaccataaaagagttggctcgtggtgatagacacccccccccctttcgtagccgttcagaaacgtgttacgtcattgctccagaacggcctgtttctgccgttttcaacatatatgtgccacgtatcaagaatttgattggcaacaagttacaatgtttgccctcccagcagcggccaatgtttcaatcattgtttgatgctcatgacaaagaggttgataaatactgtgattcccttcagctgagccatcagatgattgtttcgaagcagattgaactctctgaaacatttggtgaaatgattgatgaagttctgagagctgcaacgcagcgcgattcacagccagaaggttttagtatttatgtttatttttttaaactaatcaagttcacgaattatttcctggaaaataatatatacttatacgatctcaaataa

SEQ ID NO: 3336 - DNA, 192 bp, Zea mays
  Peptide Sequence Number=SeqID_46711
atggcgacctccggcttgatggtgggggaaagcgagccgggctgcggcctcttcccctccctcagcctcaaggattttcatcaccagggctggggaggggagtgcgccgagttgagctgcagcgtgcctggctttcaggcgcgggtggcttcggagccgctcacggtgccggcatccgccacggcagcttga

SEQ ID NO: 3337 - DNA, 744 bp, Zea mays
  Peptide Sequence Number=SeqID_46712
atgccaggagcaggagcagcaggactcttccccttgcctcagcgggaggtggagtctgagaggctgccttcccctgcacctcagccagagatgccccctgcaccaccccagggcatcctggctgctggaggagaccccgacggagacgatgccgacgccggtggcagttcgagccatggcacggagcattcggaggagccggagctagagggatggatcgttagacccatcactcgtgacgctgctcgcgggtatcacttccacgacgctctcgataccctgttgtgtcaggatttcgaccgacacacttggtctatcgagtaccgttgtgtagtctaccagcatcgtcgcgggttatacccggaccagtgggaggctacttgcttgtattgctcgttgttcagcggggtagctgatggccttgacctgaagtactaccctcgtcgttcgattggcagtgctagaggtgtgattgtctcgccagttggtgagggcaatcccaggctgagcagcatggtcaacttggtcgtcgtgctcaacacagagttggaccacgcccttgacgagttgggcaaggttcgggcagaggttgcggaattgcgtgctaaatgtgtggcacgccactatcttgatggtggttctcccacccctgttgggattcagcacccttactgttcaccgcctcgtggtcgctttgactatggtaccccagactgcaggacccggatagatttggatccctag

SEQ ID NO: 3338 - DNA, 111 bp, Zea mays
  Peptide Sequence Number=SeqID_46713
atggagagtcatgatctccgggcagaatgggaatcacgacttgtgggtaaagaagaaggcgtcgaggcggatctccaggagttccaggacttcgatgagttcgaggattag

SEQ ID NO: 3339 - DNA, 1256 bp, Zea mays
  Peptide Sequence Number=SeqID_46714
tgctccctgacactcggcaaagatcttcgccgagtgcccgagaaaaaggcttcgccgagtgcttccggcactcggcgaagctattgattccggtagtgttggtagctaggcaagctaatgggcgcgcagttaagcatagcaggacgaccacgacgatgtatcacccgcagtgcgagctcctgacgatggcgcacgaaacgccggacctggacgccggccagccgcacctaaccgtctccggcgtcgccagcatcccggcagagctgagcttccacctgctgcactcgctcgacgccgcggcggcggtcaatcccgtcacggcgccgccgcagtccaccatcgactacttcctcggcggcgccgatccccaccagcaggccatgcagtacgagccgctgccgcccgccgcgggcggccaccaccagtacaccatggacatgttccgcgactactgcgacggccactaccccaccgccgagccgtacatccgcgggacaatgactggagccctcgtgttcggggccaccgacgacgacgactcggccgctgcctacatgcccggggggcactttgagacctccccgccgccgccacgcgccaccggccgcggcaggaagcggggcagggcgctgggcggcggcttccatgctgtgctggccaacggcgtcgagaagaaggagaagcagcgccggctgcggctcaccgagaagtacaccgccctcatgcacctcatacccaacgttacaaaggtcactgatagggcgacggtgatctcggacgcgatcgagtacatccaggagctggggaggacggtggaggagctgacgctgctggtggagaagaagcggcgccggagggagctgcagggggacgtcgtggacgcggcgccggctgcggtggttgctgccgccggtgaggcggagagctcggagggcgaggtggctcctccgccgccggccgtgccgcggcagccgatccggagcacgtacatccagcggcggagcaaggacacgtccgtggacgtgcggatcgtggaggaggacgtgaacatcaagctcaccaagcgccggcgcgacgggtgcctcgcagccgcgtcgcgcgcgctggatgacctccgccttgacctcgtccacctctccggcggcaagatcggtgactgtcaaatctacatgttcaacaccaagattcacaaggggtcttcagtgtttgcgagtgcagtggccggtaggctgatggaagtggtggacgagtactag

SEQ ID NO: 3340 - DNA, 258 bp, Zea mays
  Peptide Sequence Number=SeqID_46715
atgccgccaaagtcgaagaagtcagtgaaggggttgtccaagggcctgggcctatttcagggcagttcttcaagcagcagcatacgtcgagagctgttgatcgctgtacatggagatgaggatgagcagcacactgaggagcggcacaatgaggaggagcagcacaatgaggaggagcaacacaatgaggaggtgcagcacacgacatgggaccaggccacgcagcagcaccagccatgggaccagtgggaccactag

SEQ ID NO: 3341 - DNA, 561 bp, Zea mays
  Peptide Sequence Number=SeqID_46716
atgcttcttctcctcactctctctctcacttactcactcaaacgccgtcacccccgcgccctcaccgtcgccgccgtgccgtatcttcgtgccggccgcgcccgcccgccgtgccccatcgcccgccgccgccggccgcccgtgcgccatcgccgccgcgggtcccgccgccgcgcccgtgcacgcgccgcctccgcgccctcgccgccgcgctcccgtgccgccgcccgcccgcgtcgccctcacgctcgccgaagccgcgtccgccgtgcccgcgctcgccgtgtcgttgcccgcgctcgccgtgccgtgcccctcgtcgtgtcgcgccctcgcccgtcgtcgtgcccctcgcctaacccctcgcccttgcccgtgcccccgccgcggccccgcccaccgcccccgcccgtgcccccgccgcactcctcgtccgtcgtgaccccgccgtttccccgccgtgccctcgcccgccaggcgcctcgcccgcgacccgacgcctcgcccgcgacccgtcgtctcgcccgcgccccgtcgcctcgcccgtgccaaaacctctaa

SEQ ID NO: 3342 - DNA, 660 bp, Zea mays
  Peptide Sequence Number=SeqID_46717
atgaagaacgtagaccgacctccgcctaatccaaagcgcattataattcagtctactcaagagtgctttagtgtcgacataccccgtgttccggcgaacactgtcagtcacaaaccaatgcatgccggtgatgaggacgatgaatttatgcttgtattgaagaagcgtaaccttgctagtagtcctccaagaatgatgaagaaggtcgttacaaagcggatgaaagcagtggatcccctccgacagaggcttaatgttagatgcaatccccaagatgttatagtaagcatccagatcttaaatgccagacaacgtcaagctattgcacggaaggggttctccagtatacttgatatgagagttgatgtgcttggcagtagatcacatttatcttggctgatggagaagcttgatcataatgatatgacaattcgagctggaccagggaaggagctaaaaattacaaaggaaacggtgcaccttatattagggttaccaaatgctggtggaggaaagccattaggcattgacgaggctgttgctgcaaataatttaagggttgaacttggtttatccaaagaagaattcggtgttgcagctctacaagatcgtttaaggaaaggatttgacaatgatctaagcatcagatcctttttctga

SEQ ID NO: 3343 - DNA, 534 bp, Zea mays
  Peptide Sequence Number=SeqID_46718
atgacatttgcattcataaacattcatttagacatatatagaatcatcatcatcataccacaaaagacagatgcttcggctatgagaaaaacttcgaagaaagaggaaatgttcatgcttcgttgtgtacgaaaagaagggaagatgtttttcgccttcggctcaaaagtgaagtttcgttcacagcaaagcagattgtacacagataaaggagacaagatatattacaagatttctccagaattttttgcaggaaagtcttttatagcaactgttaagcttcagcccgtcattcttcagcttcgtcatcctgcacatattaaaaagcagaataagaaaggttcaaatttcaaggagaagccagccttcaggaaagcggtagctgtgcctcgagaagccactagggcgcagaagtcagcatgcccagcaataacttcgtcaagtgcatcaacctcgccttcaatgtattccaaggtgctgggcaggttttcagctgaaggtgtaaatttttcagagctggctccgatagagtaa

SEQ ID NO: 3344 - DNA, 348 bp, Zea mays
  Peptide Sequence Number=SeqID_46719
atggagagtcatgatctccgggcagaaagggaatcacgacttgtgggtggcaatgagattgttggttttggtattgactctagtaatgctagtccactacagccaaacagaatacttgctgagtatgttgatgtgtactcaccctttgctctacacaccaaacccccccatccccaagttgtcagcattgcaacccctgctcaggagaagatgaagccggagaaggagaccatcaggagttccaagattttgatgagttctaggcgtgggttagcggcaacccccagtcggctgcctgtgaaggccgcgtttatctacgtttcttttctgcactttgatttattgtaa

SEQ ID NO: 3345 - DNA, 246 bp, Zea mays
  Peptide Sequence Number=SeqID_46720
atcgacaacccggcgggggcccaggggaagcccggcccccgcggtgtcctcggccgcccctacccggttcaaccgcccactggccggttcaaccgccctggccccagcttcgccgcccgtccccccgtcccggcctcgcccgaccgtggttatgagattgatggttttggttatgactatgatgctggcgaagatgaagctgtggaaggagacttccaggagttccaagattacgacgagttctag

SEQ ID NO: 3346 - DNA, 75 bp, Zea mays
  Peptide Sequence Number=SeqID_46721
atggcgggcggaattgagctcgccggagctaaggagaggtggcaggccggtgaagatatacttcaatttttataa

SEQ ID NO: 3347 - DNA, 249 bp, Zea mays
  Peptide Sequence Number=SeqID_46722
atggcccttggccccctcggcgcggctccctggtccccctcgcgcgaggccccgcccccctgcacgcggcctccggccctctgcacgcggctccccatccctctgcgcgtgacccctcggcaccctgcgcgtggctgttctggccccggtggtgatgagaatgatggttttggttatgactatggtaatggtgaagatgaagtcgtggaggaggacttccaggagttccaagagtacgatgagttctag

SEQ ID NO: 3348 - DNA, 594 bp, Zea mays
  Peptide Sequence Number=SeqID_46723
atgcactggaactgttccccgggatcaggagaagacttccgaccagaactggacgatacaacagcgctggtaacccccatcagcacaaagctgcaaaggcctggtgggcgtgattcaggtcaaggctccgtccactcaagggacacgatctcgcctcgcccgaacccagcctcgggcaaaggcagccgacccaggaggattcacgtctcgcccaaggagctcgggctcaacctcgacgccggacgacggactccgcctcgcccgaccccagggctcgaactcaacctcgacgccggacgacggactccgcctcgcccgactctagggctcggattcaacctcgacgccggacgacggactccgcctcgcccgacccgaggacttggactcagcctcgacctcggaagacggactcagcctcgcccgaccccagggctcggactcagcctcgacctcggaagacggactccgcctcgcccgaccctggggctcggactcagcctcgacctcggaggagcctccgcctcgcccgacctcgggctcagaccgaccatgtcacaggggtggggccatcattaccctacccctagctag

SEQ ID NO: 3349 - DNA, 2445 bp, Zea mays
  Peptide Sequence Number=SeqID_46724
atggatggcggcaaccacccccgcggcggtgagccctccatctcacagctcctgcaaggccgccagaaggggctggagattcttctgtctctcgcgcggggccccatagcgccagttggtgtcggcggtgccaccggcccgcatcgccatacgaagtctcctctcccccgtcgccaaggcaaaaggctccacagagaagagatgggtccacagatcctagtggggggcaatccccaaaaaccattcgcaaaccgccgcgaaaatggctgcttgcgcgatggagttggggctgagattatgcagctccaccccgtagaaatgcagaaccgcccgcatgaaatgactcgctggcactctgaacccccgctcgtggaaagagacgaaactcagcacataccccggcgacggggatggggcggctctgctcggaggggccatccactctggctgcgggtcaccagagaggggacgaagcaagccatcggcaacaagggcctccaaatcgtccaccgtgacggtagagagaggccacgagtcgcgcggttgcggagacctaagcggaaggcgagtagcaggagtaaagaactgtcaccggacaggcggcacctttggcaggcgacgcttcacctccgccttaatgaccgcgtcaaaaaagccgcctcggagcactcgggctccgcgcccactactggtcagaggtcgaaggctggcccctcggaagggttcgacagccgcctcaggcccctcgggctccgcgcccactactggtcaaaggttcgaaggctggcccctcggaagggttcgatagccgcctcaggccacttgggctccgcgcccactactgatcaggggttcgtaggctggcccccgaagggttcgacagccgcctcagaccacgcagagcgagggatgactctaggtacgtccgatacatggccgaggctcgggctacgctcccgaggctcgggggctgctctcgcaaacccggctccggccaaaccgttgacagcgtcaacataccagcccaagaacttggaacctgactatgcactcgggctacggccagaaaacagcgccgcctgccctcctccgactgctgtgccactcgacagagtgaggctgacagcagctaagtctagcctcgggcgccataggaagctccgcctcgcccgaccccagagcttgggctcaacctcgacgccggacgacggactccgcctcgcccggccccagggctcggactcaacctcgacgccggacgacggactccgcctcgcccgactccagggcttggactcaacctcgacgccggacgatggactctgcctcgcccgaccccagggctcggactcagcctcgacctcgaaagacggactccgcctcacccgacctcagggctcggactcagcctcgacctcggaagacggactccgcctcgcccgaccccagggctcggactcagcctcgacctcggaggagcctccgcctcgcccgacctcgggctcggaccgaccacgtcacaggggggccatcattaccctacccctagctagctcatgctacggggaacaagaccgacgttccatctggctcgccccggacaacatgaaggccacggtttccccttactgtttctcccccctttgtgttctgtctcgcgccgacccatctgggctgggacacacagcgacaatttactcgtcggtccagggacccctcggggtcgaaacgtcgacaccgcgcgcgtggggctgcgaacgcgggaacgcgttcggtaaacaggggagcgcgaggccgcgcaggccgtgccgaggccacgcgagccgcgctgggacgcgtgcaggggctgcgccggggtccacgctgccaaaggcaggggccgtgcaccggggctgggatggccgcgcgcagggggccgaggggtcgcgctcagggggacggggagccgcgtcgctgggggccagaggccgcgcgcagcgggccgggggtcgcgcgcgagggggatcagggagtcgcgccgaggggaccaggggccgcatcgccggtggccaggacggccgcgtcgggggggcgagggagccgcgcgcgagggggggacgccgcgccgggggagcaggggcccgcgcggccggggagggccggggccgtgccgccggggccgaggctgcacagggggaaaacaggtggggcgcgcaggggaagaaaggggagagggagaggaagagagagagggagaggggagctcacctcggggatccaaatttcggcgatcaccgtctccaagacctagggcaccacggggagagagagagatgggagagagagaggttgctgcgcgggaaaaatcaaatgagagaaagagaccaggggagggggcgcgcgcaggggagggcacgggcgccaggggcgcgccagactgggctgagccagaccaggccgggctag

SEQ ID NO: 3350 - DNA, 657 bp, Zea mays
  Peptide Sequence Number=SeqID_46725
atgaggacccgcatggtcggcccgcccccgagatcggcgtgttttgtgggagaatctgccgccgccatcagagatgatcacggcgatttcagcgggggaacggagcttggttctgttatgggtgaggggaaagagataaacctgaccgctgggtcctaccggtcagagagcgaagagcgtgcacggagccggtttgtcggagagagattggaagttggcggtgaagcgccgactaaaatcgctccattcgtcgatgcagtgtcgagcagctcgagcgtcggtggtgtagacggccagccagcctcccggatcctgcttaggctcgtacttgtcgacgttggagactttgaagtttgggggccattgaatggccctaaggcgcagagtgagtgccgatactccacatgtgtcctcctgtcgtcgatgatgatgcctgtcccagggaggggagttgttgtcgtggtgcctcgaccatcctcgggctgtgccaccagtcgaagtcgttgccgactcagctctggtggcctgactccgcgcagggatgtcgtgatcccggtcatattcttcctggcgccggatctcgttctcatgtcgtcgttcgcgcgaggcgttgatggagcttcgtgcgtctcaccgactgttgatggtgtgtcgtag

SEQ ID NO: 3351 - DNA, 537 bp, Zea mays
  Peptide Sequence Number=SeqID_46726
atgaccacgccaagtccaccggtcggccactggcttgctcctgcgaagtcctcccaaaccctcgagccaccgcgcaagagtaaattgcaagaggcggcgccaaattctctctcctaccctcgattccacttctccatctctctgctccgatctcagcgctccagatggtggggaagagggtcacggtatggttttatagacgaggatgaggacccgcatggttggcccgccccgagattggtgcattttgtgggagaatctgccgccgccatcagagatgatcacggcgatttcggcgggggaacggagcttggttctgttatgggtgaggggaaagagataaacctgaccggtgggtcctaccattcagagagcgaagagcgtgcgtggagccatttattatgtcagatgaggtacggttatggcaagtataggttgtggcaagatgtaattgtggacattactccacaactcttcacactcaatcaaagatccaaatcagacaagtatcataagaaaaaacattcaagtacataa

SEQ ID NO: 3352 - DNA, 105 bp, Zea mays
  Peptide Sequence Number=SeqID_46727
atgggtaaaatgatgaaaaaggttaagtatgtaagctacgagcagcagcgaggttacgagacatcgaagaccaacttggtgaagtacccggggtctcaagtctaa

SEQ ID NO: 3353 - DNA, 447 bp, Zea mays
  Peptide Sequence Number=SeqID_46728
atgggcaagagcaagaaaggtgagagttcctcgcaccattccggtgataagtggaaacgcgagccgactcctccctcggaggacttcgacgactcggagtactcgaaggaggagttctccttcgagtcagagggcttgccggtccatgcctctcctccgacgtcgtctgatgattcagacgactcccaggggatcatcgcagaggtatggacctacatccgggtcgtcgagcgcgccgggctcgagggctcggatgagtcggaggtctcctcggacgaggagaactcctcggactcgtccgaggagggcggcggtgacggcgatggcgagggcgacgacggaggcaacgacgatggcgacggcgacggcggcgaaggcggcggcaagggcggcagtggtgatggcagcaagggcagcagcaagggcagcaacaaggccagtggctag

SEQ ID NO: 3354 - DNA, 216 bp, Zea mays
  Peptide Sequence Number=SeqID_46729
atgaggacccgcatggtcggcccgcccccgagatcggcgcattttgtgggagaatctgccgccgccatcagagatgatcacggcgatttcggcgggggaacggagcttggttttgttatgggtgaggggaaagagataaacctgaccggtgggtcctaccgttcagagagcgaagagcgtgcgcggagcccagtttatatgcaacaacaagtataa

SEQ ID NO: 3355 - DNA, 789 bp, Zea mays
  Peptide Sequence Number=SeqID_46730
atggccgcgcgagggccagctctgtgggtggcaggataccagagagatgatgatcagcccaaggctgctgctttaataatgcggaatgttgatcgacccccaaccaatccaaagcgtttaatcattgagtcaagtcaagaatgtttcagtgttgacattccgcgctcgacagacattgggaaccctacaaatacgcggtctgatggtgatcctccgcagcatagaaagaggggtgttgcagccgatgctaaaaagattcctatgcctaatgtggatgatgagatgactttgagccaccaaaaaagaagtgcaatatctcaatggatgccccaaataagacgcagactcaacatcagatgcaacccaggagatgttcttgcgtccattcagatatcgaatgaaaggcaacgtcaagctatagtcagaaaaggattctctagtattcttgacatgacaattgatgcaattggatgtcgaacacttctttgttggctcatgcaaaagctagaccccagagacatgactcttcgtattggttcagacaaagaactcaaaatcaccaagcagactgtccatcagatattgggtcttccaaatttgggtggtggaaagccacttaatattgatgaagcgaacgctgcggcaacacttcgggcctccttgaatattagcaaggatgaatttgttatttcaaagctccaggacagattgaggctaggccaggatgatgatctttctatcagatgttttttttattctcttcaacctgttgctattcccaatagctag

SEQ ID NO: 3356 - DNA, 839 bp, Zea mays
  Peptide Sequence Number=SeqID_46731
atcacacgtgggccttgggactgaacgaggacgcgccatggcaggacgtcgccgcaggccttcgtcaaagtgccgagtcctgcgaagggtgtccctgcccgctttgtctccgtcgaaccagcggctgcagcgaaggcctcgagcgaagggtggcgtctttgccttcgccccaacaaccaccacagggcgccccagcccctggagtagctgctggaggagacccagacgacggaggtggcgacgacagctcgagccacgacaccgacttctctgctaaccatgagctggaaggatggtttgctcgatccatcactcgcgacgctgctcgcgggtgtcacttccacgatgcgctcgacaccctgctacgtcgggcatttgaccggcatacttggtccgtcgagtatcgctgtgtggtctaccagcacggtcgcggggtctacccggaccgctgggaggcaacctgcttggtgcgccgtccggagaacagtctccagggtgcagaggcctgctcagagcactattctatttctgagcgggactcagctgaggcaccatgcaagatgttgcacggcgtgcgctttcgcactactgctcggttttcggtgggcacagtcaacctagccgccgtgctaaacacggagctggaccatgcactagatgagctgagtagggctcgtgctgagatcgccctgctgcgagctgagcgtgcggaacgtcgtcacctggacgatggttcccccgctcccgtcgggactcagcacccgtaccgctcacctcagcgtggacaccagtcttatggcaatcccgactgcaagaccaagataaatctagaaccatag

SEQ ID NO: 3357 - DNA, 228 bp, Zea mays
  Peptide Sequence Number=SeqID_46732
atacctggtccgctaggcgctatcacgatcttcggcaaccagcagacggcgcgcaacatagagcgggacttcgtgcctggtcagaggaacgctgtttcggtctggggcaccggactgtccggtggtgcaccggacagtgtccggtggtgcaccggacagtgtccggtgcgccaggctatctcggccgaagaggccgctctcgggaatttgctgacgacgtacggctaa

SEQ ID NO: 3358 - DNA, 1164 bp, Zea mays
  Peptide Sequence Number=SeqID_46733
atgccttcgcactttcctcgtgatggggagcgcccgcgttgtcttcgtctcgttgcgggaggagcgcaacctcgtggtggttggtacctttcagccatcgctcggcttcaaggattttcatcaggcagcctggctgcatcccctcaacgatggtcacccaagatggtgaccactagttcaatggtggggagaagcaagccaggctgcggcctctgccccgccctcagcttcaaggatcttcatcatccttgcttgggaggagggcgaggcgagccggggcctgccttcgcgtgggctagcgtcccgcttcttcctccggcttctgggggtggaaaccatcctccagctctgcggaggaggcgccctccagccatgccggggaaggcgaactgctgctgcccagtccagggtgcagcattccgtcttccgtccgggcgacggtggccagccgcaccggggggtctcacaacacgtcgtacgctgcgagggcgctggagaaagcttctccgccgacgagaccatcagcgccacccgcggacctacctctggctctttggctttaatgtctggttctcgtccctcgagtggggacgcgaacgagagccttccagcggtagcgtccgccctgggaccatcgctgctgctgcagaggtcgctggcggcgatggctcaggcgcagtgttgacatcttcctttgaggtggagatcttccgaccgtgttgctgtccgaggtcgggtcggattccgccgaaggaatggtttatctgtagtgtgcatatgttttttgcggccgccgaggcccaaacatatcatcgtcgtgttgtaaagctgcgtttcttttccccttgtttcgagtatcaggacttgtttgtcggtagcagaattacttgtgcgagcgagagttacttttcacggaaggtgatgagtgaggattctgttatcgatatattcgagaaggcacgaaaaatcatttcggcagaaaagttttcgagcgtcaagacttgtccggtcagcggaatcgcttatccgagcgtgagttacttatcacagaaggtgatgagtgaggatcccactatcgaagtagtcgaaaagcgtgtaagacgttctgacagaaagactttttccgaggaaaattttgacacagagggggttccccccttctag

SEQ ID NO: 3359 - DNA, 372 bp, Zea mays
  Peptide Sequence Number=SeqID_46734
atggcggtcagacgggggatttctgcattgctcttcctagaaactttagcggattttctgaagctagtagaactttgtaaaggcctcgtagtgttaccctgcctcgcttccttggtagaggtgtatggggttcgatcaaccccgtggcacatgggtaacatgacttgtgggtacagggtacaacctctgcagagtgtaaaactgattaggcccgtaacacaaaggcggccacgcagggcccgttacaatgggccagatcacgcgtgggcctcagagctgaacgaggccgcgctgcgggatgacttcgtcgctggtcttcgtctggtgccgaatggagcgaagggtgtccctgcctgttctgtctctgtctga

SEQ ID NO: 3360 - DNA, 429 bp, Zea mays
  Peptide Sequence Number=SeqID_46735
atggcgtcgtcgtcggatgcggtgtccagaataacccgaaagtcgtcgacgttggcgacaaccatgaggcccccctgcttaacgatggacagcgcggtgcagctgctctggaccgcgtccaagcggcggcttcgcgggagcttgtcgtacacagcggcgcatgcgaccacgaaaaatttggttggaattaaagatggctttgttcagtcgaagtcagctcagtctgggtgcaccggactgtccggtgttgcaccggacagtgtccggtggtgcaccggacagtgtccggtgcgccaggctgactcaggcgaacttgctgctctcgggaaatcgtcggcgacgtacggctataaatcaccggactgtccgtgtaagggcgagaggctccaagttgtggagattcctcgcaagtgggatatagtaaagtga

SEQ ID NO: 3361 - DNA, 144 bp, Zea mays
  Peptide Sequence Number=SeqID_46736
atgcggcggccgcctgtgcatgcactgaggctgagcgcgctgctgctgctcctctgcctgtgcgcgttccctgccccagcgtgcttgtgcaacataagacaagttagaaatttaactatctacgtgcggttattaatgtcttag

SEQ ID NO: 3362 - DNA, 375 bp, Zea mays
  Peptide Sequence Number=SeqID_46737
atgccacctagatcaagttgtcttctcgtcgtgcggctcctcctaggccacctgttcttctcctatgggggtttatatatcgactgcgggtttattcataaaaaccatgggggctcttatgaaaaatgtgctcacgaagggatatggtgcgatctgagccattggatcagatatgaacgagccagattagactggcgcggttgtgaaccggtaaaatcatacccttataggataaaatatttagaacagtctctaaagtatgaagatcgctcagctctgatgcagcgcgaaggcagggacacccttcgctccattcggcaccagacgaagaccggcgacgaagtcatcccgcagcgcggcctcgttcagctctga

SEQ ID NO: 3363 - DNA, 662 bp, Zea mays
  Peptide Sequence Number=SeqID_46738
gattctttccgccctttcaaaagagatcgtcaagtctggatggtcaggatgcgtgcattgggaagggcagcagctgcttgaagacgacccctcagtcatgtacctcactgcatacctgctcacctttggatgtgcagtatgatttcttggctcggcaccaccgtcagatgattgcccgagcagaagatgcagagaagtgcaaccgtcagctacatgtggatctcaccacagctcaagcccgtgtagctgccttggaaagtcgtgaagccattgttgttgaagccctgaagcaagccaaggatgagcatgtccaaaagctgatggaggcctacttggtcacccataaccaacaaggagccatagtcttggaaggaattccagtcttccctcaggctatgaataagcaagagcaccccgagtcctcccaagatcccccgccggagttgtttgagcccctcaccatgaagaagattccagcaccatcccttgaagtcaaggaagaagctgcaagcacctcgccagcaccgccaccctttgaggaactacaagagccattccagcttgaagaagagttcgaccccgtgctgccatctcagtcgccgccagaagaagtcatcaacatcagctccctcttaacccatccaggagatgcctcagattga

SEQ ID NO: 3364 - DNA, 1079 bp, Zea mays
  Peptide Sequence Number=SeqID_46739
atgcatcgtgtcttcccaccttccgagcccccgggcgggggacgcccggaatccttccgtcttgtagtcggaggaacacaacttcgtggaagtcggtaccttttagccatcgttcggcttcaaggattttcatcatgcagcccggctgcatcccctcgccggtggtcacccaagacggtgaccaccagcttgatggcggggagaagcgagccgggctgcgatcttggtcccgccctcagcttcaaggatgttcatcatcctcgctggggcggaggccagactgaaccggagctctacctcccgcgcgggttcgtgggtcagcctccccttcagcatccaagggagagggcgctcactagccctgcgagcggggcagacttcgacaacgcggggccgatcgacggtgggtgtcgccagctccagcatgttgggctcgccggcttggctcccgggctgtcctgcctttgcaatggtacagggcctccgcgcggaggtcggtgctctgctcgtccgggaggatccgagtggggatctgccgatgggctgatgctccactcgaaggcgccgaggtggatgcggcccgagaagtccccgtcgccgacgggatcactgccaccatccgtgctctgggcctccggctctttgtacttgtcctcgcccctcgagcgtcggcgcgggcgagggcaaggttgcagcggcttccgccctagggccatcgctgctgccgtggggacggaaccggagttccgtttgtattggcaccttgaatgccggtgtcttgttcaatgcggctgtcgaggcctgaacgtggaccccctccggcgcgccttcgatgagccaaagccggaggtagcagtgtcagcacgggacggaaggcagagttggcttcgaaaaggagctaggcagtggccctcggggtgtggccgggccgagccccctgctcgggccggatcctcgatgaagaccctgggcggcagggccggggtggggtgctctgatgtcgccttccagaggaggggccctccgacgcgtcgcatcgaggctagtatccgcgaagaggttatatgtataacggcaag

SEQ ID NO: 3365 - DNA, 552 bp, Zea mays
  Peptide Sequence Number=SeqID_46740
gtattcgtcgagccgcaagtcgactagtcgtgtcgatgcggtaatcctgcgactgcatcagtactgcgtgcgatcaactgtcgtcatcaaagtccccgttgatcacttcgagcgatgcgcagcgtctccgccatctagcatacgtgttcggcagcaggtgactttgtcgaactggtccctcggagggcaaatgttggggcgaaggcaaagacggcacccttcgctcgaggtcttcgtagcagccactggttcgacggagacaaagcgggcagggacacccttcgcaggactcggcactttgacgaaggcctgcggcgacgtcctgccacggcgcgtcctcgttcagtcccaaggcccacgggggcgcctccaggggaagcacaggggagcagctcctcacagactctatctcctgctggagcgagaaagaagagccctgctgctcctgtcgtcgacgttcctgctcctcatgcaggcggtggtgcagtctctccaagtggctggactgtccgggcacgggacggcgaagcggacgctcagcaaggcgggagg

SEQ ID NO: 3366 - DNA, 369 bp, Zea mays
  Peptide Sequence Number=SeqID_46741
atgaagaagacgcttgaagatctccaggcggagcatcacgccggggtccagcgcatcgccgcatgggccgacgaggcgagcacggcactggtgccgctaggggtgagtcccatcccggtgttggagctaccgacgtccatctccgacgcactcctggtgctgtactccaccgccgaccgcctccgacgcctggaccagatccttggtgcctgcctggaggccgaaggcaagatgctctatgttccagggattgggaagaggctctccttcagttgtcgcaaggcagacacacctgggtcggcttacttctgtcaccttgaagggtccttcccaactgggggagagtttgtggagcacttctcagtttag

SEQ ID NO: 3367 - DNA, 366 bp, Zea mays
  Peptide Sequence Number=SeqID_46742
atggtccttggccttcccaaatttcaccaacacgaagaaatggtagaagagggaggtgcagggcgccacccccatcaacatctcgcagaggtggtcaaagatggccgcctagaggatggagtggggcgtgaggtgctgaagctagaggccgagctcctccagcagcagcaggaagaaaggcgagatcggcagcgccaacccgctggaaaggtaggagacgaagagcacgaactccccggcagcgagatcgccgaggggagaggcaccggcgcggatccttccggtgaacgccgacgccccccatccgagcaggttgcgcaccaagttgagtgccccctcgggctggaagtgctcgggatgagctag

SEQ ID NO: 3368 - DNA, 711 bp, Zea mays
  Peptide Sequence Number=SeqID_46743
atggtccacatcgtcgagcaccatgatttcatgcccgaggacttcccggtggaggaagaggctgcatcttccacatcgcgggccaccaactgccctgcgccaagtgctactgctgtgcactctgtgcggcagcacactcctgcgcaaacggcaagggcaagaagggctgcgcctggggccttgtctgtagctagggagttgctacgccaccctcctagctccacggcctcgccgggggccatgaagcagtggtgtgacgatgtcgaccatctactcggcatggtgcattctagctcagccaggcccaggcctcggtcgtcccggcgtcaacatgaggcgtcggcgtcagtgcgctcaccctcggtgagggacgcaccgactgaggacatgctggcagagctcaaccgcaggcgtgcgggagaggacgctccagtctctctggagaggtctagtgacctgcgggtagaactcaaccgcaggcgtgcgggcgaggatgcccgcgtctctctagagagggcgcgtgagtacggacagaatgtcgagggtcgcaacctcgactacgacttcgctgtggttgcaccgcaaactccaatgggtgcccggatccaggcgggtgtcccattggccggcataggctatgccgcactggcggatcatctccgcgcgacgacttggccatccaagttccggccacacctgccggagaagtaa

SEQ ID NO: 3369 - DNA, 201 bp, Zea mays
  Peptide Sequence Number=SeqID_46744
atgaagtattatttgaggttggtattgtatctgaagataaatgaagtattatttgagatgatggtggtttatacccccagaggtatgaagatagagtactacgcattgcattcatatgcattcattgaagtgatatttgcagatgatgtggttttatacccccagaggtgcttgttgctcatcaaggggagtgggaagtag

SEQ ID NO: 3370 - DNA, 115 bp, Zea mays
  Peptide Sequence Number=SeqID_46745
gacgagtgcccctagtggccagggtgtcgcgctccacaagatcgtgacggacataggaggtggtgtatcggttgctaaggcacagcatccttggaaggctgtagtagggccatga

SEQ ID NO: 3371 - DNA, 255 bp, Zea mays
  Peptide Sequence Number=SeqID_46746
atggaaaaagagattcatgggctagaatacgatccaaggaccaagatcattgacggagatatccttatgagggtcggaggaggcaaagacatgggtggtactagatcccgatgggggcaaaatattacagactcagctagaagaagagaggaggcaatgtgtggagttggaggcgaggatgatggccgagaagacagtttgcttggccaattagtagaggatagcggatatgtttcattaaatgtagagccttga

SEQ ID NO: 3372 - DNA, 162 bp, Zea mays
  Peptide Sequence Number=SeqID_46747
atggggctcggtgtatgcggctcgctctgccaaggtggtgatgaagatgatggttttggttatgcttatggtaatggttgtccacattgcaaccactgctcaggagaagatgaagtcgtggaggaggacttccaggagttccaagagtacgacgagttctag

SEQ ID NO: 3373 - DNA, 693 bp, Zea mays
  Peptide Sequence Number=SeqID_46748
atggctcgccccagcctcgggcgactactctgggccagcaacagcacccgaccccaccacgtggatggctccgggaccgccacgtggccagagaagatgatatactacaaggtatcaacagtgagttcggacccctatgggaaagtgctggacccctgtatatacaaactaggcctccgggtaaagtctgggacctccacgggcacaaaccggacccctaggatgggttctggacccctcagtgtggggtccgggccactcacagcagggtcccgggattctgagacagagaatacccaggccttaatcaaggccaggcgggggtccggagccgacacgtgtccgaaccttaccgtatacgcttctgctccccgctcaggcggagccccgatggtgccacgtggcatggtgcacatgacgcgaagtgtcgcctccgcatttaatgagacctgtccattccacgggcaggcggcgaccagtccattccgtaggcggcgtgcctgtccattccactggcaggcggtacgcccatactgctgcgtgcactatgctcatcatcactcgcgcgttaccgaggaagcagccacaacatatcaatactacatggactacggatataatggcgccagaagattgctcaggcgtactcgcattggatacttctataatgtattccctccgttttgctcctag

SEQ ID NO: 3374 - DNA, 834 bp, Zea mays
  Peptide Sequence Number=SeqID_46749
atggctcgtcttagacacactgctcgtaagtcggtgatccctttcctgccgtctcgccttgcggagcgtcctctgcgccgcacagtgtccggaggtggagtccgtgaggcgccgtccctctgttcctcagctggaggcgcccctgcaccaccgcaggacgccccggctgttggaggagctactggaggaggtcttagaggagaccccgacgatgacgacgacggctcagaccacaacaccgagtcctctgagccacaggaggcttttgaccggcacacctggtcgatcgagtatcattgtgtagtctaccagcacagttgcgggaggtacctggaccgctgggaggctacctgcctagtacgccgtccggaggatgacctccggggtgcaaaggctgtttcagagcattactccatctccgagagggacactacaaaggcggctatgcaggacgcagcacggcgtgcactctcccagtactgttccttattcggtggggtggccgacggtcttaaccttaggtactacccccgtcgtcctactggtagcacagagagtgtggttgtctcgcctattggtgaggataaccctaggttgagcagcacagtcaacctagtcgttgtgcttaacaccgagctggaccactctttggatgagctgagcagggctcgaacggagattgttgagttgcatgctgagctggcagagcgccgccaccaggagggtggttcccctgctccagttgggactcagcacccttaccgctcgccgccacgtggtcaccacacttatggttcccctgcctgtaggaccaggatagatctggatccttag

SEQ ID NO: 3375 - DNA, 213 bp, Zea mays
  Peptide Sequence Number=SeqID_46750
atgagggagggggagagtgagcggggctctggggctcaagtggccgagggcggggcggttgcgagctctacgcgcgacgtgggcgtggagttctcgggtgttacaatcacggtcacagggcaccccttcccgccccctattgcacatgactgcgtcaccggcgacctcaccgccgtgaacacccgccaccgcgccgtggaccggccgccctag

SEQ ID NO: 3376 - DNA, 156 bp, Zea mays
  Peptide Sequence Number=SeqID_46751
atggtttgtttacagatgatgatgaggaggatggttatgtttatgcttatggtaatggttgcctttggtgcaatctatgctcaggtaaagaagaaggagaacggtgtcgaggtggatctctgggagttccaggactttgacgagttcgaggattag

SEQ ID NO: 3377 - DNA, 615 bp, Zea mays
  Peptide Sequence Number=SeqID_46752
atgaacagtgcgcgtctgcgcgcacagaagtcagagctggcgccaaaaggcgcaccggacagtgaacatgacatgtctgcattacgagccgaggctagagcccaagcacagcacgacgctcgtacggggctggcccaggcactattaaatgggtcgtgcctcggcccggcccgtcagacacgacccatttggccatctatacctccgcacgataatgttggtcctcgcctcagttgccgccacctcattcgtcatcctgcttcttttctctctcacctcatgcctccgccttcgcgccaccccattctcggcagagggcgtgggagtaggcgcctcctccccatattcgtccaacaccagccccaacaccaatccgcgcagtggctattccacgtccacgaggacgtttcacagtatgcgcgcaccatcgttttcgccatcgtcggacgtcccattcgtctttcaggccttcgccctattcttcctccccaacctactgcccccgcctacggtcgtagcagcgagccgaccgatgctcttcgacacgggtacgaggcgagtcggtcttgctcctggcctttcttcgtgcgtgccgctgaggaagtccaggtctga

SEQ ID NO: 3378 - DNA, 1182 bp, Zea mays
  Peptide Sequence Number=SeqID_46753
atgaccgtccgggccgcggccgtgctggtggccgccgccgtgctcgttctcctcctcccgggatgggcggcggcggagtggaatctcacgaagaaaggcagcgtcgtcacctacgatgggcgctctctcatgatcgacggcaagcgggacctcttcttctccggcgccatccactaccccaggagcccgcctgaggtgtggccgaagctgatcgagcgggctaaggagggcggcctcaacacgatcgagacgtacatattctggaacgcgcacgaacctgagcctggcaagtacaattttgaaggccggttcgacttgatcaagtacctcaagatgatccaggagcatgacatgtatgcaattgtgcgcatcgggcccttcatccaggcagaatggaaccatggtggtctgccttattggcttagagagatcgaccacataatattccgggcaaacaatgatccctacaagaaagaaatggagaaattcgtgagattcatagtgcagaagttgaaggatgctgagttatttgcatctcaaggaggacccatcattctaacacagatcgagaatgaatatgggaacataaaaaaagatcatgcaacagacggtgacaagtacctcgaatgggcagctcaaatggcgctcagcacacaaacaggagttccatggataatgtgcaagcagtcttcagctcctggtgaagtgatccctacttgcaatggaaggcattgtggagatacatggacactacgcgacaaaaataagcctatgctttggactgagaattggactcaacatttcaactttatgaagcaaaatctcacctccactcgcataccagacaccaagaagcgaggcgacgccgtggtcgagacaaacatcaataacgatgccttcacgaagggagtaacgtctaggacaccaccatcgcttgtccgagaagaaccgaactttcgctcagaagacaccctcaacaagggaagcgtcactatcgctaaagctttcgcccaagatgtccccgccacatcgtcaggctacgaccccaggaaaaagcatgcagcctctatcgtcgtcgctgccgcccagacatcccgcatacacccttacacagagggggaagcgacacgtcgactgccgcagcagccgcatagctgcatcgtccgccaccccttcggctag

SEQ ID NO: 3379 - DNA, 696 bp, Zea mays
  Peptide Sequence Number=SeqID_46754
atggcgggggaaagcaaatcgggctgcggcctctgcccctccctcagcctcaaggattttcatcatcagtgctggggaggggagtgtgccgagttgggctgccgcgtgcctggctctcggacccgagtggcttcagagccgctcccggcgccgccttccgccacggcagctggaagaggttcttccgccgacgagatagtcggggccacccacggaccgacctccaactctacggccttctacccgtccttgcctcacgagtttgggcacgggcgagggcctcatggcagcagcatccgccctgaggtcattgctgctgctgttcggccctccggagcagaagtcgtcgtcgtcgtcgctgctggagcgggcgacggcgagccgttcgtcggtcttctgttgctccgcaggccccccaatcgagtggggttgttcgtacctgcggaggggtccctcggctcggtcgaccttactgtccgaggcttctcttgcttagttaaaggaacccctcggtcgctcttcgatgagccgaagccaggggtagcggtgtcagcatggacagagagtggagatcctcggaccgcgtcgccgtccgaggctgggccagacctcgccgaaggtgtagttgacgccgagggtgctgctggtcccttcaaccgtcaagatccgagcctgcaggatcagattatcttgtag

SEQ ID NO: 3380 - DNA, 174 bp, Zea mays
  Peptide Sequence Number=SeqID_46755
atggggagtagctctctccgggcagaaagggaatcacggcttgtgggtggctatgagattgatggttctggttatgactatggtgctggttgtcagcattgcaaccactgctcaggcgaagatgaagctgtagaaggagacttccaggagttccaagactacgacgagttctag

SEQ ID NO: 3381 - DNA, 516 bp, Zea mays
  Peptide Sequence Number=SeqID_46756
atggcacgtacgaggaaaaccgcacacaagtccactagacctattggcgtgcctcgtcatcagttggctccaagacatgaaggaagcagtagtggcagcaacgatccaatcgaagacttggaagctaaagtggaacaacttcagatggagctacgtcaccgaaatagggtgtgggcacaggacagtcagtgtatagctgagttagcagctgatgtcagacgcttgcaagacgagcttgctgaacgagatttggcggttgattgggctgtcaactcacgttcgattgcctgggaccgtgaagccaaagctcgtgctcgtgtggcagagcttagtgcggccctcgacagcttgcaggtgtactgcaatactttacatgaggaagtacatgtactatatgcgcaactgcacccggacgtgcctaacgaccctgttgcaatgggagccagaccatcagggacagcaggtgaaggacctgatggggagttggacctttttaggtgtggtggaaccgcctga

SEQ ID NO: 3382 - DNA, 1143 bp, Zea mays
  Peptide Sequence Number=SeqID_46757
atggacgatccctcctccgcctccaacaagcacaagcgcaagcgggggcgcaagcccaaggcatcgccaccctccctcgaccgctcctccgcctctccctcggtcgcccccgctccggctgggcgccgtggccgcaagccgcgacgtcatgaggccctcgccggcgtggacgccacgcgtcctccgtccccgccctgccgcggggagccgaagccggtggcaaacggacgcgatgtggtggcagtggcggagtgcggccccgcgagctgggatgaggtggtgagggtagtgccgtgcatggacgctgtggtcaaggttttctgcgtgcgcacggagcccaacatctcgctaccgtggcagcggaagcggcagtacagctccagcagcagcgtatttatcatcagcggccgccgtgtccttaccaatgcttactccgtggagcactatacccaggttaagcttaagaagcgcggctccgacaccaagtaccttgccaccgtcctggccatcggcacagagtgcgacattgcgcacttaactgtcaatgacgatgaattctgggaaggagtttcacctattgagtttggaacaataccagtccttcaggatgcagttactgttgttggctatccaattggaggagataccatatccgtgacaagtggagtggtctctaggatagaaatactttcatatgttcatggttctacagaacttctaggattacagatagatgcagctattaattcaggaaattcaggtggcccaacttttaatgataggggaaaatgtgtcggtatagcttttcagtctcttaaacatgaagatgcggagaacatatgttatgtgataccgactccagttattacacatttcattgaggactacaaaaaatctggagaatacacagactactgcccctcacttttaactttctttcaggctgcaactgagtacattcattctttatcaagggcacagcctgctcgttctctcaatggtgctggcctttgtcctgctagtagatcacttagcacccatgccaccactacgtcaagcacaccacagttgaaagcacgccacgtcaagcacccaggccgccactacgtcaagcaaaacagaagacgagaagaactgatgtag

SEQ ID NO: 3383 - DNA, 516 bp, Zea mays
  Peptide Sequence Number=SeqID_46758
atggggatgaacatggtctccaaaggtgtacagaacgtgctggactacctccaggctgacttctctgatatggatgtcatcagcatatcaggtttccccatgagtgctggtcgattcctgttggctataagatattcagatagtatgcagtactcgcgatccaacctatttgggatgcagtactcgcgcaagcgctacttcgtgctcgaggacgccgcgctccgctgcttcaagtctgcgccatcctccaagggcgagttgttttttgtgcttcaagtctgcgccgtcctccaagggcgaggtggattctttcatggtgttcgcagtataagtttcggggttgaccttcaagaaataaggctgatgggtgtactgcagagaattgcaatagcttatctgttgaccgccctctgtgagatttggatcagaggagatgaagatgtagactatgccaagtttttcttcagctctgccaagttttgcaacttgcagaacatccagttgttcagaaactga

SEQ ID NO: 3384 - DNA, 336 bp, Zea mays
  Peptide Sequence Number=SeqID_46759
atggcgcagccgaccgttggcagccagagagccgttggcgcaccggacatgtccggtgcacaccggacagtccggtgcccccttctagccgttggctcggccacgtgtcccgcgcagattgcgcggccgaccgttggcccggccgaccgttggctcaccggacagtccggtgcacaccggacagtccgcagtctctgcgacgctaccacgcccgaaggattcggccccgaggcttccaagtgggagatttggtgcttcggctacgacaagacgcccgagggcgccacaagctcactcctccctgggaagggccattcatcatcgccaaaattttga

SEQ ID NO: 3385 - DNA, 492 bp, Zea mays
  Peptide Sequence Number=SeqID_46760
atgggtgaagcgctcttgggcaaggaaataaggttacagataccgaacttgtcaagtgattatgagcatctacagggttgtccaagttggctccaagacatgaaggaagcagtagcggcagcaacgatccaatcggagacttcgaagctaaagtggaacaactttagacagagctacgtcaccgaaatagggtgtgggcataggacggaccggaaagccaaagctcgtgctcgtgtggcagagcttagtgcggccctcgacagcttgcaggtgtactgcaatactttacatgaggaagtacatgtactgtatgcacgactgcacccggacgtgcctgccgaccctgttgcaatgggagctggaccatcagggatagtaggtgaaggacctgatggggagttggacctttttaggcctcctccttccatgaacctggctgacgatcggtctcctgcagcaggaaatgaagaaaccaaggacgacgaagactag

SEQ ID NO: 3386 - DNA, 204 bp, Zea mays
  Peptide Sequence Number=SeqID_46761
atgacggcagtcggggtcagtgaggcattgtacgccaaggcgatagatagtgcttttggcaaccaaaccccccagccaaacagccgcatgtctagaggttctctagaggacatggttgctggagtgacttggccgtccatcttgccaccgggttggactgtcgagtgggaccctgcttcggctgaggaggagcatgaggagtga

SEQ ID NO: 3387 - DNA, 432 bp, Zea mays
  Peptide Sequence Number=SeqID_46762
atgaagctccccgagcaaggaatcggactttgcctcatcggagaagccagtccacggtcgccggacttcacccgaccgccggtgaacgtagaccagatcgccgtggttaagccggagcacccgccgccgacgagttcacccgcctgtgcacgtggacccactgattccgaccaccctcgccgtcgagccgtacctcgttgtgaccgccagaacctcccagagccaaccccgcccctcgccggacctccctcgccgccgcatacatattcttattcattgcattcaatagattgcaacctcgctgacggagagtatgtcctcgtgccggagcaaggagttgctcaggaggtagcctcggatccagcaccagagcctgccccagaggatctgcctgccccagctttggaaggcaagccccggttttatgcataa

SEQ ID NO: 3388 - DNA, 144 bp, Zea mays
  Peptide Sequence Number=SeqID_46763
atggccatgatgggttcaacatcggacaagatgtacctctgccaggtggggaaacagcagacttttgctgtttttgttctatggtggtgcccaaagaagaacctcagcagtgaagccgcgggaggatgttggcctcccacatga

SEQ ID NO: 3389 - DNA, 534 bp, Zea mays
  Peptide Sequence Number=SeqID_46764
atggaggcaattgctcttcacggactgagcaccttctacggattccaccccttggagctgtccactcaccccattggcttgttccccacggagaaggaggacgacccaatgtggaagaaccgagtggagcatgccaaggatatctgggctatctacccaggacagactgctcacttgacggcgaccaagatcactttggataacagagaggaacttgtggttgacttgtccactgagatggtggaaaaagacctacaagtggaacaattgtcaaatgagatccaagagcttgaggagctagtgggaaccagggagaacaccattgaggttctcgaggatcagcttatcaacacgtggaagctaaccagcacctggatatgcaccaccaggagatccaggacatggaggccaacgaggatgtcgacaacgaggggggagaggagcctgcctccagcttggacactgctagctcagggagaccgccttcccccgagtcgagtgttgcctcgtttgctcactaggtcgtcgagatag

SEQ ID NO: 3390 - DNA, 375 bp, Zea mays
  Peptide Sequence Number=SeqID_46765
atgacctggaagccactccaactagccgtagtccatctcccctggctcaccgcccgcgaacgtgaagaagaaattgaagtaactgaagagaagacaccaccaccttcggaatctcaggccgggaattgtttctactttgatatctgcggatccgagcctgactcacctgtaaacgaaggcaagccccggcgtgctgaccaaggaccctttaactggtcacatgcctcgtcatggcatacccttgagagtcttttccttagtcgggtgaggaagcgacaaatttttgttgcttttgctccaaggtggtaccaaatgaagaaaaacaagactgaagtgcgggaggacttggtcctccatataggatcttttgcttaa

SEQ ID NO: 3391 - DNA, 300 bp, Zea mays
  Peptide Sequence Number=SeqID_46766
atggcgcgggggctgggtcccacacgtcatgcaaaccggctcagagcagaagaagccaaaccgccgcgcgcgggaccgggaaagggggataccccgaaaaggatccttccccgtgaaggaaccaggctccgagcctccctactgatcagaggttcgaaggctgcccccccgggagggttcgacagccgcctcagatcgcgtgggccctacaccccactactggtcagaggttcgaaggccggcccctcggaagggtaccacgaccacctcaggctactcgggctctgcgcccattactga

SEQ ID NO: 3392 - DNA, 660 bp, Zea mays
  Peptide Sequence Number=SeqID_46767
atggagagtcatgatctccgggcagaatgggaatcacggcttgtgggtggttatgagattgatggttttggttatgactatgatgctggtgtcaaagattcaacaaaaaccaatagaaagaacaagacagggttcaaaacaaaggagcaaaaacaaaccgaagtgctccctggtctggcataccggactgtccggtgcaccagggaggattgccttcgaactcttcaccttcgggtttctcaggcgcagcccactataattcaccggactgtccggtgcaccaccggacagtgtccggtgctccagagtgaagcggctctgaactggccagcttcgggaaaatggaaggccgctccgctaaaattcaccggactgtccggtgtacaccggactgtccggtgcgccagcggagcaacggctacctcgcgccaacggtcgactctgacagcgaacagtgcgcaacagtacacgcggcagaagttagagcagaaggacagaggggcaccggactgtccgttaaattcacatttagtgaagcaactcattgcaagagaaaacttgttgtcggggaccataattaggggtaccctcaagactcctaattctcagctggtaacccccatcaacataaagctgctaaggcctggtgggtgcgattaa

SEQ ID NO: 3393 - DNA, 897 bp, Zea mays
  Peptide Sequence Number=SeqID_46768
atggcgcctcctttgacatggtcggtccgagccctgggttgggcgaggtggaggctcctccaaggtcgaggtcgagtctgtcttccaaggccgaggtcgagtccgagcccctgggtcgggcgaggcggagaccgtcggctgaggccagggctgagtctgagccctggggtcgggcgaagcagagttcgtcgtcttccggggctgagcccgagtccgagccctggggtcgggcaaagcggagttcgtcgtcttccggggctgagcccgagtccgagccctgggggtcgggcgaagcggagttcgtcgtcttccagggctgagcccgagtccgagccctggggtcgggcgaagcagagttcgtcatcttccggggctgagcccgagtccgagccctggggtcgggcgaagcggagttcgtcgtcttccggggctgagcccgagtccgagccctggggtcgggtgaagcgaaattcgttgtcttctagggctgagcccaagtccgagccctggggtcgggcgaagcggagttcgtcgtcttccggggctgagcccaagtccgagccctggggtcgggcgaagcggagttcgtcgtcttccggggctgagcccgagtccgagccctgggatcgggcgaagcggagtttcctatggcgcctgaggccagacttggctgctgtcagcctcactctgtcgagtggcacaatagtcagagcggcgcaggcggcgctgtcctcttgtcaggcccggtcagtggagtggcgaagtgactacggtcacttcggctctgtcaactggagggcgcgcgtcaagataaaggtgtcaggccacctttgcattaaatgcccctgcgatttggtcggttggcatggcgatttggccaaggttgcttcttggtga

SEQ ID NO: 3394 - DNA, 1002 bp, Zea mays
  Peptide Sequence Number=SeqID_46769
atgaacaaaacaccgacattcaaggtgccattacaaacggaaccccgattccacctccgcaggtacgaacaaccccacacgattggggggcctgcggagcaacagaaggccgacggatggctcgccgtcgcccgctccagcagcagcgacgacgacgacttctgctccggggggccgaacagcagcagcaatgacctcagggcggatgctgctaccataaggccctcgcccatgccgtcactcgagaggcaaggacgagcagaaggccgtagagttggaggtcagtccgtcggcgacaccggctatctcgtcggcagagaaacctcttccggctgccgtggcggaaggcggcgccggaagcggctccgaagccactcgggtcagagagccaggcacgcggcagctgccagcgccacgaacggcgaacgcccttcctcccgatcactgagggaaggagcgggccgccgcccgcgcagggaccgaccccaactcggcgcactcccctccccagcactgatgatgaacatccttgaagttaagggaggggcaggaggcagcagcccggctcgcatttccccgccatcgagctggtggtcaccgtcttgggtgaccgccggtgaggggatgcggccgggctgcatgatgaaaatccttgaagccaaacgatggctgaaaggtaccaacttccgcgaagttgcgttcctccaacgacaaggcggaaggatcgcgggagttccccatccgggggctcggaagggaccgggaaagggggataccccgaaagggatccttctccgcgaaggaaacgggccccgagcccccctactgatcagaggttcaaaggctggcccctcggaggggttcaacagccgcctcagagcgctcgggctccgcgcccactactggtcagaggttcgagggccggcccctcggaagggttcaacggccgcctcaggccactcgggctccgcgcccactactgatcaggggttcgtaggctag

SEQ ID NO: 3395 - DNA, 366 bp, Zea mays
  Peptide Sequence Number=SeqID_46770
atggcgaacgacgagcaactgtcgctgcagtgggcggaggcggtggtggtgcctccaaatcgacatccattggggccgatgcagacgatcccgcatcaaacaccggcgccggtggcgacggggatgcagtggggagtccacactccaccaccggcagcggaaccaccgctgtccatccatggagaacgcagaagtgcacattttgcacttgcacacggcgttcagggatctcgtgcaccggtgggagtgcagtggcttgcccaacgtactcagtggcaaaaggagagacaacagagacaaaatgacagggatgtcttgtttattgcagagatcctctttatatacatgtatacaaagggcatctga

SEQ ID NO: 3396 - DNA, 732 bp, Zea mays
  Peptide Sequence Number=SeqID_46771
atgaagcatcagactggttcagtggtgcaccagaccggttatgcagagatggatcggtccattcgacggactcgatcacgcctcgcccgagcccagcctcgggcaagggcagccgaccccggaggatctccgtctcgcccaaggcccccctccagcgacgaacctacttccggctcgcccgaggcccagtcttcgccaaggagcaaccccggccaaatcgccacgccaaccgacaaaatcgcggaggcatttaatgcaaagggctcggactcgggctcaggcccggaagacggcgaactccgctccgcccgacccagggctcggactcaggctcagccccggaagacgacgaactccgctccgcccgacccagggctcggactcgggctcagccccggaagacgacgaactccgctccgcccgacccagggctcggactcgggctcagccccggaagacgacgaactccgcttcgcccgaccccagggctcggactcagccctggcctccgccgacggtctccgcctcgcccgacccaggggctcggactcgacctcggcctcagaagacagactcgacctcgacctcggaggagcctccacatcgcccaacctagggcgcggaccgaccacgtcaacaggaggcgccatcattaccctaccccaagccgactcaggctacgggaaacaagaccggcgtcccatctggctcgctccgccagacaagcaatga

SEQ ID NO: 3397 - DNA, 1461 bp, Zea mays
  Peptide Sequence Number=SeqID_46772
atggacttcatggtatttgaggttgctgaattggatggagcaataatgatttgtcacactaacagtaaaatgaaagccctagagaccgtgcactggactcagcctcatgctgctgctgcatcagaaatcgtcgacgaccaaggcaccgacgccccgcccaacgcggacgccccaaggcaccagtcgccgatgagcttcgcggcggcagtgcacgcgatcgcgacgcacagggcacgcacgcgccgccataccgacagttccgtctcaaactctctacctgctccgctgcccacacggcacacgagctgtcagctatatactccatcgcacgtccaaccccagggaaacacccatccaagataccgacgagcaggccagagcgaaggaatggactccatggccagcgacgacagcaaccaaggagcagcagccaagccgaagccgaagccaccaccgctaccgctgtccgtgcgcctccagctggccgggctgacagcggccatcgacgccgtggagcgccgcgacgggacggtgaaccgctgcctgtacggcgtgatcgaccggctcctgagcgcgcgcgccagcccgcgcccggacgcctccggggtgcgctcctacgacgtgaccatggacgcgtcccgcggcatctgggcgcgcgtcttcgcgccggccgcggcggaccgcccgctccccgtggtggtgtacttccacggcggcggcttcgcgctcttctccccggccatcgggcccttcaacggcgtgtgccgccgcctctgcgccgcgctcggcgccgtcgtggtgtccgtcaactaccgcctggccccggagcaccgctggcccgccgcctacgacgacggcgtcgacgcgctgcgcttcctcgacgcccgcggcggcgtcccgggcctggacgacggcgtgcccgtcgacctcggcacctgcttcctggccggggagagcgcgggcggaaacatcgtgcaccacgtcgccaaccgctgggcggcggcgtggcagccgtccgcgcgggccctccgcgtcgcgggcgtcttccccgtgcagccctacttcggcggcgtggagcgcacgccgtcggagctggagctagagggcgtggcgcccgtggtcaacctcaggcgctccgacttctcgtggaccgcgttcctgcccgacggcgccacccgcgaccacccggccgcgcacgtcaccgacgacaacgccgacctcgccgacgacttcccgcccgccatggtcattatcggcggcttcgacccgctcatggactggcagcgacgctacgccgacgtgctgcgccggaaggggaaggaggtgctggtggccgagtacccaggcatgttccacggcttctacggcttcccggagctccccgaggctaccaaggtgctgcaggatatgaaggccttcgtcgacagccacatacccacgcccaagctcgccgacgcgtga

SEQ ID NO: 3398 - DNA, 840 bp, Zea mays
  Peptide Sequence Number=SeqID_46773
atggaggttcagtggcaaaccagcttttgccagaatgaagatggtttccccaagttgctgagagcatgcacagtccgcctcggaatcaggagccaaccagagtatgatggtcgtgaattcatcgagcatggcacagagaagtgtgtcgtgactgtatacattggatccagtccgcgccatgtggaatggagtgtcactgctgctgggcacagattcaaagacacctgccaagtcgtcgctcgcaaggcattgagggccctgtgtcagatctacgaagaagaagtggccgacaccccactcagattctttccaccctttcagagagaccgtcccgcttggatggccaggatgcgtgcattggaagagcagcagctgcttgaggacgaccccacagtcgtgtacctcactgcatacctgctcaccctggatgcacaatatgatttcttggctcgacaccaccgtcagatgattgcccgagcagaagatgcagagaagcgcaaccccctgaagcaagccaaggatgagcatgtccagaagttgatggaggcctacttggtaacccataaccaacgtagagccctgcggatccaagagcccgcttcatccaaccctgttcaacccatcagagctgaagacccccggattcttgaaggtcacctggtctctatcagaggagagaagaacgcttgtgaactaccggaaggagccatagtcttggaaggaattccagtctcccctaaggctatggataagcaagagcaccccgagtcctcccaagatcccccgccggagttgcatgagccccctcaccatgaagaagattccagcaccatcccttga

SEQ ID NO: 3399 - DNA, 498 bp, Zea mays
  Peptide Sequence Number=SeqID_46774
atgaacaaaagaccgacattcaaggtgccattacaaacggaactccggttctgtccccgcgggcatgaacgacctctacaccggggagcctgcggggcgacaagttccgggcaactcgccagcgacctctacagcagcagctatggtcccaggacggacgcggcgaccggaaggctcttgttcgcgtcccagctcaagggacgcggaccagacatcaaagccaaagagcgggccgctctaaagcgcaccggcagcaacagttcgccttccccggcatggctggaggacgcctcctccgcagagctgggggatggtttccaccaccagaagctggaagaggaggtggccagccgacccgtgcgggaggtagagccccggctcgcctcgctctccaccccagcaaggatggtaagcatccttgaagctgagggagaggcgggggccgcagcccggcttgcttctccccatccaggggctggtggtcaccgtcttgggtga

SEQ ID NO: 3400 - DNA, 264 bp, Zea mays
  Peptide Sequence Number=SeqID_46775
atggctgctcaatatgatgtgactcaagaatggcttgatagggtgaagatagcaaggaaagggcttcgaggaactaagcgaagctgtgttgagctttctcaactccagctgaacttcaagttcaaccggggtctagacaggttcaaccggggtccagggcaagttcaaccgaggtccagagaggttcaaccggtgtccagggaaagttcagccggggtattttccccggacctcactagtcaaaaccagttgaaccggtcctag

SEQ ID NO: 3401 - DNA, 798 bp, Zea mays
  Peptide Sequence Number=SeqID_46776
atgtctgaaaggctattcaaatttccactatcagataacttatgtgcagcacttttcagtgttcttagtggaaccagtgcacaacaggttccccaggaaaattctgagcctgatccatcaagggatagaaattgcaatattttaagcttgccacccttttcccttcctcagattttgatatgcatctttagatttatgcattcttgtaaagattcctcagcacgcacaagaatcttaaatcttcttcttggtttgctggattcaaactcttcaaacatcgaggcattaatggagcacagttggaactcttggcttgaaacatccacaaaacttgaggtattcaaggactacaaatcagtttctaaaggcgaccctgacgatgtgaaggcagatgaaataagtcttgttaggaacttgtattctttggtcctttcatactacctgcgctttgttagaggtggctggcatcaacttgatgatactgctaattattttctcttaaaaactgaccagccttgctgtgataatgttttacattttttgaaccttatacaggagctgcttatcagtcaaatgggaattaggctattgtttctctctcccagtatttcggaggaatcttcacatgataacatatggaaagaagatattaagtcaacagtaaatgatattttaaataccgagagccatggtcaatttacaagcagtaatacagcaggggagccccccactggtacaagccccaaggatgatcagagagttaagccttcttctaacaagactgctagccaagtctga

SEQ ID NO: 3402 - DNA, 2835 bp, Zea mays
  Peptide Sequence Number=SeqID_46777
atggaaggggcaaaaagcgaaggaggtggagaacactggttccaactttggtactcaggaacagtggcaaacaaaaatggagtagtcttgaacattataagtgcgtatgcccctcaggttggtctcagtgagagtgagaagaggaagttctgggaagacttagatgacaatggggtggtctcattaaagttcctggaaagaatggccaagatggctcgcgcctcctcgggtcctgcgcgcgacccttcgtctcccgcgcgcgacccctccactgcccacagcaccgcgcctcccaacagtccggttgcctaccacccaactccggccgccgtacactccataaacggcggcgccgcagcccccctccgcccgaaatcgtcaacctccgccgcccaggcacgttcggttggccgccatcccgctccggccaccatccacaccatatacgacgccgccactgcttctctccgccaggtcgcctcaccatctgccccttcctcccctttcccggaatcgtcaacctctgccacccaggggcggtccaagttccagagatggaatgagagtgcggcaggttccccagacgacggtctacaaccacgttcttgggctggccggcctctgttccgtgatactctgcttcacccgcgggttcctcttgttccagcactgactgcttcgtctccaagggagccctccccacttgagaccgggacgttgaaccctcatcacgagcatcaacatcgctggtttcgtgggttggagagtgcgccggagacaacacttggtggttggaccagagttgaatcaaggaaggcgaagaagcgtcgccttcgtgcactgcgggcacgtcgcccggtgccaaatgacttgaaaggtcgctgtttcaattgcttcgcggataatcacctcgctgctttctgccaccttgagccaaggtgttttcgttgcaagacagttggtcatcgctcctactactgccccgggcctgtgaaagctgacaggaaggttcctgtacatcgacgactgttgagaggaacggtttggaacagactttcgacagttgagccaacgatcgctgatcgtgttccgcagtatcagttgcctcgggtcccggtctggaagagactccagccttttgtgcccctttcatgcaagaaggtatgtatctggcgtagaatctcccctccaggcattgagaagggtccagcacatcacatgatgatagcagggggagtggatgcacatgtttctgattctccacccagggaggttggagctgcggctaggtcggcttcgctgggcaccctcccgcctcgcccgcgacgcaggcgccaacggaagcgcaagtcatcttctaggggtggttctgatccgggttggatgcaatctgatcaacccggaaatgacgaggcccctctgactgaaactgggtcaacgcatcatcagcaaccttgtgtgattggttggaacagtttgatggaaaaagcagaggaggacttgaagttcgcagtatctatctttgtggtcagtgatgtgcctgtgtcagatgttgatattgcagatgcggttgctcaaaagcttgaagtcagttctgattcgctaattctgaggaaactggcccatggacatttcctgctcatgcttccctccctgcagtttgctgaccagttgacagtgagatggaacactattcgtgcaggcgctttttccctgcattgtaaaaagtggtccaagttctttgggtcttcgagtgcaagtttgcctatccctgtggaattcgagctacgtggcattccaatacatgcctgggaactgaccactgtccaacaacttttaaatccttttgcttgggtccaggaggtgcatgatgatactttacaactcaagaatttggatgtctttcgttgttacggttggtgttatgacttggctttaatccctcagactagagacctctggattaccgaccctctgggaattggaccaggtgttggtaggctagctcttgtctatcatgttcagattaaagtgttggtgggacaacgtgctgtaccagatcccacccaggtcccatctgatttggatgattctgcatggcggaggaggcgcttctgttcacgttcgccacctggggaccgtgatggtaggaggggctctgcagatgacggggaccctgttgatgagccagggaccgtggagcagctggcgcccagtactgaggattctatagctgtcacctttattccttccgcgaatttacctctgcttacttgggaagaggatagacttggtgctgctgtggttccagacattgtgtctaaccagggtattcctcaccctgttgagaggcataggtctgttgagccgcaggatgctgccattaatcgcagaggtggcctcccttccaaccttcaggtatattttaggcgaaagcgtcactctaagaaatgttctgcgccggatgcgcctgctgtttctttcaatgacctggagaaaatcatcaagccagtggtacagctgctgcccatgccggttgccaagattagaagcagtaagactgttgttgctgtgcctcgtcggagtaggagggtggctggtgtcaagccttgttctccaggtccgatcatcactgaagcccaaaagaaagtcatcaggagtttgggtctcgcagccacggaagaagccattgatcaaaaagctcaagacaactattttaagctgttcgaggggcgcctgacggactctcatcttgctgcacttgctgctatttttggctggcaggctgagcgatttgatgattccagcagcccagttctcctggcaggctgttaa

SEQ ID NO: 3403 - DNA, 570 bp, Zea mays
  Peptide Sequence Number=SeqID_46778
atggtgaagatgatgggggtcttactagggttcagaggcgatagagaagccgacccacgcctgttcgggcgtcaaccccgcccatcccggacgttcccacatcatctcgaccgggttacaaccctcgtcccatcggcgtggaaagaatctgcgctcgttggcggcgcaggaggctgcggcggctccgggacgaaggcgactgcggcggcgtccacaacatccacgagacggcagcaacaggacggagacggagatctggtgcgccttgcggctgggatcagaagacatgtacatagcatggttactcctttctacaattctccactggagattattcctgcaccggttcgagttggagaagaatttccaccgtcttgggatctaaaaattagaagcaaacaagttgaagatgaagcgacacaattggcaagagaaagggaggttagaggaagtgatgatttctcaattaagaattgcatagcagttctaaacacattggaagtcacaaaggaggagaaggtcaaagcctataaggtgttcaaggactctgacaatcgacagatttcttga

SEQ ID NO: 3404 - DNA, 399 bp, Zea mays
  Peptide Sequence Number=SeqID_46779
atgcaggcggcatgcaaccgcaccaaggggacgcaccctttcgactttgatgcgtccagcatgggggcccaggcccacacgtcatgtaaccgggaccgggaaaggggatactctaaaagggatccttctccgcgaagggagcgggccccgagccctcctactgatcagagggtgaggctgacagccgccaagaccggcctcaggcgccataggaagctccgcctcgcccgaccccagggctcggactcagcctcgacttcgaacgatggactctgcctcgcccgaccccagggctcggactcagcctcgacttcggacgatggactccgcctcgcccgaccccagggctcggactcaacctcgacctcggacgacggactccgcctcgcccgaccctag

SEQ ID NO: 3405 - DNA, 318 bp, Zea mays
  Peptide Sequence Number=SeqID_46780
atggcttcgatccacttagtgaagtattcgactgcgacgaaagcaaaatttaggttgccctgtgctgttggcagtggtccaacaatatcgagtccccaacgttgtagtggccagttgttcgtcgatcacagcgaagtcacgacttttgtgtttcaaccttttggcttcgctttggtcagaggggtgataatgaccttcaagacttcgcatgatagagagatattgcatgaggactggctctttggcggagcagtccttttcgatttggccggtgactatcttagaatcagttttgactatgcacattgtcacccctag

SEQ ID NO: 3406 - DNA, 516 bp, Zea mays
  Peptide Sequence Number=SeqID_46781
atggccggttcaagggatagctttgacgtctcccctagcaatatcatagagttgacttgggagaccttgccggctgacaaacagttccagttcgaggagcacaaggagcagctgatccaagaagcaaaggcgaagttcctgaccaacttcaagatggacaggaacaacaaagtcgttcggcaacgggcgacagatctggcttcgcttcgaccttccatgactacccccaaggtgccaaaggttcaactcaaaccaataaaaggtccaagtcagggttcaaaaagaaaggagcaaaagaaaccgaaggatgccctggtctggcgcaccggactgtccggtgtgccaccggacagtgtccggtgcaccagggtggatcaactcgaactcgccaccttcgggtttctggaaaagccactccactataattcaccggactgtctggtgtggcaccggactgtccggtgtgccagcggagcaatggctacaacgcaacggtcgactccaacggaaacctga

SEQ ID NO: 3407 - DNA, 456 bp, Zea mays
  Peptide Sequence Number=SeqID_46782
atggaagcccaagaatcggatgggcacgaaggaggggcaaggggagaattggaggttatgttgtcggaatcagatgacagtgaatttgatcttgatgatgagtttccaccttccattgatggagatgagttgtcaaaaactgaaaagacaaagagaggaggaaagaggtcaagagctggtattcagttgtccccatccaagtgcaaggcgaatagagtaaagagggttggttgctggaagtattttaaggtggtcactgttgcttctagaaaggaacttggggttatggagacaaaagccaagtgcaagttctgtcatagatcttatttgtaccatcaagggggcagcactacaacactaaaccgacacctagacaagtgcacacagtatttgaacaagctggcacaagctaagaaaaatcttgctcaaggaagactattaaaaatgaatgcatga

SEQ ID NO: 3408 - DNA, 393 bp, Zea mays
  Peptide Sequence Number=SeqID_46783
atggtggatctcaccacagatcaagcctgtgcaactgccttggagagtcatgaagtcattgctgttgaagccctgaagcaagccaaggatgagcacgtccagaagttgatggaggcctacttggctatggataagcaagagcaccccgagtcctcccaagatcccccgccagagttgtttgagcccctcaccatgaagaagattccagcgccatcccttgaagtcaaggaagaagctgcaagcaccccgccagcatcgctgccctctgaggagctacaagagccagtccagcttgaagaggagttcaaccccgtgttgccatctcagtcgccgccagaagaagtcatcaacatcagctcgctcttgacccatccaggagatgtctcagattga

SEQ ID NO: 3409 - DNA, 537 bp, Zea mays
  Peptide Sequence Number=SeqID_46784
atgacttcccacggatcctcagatgacggaaatgcactaacccacactgacgggcttgcacgagagggctttccccgcattttgtgggagctggctacccaccccattggcttgttccccgctgagagggaggacgacccaatgtggaaggatcgggtggagcatgccaaggatatctgggccctctacccaggacagaccgcgcacttgactgtgatgcgcggtgaggcgatgtcccatctgatggcactgctggaggcaacgaagattacgttggacaacagagaggagctcgtggttgatttgtcccaagaaatggtggagaaggacttgcaggtggagcagctatccacggatatccaagaattggaggagctagtgggcaccagggagaacaccatcgaggagatccaggaccaggaggccaacgaggacgtcgacatcgagggaggagatgagcctgcctccagtgtggacactgctggctcgggaagaccaccttcccccgagtcgagtgttgcttcgttcgctcactag

SEQ ID NO: 3410 - DNA, 333 bp, Zea mays
  Peptide Sequence Number=SeqID_46785
atggactccaaagggaaggacaaggtggccgacgagaagcagacggtccccattgacgacgagcccaagggagacaagaccgttgactcgggatcgggcaagaagaatgaggggaagaagaagtgcatcaagaagatcacctactatgaaaatgacacatcttctgcacaaaaggactcctcctacatgcaaaaatcggtcaaaaccccctttactcgcactcctaattataagcacatttctctcaaacaggctgaaatgggccagcctgaaccgctattgggatccactaatgaatttttatttcattttatttcatctacgtttgattaa

SEQ ID NO: 3411 - DNA, 153 bp, Zea mays
  Peptide Sequence Number=SeqID_46786
atggggtccaggcacagtgcttgctctgccgaggctgagtgccgaggttctttcgttttgttttttagtcaccctcctgcggggagaggtaaagaagaaggtgtcgaggtggaccttcaggagttccaggacgttgatgagttcgaggattag

SEQ ID NO: 3412 - DNA, 405 bp, Zea mays
  Peptide Sequence Number=SeqID_46787
atggagagggcagatgctttgaggacaaagattgctaaccaactatttgagaaggagagggcagatgctttgaggacaaagattgctaaccaactatttgagaaggccgtcgaaatctttatcaaggacgttaaggtatttgcatcgttcaatggggagttgtttaaggagatcacaaaacttttgaccttggagaactttagtctatatatatcttttaagttgacgacccttgtgatgctgaaactgatgaagacctccgatgaagaaagagacatgctgcacatgcacgagatagatgtcggctctatggacaaacactcgaccaagtcagatgaggagtatgaggacctagccatgcgtgacgtgatggctactggtccgacaatgaacagcaagctgtga

SEQ ID NO: 3413 - DNA, 537 bp, Zea mays
  Peptide Sequence Number=SeqID_46788
atggtgatgaagaagactttgcagatgatgttgacgagcactaagtctaacgatgctccagtcatcttcctatggaagagcatccatgttttatccgatggtgtgtactatccagactacccgtgtgaacaccaactatatccctccaccacggtaggctcctgtctacccagtggtagtagaggaagtccctatggatattcaccaccttcatgtggagaatggagtgattctgaaggacaggtcagaggagattcttgtgacacccaccccgttgtcggagtcacaagcctttgcaactggagcatcatcttcagcatcgccaacactagcagcctaagccctgatcctagaggcaacgatccagatgattctggtgatggtggagacgatgaagaagaagaagaagaagaggaagaggaaatcaacaatgaagaagccaacaatgagcaggaggacaactttgttgggatatggcctgtcactaagcattacacttcaatcttcgagacgggacacttcccaaacctgttgtag

SEQ ID NO: 3414 - DNA, 2388 bp, Zea mays
  Peptide Sequence Number=SeqID_46789
atggccgaggatccccaccctcctccagcaccggcgagatccgcggacgcgcccacctcacctccaatcacggctgccccgtctctctcgccgcacgcacccaccccgtctctctcggccccgctctcctctctcgccgccatccccgctctctcccactcggatctgcgcgcgttcgccccgtctctctcgccgccatccccgctctggcgttctctcccacccggatctgcgcgcgtcctccctgtcactctcgctattcgtgcccaccatcggctgatcatggaagccgccccggatcacgccccagccacgtccgccctggacttccatagaaggcgttgtgccacatggaagagaatctccaaaatcgtccgcacgtccgctaacctcgccccagcttccaactgcgcgccccagcctcatatctaccttgccaccgaccggatgagcagagacaaccccacaatcggcgacacccactccccgccgaagccgaccctccatctccgccgcgatctacagccgcagccgccggtggcgcccgctgcgggtggcaagcgagaaggtggtaggcatcgacccaccacaaattccgcggtggcacctatggagggcggcaagcccacgatcgttaccaacgccgaggcggcgcggaccacgccctcggtggtggcgtacaccaagtcaggcgaccgcctcgttggccagatcgccaagcataaggtcgtcgtcaacccggagaacaccttcttctccgtgaggcgctacatcagccgcaagatgaacgaggtagacgaggagtccaagcaggtctcgtatcccgtcatcagggatgacaacggcaacgacaagctcgattggccggcacttggcaagcagttcgcagctgaggagatttccgcacagttgaacctgtatcttgtcctgcttccacttgatggtcaaagtgtgcctaaactggaaaagccctaccacaattgcctgccaacactatctattcgacatctctgccaggttggttccataatcttgttgttggccttgataaatttagcttaccagatgaataaacaaaggctgtgtgcccctgcatctttccagtttgttgctctccagttgtctcggcaacccaaagaagtcgagatatatatcaggaaaagcaaggatgcgtgcttgtcagccaattacactcgtaaatacgagacaaagccagaacaacctaatggtttagagagactgtgggaagagaattctctttcggatctctacccttccctcgccacctgtcaaaggagatctggaggcgtagttgttgatgtgcctctaactgacagctcatctgcaactgttgaagaaattagccagcccaatccgaaggatggttctcctggggttgcatctgctataccagaaacagatctgccagaaattgtccaggtgataagatcatgtcgagatggtatccataaggtggtggaattactgcagcacaagtttccaaatgtttcaaagactcagctgaatcgtaaagtgagagagatatctgactttgttgacaatcattggaaggtaaagaaagaggtgcttgacaagctgggattggattcatcaccagtgaaatccaagaagaataaaagcatagccatgttcctggacaaggccgcggtggagatggcggacgacaagtcgcggcggcggctggcgagcgcgtggcgcctgtgcacggtgacgcaggtggaggatctcaagtgcgtgctgcggctgctgccggtgtgggcgagcggcatcgtcttcgcggcggcgtacacgcagatgaccaccaccttcgtcctgcagggcgacacgctggacctgcacgtgggaggtggattccgcgtgccggccgccgcgctctccgtcttcgacaccctcagcgtcatgttgtgggtgccgctctacgaccgcctcgtggtcccgctggcgcgccgcgccacgggccaccgtcgcggcttcacgcagctggcgcgcatgggcgccggcctcctcgtgctcgccgccgccatgctcgccacgggggcgctggaggtggcacggcgccacgtcgtcgcacgccacggcgtgtactacgacacccacacgggcgccgcccgctacctgccgctctccatcttctggcaggtgccgcagtacgtggtggtgggcgcgtccgaggtcagctccgcgctcgtcgctgtcgtcgcgcgcgccaccgcgcgggccggccaggttgatgggtggattcccgacgacatcaaccgcgcgcacctcgactacttcttctggctgctcgccatgctctgcgtcggaaacttcggcgtctacctgctcatcgcgcgctggtacacgtacaagaagaccgtggattag

SEQ ID NO: 3415 - DNA, 321 bp, Zea mays
  Peptide Sequence Number=SeqID_46790
atgaggaaaaaacacggctccgtgccgaaattacgtacatgttcaggccccgacagccacaatgaacaaaaaacactggcattcgaagtgccattacaaacggaactccggttccccctccgcagggccagcgagcgcctccacccccaaacgccgcggaaaagggtgacccgcggacccgcgcggaaggaagagcgccggctcagcgtggcccccaccccagcgaggatgatgaacatccttgaagctgagggtgggacaaagatcgcagcccggcttgctcttccccacccagaaactggtggtcaccatcctgggtga

SEQ ID NO: 3416 - DNA, 444 bp, Zea mays
  Peptide Sequence Number=SeqID_46791
atgaacaagacaccggcactcaaggtgccattacaaatggaactccggttccacctccacaggtacgaacaaccccacacgattggagggcctgcggagcaacagaaggccgacgggtggctcgccgccgcccgctccaacagcgacgacgacgacttctgctccgaggggccgaagagcagcagcgatgacctcaaggcagatgctgctgccataaggccctcgcccacgccctcactcgagaggcaaggacgagcagaaggccgtagagttggaggtcagtccgcgggcggcaccgactatctcgtcggcggagaaacctcttccggctgccgcggcggaaggtggcaccggaagcggcgccgaagccaccggaccggagagccggacacgcggcagctgccagcgccacgaacggcgaacgcccttccccccgatcgctga

SEQ ID NO: 3417 - DNA, 588 bp, Zea mays
  Peptide Sequence Number=SeqID_46792
atgggtgcgattaagtcaaggatcggtccactcaagggacacgatctcgcctcgcccgagcccagcctcgggcaagggcagccgaccccggaggatttacgtctcgcccgaggaccccctccagcaacggacacaccttcggctcgcccgaggcccagtcttcaccgagaagcaaccttggccaagtcgccacgccgaccgatcgtatcgcaggagcatttaatgcaaagagtgaggctggcagcacccaagtccggcctcaggcgccataggaaactccgcatcgcccgaccccagggctcggactcgggctcagccccggaagacgacgaactccgcttcgcccgaccccagggctcggactcagccctggcctcagccgacggtctccacctcgcccgacccaggggctcggactcgacctcggccttggaagacagactcgacctcgacctcggaggagcctccacctcgcccaacccagggctcggaccgaccacgtcacaggaggcgccatcattaccctaccccaagctaactcaggctacggggaacaagaccggcgtcccatctagctcgccccggtaa

SEQ ID NO: 3418 - DNA, 1287 bp, Zea mays
  Peptide Sequence Number=SeqID_46793
atggggggctcggagcccggttccttcgcagagaaggatccctttcgggcaactggcgcgccggttgctcgacgcgtgggcctgggtcccaagctggcgtgtcagaagtcggagaagcgcgtccatctggcgcggttgcatgccgccttcatggctgctcgccccttctgcccgttggtctgggcgaaaatggggggtcgcctgaacgcgactccatgggagttggtacctctcagccatcgttcggcttcaaggattttcatcacgcagcccggtcgcaccccttcaccggcggtcacccgagatggcgacctccagcttgatggtgggggaaagcgagccgggctgcggcctctgccccttcctcagcctcaaggattttcatcaccaaggctggggaggggagagtgccgagttggggtcggcccctgcgtgggcggtggcccgctccttcacccagtgatggggggagaagcgggcattgctcgtggcgtccggcagctgcagcgtgcctggtcttcagccgcgagtggcttcggggcctcttgcggcgtcggcgtctgccacggcagccggaagaggttcttccgccggcgcggcggccgggaccggccacgggctgacctccaacttctacggccttctgcccgtccttgcctcacgagttttgggcatgggcgggggccacctggcagcggcatccaccctgaggtcagcgttgccgctgttcggccccccagagcagaagtcgccgtcgtcgccactgctggagcaggtgacggcgcgccgaccgtcggccttccgttgctccgcaggccttccccctcggagtggggttgttcgtacctgcggagggggaaccggagttccgtttgtaatggcacttcggatgccagtgagttcgttcattgtggctgtcgaggcctgaacgtgtatgtaatttcggcacggagccgtgttttttcctcatttttgagcactaagtctcgcctgtttgattatctgaaccgctttaccaagcatgagttgccccgtgtcaaggtgacgggtgaggccgggggtagcgatatcagtatgaacagaggcggagttggctcgagaatggggaacctggttggccggagcctagccgtgtcgcccgtcagcggagccgacgcccaagagcccctggacctcggcgccgcccgaggctgggtcgggctttgctgtagacgtcgtcgatgccgagggtgctacggctcccttcggcgtgaagacccgagcctgcaggatcagatcgtcttgtag

SEQ ID NO: 3419 - DNA, 828 bp, Zea mays
  Peptide Sequence Number=SeqID_46794
atggcctcaaggcggacgccgctgcaaccttgccctcgcccacgccgacgctcgaggggcgaggacaagtacaaagagccggaggcccggagcgcggatggtggcggtgatcccatcggcgacggggacttctcgagccgcatccacctcggcaccgacgacaggagcccgcagaaggactacgagtgttccccatccgggggctcggaaggtggaaagacacgatgcatgagggagcgtgaagacatggtcgctttccaagggggtcaccctccttttaaggcgactctccctacttgcgtccccagccgtcgcgggttgagtcttctccaacacgctccaaggtcctccccctatggcgcgggggccgggtcccacacgtcatgcaagctggcccagggcagaagaagccaaaccgccgcgcgcggtgcatgcaaccgcccaacggctacgagcattcctccactttcgcccagaccagcgggtgaaagggcggacaaccatgcagtcggcacgcaaccgcgccaagtgcgcgcaccccttcgacttccaacgcacccaacatggaggcccaggcccacgcgtcatgcaaccggagcgccggttgctacgtgcaagcaactgcaccgccactcgcaccactaccacgcctcctcgactgcggaaccagtaccacaactcgaggcaaccctgcgtatgacccagcagtgccagccaggcgcgacggtcaatatggccaaaaatgggccgacagtaatggcggtggcaggcgggcaggagcagcggtcacgtcgtcagccaagcttacgtcccatccaggggcagtga

SEQ ID NO: 3420 - DNA, 462 bp, Zea mays
  Peptide Sequence Number=SeqID_46795
atgggcacatttccctttcaactacaagataatccgatcctgcaggctcggatcttgacagttgaagggagcagcagcaccctcggcgtcaactgcaccttcggcgaggaatccggctcgagcagacggctcggccggccaccccgaggcctcggccggctgtcccccgaagacatgagcccggcccgtggcctcggcaactcaattccggcgtcggtcccgccagtggacgacccggtcaggctccggccgaccaagtcttcttttcgagccaactctgcctctgttcgagctgacaccgctacccccggcttcggctcatcgaagagcggccgaggggttcctttaactaagcaagagaagcctcggacatcaaggccgaccgagccgagggactcctatgcctctgggatacggatacctcactcgtcacctttgcacggggcaactaacgcttggtga

SEQ ID NO: 3421 - DNA, 267 bp, Zea mays
  Peptide Sequence Number=SeqID_46796
atgtccggtgtgcaccggactgtccggtgcaactccggagcaacggctacctccgcgccaacggctacctgcagagccctaaatgcgcgcgcagcgctggacacctgcccatactggcacaccggacagcaaataagcaccggggagtgcaccggacacccaggcgggcccacaagtcagaagctccaacggtcagaatccaacgacagcgatgatgtggcgggggcaccggacatgtccgtttcgccctattcaccccccctctag

SEQ ID NO: 3422 - DNA, 459 bp, Zea mays
  Peptide Sequence Number=SeqID_46797
atggcaagggagatcaacgacgagccaacatggaggtggggttgcgcacgctgggagactcgacggcagcggctgagcgagcgagacggctccaggcgcgacgtcgagtgcgggctagacggctctgcggccatccagaataggcgactggcactcgaccgacgcaggggcatcaccggaggaccgagatcggctggggtggggcttcaggcgcaacagcggctacagtcggccgactgcagtgcgcaggggcctaggagcggacaaccagcgatggatatgcacggtcccggtcctgaccagactagcgaggaaatgaataaagaagtgaaaagaaagaggaacaagaaggagaggttggaggttgccaaccggataggtgcaagaggaaaaggtatagatagaaaaggcaagcctatatggattaaaagaggaaagggggatcacccaattacctaa

SEQ ID NO: 3423 - DNA, 2046 bp, Zea mays
  Peptide Sequence Number=SeqID_46798
atggagttgcgttcctccaacgaggaggcggaaaggcggcggataccccccatccgggggcttggaagatgggaagacacgacgcttaagggaggaagaagacatggttgccttccgaaaggagtcgccctccttttaaaggcaactctccctacttgcgcccccaaccgtcacgggctgagtcttctccaacacgctccaaggccctcccctgcgacgcgggggctgggtcccgcatgtcatgcaaaccggctcagagcagaagaagccaaaccgccgcgcgtggtgcacacaacccgcccagcggttgcaagtgaccctccacttttgcccagaccaacgggcgaaagaggcgggcagccatgcaggcggcatgcaaccgcgctaagtggacgcgcttctccgactcccgacacgccagcatggaggcccaggcccacgcgtcacgcaaccggcgcgccggatgctgcatgcaagcaactgcaccgccacttgcgccaccaccgcgcctcctcgattgcggaaccaataccgcgactcgaggcgacccagcgcacgacccagcagcgcccgcctgacgcggcggtcaatgcggccaaaagtgggccggcagtaatgacggtggcaggcgggcgggagcagcggtcacgtcgtcagccaagctcacgtcccatccgggggcagcaagagaaccccctctcacggcgtgaagacaacgcgcccgtgatccgttcctcgaacggctcgcgcacgcgcaacggccgccccgccaaccgcttgccccgtcgcattaactctgcggcaggacaggcggcgcttccggcaggagcagtgggcgacgcttcgccttcgccgttcgaaggctggcccccgaagggtttcgacagccgcctcagatcgcgtgggccctacacccactactggctggcccccgaagggttcacatccacctcagacgccgagcgagggatgaccaggggtacgttcgatacaaaaccaaggctcgagctgcgctcccgaggtaccctaggacatttccgagaccagcgggagcgatcttgtaatggaatcccatcagagggaggcatcgagccctcggaccccgtcgccaggggaccgggtccggcagatcacccgcagctcatcggagacaccatgttcggcgcccatcgagggcaacatggcgctttcccccctcctccttgcggaaaggcgacgcaggggcgtatggctcggactcgggctcagccccagaagacgacgaactccgcttcgcccgaccccagggctcggactccgcccttgcctctgccgaacgttctccgcctcgcccgacccaggggctcggactcggcctcagccatggaagacagactcgacctcggcttcggaggaacctccacgtcgcccaacctagggcgcaggccagccacgtcaacaagaagcgccatcatcaccctaccccgagctgactcgggccgcagagaacaagaccggtgtcccatctggctagctccgccagataggcaatcatggcgccccgcatgctctgtgacgacggcggctctcagctctcttacgaaagcagaaggacgtcagcaaggactcaaccgcttcgacagctgtccctccgccaggttccgtcgctcctccgacgaccacgacatcacaccagctgggtgccaaaatctctccagctgccacatcggcatggccctcttagagaaggttggccgcgcggggacgaggacgggacaggcgctctcttggggccgctcgcttccctctcccgcgtggacgcttgtaaccccctactgcaagcgcacccgacctgggcgctggacgaacacgaaggccgcgggattcccacctctctcacgccggtctccggccgccacgctccttccccccttcgcgctcgcccacgcgctcgacccatctgggctggggcacgcggcgacactcactcgtcggcccgagggaccccccggtctcgaaacgccgacaagtatattatatggtaaacaatatcacattaaaaattaa

SEQ ID NO: 3424 - DNA, 891 bp, Zea mays
  Peptide Sequence Number=SeqID_46799
atggacaacgggggtcatgtggctgtcaagatcctcgacaaggcaaaggttcacaagaacaaactagctgagcagaattccgtttgctgtatcggaatgcatgtcctacaggtcaaccattttatttggattgttttcccccttataactggtgatgggaagtataaagcaacagttggagctatagcacaaaatggatactatgtagcctatgatggctggggaaatagggaagatcatggtcaccatttcagtattaaattaattctgaaaaatgtatacagtgcaggtcaaatgggtgtatcctgtcttggattgggagtttcagaccgctacttagatgatcaagactgtatcttgtctttagtcttccacctccatatttctcctcatgttgtggactgtcgcatgtgtggggacccaaattcagtccttaggtttgctttcatagagttcgctgatgaggagggtgcaagggctgctccgaatctgtcaagaaccgtgcttggatattatcctgtcaatgttctgccgtcaaaaactgccattgcaccagtcaacgaaacattcctacccaggtctgacgatgaacgtgaaatgtgtgcaagcactatctactgcacaaacattgacaagaaggtcactcaagcagatctaaatttattctttgagtccatatgtggtgagctaaaagtttgcagaaatggcaccatcaagatcgatctggagaccaacaagatcatggacttcatcaagtttgacatcgacaacgtggtcatggtgaccagcgggaggaacaccgggcgtgtaggagtgatcaagaacagagagaagcacaagggcagcttcgagaccatccacgtgctgcatggagctttttgctatgtctag

SEQ ID NO: 3425 - DNA, 633 bp, Zea mays
  Peptide Sequence Number=SeqID_46800
atgtcgccgagtccgccgccgggcgagctgacgatcgtcgtggctgccgtcgcgctccggggggaggagtaccatgtcatagctaccgtcgagggacatgaactcgagactcccgaagcggagcagcgtcccaagctaaagaggttgtcggagactgcccatctggaactcaacgggaagttgttcgttaacacacaggaggcccctacctggcgcgccaactgtcggtgtttcgaccccggggggtctctaaaccgacgagtaaaattgtcgctgcgtgccccagcccagatgggttggcgcgagacggaacacaaggagggggatgaaaccgtggctcgtgttgtcctacgccagagtggaagagaggagccggagccctatgtacatgccaacgtggttgttggagaggtgctagagccctgtgcacgcggcgtcgtggcggtcggaggagcgtttgagccctgtagaagcacagctgtcggggctgtcgggaccttgctgacgtctccttgcttccgtaaggggctgagatccgctgtcgtcatggacacacgcggggagccatcattacttgttaccagggcgagcctggatgggacggcggacttgttcccccgtagcctgagctag

SEQ ID NO: 3426 - DNA, 651 bp, Zea mays
  Peptide Sequence Number=SeqID_46801
atgcaggtggcgtgcaatcgcaccgcggggacgcaccctttcgacttcgacgcatccagcatgaaggcccaggcccacacgtcatgtgaccggcgcgccggcaagcagaagcagcagtcaaatcgtctgcaggctcacgtcccctcctggggcagcaggggaaccctctcccacggcgcgaagacgacgcgcccgtgttccatccctcggacggctcgcgcaacgactgccccgcgaaccacccgtcccgtcgcattaacttcgcggcagggcaagcgacacctttggcaggcgaagcgggcaacgtttcacctccgccataatgaccgcgtcaaaaaagggaccgggaaaggggatattccgaaagggatccttctccgtgaaggaagcgggccccaagccctcctactgatcaggggttcgaaggctggcccctcggaagggctggcccctcgaagggttcgacagccgccccagagaacgcagacgagggatgactctgggtatgtccgatacatggtcgaggctcgggctatgctcccgagaggctcggggactgctctcgcaaacccggctccggccaaaccgttgacagcgtcaacaaaccagcctgaaaactcgaacctgaccgtgcacccggactacgattag

SEQ ID NO: 3427 - DNA, 456 bp, Zea mays
  Peptide Sequence Number=SeqID_46802
atggccccccagcctgcaccggcagatccccactcaagtcctcgtggatgggcagacatcgacctccgtgcagaggcgtcgtgccggagcagggacaagacaatccaagaacacgaacgccgccctagcggcgtgcgacgtcttggacggtctcccggagcgcacggcgctacagccgcccgtacgatgggcgagcagccacgctccaccccagcggtgggaggtggcaccggaagcagcgtcagagctagctgggccagcgggccaggcatgctggagctgacgacgcttgcggccgaccggccccgcgttgtcgaagttcgccccctccgcaaggccggtgagcgcccttctcccccgatcactgtgggaagaagcgggtcgccagcccctgtgggaggtagaaccccggctcgccctgccctcctccccagcaaggatgatgaagatccttga

SEQ ID NO: 3428 - DNA, 225 bp, Zea mays
  Peptide Sequence Number=SeqID_46803
atggcgccttacacttcacatgagctcccacctttgatggtcaataccaggaagggaggcggaatcgatctacctgccaaccaccacaataaaaggattgttagacaaccacaaccagaaatgaatcctctgaatcctccaccggctaggacatattcggtggttgctgctcaaatgcagatgctacaacagatggcaaacttgatgaatgaaatgcaagcttag

SEQ ID NO: 3429 - DNA, 714 bp, Zea mays
  Peptide Sequence Number=SeqID_46804
atgacacgggggctgggtcccacacgacgtgcaagctggcccaggacagaagaagccaaaccgccgcgcgcggagcgtgtaactgcccagcggttacaagcactcctccactttcgaccaaaccagcgggtgaaagggcagaccgtcatgcaggcggcatgcaaccgcaccacggggatgcaccctttcgacttcgacgcgtccagcatggcgccccaggcccacacgtcatgtaaccggcacgccggttactacgtgcgaaaaactgcaccaccacttacgccaatgctgcgccttctcgacttcggaaccggtgccgccactcaaggcaaccccgcgcatggaccaacagtgctagccaggcgcgtcagtcacgggtcactcagccacgggagaaggcgcgacgatcgatatggccagaagtgggccgacagtaatggcggcagcaggcgagcggaagcagcggtcaaatcgtctgcaggctcacgtcccctcctggagcagcaggagagccctctcccacgggaccgggaaaggggatactccgaaagggatccttctctgcgaaggaagcgggccccgagccctcctactgatcaggggttcgaaggaacagtagacccaggcagattcacgcctcgctcgagggcctcctcaagcaacgggcgcacgttcgactcgcccaaggcccagctcgggcaggtttcgcagtga

SEQ ID NO: 3430 - DNA, 825 bp, Zea mays
  Peptide Sequence Number=SeqID_46805
atggttgccccgcctcctcctcctgcggcggggaaggtgacgggacagacccggatgctgctcttccgctacgcggggaagacgtcgtcgattccgctatgggcgggcgggctgacggccgccattgtcgatgtcgcgcggtggaggaaggagtaccatgtcgtagctgccgtcgagggacatgaactcgagactcccgaatcggagcagcgtcccgggttggaaaggttgatggagactacccatctggagcttgacgggaagctgtttgtcaacacacaacaggcccctacctggcgcgccaactgtcggtgtttcgaccccgggggtccctggaccgacgaggtggatgcgcttgcagtagggggttacaagcgttcgcgtgggagagagagagggagagagagcctgcccgtcagcccgttctcccgcgtggccaccttctcgtacgagggccctggaccttccttttatagacgtaaggagaaggcccagcctgagctagctaggggtagggtaataatgttccccttgcgacgtggtcggtccaagcccaaggtcgggcgaggcgaagactcctctgaggtcagggctgagtccgagccttggggtcgagcgaggcggagaccgtcgtccgaggtcgaggttgagtccgagccctggggtcgggcgaggcggagaccgtcgtccgaggtcgaggttgagtccgagccctggggtcgggcgaggcggagaccgtcgtccgaggtcgaggttgagtccgagcccgggggtcgggcgaggtggagaccgtcgtccgaggtcgaggttgagttcgagccctag

SEQ ID NO: 3431 - DNA, 387 bp, Zea mays
  Peptide Sequence Number=SeqID_46806
atgtcgtgcgcgttcgacgactactatatcaaggactgtggcttcatcttggcgccagaggtgacgcagaggaggaccgacaacaatgactactcaccatcgtcggggttgggcgatgtggaggctcctccgaggtcgaggtcgagtccgtcttccgtggccgaggccgagtccgagcccctaggtcgggcgaggcggaggccgttggctgaggccagggcggaatttgagtcctggggtcgggcgaagcggagttcgtcgtcttttggggttgagcccaagtccgagccctgggtcgggcggagcggagttcgtcgtcttctggggctgagcccaagtccgagccctgggtcgggcggagcggagttcgccgtcttccggggctga

SEQ ID NO: 3432 - DNA, 2577 bp, Zea mays
  Peptide Sequence Number=SeqID_46807
atggtgacggccaaggaggccgcggcggcggcggcggccatggacgccagcaagtacgtgcggtacacgccggagcaggtggaggcgctggagcggctctactacgagtgccccaagccgagctcgctgcgccgccagcagctggtccgcgactgccccgtcctcgccagcgtcgaccccaagcagatcaaggtctggttccagaaccgcaggtgccgggagaagcagcggaaggagtcgtcccggctgcaggcggtaaaccggaagctgacggccatgaacaagctgctcatggaggagaacgaccgcctgcagaagcaggtctcgcagctcgtctacgagaacggctactaccgccagcagacgcagagcgcggggctggcgaccacggacacgagctgcgagtcggtcgtcaccagcggcccccagaacgtggccgcggtgctgccacaagcccagccgcgcgacgcgggccctgccgggctcatgtccatagcggaggagacactgacggagtttctgtccaaggccaccggcaccgccgtcgagtgggtccagatgcccgggatgaagcctggtccggattctattggaatcattgccatctcgcatggctgccccggtgtcgccgcgcgagcttgcggcctcgtgggcatggagcctgcgaaagtcgctgaggtcctcaaggaccgcccgctgtggctgcgagactgccgatccatggaagtggtgaacgttctccctgccggtaccagtggcacagtcgagcttctctacatgcagctctacgcccccacgacgctcgcgccagctcgcgacttctggctgctgcggtacacctccattctcgacgacggaagcttagtggtatgcgagagatcactcggcgccaaccagggcggcccaagcatgcctctcgtccagccttttgtcaggggcgagatgcttcccagtgggttcttggtccggcctagcgacggcggaggcagcgtcatacacatcgttgatcacatggacctggagccttggagcgtgcccgaagtcgttcgcccactgtacgagtcgtctgcgatggttgctcagaagatgtcaatggcggccttgcgctatctcaggcaggttgctcacgaagataccgcccattctgtggtaaccggcgggtggggacggcagcctgcttctctacgggctctgagccagaagctcaccagagggttcaatgaagctctcaatgggctcgctgacgacgggtggtctgtggtcggaagtgacggggtggacgatgtctgcgtctctgtcagttcatccccgagtagagtggtcagctgcaatgcaactttcagtaacggacctgtagtcggcactggcagcagcagtgtgctctgcgcaaaggcatcgatgctgctgcaggacgtttctccgccagagctcctgcgcttcatgcgggagcagcggtcgcagtgggccgacagcaatctagacgcgttcttcgcttctgcgatgaaaccggatttctgcagcttgcctattcctcctcgccttggagggtttggtggccaggtcatacttcctctagcccacacgtttgaccctgaagaattcctcgaggttataaaagtaggaaatgccggtaactaccaagacgcgctcctgcaccgtgatctgtttctgttgcagatgtacaacggggtagacgagaacatggcaggcacttgttcagagctcatctttgcccctatagacgcatcgttcagcgacgactcgccactgctcccatccggctttcgtatcatcccgatcgacgctcctcttgacacgtccagccccaagtgcacgctggaccttgcctccaccctcgaagccggaactcccagaagcaggacaagcgggagcggcggccctggaactgccgccgccgcttgtgccggctccaaggccgtgatgacgatcgtgttccagtttgccttcgagagccatctgcaggacagcgtcgcagccatggcgaggcagtacgtgcggagcatcgtcgcgtcggtccagaggatcgcgctggcgctctcctccgcgcgcctggtcgtccctcatggcagcggtgtcagccacggtgctcctgctgctggtccggaggcagccacgcttgcaagatggatctgccagagttacaggttccatttcggggctgagcttatcaaatccgcagacggtagcggctgtggtgaagcagtgctgaaaactctctggcaccatgccggcgctatactctgctgctctctcaaggccttgccagtgttcacgttcgcgaaccagtccgggctcgacatgctggagacgacgctggtggcgctgcaggacatcgcgctggagagagtgttcgacgaccaagggaggaagaacctgtgcgcggagctccccggcgtcatggagcaggggttcgcgtgcgtccccggcgggatgtgcgtgtcgggcctaggccggccggtgtcgtacgagaaggcgctggcgtggaaggtgctcgacgacggcagcggcggcgtgcactgcgtctgcttcatgttcgtcaactggtcgtttgtgtga

SEQ ID NO: 3433 - DNA, 426 bp, Zea mays
  Peptide Sequence Number=SeqID_46808
atggcggcgccatggggtaacaagtccataagtgagtatacgacgccgacgtctgttcatcgaccaaatcaatgcttggatatcgtaacaatggtgcaggaagaacaacaaggagggaaccagttagcgtcagatggaattacgcatacaaaatcagctactgctgtagatgcaattactccaccagcagctttgagggccccgggggttgatgatcagaccatatttgaggcatcgaggatgacagtaaatcaaggaggacaacgaatcaagctagcccctgaatttgggggtaaaaatttcattgctcatactcgcaaattcaggtgtaattctcttttctcacttttcccccatctcctctttctcatttccttttcaaaggagggggataatcctatttggaattataaattaaaggggtaa

SEQ ID NO: 3434 - DNA, 123 bp, Zea mays
  Peptide Sequence Number=SeqID_46809
atggtggtggccccctgggtgaagtaccttagccaagaatacgaccccatgttaacgtgggctgccagcacctaccgctccccctcttgcccatctttcaggttaaacaaggaatacaggtag

SEQ ID NO: 3435 - DNA, 270 bp, Zea mays
  Peptide Sequence Number=SeqID_46810
atggaggtcgcgacggcgacggaggcgtctgcgccggcggcaagcggcggcgcggcggggcagggccacccgttcccgtggctagacgctgccatctctgagccctactacttcctgcatctcctcgccttcttctcttactttgcggcccgcagcgcggcgctctccgccgacgacggaggggagctccacgaccgcctcctccgtagggagatccaggcagtgctcgtgttcctggtgctcttcgtagtgaagcatctccaacagtga

SEQ ID NO: 3436 - DNA, 210 bp, Zea mays
  Peptide Sequence Number=SeqID_46811
atggagtggatcaaccaatcctctcaagaagtggtactgcctcttggcatccgtgttgatattgatgaggacatcactatgagtacgactacacctgcagcacctccacatcaagcgccacttccttcattagctgggccaatcactcgggcccatgccagagatcttaacttcgtcatgctactgaagaatgagggcctagaagaatag

SEQ ID NO: 3437 - DNA, 534 bp, Zea mays
  Peptide Sequence Number=SeqID_46812
atgccgccgcgtatgagaaagaccgcgcgcaagtccactggaccgattggtgtacctcagcaccagctggctctaaggcatgaggatagcagcaacggcagcaatgaccccattggagatctagaagcccaggtggagcagcttcgaatagagctacatcacagaaatagtgtgtggatcgaggatggtcagcatataaatgaattaagaactgatatccgacatctgcaagacgagcttgccgaacgagatttggcactcgattgggtcgtcaactcacgttccattgcttgggaccgggagccaaagctcgagcccgtgtactgcaatcatgaggaagtttatgaattgtattcgcgactgcaccccgacgtagctgccaaccctgtcggaatgggagctggaccttctggaacagcaggtgaagcacttggtggggaactggatcttttcaagccccctccttcaatgaacctggctgacgaatggtcccctacacccgacaacaaagctactaaggatgataaatactaa

SEQ ID NO: 3438 - DNA, 417 bp, Zea mays
  Peptide Sequence Number=SeqID_46813
atggggtctcgactacgggtctgggagcttcaccgcgttcttaggaaagtgcccatggccgagacagggtggcgcggtcatcatggcggccccaatggctcaccggagcttggcggacaacatggtaccgcaccgtgtggtggccagatctccacgctgcccaaatcttcagtaggttgtccctgtcgctctcttcttgacctctgctacgtttttcttagttcggtggacgaattggtcacggatcggggcatttgctggggcgctggtcgttgcgctgccgcggggaatcggtggcgccgccctggattagcaggctgggggaaggagaggactcgtggactgtccgatccttctcggatggctgagattagatgttggcttgcgaaccgttggatccgtaatggatgcctatga

SEQ ID NO: 3439 - DNA, 1413 bp, Zea mays
  Peptide Sequence Number=SeqID_46814
atggaagccgcggcgcccgcgcccgcgcgtggcctcgggcggcaggagtacgcggtgctggcgctcaccttcgcgtcctacgcgtcgttccacgcctcccgcaagccgcccagcatcgtcaaagccgtgctctccgcggactgggtccccttctcgggcccccggggcccgcaccgcctcggcgaactcgacgtcgccttcctctcattctacgcgcttgccatgttcgccgccggccacctcgccgaccgcgccgacctccgctgcctcctcggcacggccatgctcgcgtccggcgccgcgtgcgccgcgctcggtgcggcctacttcctcgacatccacgcgctagccttcttcgcggccgcgcaggtgtccagcggtgtcgtgcagtccgccggatggccctgcgtcgtcgccgttgtggggaactggttcggccacgcctcgaagcgcggcaccatcatgggggtgtggaactcgcacacctccgtcgggaacatcgccggctcggtcctcgccgcagccgcgctcgagttcggatggggttggtcctttttgcttcctgcggtcgtcatcgccgcgctcggagttgtcgtgctggtgtttttggtcgcacacccgagcgaggctggtttggatgtggaagtaatggaggttgagatgaatggggatggtggggaggaggtagggctacttggggaggataagaaagaggttcaagggaatgaggataacgagttcgagctggaaatgggatcacaattgccgagggcaatcgggttcgtggaggcatggaaacttcctggcgtggcaccatatgcattctgcttatttttctccaaactcgtcgcctacaccttcctctactggttgccattctatatcaggaataatgccgtggcaggtcagttcttgtcacacaaggcttcaggaattttatcaattgtattcgacattggaggcgtcttaggagggatttcggctggttttctctcagatgccataggtgcccgtgcaataacatcagttctgttcctcttgctgtcaatcccatcactcgttgtgtaccggacatatggaagcatatccatgcaccacaacattgctctcatgtttctctctggttactttgtgaatggtccatactctctgatcaccacagctgttgcaactgatcttggcacccaagacgctatcaagggaaattcacgggcgctggcgacggtttctgcgataattgacggcactggttctgttggtgcagctctgggtcccttgcttacgggttacatctcaactagaggatggaatagtgtatttttcatgttgattgtttccatatcacttgccatcctgtttttgatacgactcgcaaagggcgagatagtagccaagcttagcacatggaattaa

SEQ ID NO: 3440 - DNA, 420 bp, Zea mays
  Peptide Sequence Number=SeqID_46815
atgactttcgtcaaagaagggaagaagcctacagatactctgagatggccaggggcttcagaggaagatttcaccctaggcatgtcaggtcgatccataaccccagtgcaagcgacaatagggggaatcatacccaaacgcaacaacatagctcacaatcatcaggggcacaacaatgttctttcaggccaccagctccaagaggcagagggggcagaaactttggaggaagatatggagatcagcctaggaaactgttttgtttgttttgcggtgaagataaagggcataccacaaggacgtgccaagttacgatttagaagcagaaagaaattgctgaagctaaagtatgacagaatcaaccgaagcaggttctgcataccgcttcgtgctactctccttatgtcccggagtatgtag

SEQ ID NO: 3441 - DNA, 222 bp, Zea mays
  Peptide Sequence Number=SeqID_46816
atgtcgcgtgcgttcgacgactactatatcgaggattgtggcgtcatcttggcgccggaggtgacacagaggaggatcgacaacagtgaccagttcgtcatcctcgccaccgtcaggcctcagaagtcgcttgcaccatacaatccttgccagatttctttaaggcttcgccctctgaatcaggtgccgaagcaggagtttgtactttcacagattccataa

SEQ ID NO: 3442 - DNA, 282 bp, Zea mays
  Peptide Sequence Number=SeqID_46817
atggatcttgtcttcgtgctcttgcatctgtctgaaggctttagcaaatatgatatcagttgcactgcctgtatcaaccaaaacattatggaccagaaatcctttgatcacacaagagataaccatagcatcattgtgtgggtaatccttgagctgaagatcctcttgagagaagccgactctgagcatgaaccgcctgttatcgggagaatcagcttcggagccgaagcagttccagcttggttcttgaacgaagccattgtctcaggaaagtggaagtga

SEQ ID NO: 3443 - DNA, 639 bp, Zea mays
  Peptide Sequence Number=SeqID_46818
atggtgcctgctggagaaggtgccgctggtgtagatgtgctcgtgttggtgttgatgtcctcatcacaacttgttgttgttccgcctgccgtggcgaccgcggcggctgccgtggtgcccagggcgaagggcagtgctcttagtgccggtggcgagattccggcactcactgccgtcagggacgaggcgagtgctgtgtcccgccggctgaaggagctgaaggaggcattaagtcaggcggctgatttcgcagaccgcgcggcgtcgggggcccttacggtcgttgtgtctgccgaagtcgaaagacttcggacgcaacatgctgacgtcgtccgggaaaagtcggccgccgacagcaagtgccgcaagctggcggacaaggtggccgcgctggagggtgagaggactgacctccggcgccaactggcggaggaaaggaaggaggctaatgaggccctcgccaaggcgcagtctgcgcaggcggaggccaatttggcgcgggcggagggcagtcttgccaggcagcgcgccgaggagttggaggggcggctcaacgctctgcagacccgtgtggagagggccgaggcttcgacgcgctcggaggctgagcggacacgcaaacagcttatggattcatag

SEQ ID NO: 3444 - DNA, 933 bp, Zea mays
  Peptide Sequence Number=SeqID_46819
atgtattcctgcttaaatcttgtgattaatgagctcaactctattggaattaataagctaggtgatgcggacattgtgaggaagatcatcttcctactaccagaacaaagctatgggagcatcatcaccatcctccacaacctcgaggacttgagccaaatgaccccgacgattgtgattggaaaaattgcagcatttgagatgtcgtggaaaatgagtcaacaagaggagccaacttcttcaaagccatatgcttttgcatgtgatggacacaaaaagatgaaaggcaagaagaaggctccaagctcatgtgaagatgaggagtcgaggatcttctctttaacattgacaggaaaaagcaaagaaagagaggatgcttcgcatgcaggaagaagggtcacttcagggacaactgtccaaatatggttgaacccacaaagtggaggagcaaaggcaaggcactcacaagtgtcaagacttgggatgactcttcaagcgaagatgatcctccaaggactcgtagccaccgctcttcatcatgctcttcatggctatgccacaaggaaggccacaagtcttaccaatgcaaggcagagatctaggataagcaaaagccaacaagcaaaatctccaacacctacatcaacaaggtggacaaaaggccgctacaccatatttgatcaagaagaaaaagaatggaaaggtgatagcaatcaaggccaacaagcaaaacaacaaaggaaaaggggccaaacgcatctgggtgccaaaggagattatctcaaccatgaaaaacaccaagaaggtttggatcccaagagggaagtgagaagtctgaaggacttcgggaaatttggagacttggcaaaattgggatgtatatcatgggatgcatcatattggatcaagtccccacccatgacaaagatatga

SEQ ID NO: 3445 - DNA, 444 bp, Zea mays
  Peptide Sequence Number=SeqID_46820
atgggcaagagcaagaaaagcggaggctcctcgcaccattctggcgacaagcggaagcgcgagccgactcctccctcggaggacttcggcgattccgagtactcggaggaggagttctcctccgagtccgaggagtcgccagtccacgcctctcccctggcatcgtctgatgactcggacgattcccaggggatcgccgctgaggtgtggacatacatccgggccatcgagcgctctgggctcgagggctcggatgagtcagagatctcctcgaacgaggagaactcctctgactcgtccaaggaggggagcgacggtggcgacggtggcgagggtgacggcgacgacgggggcgacgacgatggtgacgacgacggcggcaagggcgatggcaagggcggcagcggcagcggcaaggccagcggcaaagcgccgctggcttag

SEQ ID NO: 3446 - DNA, 372 bp, Zea mays
  Peptide Sequence Number=SeqID_46821
atgaagcagtggcgggacgacatcgaccgactgctcggcatggcacattctacctcggccaggtcgaggccacagtcatcccggcgccaacatgaggcatcggtgtctgtgcgctcaccctcagtgaagggcacacagatcgacgacctccgggcagaactcaaccgcaggcgtgcgggagaggacgcccgtgtctctttagaaagggcgcgcaaacgccgccaaaacatcgagggtcgcaacctcgatcaagactttgctgcggtagcaccgcaggccccaatgggcacccgatcccaagcgggtgtccccttggccggcgtaggcttagagtgttttggagggattggagagggtgtaaatccccaatag

SEQ ID NO: 3447 - DNA, 294 bp, Zea mays
  Peptide Sequence Number=SeqID_46822
atggggaagcctgtcccatcactcctcatgctcctcctcagccgaggcaggatcccactcgactgtccaacccggtggcaagatggacggccaagtcactccagcaaccatgtcctccagagaacctgtaaaattatgccacaagcaaggtataatggatcaagcagcctcattagctgcgagaagcagacgattcgaatcgagtttttatccttgcaggtttgggttttgcctagggataagcatagtggattgaaacttagatttcccttagatgttttagtaggcatttaa

SEQ ID NO: 3448 - DNA, 294 bp, Zea mays
  Peptide Sequence Number=SeqID_46823
atggcgcagtcgaccgttggcagcctgggagccgttggcgcaccagacatgtccggtgcacaccggacagtccggtgcccccttctagccgttggctcggccacgtgtcccgcgcagatcgcgcggccgaccgttggccctgccgccgttggctcaccggacagtccgaaactggatgagcacgccttcctatttgtcatccaggctggagctgatgatggcagtcttgcgttcatcagcgaacctgaaagggaaatgtgcctttgggccatttctaagtattttggtgattga

SEQ ID NO: 3449 - DNA, 222 bp, Zea mays
  Peptide Sequence Number=SeqID_46824
atgaagaatcaaggatgtgcatcctccaaggtgaccctcaccaaggaaaatgacaaacagcaagcgtcatgtcaggttgagcgacgcttctgctacaagtgtggtgagcagggtcatcgatccaagtctcaaggtggaaaagagaagatgagcatgaaatggagcaatcaggacttgggtacctctgtaagtcaagtaattggtatcttaagtcatgagtaa

SEQ ID NO: 3450 - DNA, 826 bp, Zea mays
  Peptide Sequence Number=SeqID_46825
ccgacgaggtgccgcctcctgcttggccatggttgccccgcctcctcctccgtcggcggggaaggtgacgggacagactcggatgttgttcttccgccatgcggggaagacgtcgtcgattctgccgccggcgggcgggctgacggccgccattgtcgttgtcgcgcggcggaggaaggagtaccatgtcgtagctgccatcgagggacatgaactcgagactcccgaaacggagcagtgtcccgggctggagaggttgctggagactacccatttggagctttacgggaagctgttcgtcaacacgcagcaggcccctacctggcgcgccaactatcgacatttcgaccccgggggggcggatgtgcttgcagtagggggttacaagcgtttgcgagggagagagagagagagcctgctcgtcagcccgtcctcccacgcggccaccttctcgtacgagggccctggaccttccttttatagacgtaaggagagggcccaggttgagtccgagccctggggttgggcgaggcggagactgtcttccggggtcgaggttgagtccgagccctggggtcgggcgaggcagagcttcctatggcgcccgaggctggacttggctgctgtcagcctcaccctggcgggtggcacaacagtcggagcagtgcaggcgacgatccttgcattgaatgctcctgtgatgcggtcggttggcgtggcgatctggccaaggttgcttcactgcgaagcctgcccgagctgggcctcgggcgagtcgaagctttgtactgatggtggttaccagccgagtttaggagccttggag

SEQ ID NO: 3451 - DNA, 375 bp, Zea mays
  Peptide Sequence Number=SeqID_46826
atgactagagcagtcccagaatccaacaacaaccagcatcattccccattggaaggccgaatgcgccacacgcccgcggcagataagcgtctcgacgggccaaagaacctaccccctctcgccatgcagcgcagatctgacgggaagggaacgcgggtgaatcgcagatgccgtcggtcttcttgtgcccgtagtgcttcacctttcttcacgttctacaggggagcaaaaggtcaactctgcaacttcagttgtatcaatgcaaccattgagaagttcagagatacacttgcgaagcacagacttctgacaccaacgacaccattggcaaggcagggatctgatgatatgtccttggtgtcatccgtgatataa

SEQ ID NO: 3452 - DNA, 3624 bp, Zea mays
  Peptide Sequence Number=SeqID_46827
atgaagactttgcttatgttttgcccttctgattctagaaaagcacagcgtccaaaagcagaggtgtttggaagcggcagccagcaggcagcacggccgcacgggcgcccggccttttttcctcccgactcgacaccttctccctttgctgaactgctgtgctggaggctggagaccgatggagctggagtcgcagccgaggagacaggagagcatgcgcatgcggtgcgggtctgcagatcagcgggtggaccgtccagagtccacgagctggagcgcagccgcagcgtccgccggcctggcttccttcctgccctctgcgtctccgccgcgataaatattaacagagaaaggtctccctacgttcaacaccacgccagctgcaagaaggaccaacagagaaaggtctccctgcgttcaacaccacggtctccctgtgttgtgttcgcttactgcgtgccgtgcctgggccagcacggcccgatggaagcccgtcgtgctttagggccgtgctgggccttgcttctactcactaggcccgaaaagtcgcgccaagtcggcagcgtgcgctactgcgctgtgccgaccactctcgttcccgtctccgtctcgcgcgcctcgccttcgggtgcagcggtcaagaaatcaggctccgcgtccgccgtggacgtgtggataaggaaggacgagaggtcgggacgtggtccgtgtccccaagtcggaacgagccgagacgtgcgtgcagcaggcgagttgactgttggcgctgaatccttgatccagtcggcgtcaacagttctcgattcctccttgcccaagtttccaattccagttctcgagagaaaacgtcgtgcagtgcagcgcaactgggtcgcccttctcttcgacttcttgagtcgcccttttcgtccccttgttgtcggagtcgcgcgagggattcccccttcttttccccctcctcctttctcgggatcagcgagcctaggcctagctgaggtgttggcgccagccagcatgaagtacaagaagagccgcgacgccacgggcctcgggtccaacggcgacggcggctggcagaaaggcggtggcgatgtgccgccgagcatccagctggacatcatggagcaccgtggcgccgccgccacaaccgggctcgggaccggaggcaccgccggctcggcgtccttcttcgagccgtggcgcgagcggacgccgggcagcagcggaagcgggcgcggcagctccggcggagggggcgacggccgggagccgcccgagaagcggctcacgctgttcgccctccggctggccgtgttggagaaagcggcgagcgggctcgggaagctcgacttcgtctgggccaccgtcgtgctcctcggcggcttcgcgagcaccctcagcatcaccgacttctggtgcgtcaccgtcatcctcgtcggcgagggcgcgcgcgtcttcggccgcagccacgagctggagtggcagcagcacgccacgcagacctccaccgccggcggcgcgctgcgctccagctcccgcttcttccgccacatcgtgcacgccctcgtcgacccggccgcggcggccgctggcggccgccgcaacgacgacgacgacgcgcgcgccagggccgcgctgttccagcgccagatcgtcgcgttcatgaggcgccgcgcctggcacgcgccggacgtgtcgctgctcccctacaccggctgggtcttcgtctccaggaagatcggcaggctgctcaactggatgcaggtgctctccgccctggcctgcgtcgtgctctcggtgatgcgtctctggaagcaggacttcggcggccgcgacagccgcaacatgaggccggcgctcctgctcttctacaccctggcgctcgtggaggcgtcgctcttcctgttcgagaaggcgtactggacgtggaaggtctccgtctgcaagctgctccaccaggtgagcgccgagtgcgagctgggcccgtacgggctcgtctccctcaagcgcttcttctacgacgcctactcgcggtgcatcgccgggagcatcttcgacggcatcaagatggacctcgtcaccttcgccgaggacctcatcctctcggacttcctcgacgagcagatcatcggcgtgcgcatcctgcagcagttcgccaacagcgagcgctccgcgagcgacacgctgcgcaaggtcggcaccaccccgaggtccatcgaccggctcgtcgagatgctcaactggaagcgtaccgaagaggatgaggtgcgactgtgcgccgccgagatcgtgtccaagctcgccagcaagcgtcagaacgcgctccgcgtgtccggcatccctggggccatcgagtccgtcacgtccctgctctacaccgccacgagtccacccgtgtccggaacgcacccgcagctgcccggtgctcccgccgagcacggagcctcaccgccggcggcgagccgcggctacgaccacctgcagttcaacttgctgggcctgctcatcctcaaaaggctcgccagggaccacgacaactgcggcaagatcggtaacgcgcgaggcctgctcgccaaggtcatcaacttcacgcaggcgtcgcgggctctcctccagaacccgcacgtcaccgactcgcaggtgcgcgccatgaagcgcgcgctcaaggtggtcaagatgctcgtgtccacgacgggtagcaccgggaaggcgctccgggagagcgtcgcggagaacgtcttcacggtgagcaacctgcgcggcatactgcggtacgggcagcagcacagggagctgcagaagcttgccacggacgtgctcactgggctggccatgcacgacagcggcaaggaggccatcgtggccacgggaggcgtcgtcaagctgctgctttcgatattcttcaatgtccaagacacggaactcggtcgcgaggccggcgaagcgctggcgatgctggctctggagagcgaggccggatgcgcggcgatactcaggcagaccgacgtgctggaccagctcgtgtcggcattgcaggacggcgacgcacggcggcgcctcaacgcggcgagggtcctgcggaacctgtgcgcgtactcggggcaacagcagagggagcggctgcgcgtggtgaccaaggccttgccggcggtgctgaacgccaccaaggtggacaaagacagaatactcgaggtgtccgtcggcctgtcgacggagatctgccagttcatcgacggcgagcagtttgccgccgagctgcgcggcgccggcgtggcggacgaacgcgcatacgtggagctgctggcgagcatcctgaagcagtacaggtatccggacatcagggtcccacgaatgcgacggttcgtggtgcagcaagtcatctggctgatgacgagttcgggcggaggcggtgaccacagcggcgggtacgttcagctcctcagggaggtgggcatgaagcggctgctagagtccatcgctgacaccacgtcggagctggagtgctaccacgttttctcaggaagcgtcggcatcagcaagcaccgtgagagcttctccgccatcgtggactccgcgctggagctgatcgccggcagcggtgatggagcccgagctgaagactga

SEQ ID NO: 3453 - DNA, 2667 bp, Zea mays
  Peptide Sequence Number=SeqID_46828
atgatgtacaggaagggccgcgactccaacggcgacaagtcacaggaaggcggcggcgatgtgccgccgagcatcaagcttgacattacggatcaccctgctagcggcggcggcaagacggcgtccttctccgagccgtggacgccgacgcctggaagtggtagttgtcgtggcagcagcagcagcagttctggtaggagcgacccgccggagaagcagctcacgctgttggcgctacgcgtggctatcctcgagaaggcggcgagcgggctcgggaagctcgacttcgtgtgggccaccgtcgtgctcctcggcggtttcgtgagcacgctcaacatcaccgacttctggtgcatcaccgtgatcctcgtcggcgagggcgcgcgcgtcttcagccgcagccacgagctggagtggcagcaccacgccacggaaacgtccaccgctggcggcgggctgctccgctccagctcccggttctttcgccgcatcctgcacgccttcgtcgaccataccggcggcggcggccgtaacgaagaggagccgcatcagcacgccacgccaaccaccgacgctggcggcgtgctgccactgccaccgctgcgctcttgccgccggttcttccgccgcgccgtgcacgccctggcccacccgggagcgggcggtgcagatgtcggcggcgacgcgatcacgacgtcggcaatgttccagaaccagatcgtggccgtcgtgaagaagcgcactgggcacgcgccgaacgatgtgtcgctgatcccctacaccggccggatgttcacctataggaacatcggccggttgctcaactgcctgcaggtgctctcggcgttcgcctgcgtcgcgctctcgctgatgcgcctctggaagcacgacttcggcagcggcggcaacatgaggcctgcgctcctgctcttctacaccctggcgttgctggaggcgctgctcttccttctggaacaggcctactggacatggaagttctccttctgcaagctgctccgtcatgtgagcgaggactgccagctgggcgcgtacggtcacgtctccctcacgcgcttcttctacgacgcctactcgcggtgcgtcactggcagcatcttcgacggcatcaagatggacctcgtcaccttcgctgaggacctcatcctgtctgatttcctggacgagcagctcatcggcgtgcgcatcctagagcagttcgccatgaaggtgaactcggcgggcgatacgctgcgcaaggtcggtactagcccccggtccgtcgagcggctcgtcgagatgctcaactggaagcggcctgacgaggtggaggtgcgccagttagcggcggaggtcgtttgcaagctcgccggcgagcgccagaacgcactccgcttgtccgccatccccggcgccatcgagtccgtcatgtccctgctctacacaggccggagcgccgccgtttccggcatgcacccgcaaccgaaccatgctgccggtgagggccgcgacttcgacaacgactacctgccgctcaacctgctggggctaagcatcctcgagaagctcgccaaagatcaggacaactgcgggaagatcagcaacgcgcgcggcctgctcgccaagatcatcgatttcacgcagacgtccaaggatctcctcggcagccaatgcgtgtcggattcggcggtgagcgccgtgaagtgcgcgctccaggtggtgaggatgctggtgtccacgacgggcaacacgggccacgcgctccggcagggcgtcgcggagaacgtgttcgctgtgtgcaacctgcgcgggatactgcggtacgggcagcggcacaaagagctgcagatgctgaccatcgacgtcctcaccgcgctggccctggacgacagcggaaaggaagcgatcatgggcaccggagggttggtcaagcttctgctctcgatattcatcagcgccgaggagggagagctcggccacggagccggcgaggcgctggcgatgctagcgctggagagcgagacgggttgcgcggcaatactcaagcgagccgacgtgctccagctcgtctcggcgttgctggacggtgacgacgcccgccgactgcacgcggcgagggtgctgcggagcctgtgcgcgtactcgggcccagaatacagggagcgactgcgcgtggtgaccaagttgttgccggtggtgctgggtatcaccatgacgaagagcaacaaggtcctggaggtgtgcatcggcctgacgacacagatctgcacgttcatcgacggtgaccggttcgctgccgagctgcgcggtgccggcgtggaggagggggcgtatgtgcatcggctggcgacaatcctgggggagaacgagtacccgaaggtcaagatcccccggatgcgacggttcgtggtgcagcaggtcatctggttgatggcatgctcgggtggtggcagttacatggagctgctgaggggagttgggatggagaggctgctcgagtccatcgcagataccacatcggagctcgagtgctaccatgtcttctcgggcagcgtcggtattggcaagcaccgtgagagcttcccagacattgtggactccgcgcttgagctgatcaaaggcggtggtgacagagctccagctccagctccagctccagctgaaaagtga

SEQ ID NO: 3454 - DNA, 123 bp, Zea mays
  Peptide Sequence Number=SeqID_46829
atggccttgctctccacagtggaaacatgctctgtttccaacctgagctggtgctgcctgactgttctgctggaaactgcctttgaaactgctgctgctgaggtggacgctagttctgcctga

SEQ ID NO: 3455 - DNA, 462 bp, Zea mays
  Peptide Sequence Number=SeqID_46830
atgtataagattcacgggagcaaccacacagaagaagaggctacatgggagactgaggatttcctacgatctcgcttccccgactttctgcctaaaggagtcgtttccttagcaccccatgaagctccctgtgcccttggattgaactctaccaccgtgagcaggccggagcacacgctgccgacgagcccgcccgcctgcgcacgtggcccgaccgattccggccatcaccgtcgacgagccgtacctcgacgtgaccgccaggacctcccaaagctaaccccgcccttcaccggacctccctcgccgccggaaaaatactgtaatctcgctgacggggagtacatcctcgttccggagcaaggagctgctcaggaggtagcccaggagccagcatcagagcctgccatcgaggatctgcctgccccagctttagaaggcaagccccgattttatgcataa

SEQ ID NO: 3456 - DNA, 288 bp, Zea mays
  Peptide Sequence Number=SeqID_46831
atgagcccgctcgcctgcgcacgtggcccgaccgattcccgccatcaccatcgacgagccgtacctcgacgtgaccgccaggacctcccaaagctaaccctgcccttcgccggacctccctcgccgtcggaaaaatactgtaatctcgctgacggggagtacatcctcattccagagcaaggagctgctcagcctgctcaggaggtagcccaggagccagcaccagagcctgccatcgaggatctgcctgccccagcttcggaaggcaagccccggttttatgcataa

SEQ ID NO: 3457 - DNA, 264 bp, Zea mays
  Peptide Sequence Number=SeqID_46832
atggagcctggcggagggacagctgtcggagcggttgagtccttgctgacgtcctcttgcttccgtaagggggctgagagccgccgtcgtcacagagtcgagtccgagcccctgggtcgggcgaggcggagttcgtcgtcttctggggctgagcccaagtccgagccctgggtcgggcggagcggagttcgccgtcttccggggctgagcccgagtccgagccctgggtcgggcggagcggagttcgccgtcttccggggctga

SEQ ID NO: 3458 - DNA, 354 bp, Zea mays
  Peptide Sequence Number=SeqID_46833
atggcgcctcctgttgacgtggctggcctgtgccctaggttgggcgatgtggaagctcctccgaagccgaggtcgagtctgtcttccgtggtcgaggtcgagtccgagcccctgggtcgggcgaggcggagttcgtcgtcttctggggctgagcccaagtccgagccctgggtcgggcggagcggagttcgccgtcttccggggctgagcccgagtccgagccctgggtcgggcggagcggacccgagtccgagccctgggtcgggcggagcggagttcgccgtcttccgggacttagcccgagtccgagccctgggtcgggcggagcggagttcgtcgtcttccgggacttag

SEQ ID NO: 3459 - DNA, 1684 bp, Zea mays
  Peptide Sequence Number=SeqID_46834
cctgctcgacccgctggaaattcgcgaactccacaaactggttcgtgacactgacaaagttttccctaatcctggtaattcaaacctgggactgataactgcttttttcgaagcatacctgaacgctgactacaccgatcgaggactgctgacaaaagagtggatgaagggtaatcgtgtttcacacatcactcgcacggcttccggtgctaatgctggcggcggaaacctcaccgatcgcggcgaaggtttcgtacacgatctgacgtcactggcgcgcgacgtagccactggcgtactggcccgttcaatggatctggacatctataaccttcatccggcacacgctaaacgcattgaggaaattatcgctgaaaataaaccgcccttttctgttttccgcgacaaattcatcaccatgcctggcgggctggattattcccgcgccatcgtggttgcgtccgtaaaagaagcaccaattgggatcgaggtcatccccgcgcacgtcactgaatatctgaacaaagtactgactgaaaccgatcatgccaaccctgatccggaaatcgtggatattgcctgcggtcgctcctctgccccgatgccgcagcgagaactgcgggcagaactccatgaagcccggaaaaacattccatcaaaaaatcctgtcgatgacgataaattgcttgctgcatcacgtggtgaatttgttgacggaattagcgacccgaacgatccgaaatgggtaaaggggatccagactcgcgattgtgtgtaccagaaccagccagaaacggaaaaaaccagcccagatatgaatcaacctgagccagtagtgcaacaggaaccggaaatagcctgcaatgcctgcggccagactggcggggataactgccctgactgtggtgcggtgatgggcgacgcaacataccaggaaacattcgatgaagagagtcaggttgaagctaaggaaaatgatccggaggaaatggaaggcgctgaacatccgcacaatgagaatgctggcagcgatccgcatcgcgattgcagtgatgaacctggcgaagtcgcagatcccgtatctaagtctcagctcgatgacattgctgatactccggcactatatttgtggcgtaaaaatgcccccgtggacaccacaaagacaaaaacgctcgatttaggaactgctttccactgccgggtacttgaaccggaagaattcagtaaccgctttatcgtagcacctgaatttaaccgccgtacaaacgccggaaaagaagaagagaaagcgtttctgatggaatgcgcaagcacaggaaaaacggttatcactgcggaagaaggccggaaaattgaactcatgtatcaaagcgttatggctttgccgctggggcaatggcttgttgaaagcgccggacacgctgaatcatcaatttactgggaagatcctgaaacaggaattttgtgtcggtgccgtccggacaaaattatccctgaatttcactggatcatggacgtgaaaactacggcggatattcaacgattcaaaaccgcttattacgactaccgctatcacgttcaggatgcattctacagtgacgggtatgaagcacagtttgcagtgcagccaactttcgttttctgttgccagcacaactattggaatgcggacgttatctgttga

SEQ ID NO: 3460 - DNA, 246 bp, Zea mays
  Peptide Sequence Number=SeqID_46835
atggagttcgggttacgccgtcgatctggcctcgactggtggattgagagcttcgtgaaattgagcgaatcaggcgttgggtcgtcgaatttgggagccatagcgtgcataactgggactgcgcaccgaagaaagaacaccgtcgcggatccgtgtgacgccgtgggggaccctgttgctgcctccattaccggtgagaaactatttaatcaaattcggatgaccctcctcgtttggcccctgtag

SEQ ID NO: 3461 - DNA, 2091 bp, Zea mays
  Peptide Sequence Number=SeqID_46836
atgacggtctatgctcctgtccctgtacccgtaaacggcaacacgcattacaccagtgaaagcatcgagcgtttaccgaccgggaatggcaatatcagcgatctgctgagaaccaaccctgcggtacgcatggattcaacgcaaagtacctcgttgaaccagggagatattcgccctgagaaaatctctattcacggtgcgtcgccctaccagaatgcctatttgattgacggtattagtgcaactaataacctgaacccagcgaatgagtccgatgccagtagtgcaaccaatattagcgggatgtcacaggggtattatcttgatgtcagcttactggacaatgtgacgctttatgacagttttgtgccggttgaatttggtcgcttcaatggcggggtaattgatgcaaagatcaaacgcttcaacgctgatgatagcaaggtgaaattgggttatcgcactacgcgttcggactggttaacatcgcatatcgatgagaataacaagagcgcatttaatcaaggctcttcaggaagtacttattactccccagattttaaaaagaacttttataccttgtcgtttaatcaggaactcgctgataacttcggcgttaccgccggtttatcgcgccgccagtctgatatcacccgcgcggattatgtttcgaatgacggcattgtcgccggtcgggcacagtataaaaacgttatcgatactgcattaagcaaatttacctggtttgccagcgaccgctttacccacgatttaaccttaaaatataccggctccagccgtgattataataccagcaccttcccgcagtctgagcgcgaaatgggtaataaatcctatggtctggcatgggatatggatacgcagctcgcatgggccaaactgcgtaccaccgttggttgggatcatattagtgattatacccgtcacgatcatgacatctggtacaccgaactttcatgtacatatggtgatattacagggcgttgcacccgtggcggattaggacacatttcccaggctgtagataattacaccttcaaaacacgcctggactggcaaaaattcgccgtgggtaatgtttcgcatcaaccctacttcggcgcggaatacatctattccgatgcgtggactgaacgccataaccagtctgaatcctatgtgattaatgctgccggaaagaaaactaaccataccatttaccataaaggttataaccgttactatggcgggaatattcttgatatgggattacgtgatatccgcaatagctggacggaatcggtatcaggtaataaaactctgacgcgttatcaggatttgaaaacgccttataacgatgaactggcaatgggattgcagcagaaaatcggtaagaacgttattgcgcgtgcaaactatgtttaccgtgaagcgcatgatcaaatcagcaaaagcagtcgtaccgacagcgcgactaaaaccaccattactgaatataacaacgatggcaaaaccaaaacgcattcgttcagcctcagttttgaactggccgaacccctgcatatccgccaggtagatattaacccacaaattgtctttagctatatcaagagcaagggcaacttgtcgttaaacaatggttatgaggagagcaataccggtgataaccaggtggtttataacggtaatctggtctcttacgatagcgttccagtggcagattttaataacccattaaagatctccttaaacatggatttcacgcatcaaccgagcgggttagtgtgggcgaatacgctggcctggcaagaagcgcgtaaagctcgcattatccttggtaagacaaatgcgcaatacatcagcgaatattcagattacaagcagtatgttgacgaaaaactggatagcagcctgacctgggacacccgcttgtcctggacgccacaatttctgcaacaacaaaacctgacgatcagtgccgatattctcaatgtactggatagcaaaaccgctgttgatacaacgaacaccggtgtggcgacctacgccagtggccgtactttctggcttgatgtcagcatgaaattttaa

SEQ ID NO: 3462 - DNA, 1298 bp, Zea mays
  Peptide Sequence Number=SeqID_46837
gatggttcccgcgtgctgctgcgtgacgtcgcgaagattgagctgggtggtgagaactacgacatcatcgcagagtttaacggccaaccggcttccggtctggggatcaagctggcgaccggtgcaaacgcgctggataccgctgcggcaatccgtgctgaactggcgaagatggaaccgttcttcccgtcgggtctgaaaattgtttacccatacgacaccacgccgttcgtgaaaatctctattcacgaagtggttaaaacgctggtcgaagcgatcatcctcgtgttcctggttatgtatctgttcctgcagaacttccgcgcgacgttgattccgaccattgccgtaccggtggtattgctcgggacctttgccgtccttgccgcctttggcttctcgataaacacgctaacaatgttcgggatggtgctcgccatcggcctgttggtggatgacgccatcgttgtggtagaaaacgttgagcgtgttatggcggaagaaggtttgccgccaaaagaagctacccgtaagtcgatggggcagattcagggcgctctggtcggtatcgcgatggtactgtcggcggtattcgtaccgatggccttctttggcggcaccaccggtgctatctatcgtcagttctctattaccattgtttcagcaatggcgctgtcagtactgatgtttaaccgcaacgccgaacgctacgaaaaaggggtggtgaaaattctccaccgtagcctgcgctggattgtgatttatgtcctgctgcttggcggcatgggctcggactcgggctcggccccggaagacgacgaactccgcctcgcccgaccccagggctcggactcgggctcggccccggaagacgacgaactccgcctcgcccgaccccagggctcggactcgggctcggccccggaagacgacgaactccgcctcgcgcgaccccagggctcggactcaggctcagccccggaagacgacgaactccgcctcacccgaccccagggctcggactcagccctggcctcagccgacggtctccgcctcgcccgacccaggggcttggactcgacctcggccttggaagacagactcgacctcgacctcgaaggagcctccacctcgcccaacccagggctcggaccgaccacgtcatgggagtcgccatcattaccctaccccaagctgactcatgctacgggggacaagaccagcgtcccatctggctcgctctgctatacgaggaccccccgggttcgaaacgccgacaccaggaaaaatggtaaccg

SEQ ID NO: 3463 - DNA, 225 bp, Zea mays
  Peptide Sequence Number=SeqID_46838
atggcgtcatccaccaacaggccgatggcgagcaccatcccgaacattgttagcgtgtttatcgagaagccaaaggcggcaaggacggcaaaggtcccgagcaataccaccgttctcaccacccagctcaatcttcgcgacgtcacgcagcagcacgcgggaaccatcctgattcactttcagcaggattttgccgaactctccctagaggtcagacgcgtctga

SEQ ID NO: 3464 - DNA, 2052 bp, Zea mays
  Peptide Sequence Number=SeqID_46839
atgtgggcggagagggtggtcggcgagcgccggatgcggcagatccagcgcttcgcgcggaacgccaagctcaccgtcgtctgcctcctcctcaccgtagttgtgctccgcggcaccatcggcgccggtcgcttcggcacgccgcagcaggtcctcatcgagctccgccagcacttcgtctcccacccgcaccgggcgctcgcggagcaccacgacgccaggtccagggcctccaccaccaccacgtcgtcctcgtcttcctccggccgccgcgacgagcccgacccaccgccgaggtcgctcagggacccgccctacacgctggggcccaagatctccgactgggacgagcagcgcgccgcctggcaccgccgccacccggagacgccgcctttcctcaacgacatcaagccacgggtgctgcgagacggccctgctcatcttcctcgtcctaccgccgaggtcctagcagactgcgagacggcggttgcagcggttctcctgctcgtcacggttgcagcgggaaccgcggccggccctgttcatcttcctcgtcacggttgcagcggctgcgagacggcggcgcgcgctctgttttcttggtctctggcgcggcaagggagtactccggccaggggtgacctcgaggaggaggagaggggcgcggccgccgagctggccgcgatagccggcgccgcgccgccgccgaagctggaggacttcctcggcggaggcgtcgccaccggtggtccggaggcggtggcgcccgcggagatgtacgactcggacctcaagttcatagccgccgccgggttccttggcggctcggcggcggcggcggcgacgtcgccgctgtcctccctcgaccaggccggttccaagctggccttgcctgcggcggcggctgctccggcgccggagcagaggaaggccgtcgactcctttgggcagcgcacgtccatctaccgcggcgtcacacggcaccggtggactggcaggtacgaggcacatctgtgggacaacagctgccgacgcgaagggcagagccgcaagggccgccaaggtggctatgataaggaggagaaggctgccagggcgtatgatcttgcagctttgaagtactggggttctagcaccaccaccaactttccggttgctgagtatgagaaggaggtcgaggagatgaagaacatgacgcgacaagagtttgttgcttcccttcgaaggaagagcagtggattctctcggggtgcttccatctaccgaggtgtaaccagacatcaccagcatggacggtggcaggcgaggatcggaagggtggccggtaacaaggacctctaccttgggacgttcagcaccgaggaggaagctgcagaggcctacgacatagcggccatcaagttcagaggcctgaacgccgtcacaaacttcgagatcagccggtacaacgtggagaccataatgagcagcaaccttccagtcgcgagcatgtcgtcgtcggcggcggcggcggcgggtggccggagcagcaaggcgctggagtcccctccgtccggctcgcttgacggcggcggcggcatgccagtcgtcgaagccagcacggcaccgccgctgttcattccggtgaagtacgaccagcagcagcaggagtacctgtcgatgctcgcgttgcagcagcaccaccagcagcaacaagcagggaacctgttgcaggggccgctagtagggttcggcggcctctactcctccggggtgaacctggatttcgccaactcccacggcacggcggctccgtcgtcgatggcccaccactgctacgccaatggcaccgcctccgcctcgcatgagcaccagcaccagatgcagcagggcggcgagaacgagacgcagccgcagccgcagcagagctccagcagctgctcctccctgccattcgccaccccggtcgctttcaatgggtcctatgaaagctccatcacggcggcaggcccctttggatactcctacccaaatgtggcagcctttcagacgccgatctatggaatggaatga

SEQ ID NO: 3465 - DNA, 384 bp, Zea mays
  Peptide Sequence Number=SeqID_46840
atgtcgcgagcgcgcctgcgccttgtgtacggcttaccgtacatgacatctctcccggcctcgaaagtcagctcgtcctcgagctggaaagcggggaagcttgccctgaaatcctcaaaatcctcccaggtcgcagacgacactggttcaccgtgccactgtatcagaacttgcctaacgccgcgagccaggcgacccgccaggacacgggaaggtgtggacaccactgcgccgttgagtgtggccggtagcgcaggtggttccgttggtggcgccccaacgaacttcttaaggatgcccacatggaagacgtcgtggattttggcgtcggatggaagttgtaggcgtacggcagcctcgttgatgatctccttgacacggtag

SEQ ID NO: 3466 - DNA, 798 bp, Zea mays
  Peptide Sequence Number=SeqID_46841
atggcggcaatcactcccgcggcagtgagtccccctttccgcaacgcctccaaagccttgagaaggggttcaaggttcttctgttgtaacaccctgaatttggggccccgtcttctccgcgtaaccgccgcccgagctgtgcgctgccgcggactccgcgcccacgtcgcgcgtggagctcgcaaccgccccgcccctggccacttgagcccagagccccactcgccctctccccctccctcatttgcgcaccagcagacccctcttccacctctccctcgctgcgcgcacgccagagcaccgccgccacaaatccccgccgtcccgagctcgtttcccggccgccgttggagctccgccgtgtccgttgccacggtgagcttcgccccggcgtccgcaacccgggacgcgccccaattccctctccccctccctatttctctctgcccgcgctcacccgccgttccccgtgcagccgcggaggtccgccaccgccgccccgggccaccgtcgcgccagtgccgccgccgaggagtccccggagcccgccttgaggtcaagcctaatcctggccatccgccggagatccagcggcccaggcccgcttcccccacaccccgtctccctgccgtttgggccccgcctgtcagcccgcccgcgcgctcgctctgcccgccggccccgcctgtcagcctgcccgcgccccgcgctgcccgcccggtcccgcctgtcagccgcccaggccgccgcgcgctcgcgcgcccgcccgcaggatctaatcctggccgttcgctttag

SEQ ID NO: 3467 - DNA, 1830 bp, Zea mays
  Peptide Sequence Number=SeqID_46842
atggctagtggctacgacacaaagctcatggatggagttgtgcccggttggggtggtatgtataggctccccactcaaatattgccgtttgaaccccactcagatttctgcgcgttcattggacatgtctggtgtcgccttagaggtgaccattggataaagatgtcaaatcgtttagtgtgtcaaggttcacctgacatgtccggtatgccaccggacatgccacgtcagatagctgttgaagccttcacgcagtcgactgttgagcattgtacactcggtgccgaattcagtgtgccacttgactggaaagaactagtgtggccagaattagatcaattgctccgcgacgaggatgacacaactggtgcatcgactccatatactgctgctattcctgaatacagagttgttttcattgacaaatctgacctgtcattccaagatagatcatggacactagccaacggtactggtgtgattgatattcaacacccttgcaggtctaatgttgctgttcggaaggagctgcacaaaccagcttcagatcgctcttgtatccatctcgagtttgacatttctggcactggtcttgtgtatgaaaccggagaccatgttggtgtatatgcagaaaattctgttcagactgtggaggaggttgaaaggctacttgacctttctccagacacattcttctccatccatgcagatgcagaagatggatctcctcgtaaaggaggaggttccttggccccacctttcccatctccatgtaccttgcggactgcgcttctacgatatgctgatctactcaatccaccgaagaaggctgctttgcttgctttagcttctcacgcatctgatccagctgaagctgagcgacttagattcttggcttctccttctggaaaggatgagtattctcaatggataactgctagtcagaggagccttcttgaagttatggccgcattcccttcagctaagccaccactgggagtgttttttgcagcaatagctcctcgtctgcaaccacgatactactcaatttcatcatctccaaagatggctccctccagaattcatgtaacatgtgcgttagtttatgggccttcaccaacaggaaggatccaccaaggagtttgttcaacatggatgaagaatacaattcctctggaatatagcgaagaatgcagctgggctcccatctttgtgaggcagtcaaatttcaagttacctgctgatccgtccactcctattatcatgattggtcctgggacagggctggctccttttagaggcttcttgcaggaaaggttagcattgaaacaatctggggcagaattgggcacttcaatccttttctttggatgcaggaaccgtaatatggactacatatatgaagatgagttgcaaactttccttgaggagggggcgctttctgagctaattgttgcattctctcgggaagggccaacgaaagaatatgtgcagcataagatggtggaaaaggccacagatatttggaacatcatctcaaatggtggttacttatatgtttgcggtgatgccaagggaatggctagagatgtacacaaaatgcttcatacaatagtccaagagcagggatctttggataactccaaaaccgagagctatgtaaagagcctgcagatggaaggaagccgcaatgttgcatcgaaggtgcagcttgcttcggcacccgtagggatgcaagttctaattattcagggttcctgggttgaccaggctgcaagttctaattgggctgaaaacatggagatgtcggatcattcaccattggtctga

SEQ ID NO: 3468 - DNA, 408 bp, Zea mays
  Peptide Sequence Number=SeqID_46843
atgtccatagtgcatacagtattgatatgtcgcggctgcttcctcggtaacgcgcgcgtcatgaagagcgtaaggccttacgtcaggctccgcccgttggcttacgtcacgggatgcatgccatgtggcagcatcggggctctgcctgagcggggagcagaagcgtacacggaccctgctgtgagtggcctggaccccacacagaggggtccgaaacccatcctaggggtccggtttgcgcacgtggaggtcccagacctctcccggagctctggagccgtccacgtggtggggtcgggtgctgtttaccacgcgactagagatagccgcgcggggtgggaggggggctccgccacgatggctttggaagtggggcgttggagaccggggagcggcggacatggctga

SEQ ID NO: 3469 - DNA, 147 bp, Zea mays
  Peptide Sequence Number=SeqID_46844
atgcccttacttcacctaccctgctcccccacccgcaccccacactccatatttgtggctgttggtggcaaaaggggccggccctggggggtggcagccggtgccaccgcaccgggccccacgaagctggtggcccccagcccataa

SEQ ID NO: 3470 - DNA, 882 bp, Zea mays
  Peptide Sequence Number=SeqID_46845
atggccgacctctcctttgagcctgggcgtcctggggaatcaacaattgagcttggtcgagttattgaccgtggcctcagggagagtcgagctgttgacatggagttcttgtgtgttgttgctgggaagcatgtctggtctgtgcgtgtggaccttcacatcttggataacggagggaatctcattgatgcagctaatatcgttgcattggcagctttatctactttctggaggcctgaatgcacggttggtggggacgatggtcagcaagttacagtgcatgatcctgagatagacgtacactcccaatgtgctctattgtcctcaaaggttagggatctacttcctcttacgatacaccatatgcccatagttgtaacatttgcatattttggtgaaggtaacatcgtggttcttgatcccacatacaaggaagaagcagtaatgggagggaggatgactgctatagttaactcaaatggggatgtttgtgccattcagaaagctggtggagagggtcccgtgtcaagtgttaccatgcagtgtttaagaattgcttcggtaaaggctgctgttataacaagcaaaataaagaaagcgaaatttaagtttgccttccttatttttgacattctttttagtggaaataacattaaaataatgaatcttggaggagatggtcaaggtgcaagtggtgtaattacagatgttctacgaaacactgatgatgatgctgttgatccccatctagagcgcattaagaatcaggctggggatgaagaaagcgatgaagaggatgaagattttgttgcggataaggatgatagtggatctcctactgatgactcaggtgatgaggaatgcactgatgttttgagctaa

SEQ ID NO: 3471 - DNA, 477 bp, Zea mays
  Peptide Sequence Number=SeqID_46846
atgccgcagaaaatcgcgcccgacgcgcaccaaagcaacccggcctatgacacgggggcctgggcccacaagtcatacaactggtgtactggcccacaagtcatactccttgggtgtcggttcctgggtgaagaaagagtgaaccgccgctcgcgccagtactgcgcctcctcggggccaccacagaagacagagaaggtgatttttcaaaaccaatgcagcggtattgaggcgcctcgcgcgtggcccggcgaaaccatcaggcgtgggggccacgggggtaccccttactacagtatgaagacgcggtaccgcgcggctatctctagtcgcgtgaccggacctccgggagaggtccgggacctccacgggtgcaaaccggaccccctaggatgggttccggacccctctgtgtggggtccgggccactcacagcagtattccgggattccgggacaaagagtacccagaccttaa

SEQ ID NO: 3472 - DNA, 324 bp, Zea mays
  Peptide Sequence Number=SeqID_46847
atgccggcggactccgacgacgtcgccagcccggcgtcgccgctggggctgggcagcgtgcacaagaggggcgggggcgggggcgggaaaagcggcgggcggcggcgtccgggcccggcgtaccgcggcgtgcggatgcgggcgtgggggaagtgggtgtcggagatccgcgagccgcgcaagaagtcgcgcatctggctcggcaccttcccgacggccgagatggcggcgcgcgcccacgacgccgccgcgctggtcgtcaagggccgcggcgcggtgctcaacttccccgagatggcggcgcgcctgccgtgttgggaatag

SEQ ID NO: 3473 - DNA, 609 bp, Zea mays
  Peptide Sequence Number=SeqID_46848
atgtacctccgcggagcgccgaacagcaacaggaacatcaccgtcatctggaaggccaagaacttcaccgtccacagcgtcgtcaggtgggtggacacgcagctcccccgccaccccaagctgaaggcgttctacaggtcgatatcgccccggcacttcttcaacggggactgggacatcggaggcagctgcgacaacaccagccctctggccaagggagggagcggcgtccacctcgaccgttcggaggacgccgacgctaaaggcgctgtgaggggcaccggggtcaggctcctggacgtcactgccctgccgcggctgagggacgaaggccatatttcgcggttcgtcctctcatcccttgtatcaccactgtttatggtacaggtggaatcatctggcctggaacgtctgatggaatttgtattcaagatcagagtcccagcggcacttgcacgtgcaaaatacagtgggcctgtcagtggcctggcagtgtcaccgatcagtccaagcccggcacggaccgtccggatcggcacaagaaaccctgctcctgctgtccaggtcacgacggcgtcgcaggcgtctccatctaaggggcctgggtga

SEQ ID NO: 3474 - DNA, 351 bp, Zea mays
  Peptide Sequence Number=SeqID_46849
atgtcgaccgtctcctcggcatggcacattctggctcggccaggcctaggcctcggtcattccgacgtcaatgcgaggcgtcgacatctgtgcactcacccctcaatgaggggtgcacggactgacgacctacgagtagagctcaaccgccgacgtgtgggcggggacgctcgaatctctctggagagggctgacgacctgcgggcggagctcaaccgtagacgtgtgggcgaggatgcccgagtctctctggagagggcgcgtgagcgccggcagaacttcaagggtcacaacctcgaccaggacttcgctccagtttcgccacaaacaccaagggatgcccgaatctag

SEQ ID NO: 3475 - DNA, 399 bp, Zea mays
  Peptide Sequence Number=SeqID_46850
atggtattacacccaaaaatacctacatgttcaggtctcgacagccacaatgaacaaacaccagcactcaaggtgtcattacaaacggaactccggttctgcccccgcaggtacgaacaaccccccacgttggagggcctgcggggcgacaaaacccctggcagctcgctgacgcccgctccggtagcagcgacaacgacccccgctccgaagcggccaaacagcagcagcgatgacctcagggcggacgctgctgcaacgagctcctcgcccacgcccccactcgaggggcgagaacaagcaggaggccgtagagtcggaggtcagtccgcgggtggcaccggctatcccatcggcagagaaacctcttccggctgcctcggtgggaggtggcactag

SEQ ID NO: 3476 - DNA, 174 bp, Zea mays
  Peptide Sequence Number=SeqID_46851
atggagagtcatgatctccgggcagaatgggaatcacggcttgtgggtggctatgagatcgatggttttggttatgactatggtgctggttgtcagcattgcaaccactgctcaggagaagatgaagttgtggaaggagaccttcaggagttccaagattacgacgagttctag

SEQ ID NO: 3477 - DNA, 261 bp, Zea mays
  Peptide Sequence Number=SeqID_46852
atgggcgcgattaaggtcaaggctcagtccacgcaagggacacgatctcgcctcggactcagcctcgacctcggacgacggtctccgcctcgcccgaccccagggctcggactcagcctcgacctcggacgacggtgtccgcttcgcccgaccctcgggcccagactcgacctcgacctcggaggagcctccgcctcgcccgaccttgggctcggaccgaccacgtcacaggggggccatcattaccctacccctagctag

SEQ ID NO: 3478 - DNA, 404 bp, Zea mays
  Peptide Sequence Number=SeqID_46853
cggagcaacggctacttcagcgccaacggtcacctgcaacagcatttaattggctacagtgcgcgcagaagtcaggcacgcgccagaaggcgcaccagacagtctacaggacctgtccggtgaccgttggcgctgaagtagccgttgctccgctggcacaccggacagtccgcggcccatcgagggagcccaggcgtcgagatgtggaggggacggtcgctgaaggggcgaaagccgatggggtggccgctggaaccgggttggttgccggcgggaggctgccagaaggctgcttcggtctgcagcaccggactgtccggtggtgcaccggacagtgtccggtgcgccaggctgcctcggccgaagaggccgctctcgggaatttgctgacggcgtacggctaa

SEQ ID NO: 3479 - DNA, 165 bp, Zea mays
  Peptide Sequence Number=SeqID_46854
atgggtaactcgcagctctcaaactgggttgaaagaaaggggaggcttttaaaggataagttcaaggaagttatagggaaacaacagattaccacagatgtgcagaataaaatgactgctcatggatcattaagaaacaagggtggtcaaggacatgtaaactga

SEQ ID NO: 3480 - DNA, 1113 bp, Zea mays
  Peptide Sequence Number=SeqID_46855
atggagagagccgaggcctctacgtgctcggaagttgagcggacgcgcaaacagctcatggactcataccgcgagctgggcgcacggactgctgacttcgaagtgcccgaccgggaggcgggccttcgcttcctcgagtggctgcaagaagaactgttggcgctcccgaccattgtggagggatttatgtcctttgcctccctcgtcacctgcgaaggggcgatgaacgcgctgtcccgcgaggggtgcagtcactatgaggtcttcgaccgatgtgatgaagattttgggcgcgagattttcaaggtcgaagaccctgtggtgaatgactccgcgggtgccctctttgaccggatgtggggcccccacggtcgggaggtggcggcgcgtgccgaggtcgtggaggacttcggacccctgaacagcgtgcggcccaaagcggaggccaacccggtggtggccgaggctgaggtcgacccggcaccgcccccggaaaccggtgaaggctccctcgctgctcctgcggctactgtgtccagtggaggctcgtcgccaaccgctgtgccgagggcggagaatcccccgaagacggcgacggagccagcagcggaggatcccacggcggcggctgggccttcgcaggttcaagattttgggcatgcgcacgcaaccgctactgctaattttgtggcagcttcgaccgtggatgctgggaatgaatcagatgagtctgcgtctaagttttctgattttggtgactctgggagttcagttgagtggacggaagagtcttcggatgaggacttggattactttgcggccttggatgtggctgcggcggaggcttctccgcgtgttgcggatgctgaagttgtgcctggtccgagtgttgggcgtaggcagcgaagggcggtggcgaagcgtagagtgagtgagatggatggcggtcggcttcgtgtgggcagggctggcaagcaggaattgttgtccttgccggctggggcgagtgtaggtgagggggagttgcgaagtctttttgagggtgaggagcttaggataatgctatttaactatagggagatgggaatcattccgaaggttgaaccgatgtaa

SEQ ID NO: 3481 - DNA, 1029 bp, Zea mays
  Peptide Sequence Number=SeqID_46856
atgcagcccggccgcacccctccaccggcggtcacccaagatggtgacctccagcttgatggtgggggaaagcgagccgggctgcggcctctgtcccgccctcagcctcaaggattttcgtcatccaggccaagatggaggatgaggcgagtcggggggctgccttcgcgtgggccggttacccttttcttcccctggcgtctgggggagaacggcatcctccagcttcgcggagacttcctccagccacgccgggattggtgggccgccgtcactcagtcagggcgcagcactacgccctccgtccggacgacggttgcgacgcgcaccgcgagggcggcgccccatgctctgggcggttctggccagagcgaagacctgccggcgcgcttcgaggcgtcggcagccggagatggcttctctaccgatgagattgccaactccgccagtagccctgggtctccgcctcccggcctgaatggctggctctcgtcctcagcgggtgagagtccttctgccgtagcacctgccccgaagccgctgctgaagctgcttcgctgcccgaggcgggggtggttgtcgctgttgccggatcaggcggcggcgggccgcccgtcggcccgcgatcgctccgcggtttccccaatcttgtggggtcgttcgtacccgcggggacggaaccggagttccgtttgtaacggcacttggaatgccagtgtttttgttcattatggctgtcgaggcctgaacatccgaggcctcgggtcgggctggcgcccttggaagatggtcggccgaggccccagaggtgaccggccgagccgcctgctcgggccggattcccggagaagatcctggcagcgatggcccgggcgtggtgacgacatcgtccttcggagtggaggtcttcggaccgcgtcgccgttcgaggctaggtcgaacctcaccgaagatgtcgtcgatgccgagggtgctgctgcccccttccagcgtaaagacccgagcctgcaggatcagattgtcttgtag

SEQ ID NO: 3482 - DNA, 231 bp, Zea mays
  Peptide Sequence Number=SeqID_46857
atggcgatggtcaataccaggaggggtggtggaatttatttgcctcctaatcaacacactcgaagaatttatagacaacctcagccacagccagcagggatgaatcctcctaatcctccaccagggggagttgatccactggttgctgctcagatggcggtgatgcagcaaatggcggacaccatggctgatatgcgtgcccagatgcagcaagaaaacgaatcaagctga

SEQ ID NO: 3483 - DNA, 156 bp, Zea mays
  Peptide Sequence Number=SeqID_46858
atgtatggtttacaggtggtgatgaggaggatggttatgatcatgactatggtaatggttgcctttggtgcaatctatgctcaggtaaagaagaaagagaacagtgtcgaggcggatctccgggagttccaggacttctacgagttcgaggattag

SEQ ID NO: 3484 - DNA, 1083 bp, Zea mays
  Peptide Sequence Number=SeqID_46859
atggcgcctcctgttgacgtggtcagtccgtgccctagtttgggcgaggtggaggctcctccgaggttgaggtcgagtccgtcttctaaggtcgaggtcgagtccgagcccccgggtcgaacgaggcggataccgtcgactgatgccagggctgagtccgggtccgagccctggggtcgggcggagcggagttcgtcgtcttccggggctgagaccgagtccgagccctggggtcgggcgaagcggagttcgtcgtcttccggggctgagcccgagtccgagccctggggtcgggcgaagcggagttcgtcgtcttccggggctgagcccgagtccgagccctggggtcgggcgaagcggagtttcctatggcgcctgaggccggacttggttgctatcagcctcactctgtcgagtggcacagcagtcggggcggcacaggcggcgctgtcctcttgtcagaccggtcagtggagcggcgaactttgtgctgatgggggttaccagctgagaattaggagtcttgagggcgcccgcgtcccagctcgcgtgcggcgctcgctcggcccagcagcgcagcagccgcgcccccacaaccctagcgcgcgcagcagcaggagcgccgctgctgcctgcgagtgggccccacatgtcatcccttacaactgcctcctcgcgatgtgcgcgcccatcttcccacatcgccccaaaacaggaactggtgctcccgttgccccgttcctcgccccagtcatcgccagatgcgcgcagcctcgtcgccccgtcgcgctcgtcaacgccgtcgtgcgcgcccgcttggtgaaccttgtcgtccgcgcagagccgctcaccatcgccgtcgtccacgccccgtcgagtcacgccctcgccatctccgtcgagctccaaggtgaggatccccagcgtgtacccctgaccatggcctccttttcttctctatcccggtcggcgctcagtgccaaggcagcgccctgctcgctcggcgtggccttgtccaccgtggcgctggcgttgagtcccctccctcctcgcagcaagccgcaacagcaggccggccgatag

SEQ ID NO: 3485 - DNA, 156 bp, Zea mays
  Peptide Sequence Number=SeqID_46860
atgtatggtttacaggtggtgatgaggaggatggttatgattatgactatggtaatggttgcctttggtgcaatctatgctcaggtaaagaagaaggagaacggtgtcgaggcggatctctgggagttccaggacttctacgagttcgaggattag

SEQ ID NO: 3486 - DNA, 363 bp, Zea mays
  Peptide Sequence Number=SeqID_46861
atgtgcgcgcccatcttcccacatcgccccaaaacaggatctggtgctcccgttgccccgttcctcgccccagtcatcgccagatgcgcgcagcctcgtcgccccgtcgcgctcgtcaacaccgtcgtgcgcgcccgcctggtgaaccttgttgtccgcgcagagatgctcaccatcgccgtcgtccacgccccgtcgagtcacgccctcgccatctccgtcgagctccaaggtgaggatccccagcgtgtacccctgaccatggcctccttttcttctctatcccggtcggtgctcagtgccaaggcagcgccctactcgctcgacaaagataaattacaaatgtaccttcggcttgaatga

SEQ ID NO: 3487 - DNA, 528 bp, Zea mays
  Peptide Sequence Number=SeqID_46862
atgacatgtggggcccactcgcaggcagcggtggcgctcctgctgctgcgcgcgctagggttgcgggggccgcggctgctgcgctgctgggccgagcgagcgccgcgtgcgagctgggacgcgggcgcctgggccgcgcgatcaagttccacgatcttcatcttcgtcactgcttcgtacatcaaagtctttggcgccaaagcatcttgcttcggcattcacctttgcaaaccttgcataaggatgaagcttcacaactttcttacctctgattctcaattgattctaacgaaggcggcgaagcggagagttagtgaggtgtcgcggagtgatgggcgtcattgtggtgaggtggagggttgtcgtcttcgtgtggacggggctggtaaacgggaattgttgtcctcgccggctggggcgagtgtaggagaggaggagctgcggaatctttttgagggtgcagagctaaggataatgttgtttaactacagggagatgggtatcatcccgaaggttgaaccattgtaa

SEQ ID NO: 3488 - DNA, 384 bp, Zea mays
  Peptide Sequence Number=SeqID_46863
atggagcataaaaatataattaaagagtgtgacttccttcaaaatctcaaagatgaaaactgtaacctcgctgacagggagtacatcctcgtgctagagcaaggagttgctaaggaggtttgtattgtgcacttaagtgtaggagttgtttggaaccttagttgcatgaactcaggtttttcccttgtgatggatactagtatgctaggtcgagtagctgctttactacttagggatctcggtagaagtcgagtgatttttccagcactcgcgcgaggttctctggaggacatggttgctagagtgacttggtcgtccatcttgccactgggttggatagtcgagtgggaccctacctcggcagaggaggagcatgaggagtga

SEQ ID NO: 3489 - DNA, 375 bp, Zea mays
  Peptide Sequence Number=SeqID_46864
atgtctatcttaagtggagtcaccattcagcagaagaagctacatgggagactgaggattttctacgctctcgcttccccgactttctacccaaaggagtcgcttgacccggggacccgcgtcaccggaatagcccaatcgtgctcaccggagttcaagaacccgccggcgcacgtggaccggctcctcgtgcaccctaatcgatctatgccgccgtggtttggccggagcaggagccgccgacgactcccgccgcctgtgctcgtggccagggtagctccgaccacctccgacaccgacccgcacatcggcgtgaccgttgcgacctcccggacgtcactgaccaccccgccggagctctactgccgccgatag

SEQ ID NO: 3490 - DNA, 162 bp, Zea mays
  Peptide Sequence Number=SeqID_46865
atggggattggttgtctacgagatgaaattggaataaggattaaggtgtggtaccgttctctggaggagatggttgctgggataacttggccgtccaccttgccaccgggttggactgttgagtgggaccctgcctcagccgaggaggagcatgaggagtga

SEQ ID NO: 3491 - DNA, 1047 bp, Zea mays
  Peptide Sequence Number=SeqID_46866
atgcataaggggagcgcgaagacatggttgcctttcaagggggtcaccctcctttttaaaggaaactctccccacttgcgtcctcaaccatcgcgggcggagtcttctccaacacgctccaaggtcctccccctacgacacgggggctgggtcccacgcgtcatgcaagctgacccagggcagaagaagccaaaccgccgcgcgcggtgcgcgcaactgccagcggttacaagcattcctccactttcgcctagaccagcggccgaccccagaggatctacgtctcgcccgaggaccccctccagcaacggacacaccttcggttcgcccaaggcccagtcttcgccaagaagcaaccttggccaagtcgccacgccgaccgaccgtatcgcaggagcatttaacgcaaagggctcagactcgggctcggccccggaagacgatgaactccgcctcgcccgacccagggctcggactcgggctcggccccggaagacgacgaactccgcctcgcccgacccagggctcagactcgggctcggcctcagccgatggtctccgtctcgcccgacccaagggctcggactcgacctcgacctcggaagacagactcgacctcgacctcggaggagcctccgcctcgcccaacccagggctcggaccgaccacgtcacgggggggggcatcattaccctacccctagctagctcaggctacggggaacaagaccagcgtcccatctggctcgccccggctccagcgctctccgacagccacgacatcacacgaacagggtgccaaaacctctccggctgccacgacggcatggccctcttacagagggttggccgcgcggggaaggatgggacggcgcgcataagcctctcgctctctcccacgcggacgcttgtaaccccctactgcaagcgcacccgacctgggcgcgggacaaacacgaaggccgcgggtttccccttttacgcctgtctccctccggctccatttccccccttcgcgctccgtctcgcgctgacccatctgggctag

SEQ ID NO: 3492 - DNA, 387 bp, Zea mays
  Peptide Sequence Number=SeqID_46867
atggggaggagggaccacgaggcgctctacttattcacgggcgcccaggtagtcgcggataccgcggcgaagaccccgcccgaacaccacggccccggcgagctcgcgaagtccgttgagccgcggcgattctgttgggagaggatcgccgacaggcgggacccacaacgcagtgaggaggagcgcggcgagagatttaccgagcgcggacaagcaagccctggcaagtgggtcccgcgtcgcagtgggagtgcgagacgcggcgcaagggagactgacaggtgggatgtaattgtggacattactccacaacccatcgcactcaatcaaagatccaaatcaaacaagtatcataagacaaacattcaaatacatagacacttataa

SEQ ID NO: 3493 - DNA, 1362 bp, Zea mays
  Peptide Sequence Number=SeqID_46868
atgtcgccgactgtagctaaatggttcgtgccagatgcacgaggatcaatggacaatgtttacagaggccaggctgagccggagctctacttcccgcgcaggttcgtgggtcaccttctccctcagcattcaagggagagggcgctcaccggcctagcgggagggtcggacttcgacaacgtggggctggtccgcggcgagcgtcgtcagcttcagcgcgttgggctcgctggctcagctggctcaggctcggctcccggtgccccctcccgccgcaagagcggttgtcgtgccgcgcgcaccggaggaccgcccaagacgtcgcgcgctgctagggcggcgttcgtgttctggggctgtcctgcctttgccccggtatggcgcctttgcacggaggtcggtgccccgctcgtccgggatccgagtggggatctgccggtgggcagacggctcctgtcgtcggtgctgaggtggcggcggctgaagaagtcctcgtcgccgacgggatcaccgccaccatcagcgcttcgggcctccggctctttggctttgatagcttgtcctcgcccctcgagtggagacgtgggcaagggcattgttgcagcggcgttcgccctgaggccatcgctgctgcagttcggccacccggagcggaggtcgttgtcgctgctgccggagcgggcggcggtgggcgacctggagccttgtcgccccgcgggccccccaatgatccctcggccgctcttcgatgagccgaagccgaaggcagcggtgtcagcacggacagaggcggagttggctcgaaaaggagacttcgtcggccggagcctggccgggctgtccactggcaggaccgacgccggagtcgagttgccaaggccacgagccgggctgatgtcctcgggggacagctggctgaggcttcggggtggccggccgaaccgtctgctcgggccggattcctggagaagaccctggcggcgatggcccgggcgtggtgctgatgtcgtccttcggagtggagatcctccgaccgcgtcgccgtccgaggctcggtcggacttcgccgaaggtgtagttgacgccgagggtgctgctgctccccctccgtcaaggtccaagcctgcaggattggtttaccttgtagtaattgtttgtccgagcgagagttacttttcacggaaggtgatgagtgagaaggtgatgagtgaggatcccactttcgaagcagttgaaaagcacgaaagacgttctggcagaaaagatcttttccgaggaaaaaatttgaggcagagggggttcccccttctagcccccgagggagggtcgggctttgccgaggcaaggctgacccttccttga

SEQ ID NO: 3494 - DNA, 150 bp, Zea mays
  Peptide Sequence Number=SeqID_46869
atggtcgttggaagtgtgctgtcgcatggcgcaccggacactatccgggtagctccgaccacctccgacaccgacccgcacaccgacgtgaccgtcgcgacctcccggacgtcactgaccaccccgccggagctctactgccgccgatag

SEQ ID NO: 3495 - DNA, 654 bp, Zea mays
  Peptide Sequence Number=SeqID_46870
atgtcgtcgtggctgtcggagaggtgttgctgccatgttcatttcgagcccaaggtcgggcgaggtggtgactcctctgaggtcgaggctaagtccgagccctggggtcgggcgaggcggagaccgtcttctggagtcaaggctgagtccgagccctggggtcgggcgaggcggagaccgtcttccggagtcaaggctgagtccgagccctggggtcgggcgaggcggagaccatcgtccgaggtcgaggttgagtccgagccctggggtcgggcgaggcggagaccgtcttccggcgtcgaggttgagtccgagccctggggtcgggcgaggcggagcttcctatggcgctcgaggctggacttagctgctgtcggcctcactctggcgagtggcacagccgtcggagcagggcaggcggcgctattttcctgtcaggcgatccttgcattgaatgctcctgcgatacggtcggttggcgtggtgatctggccaaggttgcttctccgcgaagcctgcccgagctgggcctcgggcgagtcgaagaatcgctcctgctggtctcggaaatctcctagggtacctcgggagcgtagcccaagcctcggccatgtatctgaccccgagtggcctgaggcggtgaaagtcgcctag

SEQ ID NO: 3496 - DNA, 210 bp, Zea mays
  Peptide Sequence Number=SeqID_46871
atggagcctggcggagggacagctgtcggagcggttgagtccttgctgacgtcctcttgcttccgtaagggggctgagagccgccgtcgtcacagagttgggcgatgtggaagctcctccgaagccgaggtcgagtctgtcttccgtggccgaggtcgagtccgagcccctgggtcgggcgaggcggagttcgtcgtcttctggggctga

SEQ ID NO: 3497 - DNA, 624 bp, Zea mays
  Peptide Sequence Number=SeqID_46872
atgcaggcggcatgcaaccgcgccaagtgggcgcacttctccgactcccaacacgcccggcatggaggcccaggcccacgtgtcatgcaaccggcgcgccgaatacttcgtgcatgcaactgcaccgccacctacgccaccaccgcgcctcctcgactgcggaaccgataccgcgactcgaggcgacccagagcacgacccagcggcgccagcctggcgcgacggagaagcgggcgacgcttcgccttcgccataatgaccgcgtcagcaaaggctccgagcctccctactgatcagaggttcgaaggctggcccccggaagggtttgacagccgcctcagatcgcgtgggccctacacccactactggtcagaggttcgaaggccggcccctcggaagggttccacggccgcctcaggctactcgggctccgcgcccattactgatcagggcgggagcgatcttgtaacggaatcccatcagagggaggcatcgagccctcggaccccgtcgccaggggaccgggtccggcagatcacccgcagctcaccggagacaccatgttcggcgcccatcgagggcaacatggcgctttccccccctcctgttagaaatatgccctag

SEQ ID NO: 3498 - DNA, 645 bp, Zea mays
  Peptide Sequence Number=SeqID_46873
atggcgctactccgagcgctccggcgagcccttccggcgctctcctcgccggcggcggttctcccccgtcgcgccccgcacccactacctcctccgcccgctcctcgtcggttcctggacccgatcgggctccgctccttctccgccgccgccgccaccgcgtcgcaggcgccgcccatgggggccaccctgttcggcgggctcatggacacccggttcccgaagcgccggccgggcttcgccaaccgccggaagagggctagcttgcgccccaaaggtccgtactactgggtgaagtgcaagcctgacgagcccataccagttagtcagccgaaccaagggagcgtacgagggaggaaggagaagaagcggatcaagcagcgcaaggactttatcatggtgaatgccctttgcattctctatagccgttactgtcgatttactgttgatttactgctacggtattctgttttatgctatgctgagaagaagaagcgcagagctcagtattctgctgctgttaagagaaaggaggcagaacgaacagaaaggaagatggctgctgtggcaagagagcgggcatgggcagcaaggttgatagagctaaaacagattgaggaagacgttaaagctgtaatggcataa

SEQ ID NO: 3499 - DNA, 342 bp, Zea mays
  Peptide Sequence Number=SeqID_46874
atggcgcagtggcttacccggtctacgttcgccggtggtcggagggattccagcgaccgtggactggcctctccggcgaagcagacttcgattcctcgctcggggagcttcatcgaggtgtgctcagtcttctccgagggtcggacggggttgggaaaggcttggctggccggtctacgttggcaggggctcgggtggccgcggacacgccgtgcacgggcaaacgacgctcgcccaagtcgcaaacgtgcgaatcttggcaaaaatccggcgcgagtcttttcctggcacctagggatgtctctcatccgtcagtcgccatggcagatatgccctaggtag

SEQ ID NO: 3500 - DNA, 225 bp, Zea mays
  Peptide Sequence Number=SeqID_46875
atggggaagcctgtcccatcactcctcatgctcctcctcagccgagtgaccacacttgtacccaccataaccggaatgggagaccacgtctcaggtcgcgtgaggagggcaatctacaggcaggttcactcagacaacgcatccccatggatcgttgcccacagaccatcatcattacgatataaaaatggatacaaccaattcctgacctcgcgcgagtgctag

SEQ ID NO: 3501 - DNA, 276 bp, Zea mays
  Peptide Sequence Number=SeqID_46876
atgacggcagtcggggtcagtgaggcattgtacgccaaggcggtcaaggctgtgtccactcaagggacacgatctcgcctcgcccgagcccagcctcgggcaaaggtagccgacccaggaggattcacgtctctcccgagggtcccctcaggcaacggacgcaccttcgactcgcccgaggcccagctcggacatgcttcgtggagaagcaaccttggccagattgccacgccaaccgaccgtatcgcaggagcatttaatgcaatgatcgactga

SEQ ID NO: 3502 - DNA, 1506 bp, Zea mays
  Peptide Sequence Number=SeqID_46877
atggagaaggatcgtcaagacgcgtcgtggaaacgtcgggcgttcgctacggtaggggatccgaggcgcaaagtcaaaatggcgcaggcgagcgtgaagcatgccgcccctggcgccagcatgcctccgcctggcgcgcccggcgccagcgtgccgcttccagccgcgcccacccatgagagaaggcctccctcgccgccgcacgctgatgaggcggcgatgggtggcgccgatgtctccatggatatttccgtggatgactaccttgtgggcggtgtcgcaatattcgacgcccacatagggcggggtcctactgaacccgtggtccagttctgcgccagcggcgaagttgcctcgtccgctgtcgcgaaggacgtggccgcctcagtttcgcagcagctgagacacatgagtaaacagtgcttctggagtttatttctcttccatggctccgaatttgatgtgcgagacaagtcggcggcggaaaataggagccacaacctgctggaaaagctatcggtggcggaggctgaaaaagaggacctcagccaccggcttgcggtggagaaggaagatgcagaaaaagctcgcgcagaggcccaggctgcccgtgctgaggccaacctcgccctcaagcgcgccactgacgcggagtcggggaagaggagtctgcgtggctatgtggacagagcgaaggccaccacccgcactggggtcgaccgagcacacgcattgctcgtggatgtgtaccgtcagcttggtgcgcgtaccgcccccttcgacacatccggcaaagaggtgggcctctgcttcctcgggtggctgcaggaagagctggagttagtcccatccatcatgacgggtctcatgtcctttgcctcgctcattacctgtgagggggctgcgaatgctttgtcccgtgagggatgcaggcatttcgaggtctttgaccgggcaaacgaggacttcgaccgtggaatcttccaggtcgaagatgaggtactaaagcggtccgctggggcgctttatgacaggatgtggggccctcacggtcgcgatactgtccgggagaggtctgaccggccgctggagcagatggcgaatgatgaagaagtcgacgacttcgatggcctggaaacctcggtgacccgggcagaagatgctaggacgggggttgagcaaccggcgacacaaaccggccctggcgaagaccctccagtggcggctgcaccggaaggcgaagaccctccagcggcggctgcaccggctggcgaagaccctgcagcatcggctgctccttcgcaggttccgacgtccgagcctacgcaagcaacccctactgatgatattaattttgtggcgtctgcgaatacagtgcctgatagtggaaatttgtctggttctgaaactgagtcttggtcatcagatgggggtgagtttgggagctcgttttcgtgggttgaggagtcttcggatgaggatttcacggcggagtccttgctgtag

SEQ ID NO: 3503 - DNA, 1032 bp, Zea mays
  Peptide Sequence Number=SeqID_46878
atggagtttggtacttcgaggatttcctcggtccacatgctggagatgcagtggcttggttactttggcgacggtgtcgggcatgcactgggtgcggaggaggtccccgagccaaaaggcgagttagtggtttttgaggccttttttgtgtccggtctttgcctcccgacacatcgattcgtggtggagaagaggaagataggaaataaaatagcacaattcggatcgtgcacctttacgccgaggactgggaagacctcggctgaagtcgtggagatagccccttgtgctaggaacaagtggggcaactggtgggatttttggttttatgtggcccctagtgacgtcgaagacctgcccagcttccctccggccattctgtgctcacacttctatgtggcgtttcctcaattcgaggtggcagaggaagacgaggacgaaggggcccttcaatatgctgcccgcttgagtagcgggcgcgacttggttgaggaatttatcgcctatggagtgtggcccttggcacatggctggttactgggcgaagtgtgcccccatcatataccgaccctgggcgaccgattggccgaggccacaaagattgtaggaaagtatgtgtcgaagacggagactctgaggagctgggatatccgcggttcaaatgttaggttgaaccgtgtttttgagttgatccgtctgccatatgccggctacccgggagacgacgatgtcgatgctgttgtccgccgggggaagaaggtgatgacaacggccgacgagggcccttcgcggggaacatcgccgagcacgaccgccaaaaataggaaattaggtacaacagctgaggggtcgagggcgtctaatcgttttgctgtggatttgttgaagacctgcacggttcccggggagacgatgtcttcgcccgagcttcgggaatcttctgcgcgaatgctgaaggttatcgggggtcgctggcctaagaatgatcgattctctaggctgtcggcgaggaaatgtttacatcttgattag

SEQ ID NO: 3504 - DNA, 684 bp, Zea mays
  Peptide Sequence Number=SeqID_46879
atggctgaaaggtaccaactcccacggagttgcgttcctccaacgatgaggcggaaagacggcgggtatcccccatccgggggcttggaaggtggaaagacacgatgcatgagggagcgcgaagaaatggtctacttccaagggggtcaccctccttttaaaggcgactatccctacttgcgtccccagccgtcacgagctaagtcttctccaacacgctccaaggcccttccctgcggcgcgggggctgggtcccgcatgtcatgcaagccggctcagagcagaagaagccaaaccgccgcgcgcggcggcgcctctggcaggagaagcgggcgacgcttcgccttcgccgtaataaccgcgccaaaaaagggaccgggaaagggggataccccgaaaaggatccttccccgtgaaggaaccaggctccgagcctccctactgatcagaggttcgaaggctacccccccgaagggttcgacagccgcctcagatcgcgtgggccctacacccactactggtcagaggttcgaaggccggccccccgaagggttccacggccgcctcaggctactcgggctccgcgcccattaccgatcaggggttcgaaggctggcccccgaagggttcacagccgcctcagacgccgagcgagggatgaccatgggtacgttcgatacataa

SEQ ID NO: 3505 - DNA, 558 bp, Zea mays
  Peptide Sequence Number=SeqID_46880
atggtgacctccagcttgatggtgggggaaagcgagccgggctgcggcctctgcccctccctcagcctcaaggattttcatcaccagggctggggaggggagtgtgccgagttggggtcggcccctgcgtgggcggtggcccgctccttcactcagttatcagagggaagggcggtcgtcgtccgtggcgccggcagctgcaccgtgcctggctctcggacgcgagtggcttcggagccgctcgcggcgccggcgtctgccacggcagctggaagaggttattccgccgacgagatagccagggctgcccacggaccgacctccaactctacggccttctacccgtccttgcctcacaagtttgggcacggacgggggcctcctggcagcagcacccaccctgagtatctggacttttttgtcggtaacagggatgtttgtgcgagcgagagttgcttctcgcggaaggtgatgagtgaggtatctgtatcccggaggcgtgggagtccctcggctcggtcggccttgccgcttacgcgcactttcacccgtccatga

SEQ ID NO: 3506 - DNA, 972 bp, Zea mays
  Peptide Sequence Number=SeqID_46881
atgagtgacatcaaaattatcaagttgagcggtagcacaaatttgcaaagcatagtattttttccaagggggagctcgacggggtgggggttcgactgggcagggaagggacagggacaggggctcggtaatgctggtcggctggcgtgggcgagctccggcgacgaactcacggcgagggaggaagaggatggcgggttcggttgtaggggggagagctcatgggcgtggctgtcctatttacagaggaggagagggaaggggagagggcgtcggggagggagaaggaatggtcggttggcttcaaagccattaatggcatccattacctccattaaagttcagagggaatggggagaggcgaagaggcatcggcggttcggctccggagtgtatgatgaagggtatttacccttatcaccaattgagtgggatggtcagggattccctggtttaggggagggcctcaggtgttggctcagccgggttaggtgtgagcatgaaggatcgtcccctcatataaggactggtttgtcatccttcactacctgtactcatggcaagtacaaccacttgagactgtatgggcagtcactcaatctgaacttgtacggtctgaaccccagggttatgatggctgtggagtaccgggaggataaggaaggggaaagttttgtccggtttgggcatggtggtggcctgactccttccggtataattgttaagatggaaggcacctttgtccttaagacatcctattgctcggaggtggagggattccctcaccttcttcggagttgtgtgcttcgcatggggatccgcaagaagccggagtatgtatggaaggaatactgcgagaatgggattgagaaatgctctatggcggtctacctaggagaaagccgaagctaccccaatcaccctccctttcagatcaccgccattggccaccgcttcccagatacttgctag

SEQ ID NO: 3507 - DNA, 156 bp, Zea mays
  Peptide Sequence Number=SeqID_46882
atggggaagcctgtcccatcactcctcatgctcctcctcagccgagctcatcatatttccacttgttactcaatgcagtacaatggatcaagcagtctcattagctgcgagaagcagacgattcgaatcgagtttttaaaccttgcaaggatttaa

SEQ ID NO: 3508 - DNA, 390 bp, Zea mays
  Peptide Sequence Number=SeqID_46883
atggcccgcgcccgcgcctataaagcccactcaggcgtcgaccattcccttccgcacacactcaacctcactggagctcaaactcaccgtcgtttgcccgtgcacggcgtgtccgcggccacccgagcccctgccaacgtagaccggcccagccaagcctttcccaaccccgtccgacccttggagaagactgagcacacctcggtgaagctccccgagcgaggaatcgaagtctgcttcgccagagacgaggccagtccacggtcgccggaatccctccgaccgccggcgaacgtagaccgggtaagccactacgccatttttcgattcaatgcacagatagcctctacatcaccccgtgaagctcaccgtgccaagggattgaactag

SEQ ID NO: 3509 - DNA, 315 bp, Zea mays
  Peptide Sequence Number=SeqID_46884
atgagccccatcccagtgttagagttgtcagtgtcgatctccgatttcctcctggtgctggactctatcgtcgatggcctccagcacctggataagatcctcgatgcccgcctagaggcagagggcagcaagctctgccgggcggtggtagactacgtcctgacgtgcttccggagtcacgaccccgccatatccttgacgccggtgatcgatggtccagtagctgccacagaagatgccgcccgggagagtgtacaagatgcagtggagatggtggttgtgcgctttcagcgtgaccctgctgacaccgaatag

SEQ ID NO: 3510 - DNA, 2454 bp, Zea mays
  Peptide Sequence Number=SeqID_46885
atgccgtcttcctcttcttccgctgctactacgccgccggccgccgcctcgtctgaggagacgttgagtagcttgatggtggaggagttgcgcgccggcgactctgttgattttgtggcggaggaagatgcagacgaaggggcccttcggtgcgccgccggccagagcagtgggcgtgatttagttgaagagttcgtggcgtacggggtgtggcccttggcgtacggctgggcgctgggcgaagtgtgccctcgccagatgccttttcacggaggaagggtggtgcgaagccctgccttcgcactgaatctgcgaaaccgcgacccggccgcgtttgtgcgcgatgcggaggacggggcggtgcggcttgtggggcggtacgtgccgaggacggaaggccagcgcagctttgatatccgcgggtcaaatgatcgtttgaacagggtcttcgaattaaatcaattgccgtatgacggctatcctggtcaagacgaagcggaccgccgtggaaagaaaccggcggtggagactggaggcgaccctgcgctggcggccgccccgtcctcaaaaaagagaaaattaggtactgcgatgggaggacttggggtgtctgatagttttgctagagagttaacgaggacgtgcgccgccccgggggaaaggatgtcttcgcccgagctccgggagtcttcggcacggatgctgagggttaccgggggttgctggcctaggaatgttcctgtcccctgcgcggctggcgaggactgttttacatctcgtatggttcgtcggtggagagtttttccttacgggcggaatatcggtgctgttgtgtgggcagtgatggacaaggatcgccaaggtgcggcgcaaaaacgccaggcgactgtcaggctgcatgaagctaggccgaagaggcagcggggggctgcgaaggctgcggcctccggcggaggcaggccgccgccggcggcgaaggcgggcgcctctgcacctagcaaggcgccggaggcaacggcgggcgttgggggctccaagtcaacgaaggtggtgccgccggccagcggagtggcggaggcctcgaaggcggcccgagcgttgccgttgtcgggcaagcgcgttgccgacttcggcaccgatattactatagacgactatcttggtgggtcggacgaggggcagtttgctatggctgcgccaggcgcggagaccgcgacggcggccatagtgccgagggcgaggggcgaggcccttggcgccgaaggcgaggtgtcggccctcgcggtggttagggacgaggcgagcgcagcgacccgccggctgaagggagtgacagaggcgctgagtcaggcgacggaggcgctgagtcaggtggctgacttcgccagccgtactgcatcgggggccctcacggcagctgtgtgtgccgaagtcgagagacttcggacacaacatgcagacgctgtccgtgagaagtcggcctccaacagcaagtgccgtaagctgacggacagggtggccgccctggagaaggagaaggctgacctccggcgccagctggtggcggagaggagggaagccaacgaggccgtcgccaaggggcaggctgcgcaggcggaggccaagctggcgcgggcgaagggcaatcttgccaaggagctcgccgaacatctgcaagagcggctcaccgccctggagagccgcgcgaaggaggccgaggccgtgatgcatgcggaggccgaacggacgcgcacgcagcatatggatacgtatcgtgagctgggtgcgtggaccggtgacttcgaggtgccggaccgagagcccgggcttcgctgcctgcagtgggtgcaggaggagctgctggaacttccagccatcgcgggggggttgatgtcgtacgcctccctggtcacctgcgagggggcgatgaacgcgctctcccgcgaagggtgccggcacttcgaggccttcgaccaggcggatgaagaatttgagcgagatatctataaggtcgaagaccccgtagtgaaggaatccgccggggccctttacgaccggatgtggggtctgtacggtcgtgaggtggtcagggagcgggccgagacttcgagggctcaggcggagcgcggcgagcgggtggatgacttcgaggctctgaacagcgcgctgccagacccggagccgaccctcgcggaggctgtaactggggtcgccctggagccaaccccggagtccgcagcgatcgcgacggctgcccccacatccgccgtggtcggcgaagacctgcccccgaaggtggtcgaaggcgcccccgatgcccccgcagctgctgtgccgagtgctgaagatcccgcggcggtggtggcggaaacaacggcggaggcagcggcggagccaacggcggagctaacggcggaggctcccgcagcgtcagggccttcgcaggtggcgtag

SEQ ID NO: 3511 - DNA, 597 bp, Zea mays
  Peptide Sequence Number=SeqID_46886
atgaacatgtgtgagctcacccttgttgtctcacacccccccacaggtcaagatcaggtatcactggaggagaaagatgcttctacttcctgctttgatttaattgatgattctaacccttgcaaccaagttcttgttaagaatattgttgtagaaacatgttcggatgaggttgcaaaggaaaatgaacaattaaagcaagaagtggctcgcctagggaaggcattgtacaacaagaaaggcaaagccaaacaaatccaacctccacaggataacaccactgcgggagtgaacaagcttgtggagggagaaactgtgatttgtaggctatgccacatggaaggccacaagtcttttcaatgcaaggcgatgaccggggataaacaaatgcaaaagctcaagcaaaagccatcaagcaaaatctccaacacctacatcaaaaaggtgaataaaaaggatggtacaccatatttgatagcaatcaaggccaacaagcaagccaacaaaggaaagggggccaaacgtatctgggtgccaaaggaaataatttcaaccatgaaaaacaccaagaaggtttggatccggaaagggaagtga

SEQ ID NO: 3512 - DNA, 270 bp, Zea mays
  Peptide Sequence Number=SeqID_46887
atggcgacgtatatccgggccgtcgagcgctccgggctcgagggctcggatgagtcggagtactcctcggatgaggaggactcggacggtggcggcgaggacgaggatgacgacgacgacgacgacgacgaaggcggtggcggcggcgacggtgacggtgactgcagcggcaggggcggcagcagcggcggcaaggacggtgacggcggcggcagcaagggcagcagcaggggcggcagcagtggcggcagcaacagggccagtggctag

SEQ ID NO: 3513 - DNA, 201 bp, Zea mays
  Peptide Sequence Number=SeqID_46888
atggatgttttgaggattaggaaccttggagaggaccagcaaggacttgcgaaaggcctaggtgttgaggaggagcagcaagggcgtccacaacaggaaggagatcaagttcgagtcagttgtgactccatctcggggataagccttcgtggcaaggtcattcgtgtgtcacgggtgataaccaatggagccgtggtgtag

SEQ ID NO: 3514 - DNA, 600 bp, Zea mays
  Peptide Sequence Number=SeqID_46889
atgggtgtgggcaagggacggcttggtgagcggttgccttctccttctataaataacgccgttgtctctctggctttttcacatctcttcgctgttctctgctgcttccctctcttctctcccttctgcttccgcatgggcaagaacaacaagcgcaagcgtgagccgactcctccatcggaggagtttggtgactcggagtactcagaggaggaaatctcctctgagtcggaggggtctccggctcccgtccccctgcgtgagtcgtctgacgactcagacgactctcaggggcttgcggcggaggtctggacgtacatccgggccgtcgagcgctccaggctcgagggctcggatgagtcggagtactcctcggatgaggaggactcggacggcgacagcgaggacgaggacgacgacgacgacgacggcgacgatgacgacgatggcgacggtgacggtgacggcagcggcaggggcagcggcggcggcagcaaggacggtgacggcggcggcagcagcaggggcagcaatcggggtggcagcagcaggggcagcaccaggggcggcggcggcggcagcaacagggccagtggctag

SEQ ID NO: 3515 - DNA, 183 bp, Zea mays
  Peptide Sequence Number=SeqID_46890
atggcggttgccccagagcgtgcgcggcggtggacccccaaccggtggccacaactccatgatctcgacacgcggtggcagaggagtaggacggtgtcgacaactgtagcaaaatggttcgtgccgaatgcacgaggaacagtggacaagttttacaggttcgggccgcttaaagatgcgtaa

SEQ ID NO: 3516 - DNA, 741 bp, Zea mays
  Peptide Sequence Number=SeqID_46891
atggggtcatattcttggctaagatggttcgtactcttccaaactacccgcatcaacactagctacgtccctcagccccggcagatctcggtctacccagtggtagtcgaggaagtttcggcggatctccctcccatccgagtggagaatgtagtcaacctagaggacagctcggaggaacagctgccaacccccaccccgttggcagagtccctggccttcgcagctgggtcatcgacatcggcaccacctgcaccagccttccaagcacctgcaaccggaggcgacgaccctgacgactccggagacgacgatgacgaggatgacgacgacgaagaaggtggagacgaacacgtccacgaggaagctgactacgcccagcaagactacttcatggggtttggtcctgttatcgaacattatacatcaatgttcgagacgagccacttccccaacctactgcaagaagtgctgcacgcgctaggaacctacgtccgccccctgtatgaaacaaggcgagtgagcgagcctccccgggcttgctactacatcactcgcatccacgtcagggtgatggatgcaggggacaggggattcaggactctgtctgctcacgagtccctgacaccactgtccacctatgctgcctcggttagcgatgctgcctgtcggaccctgtggtcgctcaaccacacctatcggcagcagctgcagaacacgaggttcaggcatcttccttag

SEQ ID NO: 3517 - DNA, 1225 bp, Zea mays
  Peptide Sequence Number=SeqID_46892
atggggagtgaggcggcgttgctcgtcgccgccaccaccgagctcttcctgggcagcctcacggcagggggccacacagcgacgacgcggcaattccagcacgcggtccgtgccgtgcacgtctggagcgcggcccgaagaggaggctccccgctgtcttcctccatgcttgtgtttggctatgccactaaggaagcggatgaggcaatgttgtttagacacatggtgccatcaaagctatggaaggtcctgtcgtggctcaatgtcgggacagagaagaagcttgctaatgttaaggttgtggtcgatcagttcatctacgaggagatttacaagcggaaggcatgggggagcaacaaaagccaggcagatgtactatccatgtacacgaaattgagcttggatcccagtatgagcgagcagcaaaagacagacttcctccgtgaaatggttgtggggttcatcattgctaggaaggacctcattgtcgtcaagctcacatggttcttttacatgatgtgcaagcacccaaaagttgaggcgatgatactcgaggagctcaaagacttgcagagcttgagaatgcgcctaatggctcttctggttgatggatgccggggactgagcggtggtgctatggctgaacgattctccaaaaagttcgagttcagtgcagacaacattgagcccctggttcagacatgcatgacaactctatcctcaaagagatctgacgaggagagagaaacctggggcttcttaagggttatgtttgaggacggggattttgcaaggacaaaattgcttgctcatcttggcttcgaaccacctcaggcaccgcctgcaagttcaactgatgaattgagccaaatattggcagatacacttaatattgatcatgctgcagtaaccgataatgcggatgcccagtttcttattgataatggggatgattttttcaaaaatcctcaaccttcagaggctagcttggctgaagaatcagtttctacaaatggtcaacatatagaacaggaagtttctggagatgctgtgccatcagatccatcaattgacaaaagcattcaacatgcgttggtggttggagactacaaaggggcagttaaccagtgtcttgcttctaatcgtatggctgatgctttggttatagcccatgccggtggttctgctctctgggaaagcacaagaaatcattatctcaagaaca

SEQ ID NO: 3518 - DNA, 1074 bp, Zea mays
  Peptide Sequence Number=SeqID_46893
atgtcgccgcccctcgagccccacgactacatcggcctctccgccgccgccgccgcggcgccgccgacaccgacctcctcctcgtcgtcctcgtcctcgccggcgccccgcctcaccctccgcctcggcctgccgggctccgagtcccccgaccgcgaccgcgaccgggaccgctgcgaggacgtcgccgccgcgctctccctcggcccgctgcctgctacccccaaggcgcccgctgccgtctccgccaagcgcgccttcccggaccccgcccagcgccccggcgctgccaaggctagcgacgacaagcaggcgtcccccgccgccccgccggccgccaaggcgcaggtggtgggatggccgcccgtgcggaactaccggaagaacaccctcgccgcgagcgcctccaggagcaaggcgccggcggcggaggacgccgcgtctgcggcccggcccatgtacgtgaaggtgagcatggatggcgcgccctacctcaggaaggtggacatcaagatgtactccagctacgaggacctctccgtggcgctccagaagatgttcagctgcttcatcgctggtcaaagtggcctgcataaatcatcgagcaaagacaggctgactaatggctcgaaggtggatgccctcaaagaccaggagtatgtacttacatatgaggataaggatgcagactggatgcttgtcggtgatcttccctgggactccaagaaccatagagcagacaggagaaattggtgctgcactcagcttcctgccagattaaccttagtactaacagtgcattttacacagaactgggggtctctgggatctctgggctcctgttctgcttcctccggactccggagcatcaaaacgggcactgctgtcactgaagaaattgtagaatcggctgttcctgggaactctgggctcgtactgttctgctttctccccagcatcgggagggtccttgctgtcagtgaagatttcccctgtcgtcgtggccgcgtcaacgctctcgccgtcggccttctggatggaaacggttttgaaaatttccggtgtgaattataa

SEQ ID NO: 3519 - DNA, 1725 bp, Zea mays
  Peptide Sequence Number=SeqID_46894
atggctgaaaggtaccaactcccgcggagttgcgttcctccaacggcaaggcggaaagactgcgagcatcccccatctgggggcttggaaggcggaaaggcacgatgcataagggagcgcgaagacatggtcgcctttcaagggggtcaccctccttttaaaggcgactctccctacttgcgtccccaatcgtcgtgggctgagtcttctccaacacgctccaaggtcctcccctacggcacgggggctgggtcccacacgtcatgcaagccggctcagagcagaagaagccaaaccgccgtgcgcggtgcgtgcaaccgcctagcggttacaagcggctctccacttttgcccagaccagcgggcgaaagggcgggcagccatgcaggcggcatgcaaccgcgccaagtgggcgcacttcttcgactcccaacacgcccagcatggaggcccaggcccacgcgtcatgcaaccggcgcgccgaatgcttcgtgcatgcaactgcaccgccacttgcgccaccaccgcgcctcctcgactgtggaaccaataccgcgacccgaggcgacccagcgcacgacccagcagcgccagcctagcgcgacggtcaatgcggccaaaaatgggtcggcagtaatggcggtggcaggcgggcaggagcagcggtcacgtcgtcagccaagcttacgtcccatccaggggcaacgagagaaccctctctcacggcgtgaagacaacgcgcccgtgttccattcctcgaacggctcgcgcacgcgcaacggccacctcgcgaaccactcgccccgtcgcattaactccgtggcgggacaggcggtgcctctggcaggagaagctggcccctcggaagggttcgacagccgcctcagatcgcgtgggctctacacccactactggtcagaggttcgaaggctggcccctcggaagggttcaacgaccgcctcaggctactcgggctccgcgcccagtactgatcagggcgggaacgatcttgtaacggaatcccatcagagggaggcatcgagccctcggaccccgtcgccaggggaccgggtccggcagatcacccgcagctcaccggagacaccatgttcggcgcccaccgagggcaacatggcgctttcccccctcctccttgcggaaaggcgacgcaggggcaggctcgggggctgctctcgcaaacccggctccggccgaaccgttgacagcgtcaacataccagcccgagaacttgggacccgaccgtacacccaggctacggccagctcgcatgagggaacgaccagatcagccaaagcattacgcgaggcattaagacctcagaggagtcaaaccactcctccgaggcctcgggggctacaccccggcgggtgcgctcgcgcgcaccccccggaacaaaacgcaaccgagaaggctggtccccttgcaaaaaagtgcgacgaaagcctccaagcgagtgctaacactcccttcgaggctcgggggctactgtcggggaccataattaggggtaccctcaaggctcctaattctcagctggtaacccccatcagcataaagctgcaaaggcctgatggggctcggactcgggctaagtcccggaagacggcgaactccgctccgcccgacccagggctcggactcgggctaagccccggaagacggcgaactccgctccgcccgacccagggctcggactcgggctaa

SEQ ID NO: 3520 - DNA, 483 bp, Zea mays
  Peptide Sequence Number=SeqID_46895
atggtgctcgacgatctggaccatggtgtcgagcaggaaaacatgcaaaaacctaatgccaagaggcggcacaccgcctgccagtggaatggacaggaggcgcgccttatcctcaataaatgtggaggccgtgtagcccagaggccttacgtcaggctctgccggttggcttacgtcacatgtagtaggccacgcgggagcatcgggtctccgactgggcggggagcagaagcgtatacgataaggtccggacatgtgtcggctctggacccccgcctggacttgattaaggcctgggtattctctgtccaagaatcttgggaccctgctttgagcggcctggaccccacacagaggggtcccgatcccatcctaggggtccggtttgcgcccgtggaggtcctggaccttacccggaggcccgtgatcctcttcaagttcttccagaaatactgcccaaatattccgctgatatatctcaag

SEQ ID NO: 3521 - DNA, 272 bp, Zea mays
  Peptide Sequence Number=SeqID_46896
atgacgatcgtcagcgtgacccgccaaccgagtacggacttttggaactgggttgacagatggctcgagtcggttgcagacttagcacagcagcattgtataatttcacgtcgagcctgcagtccaactatcgtcgtagcgagtctgtctatgctcgctaatcgcatactcatctgccaatggtcccggaccacccgagtcagtattcggtgggccaaggtcactgcctgcaccgacattgagtaccaatcatgggaggcaaagctcatcac

SEQ ID NO: 3522 - DNA, 276 bp, Zea mays
  Peptide Sequence Number=SeqID_46897
atggcgggcggaatgagctcgccggagcttaaggacggtggctgccgtgagggtgagtgcgggcgagagagagaaaccctaggtgacactggggtgtcacagccttcccctcttaaaggaatctcgtcccgagattcgggccagagtccttccgagattcgaaaggcaggaggaggggttgggggtgattacataccagcttccttaggtaggcaatcggggaagttggatcttaggaattcctcggtttcccaagtagcttcctcctctgagtga

SEQ ID NO: 3523 - DNA, 456 bp, Zea mays
  Peptide Sequence Number=SeqID_46898
atgcaggcggcatgcaactgcaccacggggacgcaccctttcgacttcgacgcatccaacgcggaggcccaggcccacacgtcatgtaacaggcgcgccggttactacgtgcgaaaaactgcaccgccacttgcggcagtaccgcgccttctcgattgtggaaccggtgccgcgactcgaggcaaccctgtgcatggcccaacagtgccaaccaagcacatcggtcacagggaccgggaaaggggatactctgaaagggatccttctccacaaaggaagcaggccccgagccctcctactgatcagaggttcgaaggctggcccctcggaagggttcgaaagccgcctcagagcactcgggctctgcgcccactactgatcagaggttcgaaggctggccccttggaagggttcgacagccgcctcagagcactcgggctccgcgcccactactga

SEQ ID NO: 3524 - DNA, 1074 bp, Zea mays
  Peptide Sequence Number=SeqID_46899
atgtgggaaaagaatttttgcactgatgcttgtgctatcccctgggctaaactgtgtgagaccaagagattgatgtctctgtacaaaagtgtggttgattgggatgattcggctgcattagaagccttcaatgatgcaaaggcgcgcttctgcgctatatatcatggtcaacattatgatatccctttgcctgacccagacatgtttattgatataatcaacccagatgagtatgttgatcctgaattggtggctgatctggagaagtcacgtcgtcgcgttcccagaaaagatgatggtgttcctgatgtctgggagtcttttattttctccgataagccagttccagttataggatgggtgacacggagaccagtttcactgatggccagcagtcaagcgacctgctcaaacaactggtcagcaaaactcagggaaacagcaggatcaaaccagcagccaggggagcagacgaattcttgcattagcctctcgattatgagggatggttcccaggatgcttggaagcatgattacggctgggatcctacagctattcagaccgatctatgggacaaccatcaaggtagctatgaggtgcctgatggccagggtgtgccatatggacactggactcactggagaaggcgaaacaacgactcgggtagaagaaacaccaggaatagtggaggccccatcagctcaaaaccaatgaaatcaaaggaccaaacggatgaacacaacgttgcaatcaatggttggaggaactgccgagtaaggaatgttttgagcgcaaaccaccatcagcaaaagaatttacaacctgcatggagtaggatgaataacatcgttacagattatttatgccataataacaataaatcaaagggacatgacaatgaagatcagggaagcattgcagggctgaatatccctaggtcacaaattttatcttatggattcttgcagagtttcctgttgttgcatgtgacattcctgaagcacaactacatgggttttacaatccaaccatttggtagtactgcagatggcgtgaaactacttctttactag

SEQ ID NO: 3525 - DNA, 897 bp, Zea mays
  Peptide Sequence Number=SeqID_46900
atgggtgcgattaagtcaaggatcggtccattcaagggacgcgattgcgcctcgcccgagcccagcctcgggcaagggcagccgaccccggagggtttacgtctcgcccgaggaccccctacggcgacgagcgcaccttcggctcgcccgaggcccagtcttcaccaagaagcaaccttggccaaatcgccgcgccaaccgaccagatcgcaagggcatttaatgcaaaggtggcctgacacctttatcctgacagcagccaaacccggccccaggcgccataggaaactccgctctgcccgaccccagggctcggactcgggctcagccccggaagacgacgaactccgcttcgcccgaccccagggctcggactcgggctcagccccggaagacgatgaactccgcttcgcccgaccccaaggctcagactcgggctcagccccggaagacgacgaactccgcttcgcccgaccccagggctcggactcgggctcagccccggaagacgacgaactccgcttcgccccgaccccagggctcggactcgggctcagccccggaagacgacgaactccgcttcgcccttccccagggctcggactcgggctcagccccggaagacgacgaactccgcttcgccccgacccccagggctcggactcagcctggcctcagccgacggtctcccgcctcgcccgacccaggggctcggactcgacctcggcctcggaagacagactcgacctcgacctcggaggagcctccacctcgcccaacccagggcacggacagaccacgtcaacaggaggcgccatcattaccctgccccaagctgactcaggctacggggaacaagaccggcgtcccatctggctcgctccactatacgagtaa

SEQ ID NO: 3526 - DNA, 585 bp, Zea mays
  Peptide Sequence Number=SeqID_46901
atgaatgctgtggtaacttcacacctacccgtctgtttatatagtgatgcaggcaagaaggcgagtcgccaggatttttacaccaggcgaacagctgccgacgaaggcatacttgcagcaggtcaggctacgacgcctccttgtccgtcgctgtcatccggagacctgagagcgcagcgcaacgacgccgctaagggcagaggagagatgggattcagctggtgtgtgggcggtgccttcctgccgcgcaggaccgccgaacagcgcgaatcggccaccgtcttgcattgcattgcagctggatggctggacttggacctcgagtactgttgtctgttggtggtggttggttggggcaccaactccacactgtttggctgtgcgggtcccagctcccacgtgcgcgggcgtgggcagcgtcatggtcagggctcgcgcctcgcggtcgcggacaggaacaggatgggcgcgcgcgcgcggattgccgccagcgtcgcatacgcccacgtctcggccagacgcgccgttgctttcgtcaactccatccttccactctccgccgtgcatcctgctattgtcgtctag

SEQ ID NO: 3527 - DNA, 1092 bp, Zea mays
  Peptide Sequence Number=SeqID_46902
atggggagcgcccgcgttgctttcgtcttgctgctattggaggagcgcaacttcgcggaggagggtgaccaccggttcgatggtggggagaagcaagccgggctgcgacctctgccccgccctcagcttcaaggatcttcatcaaccttgctggggtggggggcgagccgggggcctgccttcgcgtgggctggcgtcccgcttcttcctccggcatctgggggtggaaaccatcctccagctctgcggaggaggcgtcctccagccatgcgggggaaggcgaactgctgctgcccggccaggatgcagcattccgtcctctgtccgggctactgtggccggccgcaccggagggtctcacaacacgtcgtacgccgcgagggcggtactcgtgttctgggacggtccagttctcgtttttgtggcgaggacgggggtgaggacctgccggtgcgctttggggcgaacggcgctcgctggtgcggtgttggtgggcaggtggacgccgccgtcggtgctgaggtggtggcagccggagaaggtttctccgccgtcgagatcgtcggtgccatctgcgcttcgggcctccggctctttggctttaatatctggttctcgtcctccgcgaggggacgcgaacgagagccttccagcggtagcgttcgccctgggaccatcactgctgctgcagaggtcgccggcgagtcacccggagagtccctcggctcggtcggccttgccacccaaggattctcttgcttagttaaagaaaccctcggccgctctgcgatgagccggagccagaggcagcggtgtcagcgtggacagaggcggagtcggctcgagaagaagcttcatcgacccaagagcaggggacttcccaggccgaggagacgtagcagcggtggctggaaactggccaggtcgtccactggcgggaccaaccccggagtcgggctgccgaggcgtggtgctgacatcttccttcgaggtggagatcctccgaccgtgtcgctgtccgaggccgggtcagattccgccgaaggtggagtcgacgccgagggtgctactgctccccctgttgatgtctga

SEQ ID NO: 3528 - DNA, 408 bp, Zea mays
  Peptide Sequence Number=SeqID_46903
atggatgttttgatgattaggaaccttggagaggaccagcaaggacttggaaaaggccaagccttcccagaactccagctttctctcgagcagaacagatactcctttgcaatcacacccacgctcattggacagtcacaccggtcaccgtttgccacctgcagtgctggaccaaagaatcaaatggacaaggacaagggacctaaacttaacgacgatgagtgtgtctctcaaatggaattgaaggagatgatgcgtgtgatgactgaagcttttaaaaataccaggactctacctcgacatcctatgagcagcttgatcgacgagttgatgaacttgttacacgcatggacgtactggaggctcgtcccccaccaccaactcctaccccatctcactctccggtag

SEQ ID NO: 3529 - DNA, 555 bp, Zea mays
  Peptide Sequence Number=SeqID_46904
atgaccgcggcggaggaaaagggaggaggggcttaccgacggcggggttgctccggtgaggggtcgggtgaggtccgggagtctctggtgatcacgtcgaggtacggatcaccggcgatggaagcttcaccagagaacaaggaagatgtgtgcgcgaggaatttgagaatggctcaccggattgctcggtccacgcgcggccgcgggcgaccgaagtccggtgaacatgatctcgggtctccggtgaggttctgttgggtccgagagcttagaaagctccacgggccactagcgaagctaaccgaggggcaggcgcaacttggacgtggctggagtgagctggccgcggtggccgaggctcgggcggtgatggccggcagaggaaagctcaccggagctaaggagggccgtcgggccagcgagggttttgctgactggatcaagagatatggaggggtgaagttgggtttgtctcactgccgagcacagagagaagatcccgggtttgatgtgtccagagcatgcgccccgatgccatcttctggtatgaggtag

SEQ ID NO: 3530 - DNA, 429 bp, Zea mays
  Peptide Sequence Number=SeqID_46905
atggaggagaacgaggtcaacacaacagtcgaagatttaccggagattggtgtggtagaagatctgaccacggcgagcaatggatttgcggcggcaagaaggtcgacggcgagaaattgcagctcgccgatcgtcgcacacgcccgagatgctagacgagaacccccacggagacccaaggaagctcccagacacggcccacggaccttccgatggtgtatgggcgcaatcgatggtggcggcgcgaacgactccctcgcggtggtaatggcggcgcaaagcttttgcggagtggtgaagtacgaacgcaggggtaaatggggaggtcttgtgtccatgccttataatccggagttgggctgcacgggggagaaagaggaggtgggccagaatgggtacagtcggcccaggagtttcacctttgggtag

SEQ ID NO: 3531 - DNA, 603 bp, Zea mays
  Peptide Sequence Number=SeqID_46906
atgacttcccacggatcctccgatgacggaaatgcactgacccacacggacggacttgcacgagagggttttccccgcattttgtgggaggtacttcagggggctggatacacgacaccccctcagtacgcggtgcagcagttcgagaagcaccgagtgccccgctgtagggtgaggatgactttggagcctcatcccctgcagccaggctggcgctccttggattccgagtctttcgggtaccgggcagaggacacgattgaggcgatcgctctgcatggattgactaccttctgcggattccatcccttggagttggctacccaccccattggcttgttccccgctgagaaggaggacgacccaatgtggaaggatcgggtggagcatgccaaggacatctgggccatctacccaggtcagactgcgcacttgaccgtacggtgcatgaatgcgctgtaccgtctgcaggagatccaggaccaggaggacaatgaggacgtcgacattgtgggaggagatgagcctgcctccagtgtggacaccgctggctcgggaagaccaccttcccccgagtcaagtgttgcctcgttcgctcactag

SEQ ID NO: 3532 - DNA, 438 bp, Zea mays
  Peptide Sequence Number=SeqID_46907
atgaaatttctctcaccaacttgctttcatagggttgaactattcaatggggcaggcggtttagctgaaggattcatacataaagttgacaaaggtggctcagatgttgagttattagaggatgttaggatcatagctcctcaaggcatccaatggcatgtctttgctgcgtttggcggatgtgcggattggcttatagagaaatgtactgaacttggagcttctagtgttacccctctcctgacagaacgatgtcacacaatagcggaaaatcgggtggacaggctgcaacgccttgtgctggctgcaattaaacaatgtatggagtttgggtatcacctccgttcatggcatgttaaacaatgtatggagtttgggagccttaaaacaagaggatacaagtggcgacatcacaacccctacaagcttgtgccttaa

SEQ ID NO: 3533 - DNA, 309 bp, Zea mays
  Peptide Sequence Number=SeqID_46908
atgtcgaagctcaaaagttggtccgtacgggagctccgaatcagtgctgtcgaagattccaaaaagctgtggacaaaggaacccaccttaaatattgtggctcacgagattgtttgcaagggaatgctgagccaagtacagccgaaatataaggcgatgcgtgcaaaagtcatcggggaaacggtcggagagatacaaggcgaaaaccttctccgcaacttcgttaagcaatttgttaacaacttcgtcaacaatagcttcgcccatattgatgatttctattgctttctttgtttctgggtcggctag

SEQ ID NO: 3534 - DNA, 801 bp, Zea mays
  Peptide Sequence Number=SeqID_46909
atgcactcggtaaagcgccgagcactcggaaaagagccggattctagtagtgaggttttaccggcggcggcggttccctcgggcgtgcgagcaggcgcccgtgagcaggagagccccggccgccgcggcgctctccagccggcggattggcggacgtggagggggcgcgaggaggaggagcctcagcgtccgcggcggtacagcttcaggaggcaccggtcgggcgcggcggagtgggcggcggtggtgttgttcaaggtgctggtggtcgtggtgctgctgggcgccgtggccgtccttgtggtggtggtgctgccgcagccccgcgcgccgtacgtggcggtgcgggcggcgagcctgtacgcgctggtgtacgggcagacgggggcgctggacgacgtgcaggtcatggtccgggtggaggcccgcaacggcaacgcgcactcggcggcctacttctcgcgcctcgagtgccgcctcgcgttcgccggcgcggcgctggcggtgctccgcgcctacccgttccgcgtgcccgccaggggcgtcctcccgctggcgtatgtggcgcacgcgcagggcgccccgctgggcgacgccggcagcgccgccatggagaccgcgctccgcgacggcgtggtgccgttccgggtggagggggaggcccggacgcgatggaaggtcgcggggatcgttagcgccgaccagtggacgcgcctggcgtgccagctccgcttcttctggcccaacggcaccatgctccccttcagatgcagctccaagtccaagttcttgttcttctga

SEQ ID NO: 3535 - DNA, 390 bp, Zea mays
  Peptide Sequence Number=SeqID_46910
atggttaaaaattttggcaggaaaacagtgcaaatagcaatgaatgctgtggtaacttcacacctactcgtctgtttatatagtgctgcagcatttgagaacaagttcccaacatataccgagtggggcatcatcttgtgggaccacatcaaccgtgtttttggtgcggctgccacgtgtactagaggtaacgaggctcacgacgtttcagccagaagctcgatagtgaagacggtggggagcatccgagaggaggccggaagaagatcaccacttgcacgtggagaaggcctacagctctctacggggtactcggccatggtgcttggccctcgtgtggtctaccctttgcacaggggcagtatgaggattagtcaggaccttgcgtag

SEQ ID NO: 3536 - DNA, 246 bp, Zea mays
  Peptide Sequence Number=SeqID_46911
atggctgcgacctttgctattgacttgctaccatgtagcagggtccttaaacatgaaggtgtagataaggaggcgctcgcgttggcgtcgctcatcgacgatgagaagaagcttggcgactaccagttcgacttctggaagcagtactacgtggttgcatgcgtcgctgttttcggcaagctccgacgcagccgccgcttgaacgcggtccagagctgctgcaccatgttgtccatcttcaaatag

SEQ ID NO: 3537 - DNA, 480 bp, Zea mays
  Peptide Sequence Number=SeqID_46912
atgtggagacttggagacggtcgctatccgggcgaggggtcgggctcccgcgggggtgaaaaatccgggcgcgctgtactcccatcgctggcgacttcgatccatctcggcgagggggcctcgcggcgctgctcgtcggcggagccggccaagctgggctccaagaggtcgtgctcgagtgggtccggcggcggaccgctctcggtggttggaggcaaggaggtggcccgcgacgagacaaagatcgaaggctcgggtgcaaccgttggtgttcgtcgccgtcgaaccgccatcgcgaagaagctgagaagatccacggcgccgacgaaggaaggtgcggagaaacgcaagcgcatctcgtcgccgccatcgtcatcgtcttccagtaggtcgggtgctccagatccgaagaggaaaagggttcaaagtagtagatctaagaaggacacttctcaaaatccacacaccaaaaagatataa

SEQ ID NO: 3538 - DNA, 1281 bp, Zea mays
  Peptide Sequence Number=SeqID_46913
atgagagtcaacctttccaaagacctgttgaggtactccttagtggagaacaaagttcttaaggcgtcacttcgcctaggtgacaaggtgctcactggtgataaggtgccactgatgcctagccaaaagagtggagtgaggaaagaggggcctcagagaagagcaggaggtgaattatcagactatctccagcagctgtcctatctcatcttctgtcccaaactccactctaagtgcaaaagagcgatttgcacggccacatacacgacctgctggacagcctcaggaagcatgactatctttcctcctcgccccatggtttttggttctagcacaggcacagctctgctgaccaaccagtgcaattgcctgtgcagtcgtgcagatctgcccccactcaactgtggcggtggtgttagggactggagaagcagtgcaccagggggagtagattcgagaaggggcccagaccatgagcttttcccagctcaggaagcggtgctgcacattcaaactcatattgtagaccttggcccagacatggataacattatcacaacaagactacttgtacctgcaagtgaaattgcttgctttgatggaagggaggggtcattatctgatatacagaggcagactagtgcaaacgtgcagatattaccaagagaagatcttccgtcatgcgctttagagtctgatgaactcatacagattgttggagagattaaagctgctcggaatgctctgatacaagtaacaacaaaattaaggagttttctataccgtgagatgcctgatcctattcaagttggcaatatcaatttacatggagccatttctccagtagcaggctcacctcgaggaccataccaaggaaatgatatcccaatgggtgcttatcaccaagcatcgcaactggcaacttcatggcattcaaaggatagtggaggcagtgcaagtggatcatttgagcaaggcagcaacattaatgatgatataaggcaaagtgctacaaaaagatttgccgttcctctagtgactagaagcacactagaaattgtcataccaaacagtgctgttgcaagcctcaccatgagagctggtagcaagcttgctcaaataagcgagatatctggtgctgcagtaacgctagccgaggatagatctgacatcttgcagaaagttgttcgaatatctggtacccctgagcaggctagcaaagctgagaatttgctgcagggatttatccttagcattccagatgacattccttcaggttaa

SEQ ID NO: 3539 - DNA, 750 bp, Zea mays
  Peptide Sequence Number=SeqID_46914
atgggtacggactggaaccaagttatggcacaatatggaactttcctatccgaggatgatggcactcagtttcagaacactgcatttgctcctccgcctgagataccagcccagggctcaccagtaccacctccagtgaagaaggctcctcaaagcacaaagctagcaaatttcacgtctgaagaggatatgagggtttgtcaagcttggttggctgtgagttgtgatcccattgtcaacactggtcagaagcgtcaaggattttggaatcggattacagaggcatacaactctcgcagaggatcaatgccagagaggtctacaaaatctctcatgagcaggtgggacagtatcaaaactcaatgttctacatttgctggatacatgatggttgtgcttcgacaaaacccaagtggcatgactgatgcagataaggatcaaccaaaatggatggaccagcacatgggtaaccaaaatcctccacccaacccaattggtacccaatcaaatactattgacttagatggtggtgaagactcagctccatcaagctttacttcgaagagacctcttggtcgtgattcagccaaggaaaaggcaaataagcaaagatcagagaacacatcatccactgattcggagtacctaacacggatgggtgagctttctttggaacggttatctgtgtacaaatcagtagcttcaaatgaggagaagaagttggagttaatgaaaaaacaggagaggtag

SEQ ID NO: 3540 - DNA, 180 bp, Zea mays
  Peptide Sequence Number=SeqID_46915
atgcaggcggcatgcaaccgcaccaagggggcgcaccctttcgacttcgacgcgtccagcatggaggctcaggcccacgcgtcatgtaaccggcgcgctggttactacggatcgggaaaggggatactccgaaagggatccttctccgcgaaggaagcgggccccgagcccccctactga

SEQ ID NO: 3541 - DNA, 507 bp, Zea mays
  Peptide Sequence Number=SeqID_46916
atggcgatttcgatttgtgcatcgctacgaacatcgacgagcatcgagcggcttgccttctccatgcaaaacacgggatccggtgaagcacgcagtgcggaggggatccggggccgctgttttggattggcaccgctgcgcagcgaagttggacgccaaggctgcgagcaggggcttcttgctgctgcacaaggggaaaaagaaggaggggggcgagcagagctgcttctcggccatggagatgtggtcggggaaggcgctggcttgagggagaaggggtgggacaacaagggggcagaggaggtcggcagccatgggagaaactcgagctccctgtttgctgcagccgcggacagcagagggaggaggaagacccaactgctactgttgctgggcgccggccatggagaagcctctgcgcgcagggaagaagcgttccctgctggggagaccagggaagaagaaaaaaagggcgccgactgctgctgcgcgagggagaaggagtag

SEQ ID NO: 3542 - DNA, 513 bp, Zea mays
  Peptide Sequence Number=SeqID_46917
atgcagtcggcatgcaaccgcgccaagtgggcgcaccccttcgactccaacgcgcccagcatgaaggcccaggcccacacgtcatgcaaccggcgcgccggttgctacgtgcgagcaactgcaccgccactcacgccactaccgcgcctcctcgactgcggaaccagtaccgcgactcgaggcaaccctgcgtatgacccaacagtgccagccaggcgcgacgggaccgggaaaggggataccccgaaagggatccttctccgcgaaggaaacgggccccgagcccccctactgatcagaggttcaaaggctggcccctcagaggggttcaacagccgcctcagagcgctcgggccccgcgcccactactggtcagaggttcgaaggccggcccctcggaagggttcaacggccgcctcaagccactcgggctccgtgcccactactgatcaggggttcgtaggctggccctcgaagggttcacagccgcctcagacgcagagcgagggatga

SEQ ID NO: 3543 - DNA, 1506 bp, Zea mays
  Peptide Sequence Number=SeqID_46918
atgtcttctccctcccttatgcgtcgcgtctttccatcttccaagcccccggatggggggtacccgccgtctttccgcctcctcgtcggaggaacgcaactccatgggagttggtacctctcagccatcgttcggcttcaaggattttcatcagccggcccggccgcacccctacgccggcgatcacccaggatggtgaccaccagttcctgggtggggaagagcaagccgggctgcgatcttggtcccaccctcagcttcaaggatgttcatcatcctcgctggggtgggggccgggctgagccagcgctctacctcccgtgcgggtctacgggtcaccctctcccgcggcgttcgggggtggaggcgctcgctggccctgcgggcggcgcggacttagacaacgcggggctgatcgacggcgggcgtcgtcacctccagcgtgtcggagtcgtcggccgggctcccggcggcccctcctgccggagggcggctgccgcgccaggccggtgccccactcgtctgggaggatctgagtggggatctgccgggggctggtgccccccgccatcagcgccgaggcgaaggcggctcgagaagtccccgtcgccgacgggatcaccgccaccatccgcgctccgggcctccggctcttcgcacttgtcctcgcccctcgagcgtcggcgtgggcgagggcaagatcgcggtagcgcccaccctgaggcctgcactgccgcgggtgtagtcggagtcgctgtcgccgtagtcggagcgggcggcggcgagccgctcgtcggtcttctgtcgctccgcaggcctttccccatggagtggggtcgttcgtacctgcggagggggaaccggagttccgtttgtaatggcacttcgaatgccagctcctctagcttagttaaagggaccccttggccgctcttcgacgagccgaggccaggggtagcgatatcagtacgaacggaggcggagttggctcgaaaatgggaacctggttggccggagcctggccgggttgcccgtcagcgtggcccgacgtcagagtcgatgacccgaggcctcgggtcgggctggcaccctcggaagatgcttggccgaggccccaggggtaaccggccgagccgcctgctcgggccggattcccggagaagtccccggaccgcgtcgccgtccgaggttgggtcggaccttgctgaaggcgtcgtcgatgccgagggtgcatctggactatccgtcggtaacggggatgtttgcgcgagcgagagttgcttctcgcggaaggtgatgagtgagtcgctttatccgaacgcgagttacttatcgcagaaggtgatgagtgaggatccgctttccgaagcagtcaaaaagcacgaaagaaattctgctgaaaagagatcctttttcgaggaaaaattcgacgcagagggggtctccccccttttagcccccgagggagggtcgggctttgccgaggctaggccgacccttccttga

SEQ ID NO: 3544 - DNA, 552 bp, Zea mays
  Peptide Sequence Number=SeqID_46919
atgcggggctggtcggcagcgagcgtcgtcagctttagcgcgttgagcttgctggctcagctggctctagctcggctcccggtgccccctcccgccgcgagagcagtcgtcgcgccgcgcgcaccggaggaccgcccaagacgtcgcgcgctgctagggcggcgttcgtgttcttgggctgtcctgcctttgccccggtatgacgcctctgcgcggaagtcggtgttcgcccgtctgggaggatccgagtggggatctgccggtgggcagatggcttccatcgtcggcgctgaggtggtggcggctgaagaagtcctcgtcgccgacgggatcaccgccaccatccgcgctctgggcctccggctctttggctttgatagcttgtcctcgcccctcgagtggggatgtgggcgagggccttgttgcagcagcgtccaccatgaggccatcgctgctgctgtttggccacctggagcggaggtcgttgtcgctgctgccggagtgggcgtcggactcgcctgtcggctaactgaaccgcttcaccaagtgtga

SEQ ID NO: 3545 - DNA, 1053 bp, Zea mays
  Peptide Sequence Number=SeqID_46920
atgcagcacgtaatcctttgcctgcaaatctctctgctactctccagcttctcctattcgatgcaagcccagtacacctcgatctttagcttcggcgactcctacaccgacaccggcaacaaggcgaggataatttcattgttcgctccttatctcgacgtcggcaatgccgcacctattcctgaatacctaattgatcgattaattcgttgcccgttggtcgttcggtgtatgtacacagcccaggcactggggctacctctccttccgccctcgctggcgaaggaccagagcttcaagcaaggcgcgaacttcgccgtggctggcgccacggcgcttaagacgagcactacgagctcagcgctctacccgcagctggccgtcgccggcagtgccgtgcctcctccgaacaacatctccctcgctgacgagctgggctggttcgacgccatgaaacccgcgctctgcagctcaccccaagcatgcaaggactacttcgcgaaggcgctgttcgtcgtgggcgagctgggctggaacgactacggggtcatggtgaagctgatcaacgacggcgccacgacggtcgtggtgtcggggatctcgccgatgggctgcgcgccggggaacctggtgctactggcgagccaggacccggccgactacgagcccgacacggggtgcctcaagggaatgaacgagctttccagggaccacaacgcgcagctgagccaggcgctgacgacgctgggcggtaggtaccccggcgcgcgcgtcacctacgccgacctgtacggccctgtcatcgccttcgcggccgcgccggcgcgcttcggtttcgactccgcgctgagggactgctgcggcggtggcggcggcaagtacaacttcaacctgagcgccgcgtgcgggatgcccggcgtggccgcctgcccgaacccgtcggcgtacgtcaactgggacggcgtccacctcaccgaggcggcgtaccaccgcgtcgccgatggctggctcaggggaccctacgccaacccacccgttctcgcaacggcgtag

SEQ ID NO: 3546 - DNA, 657 bp, Zea mays
  Peptide Sequence Number=SeqID_46921
atgcagggaaccctagccctgcaccaagtcgcggaccgtctggcccctggccgtggaccacctattgagatcggccctcaatggcccggttcaaaagatagctctgaagtttccgccagcaatatcatcacgccgacatgggaaaccttgccggctgaagaacaactcctattcgaggagcgccaggagcagctgatccgagaagcaaaggcgaaattcctggccgacttcaaggtggacaggaacaacaaagtcgttcagcaatgggcgaaatatctggcttcgctccgacctactatgaatacccccaatgtaagtagcatcaatgaactccaatctcttaaagcttacatagacgaacaaacgagagcaaatgcaacgaaagtggtggccgagaagactcctgatggaggggagacactgaaagtgaccatcacaacctccggctcagggggcaagcgcagacaaggggacatgcgcgagaaccaatactgcgcatcgcagacggtccgcttcggcattctagcaactattgtccaaatggctgatgtgaagaagatcattgatccaacgctggccgggttttacgaggccatggaaaaaaccaacatggagaagatcgccaatgagatgttagctgggatttctgaagactag

SEQ ID NO: 3547 - DNA, 645 bp, Zea mays
  Peptide Sequence Number=SeqID_46922
atggagagggccgaggcctcaatgcgctcggaagttgagcggacgcgcaaacagctcatggactcataccgcgagctgggtgcgcggaccgctgacttcgaagtgcccgaccgagagtcaggccttcactgccttgagtggctgcaagaggagttgttggcgctcccgaccattgtggagggatttatgtcctttgcctccctggtcacctgcgaaggggcgatgaacgtgttgtcccgtgaagggtgcagtcactatgaggtcttcgaccgatctgaggatttcgagcgtgaaatttacaaggtcgaggaccctgtggtgaaggaatccgcgggagccctctttgaccggatgtggggcccccacggtcgggaggtggtgagggagcggtccgaccgggcgagggatcaggcggcgcgtgatgagaaagtggaggacttcggagctttgaacagcgtgcggcctaaagcggagtcgagcccggtggcaccgcccccggaaaccgtcgaaggcaccctcgctgcccctgcggctactgtgtccggtggtggctcatcgtcaaccgcagtgccgagggctgatgatcccccgaagacggcgacggagccggcggcggaggatcccacggcggctgggccttcttag

SEQ ID NO: 3548 - DNA, 684 bp, Zea mays
  Peptide Sequence Number=SeqID_46923
atggacaaggatcgtcaggaagctgcgcaaaagtgccgggcggtcatcaggctgcccgaggctaggctgaagagggcgcgggggactgcgaaggctgccgcctccggcggtagccagccgacactggcgacgaagtcggccgcccctgggtccagcaaggtgccggatgtcatgaaggcagccggcgccggcgtagccaagtctgcctcggccggagccgcgaaggcccgagacttgccttcgccggcgaagcgcgttgccgatttcggcactgatattagtgtggatgattatctcactggatcgggcgaggtgcaacttgttgttgttccgcctgccgtggcgaccatggtttctgccacggtgcctggggcgaagggtagtgctctcagcgctggcggtgagatttcggcgctcaccaccgtcacagacgaagcgggcactgtgtcccaccggctaagggaggcgtcgcagtggctgagtcagcatgctgacgctgtcccgggaaaaagtcggccgccgatagcaaagtgccgcaagctgacgaagaaggtggccgcgctggagggcgagaggactgacctctggcgccagctggcggaggagaggagggaggctaatcaggccctcgccaaggcgcagtcggcgcaggcggaggcccaatctggcgtgggtggagggtag

SEQ ID NO: 3549 - DNA, 321 bp, Zea mays
  Peptide Sequence Number=SeqID_46924
atgccgtcctcttcctcttctgctgccgctacaccggccgacgcgtcgtccgaggagacgctgagcaatgtggcggcagaggagttgcgcgccggtgacacagtggagttcgacgtgtcgtggatgtcctcggtccgcgtgcaagacatgcaacagcttggttatttcggcggcggggtggcacgtgtcccgaggacggaggaggtccccgagccagaaggcgagttggttgtgttcaaggcttttttcgctgttgggcttcgtctgcccgcacatcgatttgtgggagaagtcctgtgtagagtcccgccttcgcactag

SEQ ID NO: 3550 - DNA, 159 bp, Zea mays
  Peptide Sequence Number=SeqID_46925
atggcgagagtagcgtgtaccctctgtggcaagaggctggacgatggtgtatctgtgctctcggtgaagaagcagcaaatttttgttgcttctgttccaaggtggtgcctaaagaagaaaatcaagactgaagccacgggaggaagtgtcctcctttga

SEQ ID NO: 3551 - DNA, 378 bp, Zea mays
  Peptide Sequence Number=SeqID_46926
atggacgagggttgcactcaacccctttcaagtgatccaatgatcaacttgaataccatgactttcttccttatagtctttctcccgtttgcgaggaatctccacaagttggagcctctcgcccttacaataaagatcacagagaagggacccttttatagccccaaggcagctaggagccattggagaccaacttggaaggccaatcttgccttctatcgagtggcgcaccggacagtccggtatcttcggactcgtatcagagagggagaagctcaaaagatacgaaggttgacacagcgccgaagctgtgaagcaggaaagcttcggcatgttcgcagaaaagggaaccgacttgaagatgaaaaggccatttag

SEQ ID NO: 3552 - DNA, 5673 bp, Zea mays
  Peptide Sequence Number=SeqID_46927
atgcggacaggtccgcaccaggctgggcctcgacacatgtcggcaccggacccctgcctgagcaaggcctgggtattctctgccctagagtcccgggacccgactgtgggtagtccggaccccacgcagaggggttcgggacccgactcgggaggttcgggttgcactcgcgggggtcctggaccttgctccaaaggtctggtctacatgtacaggggtccgacacttttccatgggatccggacccactattggcatcttggaatgtatcgttttctctggccacatgacgaccctggggccatccatatggcggagtcgggtgctgttcatcacggctgtcgtagggaggagaaggaggaggagatcggtgaggagagaaggggatttatgtcccagcgaggggacaggggcgaggggcacgccaggagacccggccggtccagcagcttcggcggccaccgcggaggcggagtcggtggcgcgggcaagggcggcgcgggctcctcaggccagcctcctctctcatccaaccgcagctttagaaagcctggcaatggccacggcgggcaccagagggtggtgaaccagcccgacaccactggcttccagcctgcaccagcgcctggcacccaccaaactcctgcgcgcccgccacctgcgcctcagaatgcagccgtgcatgttcctgtctccgcatcacggccacaacaccaggatccacatgtgtcatcttcattgtctgccagcgagaaaccggctaatccgccgttaccactaccgaaagctacacatgctgctccaagggctctaccaaaaaactctaacacagcgcttcctcagggaggatcgcaaggagaaccatcaaaggggtttaactttcagtttggtagtataaatatgaatgggctaccgcaatttcctgccaggacaagctcagctcctccaaatttggatgaacaaaaacgtaatcaggcacttgtggaggaacttaaggttacacctgcccctgtgcaaccagctctgaaacagcagcagttgcagcagcagccacagctgccgccacagctgccgccgcagcaggttccccagcagccacagcagcagtcagcaagaaaggaagctgttggttccagccaacataactccatcaatccccatattacatcgcaattgaaaagagatgtgcacccatctccatctgtccctaatgttacatctcttagacctaccgttcaaattcctggtgttcagatgccgatccccttccatcaccagccggcacaagtttccttgcagtttggtggtcatggggcacaactgcagcctcaagtcgtgcctagctcatatcaaatgtcaatgggattgacaggcagtagtacacaagtcccacagcagctgtatgcccctactctgcagcatcatcaattgcaacagcaagcaatgatgcatcctggccagggtatgggttatgttccttccgttgctcaccaattcccacagttgggaaacattcctatgaacatcgcatcacaatatgctcagcaacagccaaacacgcatgctgctgcacgtaagactactgtaaaaattactcatccagacactcatgaagagttgaagctcgataagaggatggactcttctgggcagagagctgcaccgagcttgacacaacaatcccagcccgttggtaattatgctcctcatattggcttctttcatcagccacagagttcctacaatcagtcaggaatgtattaccctactacagctggtgtgaaccaggttgctactggatcttcaggtcctagatataattatcctgtcactcagtctgggcaagcgatgacatatatcagtccatctgcagtgcctccggtatctgctcagtcccaatatacagttaaaccgcaccctattgggttggtgactgaaaaatctagtactcatgtcacaataagtgctccaccagctaaatctgagcctcctaagttacgtgctgctgaggattctgcgtcaagtcggcaaaaggataatgaaattgtttctgggatcgctgtttctagtaaatcaatccttgagaaggaggagagtaacgatcctttagtcacagtgaagcattcgactgtaataagcccgtccttgccaattcatggtgcaaaatcacaaacttcagtgacatcatctcctgttgtgaattcagtctcacctgtggcaggagttgatggaaaaagcatagaatctattcaaaggactggatcatttaatgataacaagaaaattgtcactaaaaaggatgtcaggatttcatctgaaccaccgaattcagcttcatctgttgaagataaggtgcaaactgtaaaggctggaggcagtgatcaccaggaaactaacaacctgaacaatgagttggatttggccagctcatcttcatgctcaacggttccactggcaggatgcctcttatttttttctaactcatttacgttggcagctgctgatgttcctgggacagatagaagctcaagaagaccatctcccgagggtactggtgagcctgcagtagaaagcttcactgttttggctgttgaatgtgacaaaaggaagcggactgatgaagttgcgacagatcctagcaaggataatatttcttctgatgctaccaaacatgaattgcctgatgcatgtgcagtggaccctactgaacaggcatcagcagtgacttctaatactgatgattcatatgcatcccctatagtaaataatcaggagcagttgctgaaagagtctgctccatctgcttctgaggaacaagctatgatgaataacttttccaagaattctgagacttcacattttcttgatagcaatgctgtggaagtgagaactggaacttcagagcctactgttcaaagttccaatgacgaaggtgactcggatattagtccagaaacagacctagctgtttgcaatgttcctctagtttcatctgagggacaactgaaatctgagagtagggctgatgatcaacaggctgctgaaccaacagtttcagttcgatcagtatccagggaaaagcctagtgttgagatcgccaggtcaaagtccgcagctgggaagaggaagaagaaaaaggaaatgcttgctaaggctgatgctgctgggtcttcagatctttataatgcatacaagggaccagaagagaagtctgaaatggttggtactgcagatggtgctgatagttcttcaatagttgacacaacacatgtgctgcttgatgaagcagaaagggatgttagtacgtttgcagatgattgtaagaaaaaagttgagcttgatgattgggaagatgctgcagacatgtctactccaaagctggcaccagattctggaaatcaggctggcaccacccaagtgctagattcagatacaagtgaagcaaacagcaggaagaaatattcacgggattttctgttgaccttgcaacaccactgtactggtcttcctgttggatttcagatgaatgaagctgtcaatgcaataatgaataatttggttggaaagtcttatgttgttgaccgggaaccttaccctagtcctggaaggggtttggaccgcccaacttctcgtggtgaccgccgtggtgctgccatgactgacgacaggtggactaagacgggtgttcctctcagtcctggtcgtgatgttcacatggacctgccaaatggaacatcagttgtcaactaccgtagctcaggaggtaatcatggtgttttaaggaatccacgtggccaaccatcaaatcaatatggtggtggtcttcttgcaggacctgtgcattctgttgggcctcaagtacctcgcagcggctctgattctgatagatggcagcaaaagggtctcatgccttcccctgtcacacccatgcaaacaatgcacaaagcagagaggaagtatgttgttgggaaagtttctgatgaggaggaggcgaaacagaggcagttgaaaggcattcttaacaagctgactccacaaaactttgaaaaactgtttgaacaagttaaggaagtcaacattgacagtgtagcaactcttactggggtcatttcacagatatttgacaaagctttgatggaaccaactttttgtgaaatgtatgctaatttttgcttccatctggctggtgccttgcctgacttcagtgaagacaatgaaaagatcacattcaaaagattgcttttgaataaatgccaagaggagtttgagagaggtgaaagggaagaagctgaagctgataaaacagaagaggaaggtgagatcaaacagaccaaagaagaaagagaggaaaagagaatccgtgctcgaaggcgcatgctgggaaacattaggttaatcggagagttgttcaaaaagaaaatgttgacagaaaggattatgcatgagtgcattaaaaaattgtttggaaattgtgatgatcccgatgaggagaacattgaagcactatgcaaattgatgagtacaattggtgagatgattgatcgtgcaaaggcaaaggagcacatggatgcatattttggtatgatgcataagatgtcaacaagtcagaagttgtcttctcgtgtaaggtttatgttgagagattcaattgacctcaggagaaataaatggcaacagaggcgtaaagttgaaggccccaagaagattgaggaggtgcacagagatgcagctcaagaaagacatgctcagtcaagtaggctaggacgtggtccagctgttagttctgtttcaagaagaggagcaccttctatggattatggctctcgtggctcatctgcgttagcatcctcaagttcccaacaagggagcattcgtggaatgcctccacactcgcgtggttcacaagacatccgatatgaggagaggaaccagtttgacaatagaactgttcttccccagcgtgtagtcaaggatgaagctatcactcttgggccacaaggtggccttgctaggggtatgtctataagagggctgtcaccagcatcaaatactgaacttccttctgttattgaccaccggagaatattatctggttctaatggttataactctgtgactgattggacatcatcatctggaagagaagattctagctcaataattccagatcgaacctctggccgaacttctgcttctagtcaatctgctggaccttcacagaggcctgccagccaggaaggccgtccaggaagtaaatcatattctgaggatgaattgagagaaaaatctgttttggccattcgggaatattacagtgcaaaagatgaaaaggaggttgctttgtgtattgaggagctgaatgctccgagtttctatccttctgttgtatcactttgggtaaatgattccttcgagagaaaagacatggaaagagagttgttggctaaacttctcgtcagcctttgcagtggtcgacataatttgttgagcaagcaacaactcagtgatggcctttcatctgttcttaccttattggaagatactctaagtgatgctccaagggccaccgagtaccttggacgactttttgcaagattcaccaatgggtgcggccgccaagcagtttactttgttcgcacgcaaatacccatcggcctttttgatgtactgtga

SEQ ID NO: 3553 - DNA, 969 bp, Zea mays
  Peptide Sequence Number=SeqID_46928
atggcgacggaggagtgggagctgcgggaggaggacgcctacgcctacgagttcgagttcgacctcgagaaccccttcaccagccccgccgacgagccgatcgccagtctcctcgacgccgagggccaccacgcgccctctatctccgccgcggcctcggccacccgccgcgccgccgccgccttcatctccaaggtgcgtttcggcggcgagctcgccgtgcacccgcgcgtcgcctacctcgcgctcaactacgtggatcgcttcctctccaagaggcaattggcggtaaggactcgtcactcgcgagctatgggtctgttatctgtaaagtgcgagcagcagccgtgggcgccgcgcctgctcgccatcagctgcctctccctcgccgccaagatgcagcgcgtcgcaacattctccaccgccgacattcagagggacgaagacttcatgttcgacgcggtgaccatccgtcgcatggagcgggtggtgcttggcgcgcttgagtggcgcgcgcgctccgtcacgccgctcgccttcctcggcttcttcctctccgcatgctatccgccgccgcagcaccccccacaggtagccgctgtcaaggcgcgcgccgtcgacctccttctccacgctcagcctgaggtgaagatggcggagttctcaccctccgtggtggcggcggcagcgctgctggccgccgccggagaggtcgccgccgcgaacctccacgcgttccaagccagcttggccgcctgtccctttgtaaatagcgagaagctgcgggagtgcggtgaggtgctggcagcggcgggcggcgtcgggcgggggcgagccgctccgagcgcggacacgcctgtgacggtgctcggtcaccagcgcagcgccagctccgcctcggagaccgactggattaacggcggcgacgcgaagaaacgctgcatgggcccaccatcgcaatgggggtag

SEQ ID NO: 3554 - DNA, 87 bp, Zea mays
  Peptide Sequence Number=SeqID_46929
atggccaccgttcaaaaaccgaaggatgaaggaataaaattctctgtagccctgacgcacgccgtcacctgtgcggcaccactttga

SEQ ID NO: 3555 - DNA, 930 bp, Zea mays
  Peptide Sequence Number=SeqID_46930
atggggtcacgctcctccaacagcagcaagaagaaggcaacgcggcgactcaaggcagccctgcgcatgacccaacagtgcctggtaagtgcgacgatcacgggtcgctccgccgcggtgataggcatgacggtcgatctgatcagaggcgggccgacagtaattgcagcaacaggcgtgcagaagccacggtctaatcacctacaggacaagcgacaccttcggcaggcgaagcgggcgccgtttcgtctccgtcatgatgaccgcatcataaaagggaccggaaaaggggatattgcgaaaaggatccttcccagcgaaggaaacgggccccgagccctcctactgatcatgggttcaaaggttgcgcccttcggggttaagcaaccgccccagagcactcgggctccgagccctttactgatcaggggttcgaaggctggcccctcagaagtgttcgacagccgccccagagcacgcagagttagggatgaccctgagtacgtccgttacatgggcgaggctcgggctacgctcccgagggatcgcctgacaccttatcctgacacgcgtgcctcagtcgacaaggaaaacagtgctgttcacccccgctccggcaactgcgccagcaaccaaggaaaggctgacaacggcaagtcacgacctccctcgagttcggcctcgggcgcaacagggagctccgcctcgcccgaccccgacctcggcctcagcttcggcctcgggagaaggtctccgcctcgcccgaccctgggcctcggcctcaacctcggcctcgggagaaggtctccgcctcgcccgaccctgggcctcggcctcagcctcagcctcggaggagtcgccgcctcgcccgacctcggcctcgtatcagctactctacgggggatccatcattgccctacccttagctag

SEQ ID NO: 3556 - DNA, 609 bp, Zea mays
  Peptide Sequence Number=SeqID_46931
atgaggcagtggcgggacgacgtcgaccgactgctcggcatggcacactttggctcgaccaggtcgaggccacagacatcccggcgccagcatgaggcatcgacgtatgtgcgctcaccctcttgggtgcccggttccaagcgggtgtccccttggccggcgtgggctgcgccgctctcgcggaacatctccgcgcggcgtcctggccatccaagttccggccgcacctgtcggaaaagtacgacgacgggtggctcgggtgccgtcccccgggacggtaaaaagaaaaagaagggtcacggccacgagaagtcgcggtcaaccgctctagtcgtcgcagctgcgactgggggccggggcaaccacaacaagcgcctacgaccgcagaagggtaacagtggctcatgccatgtacaccccaacagtcgccatagcgccgcggagtgtcgcgagatcatcgagctcacgaagcgcgttagcgggcaacgtgagcagtcttcctgggacggctccccacctcgccgccgacctggcaaggaaagggtcgacgacggcgaggtggctgcggctgaacgggacctcgggtatcagtcacccgaggggacctga

SEQ ID NO: 3557 - DNA, 153 bp, Zea mays
  Peptide Sequence Number=SeqID_46932
atggggacaaatgggcatcttaatctagacattggacgtaagtgtatagatcaaaagggtgagaggctccaacttgtggagatcccatgcaaatgggaaaagaactctaaagaaaaagaccgtggtattcaagttgatcattggatcacttga

SEQ ID NO: 3558 - DNA, 1353 bp, Zea mays
  Peptide Sequence Number=SeqID_46933
atgtccttgcgctcccttcatgtgtcgcgtctttccaccttccgagccccagatggggaacactcgcagtccttccgccttgtcgttggaggaacgcaacttcacggaagttggtacctttcagccatcgttcggcttcaaggattttcatcagccagcccggccgcatcccctcgccggtggtcacccaagacggtgaccaccagctcctgggtggggagaagcaagccgggctgtggcctctgcccctccctcagcttcaaggatgttcatcatcagtgctggggaggggagtgcgccgagttggggtcggtctccacgcgggcagcggcccgctccttccctcagcgatcggggggaagggcgttcgccgttcgtggcgctggcagctgccgcgtgtccggctctccggtccgagcggcttcggcgctgcttccggtgccaccttccgctgcggcagctggaagaggtttctccgccgacgagatagtcggtgccgcccgcggactgacctccaactctacggccttctgcttgtcctcgcccctcgagtggggacgtgggcgagggccttatggcagcagcatccgccctgaggtcatcgctgctgctgttcggccgctcggaacagaagtcgtcgtcgctgctgttggagcgggcggcggcgagccatccgttggccttctgttgctccacaggccctccaatcgtggggggttgaaccctcgaccgctcttcgatgagccgaagccggaggcagcggtgtcagcatggacagaggcagagttggctcgaaaagaagacttcgtcagccggagcctggccgggccgtccactggcgggactgacgccagagtcgagttgccgaggctacgagccaggctgatgtcctcgggggacagctggctgaggcttcggggtggccggccgagctgtctgctcgggccggattcctggagaagaccttggaggcgatggcctgggcgtggtgctgatgtcgtcctttggagtggagatccttcgaccgcgttgccgtccgaggctcggtcggactttgccgaaggtgtagttgacgccgagggtgttgctgctccccctccgtcaagaattgtttgtccgagcgagagttacttttcacggaaggtgatgagtgaggattctgccatcgatatagtcgagaaggcccgaaaaatcgtttcagcagaagagttttcgagagtgaagacttgttcggtccgcggaatcacttatccgagcgtgagttacttatcgcagaaggtgatgagtgaggatcccactttagaaatagtcgaaaagcatgaaagacgttctagcagaaaagatcttttctga

SEQ ID NO: 3559 - DNA, 402 bp, Zea mays
  Peptide Sequence Number=SeqID_46934
atggctgccactcaaaatagtggagtcattactagggcaaccgacatggaaggacacgaagcctgctattacagaaaaatcaaaaatatattcgagattacatttgctggaaataagcctttagcgctagttttcttcgagtgtaaatggatgacgccaaagtcgaagaagtcagtgaaggggttgttaaagggcctgagcctatttcagggcagttcttcgagcagcagcagacgtcgagagctgttgagcactgcacatggatatgaggatgagcagcacactgaggagcagcacaatgaggacatgctacacaatgaggacgtgcaacacaatgaggaggccacgacatgggaccaggtcgtgcagcagcaccagccatgggaccagtgggaccactag

SEQ ID NO: 3560 - DNA, 312 bp, Zea mays
  Peptide Sequence Number=SeqID_46935
atgcaggcggcatgcgaccgcaccaaggaggcgcaccctttcgacttcgacgcgtccagcatggaggcccaggcccacacgacgggcggcacctttggcgggcgaagcaggcgacgcttcacctccgccataatgaccgcgtcaaaaaagggaccaggaaaggggataccccgaaagggatccttctccgcgaaggaactgggtcccgagccccctactgatcagaggttcgaaggctggcccctcggaggggttcaacagccgccccagagcgctcgggctccgcgcccactactgatcaggggttcgtag

SEQ ID NO: 3561 - DNA, 270 bp, Zea mays
  Peptide Sequence Number=SeqID_46936
atggtgtgtactggtcactttgccgagtgtgacactcggcaaagaggtgctttgccgagtgtcaggaccatagcactcggcaaagaacgaagtcttgggcaccagtatagggtctttgccgagtgtagtggctctggcactcggcaaagaaccacgctttgccgagtgccatacaaagcactcggcaaagaacctgacatgtggaccccgctggcggattctttgccgagtgctggccgacagacactcggcaaaggacgaaggtcataa

SEQ ID NO: 3562 - DNA, 240 bp, Zea mays
  Peptide Sequence Number=SeqID_46937
atggaggaggctatgatcaacctcaatgaagagtcgtcgagccggcccaagcatcgtcgacgctacatcaatcgtgatcattcgatagatgagtacttaaagctagctagatcaactgcagattcgatagatgagtacttaaagctagctagatcaacttcattagagtgggtatcattcattgttatggggaggagttccaacgtcgaccaaaagtcgcggatactaagtgtctgctag

SEQ ID NO: 3563 - DNA, 363 bp, Zea mays
  Peptide Sequence Number=SeqID_46938
atgggtggtgtatgcacttctcttagggcagacattagcgtaatgccctacttctacgcatttgaagtcatgatagcacagtcaatcagggtatatggccgagtaagtctagagcaccacctacctatcaattgcaatactacatctatgccaggcccacgaaagaatggccttacgaattattgggcccttgggcctttcgtgaggccttttacttctttagtggacccaggggatatctatcccccacaagcccccgatctttgggttgatttagagaggttggcattttggattgtaagactctggacttcattgggtgcaccggaggtgcacccaatgggtgtagcccccgacttttga

SEQ ID NO: 3564 - DNA, 729 bp, Zea mays
  Peptide Sequence Number=SeqID_46939
atgatccgcaagattaatctaatggatgtgcccctgcaggaaaaagcaaagaaagagaggatgcttcgcatatggggagaagggccacttcagggacagttgtccaactatggccgaacccaaaaaggagaggagcaaggcaaggcactaacaagtgtcaaaacttgggacgattcttcaagcgaagatgaacctccaaggacgtgtagccaccaatcctcatcacgcccatcacggtcatcacgcaagtgccttatggcaagaggtttgctagaaaaatttgaagcatttgcaaatttgaattatgagctatcaactaaaattgagcaattagagtctagtgctacatccacagctaccgatgatgacctcattaaaaagaatgaaaaacttaaggctaatttagctagctcccaagaagctattgaaaatttgctagggaaaatggaaattcttagcatacacaataatgagctaactattaagctagaaaacattggtagcaccctagaagtatctttggttgaaatacctgaaattattaagaaagatgcttctacttcctgctttgatttaattgatgattctaacccctacaatcaagttcttgttaagaatgttattatagaaacttgtttggacgagattgcaatggaaaatgagcaattaaagcaagaagtggctcgccttggaaaagccttgtatgacaagaaaggcaaagccaaataa

SEQ ID NO: 3565 - DNA, 999 bp, Zea mays
  Peptide Sequence Number=SeqID_46940
atggcaactgcccaggggatcgacccctttttaaaggcggctctccccactcgcattctcaagcgtcatgggcaaagtctccaccgacgtgctccagggttctcactctccggcgcgggggctgggtcccacacgtcatgcaagctgacccgaaacagaagaagccaaaccgccgcacgcggagcatgtaaccgccccgcggttataagcactcctccatcctcgccgaaaccagcggtcgaaagggcggaccgccatgcaagtggcgtgcaaccgcaccgcgattgtgcacccttccggcttcgttgcattcggcggaccagcatggaggcccgggcccacatgtcatgtaaccggcgcgccggttactacgtgcaaaaactgcaccgccacttgcgccaatgccgcgtcttctcgactgcggaaccagtgccacgactcgaggcagccctgcgcgtgacccaactgtgccaattgagtgcaatgatcacgggtcagtcagccgcgggaggaggcgcggcagttgatatggccaaaagtgggccgacaggcaagcgacacctttggccggcgaagcgggcgtcgtttcaccaccaccatgatgaccgcgtcaaaaaagggaccgggaaaagggatatttcaaaagggatccttcttagcgaaggaaacgggcccccgagccctcctactgatcaggggggttcgaaggctggcccctcagaagggttcgacagccgccccagagcacgtagagtgagggatgactctgggtacgtccgttacatggctgaggcttgggctacgctcccgaggtaccctaggacatttccgagaccagcgagaacgatttttgtaacggaatcccaccggagggaggcatcgagccctcggaccctatcgaatgggtccgggttcggcaaatcacctgcagaggctcgggggctgctctcgcaacctagctacggccaaactgttgacagcatcaacaaaccagcctaa

SEQ ID NO: 3566 - DNA, 741 bp, Zea mays
  Peptide Sequence Number=SeqID_46941
atggcctcccccctgtcctcggcttcaaggacgttcatcgtctatgctgaggaggagggacggggtgaggacctgccggtgcgctttggggcggccgccgctcgccggtgcggtgttggtgggcaggtggccgctgtcgtcggtgctgaggtggtggcagccagaggaggttgtctccgccgacgagaccgtcggcgccacctgcggtcagacctccggctctttggctttgatggcttgtcctcgcacctcgtgtggggacgtgggcgagggccttttcacagcagcgtttgccctgaggaccttcggccgctctgcgatgagttgaagccggaggcagcggtgtcggctcgaatagaggcttcgtcggccaaggagcaggtggcttcccaggccgaggaggtgcagcagcggtggctggagcttggccaggttgtctgcgagcgggaccaatctcggagtcacgccgccaaggccgtgagcctggctgaggtcctcgggggacagctggctaaggctacggagcggctagccagggagtctgctcgggtcggggcccttgcggagagcttggccgtgagggcccaagcgcggtgctggcgtcctcctttgaggtggagatccttccgcctgtgttgccgtctaaggctgggccaggttccgccaagggtggaaacatcgccgagggtgctgctgctccccctccttatgtctgaacctgcaggaacaacttgtctgtag

SEQ ID NO: 3567 - DNA, 2085 bp, Zea mays
  Peptide Sequence Number=SeqID_46942
atgactctcgacgtcaagctcatgctcgacgagttcaaccggaggttcgacgagtgggagactcgctgggaccggcgcttctcgcctccgccggtgatggagctacaggatgacccatcatcggtcgtgctagcacgcgcaaactccagagccgcggacgactccgtcaatgcgctcatcacctccaccgattccgacgtgttgttcgacgctatcatcactgacaactggggtgggtgcttcgacgacgacgagcagtactgcgtggcgccattcgtcatcgccggtaactggggcggattcttcggtggcgaggacctcgattcgccagacggccccacgagattcgtgaccgccgaactcgatggctacgacgagatcaagctggatgccaccaccatcctcgacgtgctgcccggcgcgcacacagtgggcaaggcgcgatgcgcctcctacgccgaccacctctacgcctccgcctcctgcaccacacccgaccaggcgctcaacggccactacaccgataagttgctgatgctctgctccagcaacaccaccagcaccatgcccacaagcgtcagtgcagcggctcgcaagacccccgacgatctcgagctcggcctccccgattactacggcgccaggcgccagcacccgctcaccagtcgcgtcgtcactctctcgtaccgcgtgcctgagctgctgctgagttacaatagcctagaggccaaggcgctcctggaggcagctcttatggaagctaacaaggagcggaagaagaacatcacgggcaccttgacaaccaaacccaacgacgaccttgacaaggacgacgacgagttctgcctgcgtggcatctgcctggagttggcatgcaccatggaggtgcaggactgcgggcaccagatgtacgtcgctttcatgctagcgctgtgcttcaacatttccatgcctatcacgatcgctccttcagccatattgaaaatggctcagcaggatggagagctgcttgtttctgttggtgtccctggtaatgctcttgtgttcaagatttcaattcagggtgttgtggctgcccttcatagggaaacacttcaaggcacaagtctgaatgaagagcagatgaagcaggatagcgtcgcagacatttgccatcgccaactaaacaagattcttgttgacttggatcaagatcacatcattgtcaggtcgagctgcttggatttagactcttcaggagaatcaagggactatggttttgttcagtttgagatggatgaatctgctcagtcggccattgataaactctatggtatgcttctcaatgacaagaaagtgtatattggattttttgtttgtatgcaggactggaaaaatgcctggaacagtatcaaattcagtaatgtgtatgtgaagaatctgtccgatactgttactgatgatgagttgaaggagatgtttgaaaaatatggaaccataacaagtgatgttgttatgcgggataatgttggaaattctaggtgttttggatttgtcatttttgaaaatgcagatgctgctgctcaggctgttcaaaagttgaatgggaagatattcaatgataaggaactgtatgttggaagagtacaacaacctatgatgcctgtaaatctatatgcaagtaagtttgttgtttttggtgacaaggtcttcagccttgaggagatcagtgccatgatttttggcaagatgaaggatactgctgaggcataccttggcaagaagatcaatgatgccattgtctttgtccctgcctacttcaataacgcacagaggcaaacaaccaaggatgctgcttttacagaggttgatatattcagagatgctgctgctataatctgtcatgaccaagagagatgtgatgagattttccaactagccgcttcttttctggggttcaagattaagaatcagcgaagtatcttgcacttgcaatgggatcccggtggaattggtgtcatgtatcggcttgagggcaagcctaattttaagaaggggagaatgttagggactgtcggcccaaacagcccatgtcagcccaggtag

SEQ ID NO: 3568 - DNA, 738 bp, Zea mays
  Peptide Sequence Number=SeqID_46943
atgtcggacgaccttgttgttcctgtccactttgaagttggccaagaactttgctttcgcctcctggatcatccgctccttgtgctcctcgaactggagttgctcgtcaaccggcaaggtgtaaaaggttcacacttagccaataaaaagatcaagttattggattcaacaaaggagcaaagaggcaaccgaaggcacctctggtctgggggcaccggactgtccggtgtacaccggacagtgtccggtgcacgagaggactccaactcgaactcgtcaccttcgggaaattctagaggcgactccgctataattcaccggaccgtccggtgtacaccggacagtgtccggtgctccaagggaaagccgccccaggaactcgccagcctcgggaattcacttcagccgctccactataattcaccggacagtccgcgcgcgcagatgtcagactcgcccatactggcgcaccggacatccaacagtacatgttcggtgtacaccggacatccaggcgggcccacaaatcagaagctccaacggtcagaatccaacggcagtgatgacgtgggcggggggcaccggactgtcccggtgtgcaccgggactgtccggtgcgccatcgaacagacaacctctccaacggccatttttggtggttggggctataaataccccaaccaccccaccattcattgcatccaagttttccacttctcaaccacttacaagagctag

SEQ ID NO: 3569 - DNA, 951 bp, Zea mays
  Peptide Sequence Number=SeqID_46944
atggcggaggtgaagcgacgcccgcctcgcctgccagaggtggcggtgcggatctttgcatgtcgtaaccggcgtgccggttacatgacatgtgggcccgcttcctttgcgctggtccatcggatgtggtcgaagccgaaagggcgcacagttgtagtgcggttggatgcttgtcacgtggcggtccaccctttcggccaccggtttctgcgaagatgggagagcgcctataaccgcggggcagttgcatgcctcgcgcgcggcggttcgccttcttcacgcttcggatcagctcgtatgacgtgggggtcccagcccccgggtcgtagggggagaaccctggagcgcttcgacgaagactttgcccgtgacgctaggggggcaagtgaggaggagcgcggcctcatggagatcggcgccgttcagccatcgcttggcttcaaggattttcgtcgtgcagcccggctgcattccctcaccaatggtcagtttggtggggaaaagcaagccaggctacggcctccgccccgccctcagcttcaaggatcttcgtcatccgggctgaggcggagggcaagccgagccggggtcggcctctgcgtaggcagcgacccgctccttccctcagtgatctggggaagagggcgttcgccgcctgtggcgcttggcagctgccgcgcctctggctccctggcacgagcggccctggcgctacttccgatgccgcccccaccgctggctctcactgtgccactggctgttggggggtcgcccaacatgtcgtacgccgcgagggcggcgttcgtgttctgggacggccccagtctcgttcttgtggcaaggacgggagtgaggacctaccggtgtgcttcggggcgaccgctgttcgccgacgcggtgttggaaggcaggtggccgctgtcgtcgatgctgaggtggtggtcgccatag

SEQ ID NO: 3570 - DNA, 1527 bp, Zea mays
  Peptide Sequence Number=SeqID_46945
atgggacagtcagccgcggggataggcacgacagttggcatggccaaaagtgggccgacagtaattgcagtggcagatgagcggaagcagcgggaccgggaaaggggatgttttggaaaggatccttctcggcgaaggaagcaggccccgagtcctcctactgatcaggggttcgaaggctggcccctcggaagggtttcgacagccgccccagagcactcgggcttcaagcccattactgatcaggggttcgaaggctggcccctcggaagggttcgacagccgccccagagcactcaggctccgcgcccactactgatcaggggttcgaaggctagcccctcagaagggttcgacagtcgccccagagcatgcagagtgagggatgactttgggtacgtccgatacatggctgaggctcgggctacgctcccgaggtaccctaggacatttccgagaccggcgggaacgatttgtaacggaatcccaccggagggaggcatcgagcccgcggaccttgtcgaaggggtctgggtccggcgaatcacctgcagcgtcgcccgccccgctccgactgctgtgccaaccacccaggcgaagactgacaacaagtcacgatcaaccaccgagtttggcctcgggcgcaacaggaagctccacctcgcccgacctcaggctccggcctcgggaggaggtctccgcctcgcccgacccccggacttggcctcaacctcggcctcgggaggaatcgtgtcctcgcccgaccccggcctcggcatcaagagaagtctccgcctcgcccgaccttgggctcggactgaccgcgccaacaggggatacatcattaccctatccctagctagctcaggctacaagaaacaagaccggcgtcccatctggcttaccccggcgacgggtaatgatggtgcctcgcgtgcaaccatgacgccggtggctctcagccccttacggcagcaaggagacgtcagcaggatccttgccgcgctgccagctgtgcttctacagggctcaggcgcttctctgacggccacgctatcacgtgtacagggctcaggctctcccccgacagccatgttggcatgtacacaaggcttaggcgtttctctgccggacaagttagcgcatagctacaccccccattggttacaagctgtaattacaagcatgcctttacagattaggcccgtaacacaaaggcggccacgcagggcccgttacaatgggccagatcacacgtgggcctcggagctgaacgaggccgcgctgcgggatgacttcgtcgccggtcttcgtctggtgccgaatcgagcgaagggtatccctgcctgttctgtctgtctgaccagcggttatcagcgaaggcctcgagcgaagggtggcatctttgccttcgccccaacatttgccctccgagggaccagttcgacaaagtcacctggtgccgaagacgtcgctagacggcggagacgctgcccttgctcgaagtggttccgcgagggtttttga

SEQ ID NO: 3571 - DNA, 1200 bp, Zea mays
  Peptide Sequence Number=SeqID_46946
atggctgaaaggtaccaactcccacggagttgtgttcccccaacgacaaggcggaaagattgcgggtatcccccatccgggggcttggaaggtggaaaggcacgatgcataagggagcgcgaagacatggtcgcctttcaagggggtcaccctccttttaaaggcgactctccctacttgcgtccccaatcgtcgggggctgagtcttctccgacacgctccaaggtcccccccctaaggcgcggggctgggtcccacatgtcatgcaagccgacccagagcagaagaagtcaaaccgccgcgcgcggtgcgtgcaactgcccagcggattacaagcggctctccacttttgcccagaccagcgggcgaaagggcgggcagccgtgcaggcggcatgcaaccgcgccaagtgggcgcacttctccgacttccagcacgcccagcatggaggcccaggcccacgcgtcatgcaaccggcgcgccggatgcttcgtgcaagcaactgcaccgccacttgcgccactaccgcgcctcctcgactgtggaaccgatatcgcgactcgaggcgacccagcgcacgacccagcagcgccagcctggcgctacgacgacgcgcccgtgttccgttcctcgaacggcccgcgcacgcgcaacggccaccccgcgaaccactcgccccgtcgcattaactccgcggcgggacaggcggcgccctctggcaggagaagcgagcgacgctttgccttcgccataatgaccgcgtcaaaaaagaggctcgggggctgctctcgcaaactcggctccggccaaaccattgacagcgtcaacataccagcccgagaacttgggacccgaccgtacacccgggctacggccagctcgcatgagggaacgaccagaccagccaaagcattacgcgaggcattaagacctcagaggagtcaaaccactcctccgaggcctcgggggctacacccggcgggtgcgctcgcgcgcacccaccggaacaaaacgcaaccgagaaaggctggtccccttgcaaaaaagtgcgacgaaagcctccaagcgagtgctaacactcccttcgaggctcgggggctactgtcggggaccataattaggggtaccctcaaggctcctaattctcagctggtaacccccatcagcataaagctgcaaaggcctgatgggtgcgattaa

SEQ ID NO: 3572 - DNA, 489 bp, Zea mays
  Peptide Sequence Number=SeqID_46947
atggtgacctccagttcgatggcgggggaaagcaaactgggccgcgacctctgcccctccctcagcctcaaggattttcatcaccagggctggggaggggactgccgcgtgcctggctctcggacccgagtggcttcggagccactctcggcgctggcttccgccacggcagctggaagaggttcttccgccgacgagatagccagggccgcccacggaccgacctccaactctacggccttttgcccgtccttgccacacgagtttgggcatgggcgggggcctcctggcaacagcatccgccctgaggtcatcgctgccgctgttcggccccccggagcagaagtcgtcgtcgtcatcgcagctgccagagcgggcgacggcgcgccattcgtcggtcttccgttgctccgcaggccccccccatcgagtggggttgttcgtacctgcggaggtggaaccggagttccatttgtaatggcactttga

SEQ ID NO: 3573 - DNA, 663 bp, Zea mays
  Peptide Sequence Number=SeqID_46948
atgtcttcgggggacagctggccgaggcctcggggcgaccagccgaggcgcctgctcgagccggattctcggagaagaccctggcggcgatggcccgggtgtggtgatgacgccgtccttcggagtggagatcctcggaccgcgtcgccgcccgatgctaggtcggacctcgccgaaggtgttgtcgacgccgagggtgctgcggctccttcaactgtctggatccgatcctgcaggatcggattaccttgtagctatctggacttttttgtcggtaacagaattgtttgtgcgagcgagagttgcttctcacggaaggtgatgattgaggtatccgtatcccggaggcgtaggagttcctcggctcggtcggccttgccgcttacacgcactcttacccgtccatggggttctgtcaccaacgtagtcgagaaggctcgaagaatcgctccggcagaagagcttccaaacgtgaagaattgttcggtccgcggaatcacttatccgaacgtgagttacttatcgcagaaggtgatgagtgaggtatccgtatcccggaggcgtaggagtccctcggctcggtcagccttggctgcttacatgtactccgttgttttcaggatccactttcgaagtagtcgaaaagcacgaaagacattctag

SEQ ID NO: 3574 - DNA, 282 bp, Zea mays
  Peptide Sequence Number=SeqID_46949
atgggttcgaaaaccctgagtacggagtgtactttcgcaagtcttacccatctaaggaaaaagactctcaaggatatgctggcttttgggaatcaagcttttggtctgacacttgttcaggccattgtccttaagtttatccatcagcatcaccttgtgaagaagctcacgcttaacgacatcttcttgtcgactcagctctggtcctccgcatcacgtgatcaactagcgtacccaataaaatgcataatgcacatgtatgaacataaacagacacaataa

SEQ ID NO: 3575 - DNA, 240 bp, Zea mays
  Peptide Sequence Number=SeqID_46950
atggagacttgtgaggtgaccttttatgagactttgcctagtccatcccctatctttgagcttgtaagtccagatcaaatgaccatctttatggaagaggagcatgacgacaccgattggggtgatcccgagctatctccaccagctgccccagtcaagcctgcttcgactacttcggttgatggactagacatcacttctgatgagtacatcacccctatacaaataatgcatgggtag

SEQ ID NO: 3576 - DNA, 456 bp, Zea mays
  Peptide Sequence Number=SeqID_46951
atggcgcctcttgttgacgtggctggcccgcgccctaggttgggtgatgtggaggctcctccgaggtcgaggtcgagtctgtcttccgtggccgtggtcgagtccgagcccctgggtcgggcgaggcggagaccgtcggctgaagctagggctgagtccgagccctggtgtcgggcgaagcggagttcgtcgtcttctggggctgagcccaacccgagtccgagccctgagtcgggcggagcggagttcgccgtcttccggggcttagcccgagtccgagccctaggtcgggcggagcggagcttcctatggcgcctgcggcggggcctgactacctgtcagcctcactctgtcaagtggcaccgcagtcggagcggcgcaggcggcgctgtctttctgtcaggccggtcagtggagcggcgaagtgacggcggtcacttcggctctgtcgactga

SEQ ID NO: 3577 - DNA, 345 bp, Zea mays
  Peptide Sequence Number=SeqID_46952
atgggcaagagcaagaaaggtggtagttcttcgcatcactccggtgataagtggaagcgtgagccgacgtctccctcagaggacttcggcgactcagagtactcagaggaggagttctcctccgagtcagagggctcaccggttcgtgcctctcccccggcgtcgtctaatgactcagacgactcccaggggctcgccacagagggcggcggcgacggcgatggcggtgacaacgacgacggaggcgatgatgacggcggcggtgacggctgcgaaggcgacggcaagagcggcaaaggcgacggcgagggcggcagcaagggcagcaacaaggctagtggctag

SEQ ID NO: 3578 - DNA, 870 bp, Zea mays
  Peptide Sequence Number=SeqID_46953
atggaaaagctccaccccctcccccttcctgctgctgaggctgcttgggcttgccaggctctcctcacagtgggggaggcagtagaggctggaacgcgacgggtgctcgactgtgtgcacctcctcgcggggcctcttctcccaacgcctgtcaggctgctggttcgtgccacgctgtggcgcgggtggcgcgggtttcgtacctccaatgaggtcctaggcctgttcatccgcggtgatgtagaggtttgcctcccggaacaattgttcggaggtaacgggtgctttctggagtatggttcagacggaggccgagtcattggatccccgatagaagtcttcaatcaccgccgcctcggcgacttcgggaatgcggttcctcatggtctgaaacctctcgagatgtcggagccattgcagtgcatcctgccccaggacaatgggcaagtacgcagtcatcacgtcctccgtcgccccggcggcccgggcgacagttgtgtagatggccgaccaaccgcccgggtcttgcttgggcttgtacttgtcgatgttggagaccttgaagttggggggccactggatggcacggagacgtggactgagatcgaaaactctgcatgtgtcttcctatcggcgttcgtgttgtcggtcctagggaggggagtcggtagtgtgtcgtctcgaccgtccccggaacgggccactagtcgaggctgcaaccgactgaacgcgggtggcgcgacttcgtgctgggacaccatgatcccggtcatactcctctcagcgccttatctcacttttgtgccgtcggtcgcgctaagcgttgatggagctctgcgcgtcttgccggttgttgatggcgtggtgtag

SEQ ID NO: 3579 - DNA, 108 bp, Zea mays
  Peptide Sequence Number=SeqID_46954
atgaagctcccaagccctcagacccagtgcaacctcatcggaaaccccgaatcaccctcgccggacttctcccgctcatcggagaacgtggaccagcaaaatagttaa

SEQ ID NO: 3580 - DNA, 507 bp, Zea mays
  Peptide Sequence Number=SeqID_46955
atgattttcactctttcaaatcatactttcgaaaatcaatattgtgtccccttcttgggaccacaattttcactctttcaaatcatacttccgaagatcaatatcgtgtccccttcttgggccaaatgcaacatgatgtatgatgcttatgctatgcaaaatgatgtaatgatgttatgctacgtagatgacatttgttccgaaagatacacacatatcccacacaatatttttgtatcagcactgattcttcgctgtaagctctgcattcccttaggaacgtctttggagcttcttcgcctcttacttaggcggtataagctctgcattcccttaggaacgtctttggagcttcttcgccttttacttaggcggtataagctctgcattcccttaggaacgtctttggagcttcttcgccttttacttaggcggtataagctctgcattcccttaggaacgtctttggagcttcttcgccttttacttaggcggtatcagcgttga

SEQ ID NO: 3581 - DNA, 274 bp, Zea mays
  Peptide Sequence Number=SeqID_46956
ctcggagacaactgatcaagccaaggacggaggcaagaagagcttcgaggtaccaagtgcacgggagaaggtcaaggaggctgaggaacccaaagccaagggtgaagaagaaggcttgcaaagtcaaggccaaggttctgctcagtctgagtgcaccggactgtccggtggtgcaccggacagtgtccggtggtgcaccggacagtgtccggtgcgccaggctaactctggtgaaaagaccgctctcgggaattcgtcggcgacgttcggctaa

SEQ ID NO: 3582 - DNA, 300 bp, Zea mays
  Peptide Sequence Number=SeqID_46957
atgggtcaaattaaggcgatagaaatcaaggagaccgcggaaaaagggagaaataggaagagcgagaccgcggagaagaaaaggaacataaatcatggattcgtgggtatcctctgttggaacagtgaccccgtggcaaatccgccaagtacagagctccttcggaggaaggaccccgatggacacgagatggagaaggatgttggagctaagaaatgtcaatccagatcaagtcaagccgacttgatgatttatgagtccaacatcaaagctcaagcatgtgaaatgctatggatgtaa

SEQ ID NO: 3583 - DNA, 405 bp, Zea mays
  Peptide Sequence Number=SeqID_46958
atggcgattcatggggtgcactggaggtattcattgcatgccctgcacggatgtgacagttttgaaaaatatactgataattcctgggcgtccccccaatgggcgtgggcaagggatggcttggtctggacttatatccgggccgtcaagcgctccagactcgagggctcggatgagtcggagtactcctcggacgaggaggactcttcggactcgtccgaggagggcggtggcggcgatggcggagacgacgacgacgacggaggcgacggtgacgacggcgacgatggcggtgacggcggcagcaggggcggcaacagcggtagcaggggcggcaacggcggcagcagcaggggcagcaacggcggcggcagcagcaagggcagcaacaaggccagtggctag

SEQ ID NO: 3584 - DNA, 333 bp, Zea mays
  Peptide Sequence Number=SeqID_46959
atgcacgggcaggcactgggcgacatgctgatggacagttggtcggcggcgatgcgcaggcagcagcatgcaggcagcagcatacgggttgtcgagcgagctagcatgcgggcgccgagcgacgagctggaaggaaagcaccggcggccagcggctagctgtggcgtgctgcactgctgcgtgtggaaggcaggtgtcgaggacttcttatttctgaaatacactgagtatatggatgttcggcaagcaagataccggtttgaatctccatgcacgtctttggagaggcatgctggtggctacaattctcaaagtgctcaaaaacaacgatag

SEQ ID NO: 3585 - DNA, 777 bp, Zea mays
  Peptide Sequence Number=SeqID_46960
atgcctcgctcgacctcaggcctcggcctcgggagaaggtctccgcctcgcccgacctcaggcctcggcctcgagagaaggtctccgcctcgcccgacctcgggcctcagcctcggccttgggaggagtcacaacctcgccagacctcagcctcggcctcaggagaagtctccgcctcgcccgacctcggcctcggaccgactgcgccacaggggatacatcattaccctacctctagctagctgcctcaggctacgaaggaacaagaccgacgtcccatctagattactccggcaacagactaatgtattgtgtctaagtgctagaaacaggagaaacaattttggagaagttggctgtgtacagccaaaaggctgctcggtctgggtgcaccggactgtccggtgctgcaccggacagtgtccggtgcgccaggttggcgtctgtcaactggctgctcttgggacttcgacgacggtgtacgactataattcaccggactgtccggtgagccaacagtcagccgggccaacggtcggcagcgtaatccgcgcgcgacgcgtggcagtgccaatggtcagaagagggcaccggactgtccggtgtgcaccggacagtgtccggtgcgctaacggctctgaaccgccaacggtcggcttcgccaaagaaggaaagaaatttgcaccggacagtgtccggtggtgcaccggactgtccggtgcgccaggcgacagaaggcaagaattgccttcctggaatgctctcaacggctcctag

SEQ ID NO: 3586 - DNA, 150 bp, Zea mays
  Peptide Sequence Number=SeqID_46961
atgaacgtatgtgagctcactcttgctgtctcacacccccccacaggtcaagaacagatctatcttaaccaagacaccaatacgaagaagatcaacctcatcaaggaaaggataagagtcaccgtcaaggaaggtaatcgtcaaggataa

SEQ ID NO: 3587 - DNA, 831 bp, Zea mays
  Peptide Sequence Number=SeqID_46962
atggaggcccgggcccacatgtcatataaccggcgcaccggatactgcgtgcagaaaaaccgcatcgccacttgcgccaatggcacgtcttctcgggactacagaaccagtgcaacgactcgaggcaaccccgcgcatgacccaacagtgccaattaagtgtgacggtcacggggcacgtgacacctctggcaggcgaagcgggcgccgtttcgcctccgtcatgatgtccgcctcaaaaaagggatcgggaaaggggatatttcgaaaggctccttctcagcgaaggaaacgggccctgagccctcctactgatcaggggttcgaagattgcgctctgcggggttcgacaaccgccctagagcactcgggctccgagccctttactgatcaggggatcgaaggccgccccctcggaagggaaaaggacactattcaccgcgttccgactactgtgccaaccaccaaggtaaaactaacaacagtaagtcacgacctcccccgagttcagcctcgggcgcaacagggagctccgcctcgcccgaccttaggcctcggcctcagcctcggcctcgggagaaggtctccgcctcgcccgacctcaggtctcggcctcagcctcagcctcgggagaaggtctccgcctcacccgacctcgagcttcggcctcagcctcggcctcgggaggagtcacaacctcgcccgacctcagcctcagcctcagcctcggcctcgggaggagtcacaacctcgcccgacctccgcctcgcccgacctcggcctcggaccgactgcgccacaggggatacatcattaccctacccctagctag

SEQ ID NO: 3588 - DNA, 321 bp, Zea mays
  Peptide Sequence Number=SeqID_46963
atggatggggacgctaccgcgctcgcctccccctcggccggtaccttcccagacaagcacccgcggtcgaaaaactccgtccagcgagctccaggcgattctatcgccacttcaacgccgccggagaaggaagtcgtggatccgcgcacggccgcgattcctttctactggtctgtgcgaaggcgccgccgcctgtcgtctctgtccgccggatcggcgtctgctgggcggaggtcaacgggggttcgtcgattcgccgacagatctacgctcacccgatctgcgtcattagagcttcaagtgccaagtcagttatcataa

SEQ ID NO: 3589 - DNA, 1038 bp, Zea mays
  Peptide Sequence Number=SeqID_46964
atgatggatccggccttgcttgacgacgtcatacgccggctgctggaggtgaagaatctcaagcctgggaagaacgcgcagttgtcggagtcggagatcaagcagctctgcgctgccgccaaggagatcttcctgcaccagcccaacctgctggagctcgaggcgcccatcaaaatctgcggtgatgtccatggccagtactctgatctcctgaggctattcgattatggtggctatccgcctcaggccaactaccttttcttgggtgattatgtggatcgtggaaagcaaagcttggaaacaatatgtcttcttttggcctacaaggtcaagtacccagagaacttctttcttctaaggggaaaccatgaatgcgcatcagtaaatcgcatctatggtttttatgacgagtgcaaacgcagattcagtgtaaagctgtggaaaacattcactgactgttttaactgcttgccagtgtcagcattgatagacgaaaagatcctctgtatgcatggtggtctatctccagagttgaacaagctcgaacaaatacttaatctgagtcgccccacagacgtgcctgatactggattgctctgtgaccttctttggtctgatccttctaatgaagcaacaggatgggccataaatgatcgaggtgtttcatatacatttggtcctgataaagtttctgaattccttgagaagcatgatttggacctcatctgccgagcccatcaggttgtcgaagatggatatgagtttttcgctagccgccaactcgtaacaatgttttcagcccctaactactgtggagaatttgataacgctggtgccatgatgagtgtagatgagacattgatgtgctccttccaaatactgaaacctgcgaggaaggtgttgggtggttcaactaataacaaatcaggcttcaagcctgtcatgggcatcatagggagcggtcaccaccatgcagtccgcacccgcaggaaaggaaagaataagattgagatgagctgggataaggctagagaataa

SEQ ID NO: 3590 - DNA, 303 bp, Zea mays
  Peptide Sequence Number=SeqID_46965
atgaggatcaggctcaagacaatgaagatgaagatcaataggatgagccaccctcaagaggaggacaatgatcaagggggatatgaccatgacaaagacaatgaagatgagcaaagaagtccaggatcaaagaccgccacaccccaagagtccacccaagcgatttcaaagagatcacccccccatacagggtggaaggatgcatttaagagatttcggaatggggtgttgggccaagcaagagggaactcaacaccttctccaaggaatggagggtatgaccatttagttccaccgtcttaa

SEQ ID NO: 3591 - DNA, 171 bp, Zea mays
  Peptide Sequence Number=SeqID_46966
atgacggccacctccgcgttcgagtcgtccccggagatggagcggttcctctgcgagcggctgctgaacacggagcagcccatcgcggagcgcttccgggcgctcttctccctccgcaacctccgcggggatgcgccgcgccgcgccctcctccaagaactaatcgagtag

SEQ ID NO: 3592 - DNA, 72 bp, Zea mays
  Peptide Sequence Number=SeqID_46967
atggcagttacacgctacgcagggggcagcactaatcgaatcgagactagcgccatgaacccgagaggataa

SEQ ID NO: 3593 - DNA, 738 bp, Zea mays
  Peptide Sequence Number=SeqID_46968
atgaaggacccggagcccagcagcccggcagtcggcgcgccgggcgaccacggagccgatgagaccaacgagtccggtggcgccgtggtggcggcgcccagccggcggccccgcgggcgcccgccggggtccaagaacaagcccaagccgcccatcttcgtcacgcgcgacagccccaacgcgctgcgcagccacgtcatggaggtggcgggcggcgccgatgtggcggacgccatcgcgcagttctcgcgccgccgccagcgcggtgtctgcgtgctcagcggcgccgggaccgtcgccaacgtggcgctgcggcaaccgtccgcgcccacggccgtggtcgcgctccgcggccgcttcgagatcctctcgcttaccggcaccttcctgcccggccccgcgccgccggggtccacggggctcaccgtgtacctggccgggggccaggggcaggtggttggcggcagcgttgtaggcaccctcatcgccgccggcccggtcatggtgatcgcgtccacgttcgccaacgcaacctacgagcgccttccgctcgaagaggaggatgaagggccagctccaccgatggcgtccggcggcggcgccgatccgctcatgggtggaggcctcggcatcgccgacccgtcagcgctgcccatgttcaacttgccgccgagcaacgggcagcttggaggcggcgacggcttcccgtcatgggcgcacccgcggccaccgtactga

SEQ ID NO: 3594 - DNA, 171 bp, Zea mays
  Peptide Sequence Number=SeqID_46969
atgacatttatgaggactcgagctgtttctcgagtgcctctctgtggtgatgaggatgatggtcatgattatgtctatggtaatggttgtccgtgttgcaaccactgctcaggtgaagatgaagtcgtggaggaggacttccaggagttccaagagtacgatgagttctag

SEQ ID NO: 3595 - DNA, 318 bp, Zea mays
  Peptide Sequence Number=SeqID_46970
atgaagacttctgtcccggggggccgaacagcagcggcgatgacctcagggcggatgctgctgctaggaggcccccgcccatgcccaaactcgagaggcaaggacgggcagaaggccgtagagttggagggaccgggaaagggggataccccgaaagggatccttccccgtgaaggaaccaggctccgagccttcttactgatcaggggttcgaaggctgggccccccgaagggttcaacagccgcctcatatcgcgtggggcctacacccactactggtcagagggtcggaacgccgaccccccgataggttcatga

SEQ ID NO: 3596 - DNA, 381 bp, Zea mays
  Peptide Sequence Number=SeqID_46971
atgggcaagagcaagaaaggtgggagttcctcacaccattccggcgataagcggaaacacgagccgactcctccctcggaggacttcggcgactcggagtactcggaggaggagttctcctccgagtcagagggctcgccggtccatgcctctcccccggtgtcatctgatgattcagatgactcccaggggattgctgcagaggtatggacctacgtccaggccgtcgagcgtgccgggctcgagggctcggatgagtcggaggtctcctcggatgaggagaactcctcggactcgttcgaggagggcggcggtgatggcgatggcgacggcgacggtgacgaaggtggcggcaagggcagcagcaaggctagtggctag

SEQ ID NO: 3597 - DNA, 294 bp, Zea mays
  Peptide Sequence Number=SeqID_46972
atggcgtcctccccttcttccccagcgcagggagcacgactccttccctaccatggccgcgacgcccccaaccggccaccatcttccccaagtgctggcgcacgggagccatgtcccctctgtccagaaaatgcagagctcgagcacacccctctgctcccgcgatggacaccggggcgccctcctctagcccatggccgccagatccgcagagcagagcagcacctctgctcctgcttccttcctccaatgtcgaccgacgccatggagctgaacctgagcccccctctctaa

SEQ ID NO: 3598 - DNA, 145 bp, Zea mays
  Peptide Sequence Number=SeqID_46973
atgtctgaggagaagaagatgacagaggagaagaagataactgaggagaagaagctgtatgaagagaagaaagctgtagatccttttattgctgatttttatgaatctatggcaaaaacgaatacagagaaatacatgagaaaat

SEQ ID NO: 3599 - DNA, 666 bp, Zea mays
  Peptide Sequence Number=SeqID_46974
atgccgccacgtaccaggctaacggcacgcaagtctacgggaccaattggggtacctcggcatcaattggctccccgacatgaaagcagcagtagtggaagtaacgaccccataggagatcttgaagcccgtgtgagtcgacttcaagcagcgcttcaacataggaccgatgcttgggtcgctgacggagatagaatcaatgaactgagaagggacatccgacacttgcaggatcaactcgctgatcgagacttagcacttgactgggccgtacagtctcgtttgctaatgtgtgctaaggaagcaagggctcaggcccgagttaaagaacttagctcgactgttgataacctgcaggtttactgcaatacgttgcacgaggaagtccatatactatactcacaactacacccaagtgagcctgcaccacctgctgaggcggaagctggaccatctcacgttgcgggacgtgcgctgggtggggagttagacctttttgagccccctccttctttgagatgccgaccaggactcgaggacaggacgcagcaggaacttctgggggacgggatgttaccccaaaaccccacctccagttcctcccacgttagccgaggcgatcgctgccttggtgaatgccaccgcagacaatacccgcttccttag

SEQ ID NO: 3600 - DNA, 651 bp, Zea mays
  Peptide Sequence Number=SeqID_46975
atggagcgctcagaggagccggagcctgaggggtggatcgctagacccatcactcgtgacgccgctcgcgggtgttacttccacgatgctctcgacaccctgttgtgtcgggccttcaaccaacaaacttggtccatcgagtaccattgtgtagtctaccagcatcatcgtgggttatacccggaccagtgggaggctacttgcttggtgcaccgtccggacgatgatcttcggggtgcagaggccttcttagagcactattctatcactgagagggatactgtcgagacagccatgcaagatgcagcacgacgtgcactttctcagtattactcgttgttcagcggggtagctgatggtctcgacctgaaatactaccctcgccgttcgtccggtagtgctggaggtgtgattgtctcgccagttggtgagggtaatcccaggctgaacagtatggtcaacctggccgccgtgctcaacaccgagctggaccacgcccttgacgagttgggcaagtgtgcagcacgctactatttggatggtggttctcccgcccccgtcgggattcaacaaccttaccgctcaccgccctgtggtcgcttcgactatggaaccccagactgcaggacccagatagatttagatccatag

SEQ ID NO: 3601 - DNA, 954 bp, Zea mays
  Peptide Sequence Number=SeqID_46976
atgaaccgatcctgcaggctcagacatcgatggagggggagcagcagcaccctcggcgtcaactccaccttcggcgaagtccgaccgagcctcggacggcaacacggacggaggatctccgctccgaaggacgacgtcagcgccacgcccgggctatcaccgccagggtctcctccaggaatccggcccgagcagatggctcgaccagccgccctgaagcttcagccagctgtcccccgaggacaccagcccggctcatggcctcggcaactcgactccggcgctggtcccgccagtggacggcctggccaggctccggccgacgaagtcttcttttcgagccaactctgcctctgtccacactgccaccgctgcctccggctctggctcatcgaagagcggccgagggttccattaactaagcaagagaaacctcgggcggcaaggccgaccgagccgagggactcctacgcctctgggatacggatacctcactcgtcacctttgcacgaggcaactcacacttggttaagcggccccgacagccataatgaacaaacaccggcattcaaggtgccattacaaacggaactccggttccgcccccgcgggtatgaacaacctccacaccggagagcctgcggggcgacaagctccgggcgactcgccagcgacctctgcagcagcagcgagggtcccaggacggacgctgtagctggaaggctctcgttcgcgtccccactcaagggacgcgaaccagacattaaagccaaagagctggaggagctaaaagaagaggtggccagccgactcgtgcgggaggtagagctctggctcacctcgctctccgccccagcaaggatgatgaagatccttgaagctgagggaggggcagaggctgcagcccagcttgcttctccccaccctggaactggtggtcaccgtcttgggtga

SEQ ID NO: 3602 - DNA, 750 bp, Zea mays
  Peptide Sequence Number=SeqID_46977
atgtggccaacctcctcgtacgagagccctggaccttccttttataggcgtaaggagagggtccagggtaatgatggcccctcctgtgacgtggttggtccgagccctaggttgggcgaggcggaggctcctccgaggtcgaggtcgagtctgtcttccgaggtcgaggtcgagtccgagccccaggtcgggcgaggcggagaccgtcttccgaggccgaggctgagtccgagccttggggtcgggcgaggtggagttcgtcgtcttctagagccgaggctaagtccgagccctgtggtcgggcgaggcggagttcgtcgtcttctggagccgaggttgagtctgagccctggggtcgggcgaggcggagttcgtcgtcttccggagccaaggctaagcccgagccctaggttcgggcgaggcggagtccatcgtccgaggccgagacgggggccgagccctggggtcgagcgaggtagagcttcctatggcgcccgaggcccggtcttagctgctaccatccttgcattaaatgctcctgcgatatggttggttggcgtggcgatctggccaaggttgcttctctgcaaagactgggcctcgggcgagccgaagctttgtgctgatgggggttaccagctgagattaggagtcttgggggtacccctaattatggtccccgacaagacctatacagaaattggagcaaaatggcctagaagttgggctgttaattgggtcaggcactga

SEQ ID NO: 3603 - DNA, 285 bp, Zea mays
  Peptide Sequence Number=SeqID_46978
atgcgggacagtgaaaaacaaagagatatgggggtgagggatcttttcaaggatctgagaagcggtcgagttcatcaaatggctgcttcaactgtgggaagtctggacacttcatcaagaactgtccctattcaaagcagaataaatctaattttcaatagacttctgggagcacatctcaaggaaagggaaatgtggccaacactccagcgggcaaaaatacaaggaaaactgggcgagtctactacactcaagtggctaccaccccggaaggagaaccagtaa

SEQ ID NO: 3604 - DNA, 114 bp, Zea mays
  Peptide Sequence Number=SeqID_46979
atggattcctccacgcccacacccgcgacgaaatcgcccacgataccgccaacagtgttccaggggtttgggggtgggtgcgtactaggagggggaagaggaaggatattttaa

SEQ ID NO: 3605 - DNA, 2580 bp, Zea mays
  Peptide Sequence Number=SeqID_46980
atggaggtagttgagttggttccttgcgcccgcaataagtggggcaactggcatgagttttggttctacgttgcgaagggcacagtcgaagaccatccggggctccccgtggccgagatgtgctcacattattactcaccatacctgtcgtttgaagtggcggaggaggatgcggacgaaggggcccttcggtgcgccatcggcttgagcagcgggcgcgatttggttgaggagtttgtggcgtacggggtgtggcctttggcgcatggctgggcgttgggcgaagtatgccctcgccagatgccttcccatggtgggaagctggtgcgaagtcccgccttcgcgctggatctgcatagccgcgatccggccgcctttgtgcgtgaggcagaggatggggcagtgcggatcgtcggtcggtacgtgccgaagacagagggccagcgtagctgggatatttgcgggtctaatgaccgcttgaacagggtttttgagttgaatcatctaccgtatggcggttatcccggccaagacgatgtggatcgtcgcgggaagaagccggtggtagagactggagacgaccccgcgccggcggccgccccatcctctaagaagaggaaactaggtattgctgtgggaggactgggggtttctgatggttttgctagggaattgatgaggacatgcgcggccccggggggaaggatgtcttcgcccgagcttcgggagtcttcggcgcggatgctgagggttaccgggggttggtggcctaagaatgttcctatcccccgcgcggccggcgaagacttttttacatctcgcatggttcgtgattggaaagtgtttccttacgggcggaatattgctgttgttgtgtcggcagtgatggacaaggattgtcaaggagctgcgcagaagcgccaggcggtcgtcaggcttcatgaggccaggccgaagaggccgcgggggactgcgaaggctgctgcccccggcggaagccagccgccgctggcggcgaagtcggccgccgcccctgagtccagcagggtgccggaggctacgaaggtggcccgagggttgccgccgccgggcaagcgcgtcaccgacttcgccaccaacattagtgtggaagattatcttgttgggtcggacgaaggccaacttgttgttgttccgcctgccgtggcgaccgtggcggctgccgtggtgcccagggcgaagggcagtgctcttagtgccgatggcgagattccagcactcactgccgtcagggacgaggcgggtgctgtgtcccgccggctgaaggagctgaaggaggcactaagtcaggtggctgacttcgcagatcgcgcggcgtcgggggccctgacggtggttgtgtctgccgaagtcgagagacttcggacgcaacatgctgacgccgtccgggaaaagtcggccaccgacagcaagtgccgcaagctggcggataaggtggccacgctggagggtgagaggactgacctccggcgccaacttgcggaggaaaggaaggaggctaatgaggccctcgccaaggcgcagtctgcgcaggcggagggcagtcttgcaaggcagcgcgccgaggagttggaggggcggctcaacgccctgcagacccgtgtggagagggccgaggcctcgacgcgctcggaggctgagcggacacgcaaacagcttatggattcataccatgagctgggcgcgcggaccgctgacttcgaggtgccggaccgagagcccggacttcgctgcctcgagtggatacaggaggagttgctggcgctccctgccatcgtggaggggtttatgtcctatgcctcgctggtcacttgcgagggggcgatgaacgcgctctctcacgaagggtgccggcactatgaggtcttcgaccaagctgatgaggatttcgagcgcgatatttataaggttgaggaccctgtggcggcgcgtggcgagagggtggatgacttcggggctttgaacagcgcgcagcctgactcggagtcgaacccgatggtggctgcgtccgagaccgccccggagctgcccccggaagccgtcgaaggcgttcccgatgttcccgcaaccactgcggtcggcggaggcccgtcgccaactgccgcgccgggggctgaggatcctgggaagatggcggcggagcctgcagcggaggatcccacgacggctgggtcttcgcaggttcaagattttgggcctacgcacgcaaccgctactactaattttttagcggcttcgaccgtggatgatgggaataaatcggatgggtttgcatctaagttttctgattttggtgactctaggagctcggttgagtggaccgaagagtcgtcggatgaggacctggactactttgcggccttggatgtggcagcggcggaggcttcgccgcatgctgcggatgctaaggttgtgcctggttcgagtgctgggcgtaggcggcgaagggcggtcgcgaagcgtagagtgagtgaggcggacagtggtcggtttcgtgtgagtagggctggcaggcaggaactgctgtccttgccggccgct

SEQ ID NO: 3606 - DNA, 237 bp, Zea mays
  Peptide Sequence Number=SeqID_46981
atggcaacagcggctaccaaggccgaccgtccaaaatggggaggcgagcgcctagggcagaggctaggcgaccgtggaagggagggagctcgtccgcgccatggaggagagctcggcggcatgggtgcctggaggaaggagctcaccgcagggaaggctggcagccatggaggaataaggcgtgggctgctgccgtgtgagaagaagatagggaaaaagtggtggctaggggggtag

SEQ ID NO: 3607 - DNA, 561 bp, Zea mays
  Peptide Sequence Number=SeqID_46982
atgggagagagggcgcagagagcttggtcgccatggaaggagatgagccagcgaccaggaaaggaagagccctgcgcacgtacaggaaaaacagagggaagagacggtgggggaaaatggagaggggcgctggcttcttgctgctggaggtacaagaagggaggggggcgagccaatatgggagcagggagggagctcgtccacgccatggatgtccctgctgccaagcctgaagggggcgcgcccatgggagcttctcccactgcgccagggaagccagggaggagggagctcacagggaggggcaccgagcacagggagcagaggtccggccatgggaggagctcggcgtgccagagaagatgggcgccctgctgcagccgtggggaggaagggcactgctgctgcgcgagggagaagaagacagggaggaagaaagtggcggctagggggatgctggaaggcagggaaggtgtggttcatcaattggtaatggagggggtcaaccaatcctctttggaagcgatactgcctcttggcatccgtgttgacatcttctga

SEQ ID NO: 3608 - DNA, 366 bp, Zea mays
  Peptide Sequence Number=SeqID_46983
atgggtctagcgatcatccctcaggttctgtttcctccgagagctccgtgccgtggctcgaactaccactggcgtcgtcgtcgtctcagtctccatcagggtctcctccagcagccgggatgccctatggtggtgcagggggcatctctggctgaagtgcaggggaaagcggcctctcagactccacctcctgctgaggcgagggggaggagtcctgctcctggcgtcggtaaaccttctcctagtgcaggcgacgatgcagtctctccaggtgactggactgacctggcatcgtgcgacgcagtggacgctccgccagacgagaaggcaaaaaggggatcacagacttacgagcagtgcacctaa

SEQ ID NO: 3609 - DNA, 897 bp, Zea mays
  Peptide Sequence Number=SeqID_46984
atgaggtcttcgactagtccgaacgaaaactttgagtgcgagatttttaaggtcgaagaccctgtggtaaaggattcagcgggggcactctttgatcggatgtggggtcctcatggccgggaggcggttatggagcggtctgatcgggcgagagagcagatggcgcgtgccgaggatgtcgaagaccttggggatctgaacgacgcgcggcccgaggccgaggtcaacccggtgctgcccgaggctgaggtcgacccggccctgcgctcggaagccgttgagggctcctccgccggacctgtgtccactgtgtccggtgaaggctccttgccagcccctgcgccgacggcagaggaccccccgaaggcggtggcggagctggcagcggaggatcccatggcggcgcctgggcctgcgcaggttcaagattttgggcctgctcacgcaaccgctactgacactgctaattttgtgacggcttcgaccgtggtagctgaaaatgaatcggatgattctgtgtctaagttttttgagtctgatgattctgggagttcggttgtgtggactgaagagtcttcggatgaggacttggattattttgtggccttggatgcggttgcgacggaggcttctcagcgtgtgatggatgctgaagtttttcctggtccgagtgctgggcgcaggcggcgaagggcggtggcgaagcgtagagtgagtgaggtggagggtgggcgtcttcgtgtggatagggctggcaagtgggaattgttgtcctcgccagttggggtgagtgtaggtgagggggagttgcgaagtctctttgagggcgaggagctgaggataatgttgtttaactacagggagatgggtatcatcccgatggttgaaccaatgtaa

SEQ ID NO: 3610 - DNA, 141 bp, Zea mays
  Peptide Sequence Number=SeqID_46985
atggtggtgtgcatggaggcgggcacacgtgcagggggcacgggcttcaagggtaagcttctcggtatcttcttgggcaagggctctggccaaagtgaagaaaaacttcactacccaatgcatgcagaggactgggtataa

SEQ ID NO: 3611 - DNA, 831 bp, Zea mays
  Peptide Sequence Number=SeqID_46986
atgtcttcttcctcccttaagcgtcgtgtcttcccatcttccaagcccccggatggggggtatccgccgcctttccgcctcctcgttggaggaacgcaactccatgggagttggtacctctcagccatcgttcggcttcaaggattttcatcaggcagcctggttgctcccttccgccggtggccactcaagacggtgacctccagctcctggatggggagaggcaaaccgggctgtgatcccgccctcagcatcgggtgtgttcgtcatccttgctggggcgggggtcgaggcgagccggggctctacctcgcatgcgggtcggcgaaccacctcctcttccagcttctggtggtggcaatcgtcctcccgcgctacaacggagtcgtcctccagtcatgccggggaaggggtaaccggttgagccgcctgctcgggccggattcccggaggagtccctggagcgcggcgccgcccgaggctgggtcgggctttgctgaagacgtcgtcgatgccgagggtgctacggctcccttcagcgtgaagacccgagcctgcaggatcagatcatcttgtagcgtgtgctttctgcggccgccgaggccagaagaaaacaccctcgctgcgcttgcgaagctgcgtcttttttcctcttgtttcgagcatctgggctctgtcggtaacagggacgtttgtgtgagcgagagttgcttttcgcggaaggggcgagtgaggtatccgtatcccagaggcgtgggaatccctcggctcggtcggccttgccgcttacgcgtactttcacccgtccatgaggccctgtccccgacttag

SEQ ID NO: 3612 - DNA, 792 bp, Zea mays
  Peptide Sequence Number=SeqID_46987
atgacaggaccaaagaaccaaacatatcaggagaagtgccctaagcttaacgacgatgagtgtttcctagctagaattgaaggcgatgatgcgcgctgcgaccgaagctttaaaaaataccaggactctgcagtgacatcctatgagcatcttgatcgacgagttggtgaacttgttacacacatggacatgctggagactcgtcccccaccacaagctccagccccagctattggtgcagtagtgttctctcctgcggaggacgacgacgacggtgatagaggtgttgatgcatcgctgcgacgatgcctcacatacaatgattcatatgttaagattaagttctctattccatcgttcattggttcttatgatgctgaagcttacttattctgggagatgatgatggaacgtgttaagaagaggaattgcgagctcgctttgttcccccttcttatagacgtgatcttcaaaaaattgcaacgattagatcagggagacatgtctgtgcatgaatactaccaagagcttcagaaagaattgaaggattgccaacagcggaggagcaacacctttgtgccacaacaaccagcagcactagccaaagcgtcatcctctttgggcatatggacgtccacacctccctccaccggcggcacacacagtgccgcaccttcggcatcacagggacacaacaataatgaagatactattggagctaacattgcaggggctaatgatggtaatgaagaggttcttggcacaacagcgatagagacctataaggcctag

SEQ ID NO: 3613 - DNA, 324 bp, Zea mays
  Peptide Sequence Number=SeqID_46988
atggcccgcgcccgcgcctataaagcctccagggaccttgaccgtacccctccgcacgcgctcgacctcaccggagcccaaccccaccggcgtttgcccgtgcacagcgtgtccgcggccacccgatccccctgctaccgtagaccggccaacaggacccttcccaaccccgtccagccctcggagaagactgagcacacctcggtgaagctccccgagcaaggaatcggagtttgcttcgccggagaggccagtccacggtcgccggactccacccgaccgccggcgagcgtagaccaggtaatcctctactccattctttga

SEQ ID NO: 3614 - DNA, 1158 bp, Zea mays
  Peptide Sequence Number=SeqID_46989
atgatgcatggctatcctgagctacctttattcattgagcagctgctgggaacgggcgtattgagtgaaatcgcgcctctgctcgactgtgaccaggccctacaccagtccttctatttccaagcccctggtgctgctacggtggcctgctcggcagccgttgctccctccccagcaccctctgctcgatgcgccccctctctgctccctctccacgtttccaccatagtagggatagagcatgcggccaccgcggtggatccacgccggcatcacgggtcctcctttgggggtgtgccggggaacttcgccgggccgtggggagcgcactggtgggaagtcgtggtcgaattagagtttaaggcttggatttgggggattcgggtgctcgccggcatggcagccccgcctagccagtgcgccactgctctacctgccgcaggtgccaggaagaggtctgcgccggacttttgcaaagattcgcacgtttgcgacctctggcgacatttgaacactggaagaaacaaaccgccacgtgttcgacgccgtctgccgcgccatagcacgcccgcgcgcgcgcccgcgccgcgcccaagccaagccagtgccctggtccgcgtccgcgactataaaacgcccaggagccttggccgtacccctccgcacgcgctcaagcctcaccggagctcagttcgccgccgtttgcccatacgcgacgtgcccgcggccacccgagccccctgccaccgtagaccggccagcccagccattcccaatcccgtccagccctcggagaggactgtgcacgtctccgtgaagctccccgagcgaggaatcgggctctgcttcaccggagaggccggcccaaggtcaccggacttcaaccgaccgccggcaaccgtggaccaaggtacaccgtgcacctctcttcgattccttgcacggttagactccttagacctccacgaagctccctatgcccttggattgaactatgccgccgtggataggccggagcacacgccgccgacgagctcgcccgcctgctcacgtggaccgggcgattccggccatccccgacgacgagccgtacctcgacgtgatcgccagaccctccccgagccaaccctacacttcgccggaactccctcgccgccg

SEQ ID NO: 3615 - DNA, 483 bp, Zea mays
  Peptide Sequence Number=SeqID_46990
atggcggcgccccgtcctggcccctccccggcgcggcgcggccccgcccctcccttcccctgctcgcgcggcgcggccccgcctctcccctacccggcgtggcggctcgcccctgcccacccctgcgcggcggcgcccgtcccggcccctccccggcgcggtgtggcggccctgccgctccccttccccgtgcggcagtgcgccccgcccctcccctcctctccccgatgcggcgcggccccgcccctcccctcccctgcccgcgcggcgcggcggctcacccctgcccctgtgcggcggcgctcgccccggctccggcgcggcccgccccgcccctgctccctccctcacggtggctcaaccccggcgtggccccggcgtggtggtgatgaggatgatggttttggttatgattatggtaatggagaagatgaagccgtggaaggagacttccaggagttccaagactacgacgagttctag

SEQ ID NO: 3616 - DNA, 2160 bp, Zea mays
  Peptide Sequence Number=SeqID_46991
atgccttcccgtggcgggatgctggtgcgaagtcccgccttcgcactggatttgcatagccgcgatcccgccgcattcgtgcgtgaggcagaggatggggcggtgcggattgttggtcgctacgtgccaaagacagagggccagcgtagttgggatatacgcggatccaacgatcgcttgaacagggtcttcgagttgaaccgtctgtcgtacggcggttatcctgggcaagacgatgtggaccgtcgcgggaagaaaccggcggcagagactgacgacgaccccgcgccggcggccgccccatccactaagaagaggaagctaggtactgcgatggaaggactgggggtctccgatagttttgctatggagttgatggggacgtgcgtggcccccgggggaaggatgtctttgcccgagctccgggagtcttcggcgcggatgctgaaggttaccgggggttggtggcctaagaacgttcctatcccccacgcggccggcgaagactttttacatctcgcatggatcatcaggaagctgcgcaaaagcgccgggcggtcatcaggctgccccgaggctaggccgaagagggtgcgggggaccgcgaaggctgccgcccccggtggtagccagccgacgctggtggttaagtcggccggccctaggtccagcaaggtgtcggatgtcgtgaaggcagccggcgccggcggagccaagtctacctcggtcggagccgcgaaggcccgagaattgccttcgccggggaagcgcattgccgatttcggcactgatattagtgtggatgattatctcactggatcgggcgaggggcaacttgttgttgttccgcctgcggtggcgaccacggtgtctgccacagtgcctggggcgaagggtagcgctctcggcgctggcgatgagatttcggcgctcaccgccgtcaaggacgaagcgggcgctgtgtcccgctggctgagggaggcgtcgcagtggctaagtcaggcggctgacttcgctgaccgcgtggcgtcgggggcccttacggcagttgtgtctgccgaagtcgagagacttcgggcgcagcatgctgacgccgtccgggaaaaatcagccgccgatagcaagtaccgcaaactggcggagaaggtggtcgcgctggagggcgagaggactgagctccagcgccagctggcggaggagaggagggaagctaatcaggccctcgccaaggcgcagtctgcgcaggcggaggccaaattggcgtgggtggagggtagcctcgccagccagcgcgccgaggaatgggaggagtggttcaacgctctgcaggcccgcatggagagggtcgaggcttctacgcgctcggaagttgagcggacgcgcaagcagcttatggactcataccacgagctaggcgcgcggaccgctgacttcgaagtgcccgaccgagagtcaggccttcgttgcctcgagtggctgcaagaggagttgttggcgctcccgaccattgtggagggatttatgtcctttgcctccctggtcacctgcgaaggggcgatgaacgcgctgtcccacgaagggtgccgtcactatgaggtcttcgaccgatctgatgaggatttcgagcgtgagatttacaaggttgaggaccctgtggtgaaggaatccgcgggagccctctttgatcggatgtggggcccccacggtcgggaggtggtcagggagcggtccgaccgggcgaggggtcaggcggcgcgtgacgagaaagtggaggacttcggagctttgaacagcgtgcggcctgaggcggagtcgaacccggtggcggctggggccgaggtcgcgccggcgccgcccccagaaaccgtcgaaggctccctcgctgcccctgcggctactgcgtccggtggtggctcgtcgccaaccgctgtgccgagggctgaggatcccccgaagatggcgacggagccggcagcggaggatcccacggcggctgggtcttcgcaggttcaagattttgggcctgcgcacgcaaccgctactgctaattttttggcggcttcgaccgtggatactgggaatgaatcggatgagtctgcttctaagttttctgattttggtgactctgggagttcggttgagtggacagaagagtcgtag

SEQ ID NO: 3617 - DNA, 434 bp, Zea mays
  Peptide Sequence Number=SeqID_46992
atggacaaggatcaccaaggggcggcgcaaaaacgccaggcgactgtcaggattcacgaagctcggccgaaaaagcagcggggaactgcgaaggctgcggcctccggcggaggcaagccgccgctggcggtgaaggcgggcgcctctgcgcctagcaagggcgccggaggcaacggcgggcgccggaggctccaagtcaacgaaggtgggcgcccccggccagcggagtgggcggaggcttcgaaggcggcccgagcgctgccgttggcggggcaaaacgtgttgcccgacttcggcaccgacattactgtggatgactatcttgggtgccgtactgcgtcgggggccctcacggcagctgtgtctgcggaagtcgagagacttcggacacaacatgaggacgctgtcgaagagaagtcggcgtctcacagcaa

SEQ ID NO: 3618 - DNA, 267 bp, Zea mays
  Peptide Sequence Number=SeqID_46993
atgcatggagagggagggtgctcttaccaaagtgctcggggacggcagccggcgcttgcggcgctcgggctcggggacgatggcgctcgacactcgggctcggggacggcagcactcggcctcgggctcggggacggcagcgctcggcctcggggacggcagcgctcggcctcgggcttgcggacggtggcgcacgggctcggggacggcgacacagttgatcagcctggcggcgcaacggtgtctgctcggtcgggagttagctag

SEQ ID NO: 3619 - DNA, 252 bp, Zea mays
  Peptide Sequence Number=SeqID_46994
atgaatccgccgtgcgccgtggccaagcttcatccgcaccttaatgccgctccgttcaatttgacagtggtggccgatggggagctcggacttcgatgggcgctttccgtcaatgccgccgccgtggcctgcttggtcacctggtccgcgccgccgtctaagggttatgagggagaagacgataccaggcagtgtgggccatcggatcgtgaatgggtggtcacgattaaatcgcgatacctcttcacttga

SEQ ID NO: 3620 - DNA, 525 bp, Zea mays
  Peptide Sequence Number=SeqID_46995
atggcggtgatcctcggtaagttggggagcgcgaggacgtggagttttaaaccccgacccgaggcgataacgagcaatcaccggcgaggtttgcgggtcggttcatcggccgctccgagtttgctgccacgcgatgggcgggaggagcgagtccgcgccaccaaagttggtggaaggccggtgcaggaatcacggaggttcggtgaggtcgctgcgcggttcggttgcaatgacccgcgagcacgatttgttgcaatccgcccggcggagttgggcatgaccagggcaggtctacctagtggggcccacacatcagtggtgtgccacgacgcgctgacaacagggacgcacaaggcggaagtttgttggggaagaagacctgacgaggcggccccatttgccagagactgcgagcgcacgcgacgcaagccaacggcagacactgatggcacgggcccacggcacagcggcagtagagggcgcacggggctgaggggaagtgggccgcgcggaagagagaaatag

SEQ ID NO: 3621 - DNA, 414 bp, Zea mays
  Peptide Sequence Number=SeqID_46996
atggtgagagaacgaagaacacaaacaaacacaatgagcaagaacacaagagacacaagatttatcccgaggtttggtcacaccaccaaggtgccctacttcctcgttgaggcgcccacaaagagccgggtctctttcaaccctaatcctccctttgccgaccacaaaggtcaagctcacacactaatctttgctcaaacgagcggtctgactggcagactacagatcagaggtcagaggggtcagagaccagctgaactgccctcaggaccagttcaaccggtcttgaccaatgagtttaggagagaaaaccccagctcaactgcccggaggcaagttcagctggtgtatggtcaaagaggttcacagctgaagttgagttcagctgaagttgagaaagctcaactcagctga

SEQ ID NO: 3622 - DNA, 1197 bp, Zea mays
  Peptide Sequence Number=SeqID_46997
atggcgacgaaccgctacgtgtgcgaggtgtgcggcaaggggttccagcgcgaccagaacctgcagctgcaccggcgcggccacaacctgccgtggaagctcaagcagcgcaaccccaaggaggcggtgcgcaagaaggcgtacgtgtgcccggagcccggctgcgtgcaccacgaccccgcgcgcgcgctcggcgacctcaccggcatcaagaagcacttcagccgcaagcacggcgagaagaagtggaagtgcgaccgctgcgccaagcgctacgctgtgcactccgactggaaggcgcactccaaggtctgcggcacgcgcgagtaccgatgcgactgcggcacccacttctcaaggagggacagcttcatcacgcacagggccttctgcgacgcgctcgcggaggagagcgcgagggcggtgaccgcggcggcggcagtcgtcgtgggacagcagcaggccgctggagggggagatggcagcgcggggttgcacctgccgccggacgtgctggacccgtcgcagacgctgggcggcgggcacggcatgtccttgcaagagctgtgcctcaagagggagcagcagcagcagttcgccccgtcgtcgtggctgacggcgcaccatcagcaggagctgcccggatcggcgaggctgctagagcagcatgagtacatagggagctccacgccggagagcacggcgggcctcagcggcttcgtcgggctctcgccgtccgccgctggtgaagcggcggcctcggcgcacatgtcggcgacggcgctgctgcagaaggccgcgcagatgggtgcaacgctgagccggccgtcgaaccaggaacagatggcgagcactcacagtcacagcagcaccaccaatgctggcactggcagtgccagtgcggcagctgctgctgcaatcaacgtgcctggcactggcgctggtgccttcggctttggagcacctcatcacttcggagcggaggagaggaccaccaccagtgctgaccgggacgcctgcggcaatgccgccgccgtctcggtggtaggcgccaacgatggtttcaccagggacttcttggggctgagagccttctcccacggcgacatactcaccatggccggcttcgatccctgcatgtcgtcggcggcgtacgagcaagggcaccaccagagcagcaagcagtggcatgtctag

SEQ ID NO: 3623 - DNA, 2073 bp, Zea mays
  Peptide Sequence Number=SeqID_46998
atgacggacggtcaccacttcaacaacatcctcctcggagggcgcggcggcacaaaccctggtcagtttaaagtgcattctggtggacttgcatggaagagacaaggtggaggaaagaccattgagatcgacaaagctgatgtaactgcagttacttggatgaaagtccccagagcatatcagcttggagtcaggattaaggctggcctgttctacagatttattggcttccgtgaacagtcatttctgaaaatacgcttttacttgtcagtgaagatgaatggtgaggatgtaagcaacttgaccaacttcatacaaaagaatatgggtgtcacaccagatgaaaaacagctttctgttagtggccagaattggggagggattgatatagatggaaacatgctaacctttatggttggttcaaagcaagcatttgaggtgtccctaccagatgttgcacaaacccagatgcaaggaaaaacagatgttctcttagagcttcatgttgatgatactactggagccaatgagaaagactccctcatggatttgagttttcatgtgcctacttcgaatactcagtttgttggggatgagagtcgccctccggctcatattttatgggagaccatattgaaatttgctgatgttggttcttctgaagaaccagttgtcacatttgaaggaattgcgatccttacaccaagaggacgttatagtgttgaacttcatctgtcatttctgcgactccaaggacaagctaacgattttaaaatccaatacagcagtattgttcgcctctttcttttgccgaagtcaaacaatcctcatacatttgttgttatcactcttgatccaccaatccgtaaaggacaaacattgtatcctcacattgttattcagtttgagacagaggcagtagtggaaagagatctggcattgagtaaagaactgttggttgaaaaatacaaggacaggcttgaggaatcttacaagctgatacacgatgtttggctgagcaaacacttagggcctgtttggtttgtggctaaatgtgccacactttgcctaagatacttcactataacctggacagtgacaggtctaatacatgaggtatttaccaaagtccttcgtggtctatctggtgctaaagtcacaaggccaggttctttcagaagttgccaagatggatatgcagttaaatcatctctcaaagctgaagatggactgttgtatccactggaaaagggtttcttcttcctgccaaagccacctacactcattcttcatgaggagattgagtttgttgagtttgaacgtcatggtgctgggggtgccagtatatcatctcactattttgacctccttgtcaaactgaaaaatgaccaagagcatctcttcagaaacattcaaaggaatgaataccacaacctcttcaatttcatcaatggaaagaacattaaaataatgaaccttggaggagatggtcaaggtgcaagtggtgtagttacagatgttctacgagacactgatgatgatgctgttgatccacatctagagcgtattaagaatcaggccggggatgaggaaagcgatgaagaggatgaagatttcgttgcagacaaggatgatagtggatctcctactgatgactcaggtgatgaggaatcagatgctagtgatagtggtggtgaaaaggagaaatcatccaagaaggaagcaagcagttcaaagccagttcagaaaagaaagcataagggcagggatgacgaaggacaagagaagaaaaagccaaagaagaaaaaagatccgaatgctccgaaacgagccatgaccccgttcatgtatttctcaatggctgagcgaggaaacatgaagagcagcaacccagatttgcctacgactgagatcgcaaagaagcttggggagatgtggcaaaagatgtcaggcgaagagaaacagccttacatccagcaggcccaggtcgacaagaaacgttatgaaaaagaatccgctgtctatcgcggtgaagctacagtcgatgtggattctgggaacgagtctgactag

SEQ ID NO: 3624 - DNA, 243 bp, Zea mays
  Peptide Sequence Number=SeqID_46999
atgccggctgccgggccggcccgcccatcgatcgcgccccgcagtgctgttcgcctgattattgtctaccgtggcctggtgcttgggctccctgctgcgcggtgttcttcttctcgagctggtgccgtggatgtctccctcggctccggcagcggctctagtatctccatcaacctcccgccgtgcaggtctggatgtgggcagcggaattggttttctgggacagaaccttgcgttcgctga

SEQ ID NO: 3625 - DNA, 900 bp, Zea mays
  Peptide Sequence Number=SeqID_47000
atgaagcaaagcgagaacagatctgagcagtttgctaaatcctcgagggctggggcggcgcacagcacagtggtgcaccatagaatcagggccggaacagcgaatacatgcggcggcacgcagcagggtgaggttgaggttgaggctacgacaggccagctagaagagaacaccatcaccgcgcaccatggatcctcatggacagtaaatggaaaggatgacacgggcacccccgtgaaccgtgatcgcgacgcgtcaaccaacggcctcgcgcatggggaggcgggcctcgagttcagccttggccgggccggagaaaactcagctcactgcgcagtgcgcaccgccaccgccacccgctccgtggagtggcgtacgtggcgccgcgttgaattaatggcgtccctccccatccggttccggcccgggcacgtgacggtgacgcaacctccggccccacgcatcccccgtcaggccgtcaccggcccgcctgacgtcaccttccccgtcaccccacccggcccgccggtcgagagcatgcaggcggtgggcatccggcggcgcgggctgaccatcgacccggcgggggaggaggaggcccccgcggcgcgcgtggggcggctggtccgggagagccccgtggtgatcttcgcgcggcgcggctgctgcatggcgcacgtgatgcggcggctgctggcggccgtgggcgcgcacgccaccgtcatcgagctaggcagcgccgaggaggaggaggaagagctggcggcggccgagggcggcggcgtcccggcgctcttcgtaggcggcgaccccgtcggcggcctcgagggcctcatgcggctccacctcagcggccgcctcgtgccccggctccgggagctcggcgccctctgcgcctga

SEQ ID NO: 3626 - DNA, 537 bp, Zea mays
  Peptide Sequence Number=SeqID_47001
atggaggccctgggcagcagtgtcgggtggtcacgtgaaacgacagtgggcctcgtggacgcggcctcgcgcgcggccggccacagtgaccatgagcgaccacccgacagcgacgaactgctcatcgccgacgagcgtgcgggcatcgcctacggcacccgcatcagacgatacttccatggcccttctcggtgcgcggacgccaaaacggccacatgcgctccccggagcgggcgcgtggctcggccccggagcgggcgggcgagcggcctcggccaaagggctccccaagtgcggctgctttctggcggcgggcgcgtccggccacgaccacgcgggcgtgacccggccgcgggctcgggcgccggccacggcggcgcgggcacgacccggccgcgggcggtgcagcagcggctcggcgcggtcgaactccctggcacgcgcatcgactcggcggcggctgcgtccgtactccctgacagcagcggtctggcagccggcggtgcctacgatgtggtggcggtggtgtgcggttag

SEQ ID NO: 3627 - DNA, 792 bp, Zea mays
  Peptide Sequence Number=SeqID_47002
atgtccaggccttcctcgcgccgacagccgcatcagtgggtcgcccagcacgtcgtgtgccgcgagggcggcgctcatgttctgggcgactctggcgagggcaaggacctgccggtgcgctttgaggcgtctggtgcccgctggcgcggtgctgaggtggtggcagccggagaaggcttctctgtcaatgagattgccaactccgcccgcacccctgggcctccgtcttccggcctgaatggctggttctcgtcctcggtgaacgagagcccccgtgccgtagcgcccgcccggaagccgctgctgaagttgcttcgccgcccggggcggaggtcatcgttgctgctgcccgaacgagcgacggcgagccacccgtcggccttctgttgctccgcaggccccccaatcgcgtggggttgctcgtacctgcggaggtggaaccggagttccgtttgtaatggcacttcgaatgccagtgtttttgttcattgtggctgtcgaggcctgaacataactgtttgtgcgagcgagagttgcttctcacggaaggtgatgagtgaggtatccgtatcctggaggcgtaggagtccctcggctcggtcggccttgccgcttacgcgcactcttacccgtccatgggattctgtcaccgacgcagtcgagaaggctcgaagaatcgctctggcagaaaagcttccgaatgtgaagacttgttcggtccgcggaatcacttatccgaacgtgagttacttatggcagaaggtgatgagcgaggatccactttcgaagtag

SEQ ID NO: 3628 - DNA, 1050 bp, Zea mays
  Peptide Sequence Number=SeqID_47003
atgcctgggggaatcctccgcggagctgggagatgcctttctcccccagacgtcgggggaataaaagggttaccgacccacgcggaggcggcctcccgactcgcctcaccctccgctccagcaaggagttgcgttcctccaacgacgaagcggaaagacggcggatatcccccatccgggggcttggaagatggaaagacacgatgcataagggagcacgaagacacggtcgccttccaagagggtcaccctccttttaaaggcgactctccctacttgcgtccccagccgtcgtgggctgagtcttctccaacacgctccaaggtcctccccctacggcgcgggggctgggtcccacacgtcatgcaagccggcccagagcagaagaagccaaaccgccgtgcgcggtgcgtgcaaccgcccagcggttacaagcggctctccacttttgcccagaccagcgggcgaaagggcgagcagccgtgcaggcggcatgcaaccacgccaagtgggcgcgcttctccgactcccaacacgcccggcatggaggcccagacccacgcgtcatgcaaccggcgcgccgaatgcttcgtgcatgcaactgcaccgccacctacgccaccaccgcgcctcctcgactgcggaaccaataccgcgactcgaggcgacccagcgcacgacccagcggctccagcctggcgcgacggcggcgcctctggcaggagaagagagcgacgcttcgccttcgccataatgaccgcgtcaaaaaagggaccgggaaagggggataccccggaagggatccttccctgtgaaggaaccaggctccgagcctccctactaatcagaggttcgaaggttggcccctcggaagggttcaacagccgcctcagagcacgtgggctccacacccactactggtcagaggttcgaaggtcggcccctcggaagggttcaacggccgcctcaggctactcgggctccgcgcccactactgatcaggggttcgaaggctggcccccgaagggttcacagccgcctcagacatag

SEQ ID NO: 3629 - DNA, 606 bp, Zea mays
  Peptide Sequence Number=SeqID_47004
atgcagcccggctgcacccctccaccggcggtcacccaagatggtgacctccggcttgacggtgggggaaagcgagccgggctgcggcctctgcccctccctcggcctcgaggattttcgtcatccaggccaagatggaggatgaggcgagtcggggggctgcccccgcgtgggtcggctgcccttttcttcccctggcgtctggggaagaatggcatcctccagtttcgcggagacttcctccagccatgccggggaaggcgaactgttgctgcccagctaggatgcaacattccgccccctccctcgcattcgcggcgaggacggcagcgaggacctgccggtgcgcttaggagcggcccgctctttggctttaatagcgggttcgcgtcccttgagcgggaacgcgaacgagagccctccggtggccgcgtccacccgggaccatggctgctgctgcagaggtcgctggcaggtctcccgacgctcgtcgccccgcaggctcgaggctcctctagcttagttaaagagaccccttggctgctcttcgacgagtcgaagccaggggtagcgatatcagcacgaacagaggcggagttggcttga

SEQ ID NO: 3630 - DNA, 450 bp, Zea mays
  Peptide Sequence Number=SeqID_47005
atgggcaagaacaacaagcgtaagcgtgagccgactcctccatcagaggagtttggcgactcggagtactcggaggaggagttctcctccgagcccgaggggtctccggctcccgtctctcccccggcgtcgtccgatgactcggacgactcccaggggatagccgcggaggtctggacatacatccgggccgtcgagcgcgccgggctcgaaggctcggatgagtcggagtactcctcggatgaggaggactcggacggcggcgaggagggtgaagacgacgacgacgacgacgacgatgacgacgacggcggcagcagtggcgggggcgacggcgacggcagaggcggcaccaagggcggcagcggcggcagcggagacagcaccaggggcagcagcatgggtagcacccggggcggcggcggcggcaggggcagggccagtggctag

SEQ ID NO: 3631 - DNA, 807 bp, Zea mays
  Peptide Sequence Number=SeqID_47006
atggtgacctccagcttgatggtgggggaaagcgagccgggctgtggcctcttcccctccctcagcctcaaggattttcatcaccagggctgtggaggggactgcaccgtgcctggctctcagacgcgagtggcttcggagccgctcgcggcgccggcgtctgccacggcagctggaagaagttcttccgccggcgagatcgccaaggccggccacagaccgacctccaactctacggccttctgcccgtccttgccttacgagtttgggcatgggcgggggcctcctagcagcagcatccgccctgaggtcagtgctgccgctgttcggccccccggagcagaattcgtcgtcgtcgctgctgctggagcaggtgacggcgtgccgttcgtcggtcttctgttgcttcgcaggccctcccccatggagtggggttgttcgtacctgcggagggggaaccggagttccgtttgtaatggcactttgaatgccagtgtttttgttcattatggctgtcgaggcctgaacatccgaggcctcgggtcgggctggcgcccttggaagatggtcggccgaggccccagaggtgaccggccgagccgcctgttcgggccggattcccggagaagaccctggcggcgatggcccgggcgtggcgatgacgtcgtccttcggagtggaggtcttcggaccgcgtcgccgtccgaggctaggtcgaacctcgccgaagttgtcgtcgatgccgagggtgctgctgcccccttccagcgtcaagacccgagcctgcaggatcagattgtcttgtag

SEQ ID NO: 3632 - DNA, 258 bp, Zea mays
  Peptide Sequence Number=SeqID_47007
atgcagttcttcgagttccacaagatcgaagaccctgagcatctgtttggtgaaggcaatgataccctgccggaccacctaggaagtgatcaatggggagtcatgatccccgggcagaacgggaatcacggctcatgggtaaaagatggttggtttacagatgatgatgatgatggttatgactatggtaatggtaaagaagaaggtgtcgaggtggacctccaggagttccaggatttcgacgagttcgaggattag

SEQ ID NO: 3633 - DNA, 360 bp, Zea mays
  Peptide Sequence Number=SeqID_47008
atgtggcagaacgccaagaaaagcttcgcacaaatgaacgtaaatggaaatttgcagaatagaattaggattcagatgggtcaagttaaggcgatagaaatcaaggaggccgcggaaaaagggggaaataggaagagcgagaccacggagaagaaaaggaacgtaaatcacggattcatgggtatcctctgtcggaacagtgaccccgtggcaaatccgccaagaacagagctccctcgggggaagaaccccgatggacacgaggtggaggaggtcaggctcggagacaacatacatatggttacctgcgaaaggcaactagctgttggggtcgatggggggaatcaccacagcggatga

SEQ ID NO: 3634 - DNA, 501 bp, Zea mays
  Peptide Sequence Number=SeqID_47009
atggagcgaggccgtcgaccctccacgtgcgccgaccgcaacccatcgacccagattgacgacgggccggaatacggcagtggcggccgatctacccaccaaccgtattcacggccatggaggtgctgccgcgaggtggtggtagaggcgaattcaatgggcgatgaacgcaggggagaggcttcgggtttctctcactacctcccactggcggcgccatccttttgctcatcactgcgcaagctcccggttcgcccatggcgacgagcaatgcgcgggttccagggggcaaggctcagcttttatagcacgacgatggatcggattccgaagtcagcgctgatttggggggatcggttggaggaacgcgaggtgcgcgcgacccgcggaatccgtgctgccggtccgttgaagccgacgagtgcggcagaggaagatgacatgcagggaccacctttaagtggccgcgcgtggagtggacagagacggctggcgcagtga

SEQ ID NO: 3635 - DNA, 384 bp, Zea mays
  Peptide Sequence Number=SeqID_47010
atggcccccaagcgagatagttcgaaggcagccccatccatcgacgaagcagcgaaggaagcgctgctggctgagaaaaaaggcaaggccctcgcagacaacatcccccacgaggtcttcgaagatgaagttgtcagcaaaaaacagtgccaagaccaccccaccctcgaaggcaccctacgcacctgcagctctggaggcgtaccgcaagcaccacccccaggcttcgctccaacagagggcgaagacgcaatagaggacggcgaggtcatcggcatctcagctgaagaccagctacaactgcaggccctacgcatcaagaaccacaacctacaaaagcagaaagacatcttcgaggccaagcgccaacatgtcaccgcctag

SEQ ID NO: 3636 - DNA, 513 bp, Zea mays
  Peptide Sequence Number=SeqID_47011
atggccaaatctttcatcatcgcgctcgaaggcctggccctaacctggtacaccaggtaccttggagaggaccagcaaggacttggaaaggccaaggtgtcaaggaggagcagcaagggcgtccacaataggaaggagatcaaggataagccttcgtggcgaggtcattcgtgtgtcatgggtgataaccaacggaaccgtggtgtagtgattgagaggaatcgttcgcttggagccttggatcatcaacgtcgagatctccactcaatcaagttatcgtatctcatggaagatcgggccgcgtctactatcaattggtatcagatttccaggttgcccatgaggtactcctttgcaatcacacctacgctcattggacagtcacatcggtcaccgtttgccacctacagtgctggaccaaagaatcaaatggacaaggacaaggggcctaagcttaacgacgatgagtgtctctcagatggaattgaaggagatgatgcgcaagatgactga

SEQ ID NO: 3637 - DNA, 150 bp, Zea mays
  Peptide Sequence Number=SeqID_47012
atggccgtgatgggttcaacatcggaaaatatgtacctctgccaggtgaggaaacaacagacttttgctatttttgttcaaaggtggtacccaaggaagagtcccaacagtgaagatgattgcgggaggatgttggcctcccatctttaa

SEQ ID NO: 3638 - DNA, 138 bp, Zea mays
  Peptide Sequence Number=SeqID_47013
atgtgcataactcaaagacaacagatcaagccaaggatggaggcaagaagagcttcgaggtaccgagtgcatggaagaaggaaaatcctcccaaaagttgaagtcaaacggagaaagaacggaggaaaaagcacttag

SEQ ID NO: 3639 - DNA, 203 bp, Zea mays
  Peptide Sequence Number=SeqID_47014
acactcaatctgatctcgtacggtccaaaccccaaggttatgaaggctggggagctgatgaggacatcattatgagtacgactacaccagcagcacctccacatcaagcgccacttccttcattagctgggcctaacactcaggcccgtgccaaagatcttaacttcgtcatgctactgaagaatgagggcccagaggaatag

SEQ ID NO: 3640 - DNA, 213 bp, Zea mays
  Peptide Sequence Number=SeqID_47015
atggctcaggcgttgtctgaattacttgatgaagagactcgccttaagtccatgtcttctattactggtgttcttgactctggagcttcatttcatgtgacatctgatcaatcacgcctggcttctactgcacctgtcaccgagggtacttctgttcaaactgctgatggatcgactcataggggatgtgattgggacttgccatcaccgtaa

SEQ ID NO: 3641 - DNA, 96 bp, Zea mays
  Peptide Sequence Number=SeqID_47016
atgccaaatcacctcgccaaacttacttcatccgccggtgttcgtggtccaggcgccgccgacgagctatgccgcctgagcccgtggctagactga

SEQ ID NO: 3642 - DNA, 513 bp, Zea mays
  Peptide Sequence Number=SeqID_47017
atggccatcacaaagccacaaccgccgccgcacacgtctctccatccatcaccggcggcgtcgccgccgtcgggggcaactttacagggaccggcccgagcagcggcgagcgctgcggggacacaccggacagcgaacaggcattttggagagaccaacatgaacatgcggagcagtcagtcacacactattttcagaatggtaattgagagcagtggtaaggaccagacagacggtggagatgctatccacgtatctgtttttgtatgtacacttcactgtatactcaggtcagaaagaatcatcaagacaggggcagaaggggtacgtttgaatgaggggaagtatattaacaagagcttaatgattcttgggaatgtcatcaatcagttgagcgagaacggaaaacaaagtatggggtctgttggcatcttggtgtgcgtttggctggaggccatcgacctcattgccgtgattggcacacagttacagaggctacaatcagtgcagtga

SEQ ID NO: 3643 - DNA, 456 bp, Zea mays
  Peptide Sequence Number=SeqID_47018
atggaaaaagagccacttgacatggttgagagctcagttcgagtcatcgagacacatgttgacatcattcgcagtctagtgactgatggggttgtggatactagtgaaccggaatcagtgtacacacttaagaccactttgtttcaaattggagatgtatgcgacatgcttgagaagtgtgctctgtccatcaaaaagtatgctgactccaagagggctaaaattattcaagatgaagccctgcaatatgctgaagatgatgaagctacagatgatttggaggaactcccaagcccagatctccttactcaagctgacatattggaaaaatattttggaattgagatcagaatttctccggcagtgagcgtcagggtgactttgatgaaaccttcgccggtcggagtgttcaatgtagcaccggcgtgtctggcggatgttgaggccggttacgag

SEQ ID NO: 3644 - DNA, 585 bp, Zea mays
  Peptide Sequence Number=SeqID_47019
atggcgagagtagcgtgtaccctacgtggcaagaggctggacggtggtgtatctgtgctctcagttggcgtgaacccgatcttcccctcttatggagatatggcacgtacgaggaaaaccgcgcgcaagtccactggacctattggcgtgccttgtcatcagttggcttccagacatgaaggaagaagtagcggcagcaatgatccaatcggagacttggaagataaagtggaacagcttcagacggagctacatcaccaaaatagggtgtgtgcacaggacggtcaacatatagctgagttggcagctgacgtcagacgcttgcaagacgagcttgctgaacgagatttggcggttgattgggccatcaactcacgttcggttgcctgggactgtgaagccaaagctcgtgctcgtgtggcagagcttagtgcggcccttgacatgaggaagtacatgtactatatgcgcgactgcacccagacatgcctgccgaccctgttgcaatgggagccggaccatcgaggacaacaggtgaaggacctgatggggagttggacctttttaggtctcctccttccatga

SEQ ID NO: 3645 - DNA, 1923 bp, Zea mays
  Peptide Sequence Number=SeqID_47020
atgccgtcctcttcttcttctgctgccgctacgccaccggccgacgcgtcgtctgaggagacactgagcaccgtggcggcggaggagttgcgtgccggcgacacggtggatttcggcgcatcgcggatgtcctcggttcgcgtgcaagacatgcagcagcttggttattttggcggcggagtggcacgtgtcccgggggcggaggaggtccccgagccagaaagcgagttggttgtcttcgaggcgttcttcgccgctggctgggcgctgggcgaagtatgccctcgccagatgccttcccgtggtgggatgctggtgcgaaatcccgccttcgcactggatttgcatagccgcgatcccgccgcattcgtgcgtgaggcagagggtggggcggtgcggattgttggtcgggtcttcgagttgaaccgtctgccgtatggcggttatcccgggcaggacgatgtcgaccgtcgcgggaagaaaccggcggcggagaccggagacgaccccgcgccggcggccgccccatcctctgaggaagctaggctgcccgaggctaggtcgaagagggcgcgggggaccgcgaaggctgccgcccccggcggtagccagccgacgctggcggcgaagtcggccggccctgggtccagcaaggtgccggatgtcatgaaggcagctggcgccggcggagccaagtctacctcggccgaagccgcgaaggcccgagaattgcctccgccaggaaagcgcattgccgatttcggcactaatattagtgtggatgattatctcactggatcgggcgaagggcaactggttgttgttccacctgcggtggcgacaacggtgtctgccacagtgcctgtggcgaagggtggcgctcttagcgctggcggtgagatttcggcgctcgctgccgtcaaggacgaggcgggcgctgtgtcccgccggctgaaggaggcgtcgcagcggctaagtcacgcggctgacttcgctgaccgcgtggcatcgggggccctcacggcagttgtgtctgccgaagtcgagagacttcgggcgcaacatgctgaggccgtccgggaaaagtcggccgccgatagcaagtgccgcaaactggcggagaaggtggtcgtgctggagggcgagaggactgagctccggcgccagctggcggaggagaggagggaagctaatcaggccctcgccaaggcgcagtctgcgcaggcggaggccaatgtggcgcgggtggagggtagcctcgccaggcaacgtgccgaggaatgggaggagcggttcaacgctctgcaggcccgcgtagagagggccgaggcttcgacgcgctcggaggttgagcggacgcgcaagcagcttatggactcataccacaagatgggcgcgcggaccgctgacttcgaagtgcctgaccgagagtcaggccttcgttgcctcgagtggctgcaagaggagttgctggcgctcctgaccattatggagggatttatgtcctatgcctccctggtcacctgcgaaggagcgatgaacgcgctgtcccacaaagggtgtcgtcactatgaggtctttgaccgatctgatgaggattttgaacgcgagatttacaaggttgaggaccctgtggtgaaggaatccgcgggagccctctttgaccggatgtggggcccccatggtcgggaggtggtcagggagcggtccgacacggcgaggggtcaggcggcgtgtgacgagaaagtggatgacttcgggactttgaacagtgcgcggcctgaggcggagtcgaacccggtggcggctgggcctgaggtcgctccgacgccgccccaagaaaccgtcgaaggcgcccctgatgcccccgcagccactgcggccggcggtggctcgtcgccaaccgctgcgccgagggcttag

SEQ ID NO: 3646 - DNA, 270 bp, Zea mays
  Peptide Sequence Number=SeqID_47021
atggctaccgcccgggggatcgatccctttttaaaggcggctctccccactcgcatcctcaagcgtcacgggcaaagtcttcaccgacgtgctctggggtcctccccctacgacacgggtgctgggtcccacacgtcatgcaagctgaccagaaacggaagaagccaaaccactgcgcgcgaagcagcgaggacggtgaaggcatcgagcgaagggtggcgtcttcgccttcgccccaacatttgccctccgagggaccagttcgactaa

SEQ ID NO: 3647 - DNA, 1251 bp, Zea mays
  Peptide Sequence Number=SeqID_47022
atgatgaccaccggttcggtggtgtggagaagcaagtcgggctgcgacctctgccccgcactcagcttcaaggatcttcatcatccttgctggggaggagggcaagctaaaccggggttctacctcccgcatgggccggcaggccgcctcttccttcagcattcaggggagagggcgctcaccggccttgcggagggggcgaacttcgacaacgcggcaccggtcggccgcaagcgtcgtcagctccagcgtgtctggctcgctggctcagctagctctgtcgcagcctccgacgctgcctccagccgcttgatccgggcgtggctgtccatccaccgcacgggcgacaatcgcgccgctcgtaggtcgggcatcacggcacctccgcgcggaggccggtgctggtccgtccgtgaggacttgagtggggatctgccagtgcaggctggggcggccgccattcgtcggcgtggcgctggcgcgcaggtggccgctgtcgtcggtgtcgaggtgatggcagccagagaaggtttctccgccgacgagaccgtcggcgccacctgcagtcggacccccggctctttggctttgatggcttgtcctcgcccctcgtgtgggggcgtgggcgagggcctttccacagcagcgcttgccctaaggtcattgctgctgtttagccgcccgaagcggaggtcgttgtcgctgctggtgcagtggtcgccggcgagccacctggagtttgttgtcccgcaggccctctggtgtggaggtagttcatacccgcatttgtggaaccggagttccgtttgtaatggcaccctgagtatgggtgtttgttcgttgtggtcgtcgaggcctgaatatctgggtatttggaaccttcggccgctctgcgatgagctggagccggaggcagcgatgtcggcgtggacagaggcggagtcggctcgaaaagaggcttcgtcggcccgggagcacgtggcttccctggccgaggaggtgcagcggcggcggctggagcttggccaggtcccatcgagggtggaaacgacgccgagggtgctgctgctccctctgtcgacgtctgaacctgcaggaacagacttgttcgtcggtagcagaatcgcttatccgagcgagagttacttttcgcggaaggtgatgagtgaggattctgttgtcgatatagtcgagaaggcacgaaaatcgttatggcagaaaagttttcgagtgttaggacttgttcggtag

SEQ ID NO: 3648 - DNA, 462 bp, Zea mays
  Peptide Sequence Number=SeqID_47023
atgggcaagagcaagaaaggcgaaagttcctcgcaccattcctgcgataagcggaagcgcgagccgactcctcccttggaggacttcggcgattccgagtactcggaggaggacttctcctccaagtccgagggatcgccggtccatgcctctcccccggtatcgcccgatgactcggacaattcccaggggatcgtcgccgaggtgtggacatacatccgggtcgtcgagcgctccgggctcgagggttcggatgagtcggaggtctcctcggatggggagaactcctctgactcgtccgaggaggggagcgacggtgacgacgacggcgagggcgatggcgacgacgggggcgacggtgatggcgacgacgacggcggcaagggcgatggtaagggcgacggcggcaaggacgacggtaagggcgacggcaagggcggcagcggcaaggccagtggttag

SEQ ID NO: 3649 - DNA, 366 bp, Zea mays
  Peptide Sequence Number=SeqID_47024
atgaccgacctgacaggaaaacagcgccgctcgccccgctccgactgccgtgccacccaccagggtgagactgacaacagccaagttcagcctcgggcgcgacaggaaactccgcctcgcccgaccttaggcctcggcctcggaaggaggtctccgcctcgcccgaccctagggctcagcctcaacctcggcctcagaaggtggtctccgccttgcccgaccccagggctcagcctcaacctcggcctcgggaggaatcgcgtcctcgcccgaccccggctcaacctcaggaggagtctccacctcgcccgaccttgggctcagactgaccgcgccacgggggatacatcattaccctacccctag

SEQ ID NO: 3650 - DNA, 207 bp, Zea mays
  Peptide Sequence Number=SeqID_47025
atgcaggaggtgtgcaaccgcaccacggttgtgcaccctttcagcttcatcgcatccgggaccgggaaaggggatatttcaaaagggatccttctccgcgaaggaagtgggccccgagccctcctactgatcaggggttcgaaggctggcccctcggaagggttcgacagccgtcctagggcactcgggctctgcgcccactactga

SEQ ID NO: 3651 - DNA, 249 bp, Zea mays
  Peptide Sequence Number=SeqID_47026
atgaccttctctgaaccctccgtggctcaccggagttactgccacgtcgttggccacagcaagaagaagaagaagaaatttgtgaagaagggataccacccacctctgatcctcaagcggataactacttttattttgatatctgtggatccgagcaagacacctctgataacaaaggcaagccccggtgcatttgccacctcccttgttattttaaaatctttctcacttgattgctgcattaggtga

SEQ ID NO: 3652 - DNA, 156 bp, Zea mays
  Peptide Sequence Number=SeqID_47027
atggcgcagtcgaccgttggcagcctgagagccgttggcacaccggacatgtccggtggctatgagatcgatggttttggttatgactatggtgctagagaagacgaagctgtggaaggagacttccaggagttccaagactacgacgagttctag

SEQ ID NO: 3653 - DNA, 750 bp, Zea mays
  Peptide Sequence Number=SeqID_47028
atggattcttggttgccagtacagagggacccaacagctgcaccgctcttcagcaccaggactcaggagtcattcttcagggtgcagttgtcagctcggattgctttgagggcgcaccggcttttggatctcccagcatttctgtcagccgccggtgccgagtcagagggtcacctatcctatctgccatgtttactttctcttttgacctctggtgagtttgatgtggttgattttctaatatgtgagattgaggatacagtgttggatggtctccgtgctcgccctattgaccctgccctggctactattcttcggtcgcttactcagcagcaggctcatatggccgcagagcaggcaagtaaggcagaagagcaggccaggcaggatgttatccagcagcagttgttcgagcggatgcttttgatgtttcagaccattcataaccgccaggacaccctgcagcagcagctcctagaagacaggtccgagcaccgggcattcatgacacatattctccagcataccggtgttcaggtcccaccagtgcagccgatcaccctggatttctcgacaccggtcgtcggacctgtcagcgctcagccaccagtgccaccagcggctgctgttaccactgctgatgtggctgtgtccatgactgctctagctccagcggattctgcaccacatcctatgtcagagtcagtaccagctccagcttctactgcagatcctagatccatgacttga

SEQ ID NO: 3654 - DNA, 264 bp, Zea mays
  Peptide Sequence Number=SeqID_47029
atggcgcgcgccggaatcggcagggtcaacgacgtcgaagcagcgaaatcagcagggtcgacgagtttttcagcagagactgttaagttgaacttccgcctagaactccaagctacaccaacccacaacttggacaatggactatgccttgaattgcaagttttgcgtgaatgggtttcacttgaagtcatgaccagtacttggctaccagtagtccccttctcgggtggagcatatacgtcgtactcaaaggtctcttcatga

SEQ ID NO: 3655 - DNA, 603 bp, Zea mays
  Peptide Sequence Number=SeqID_47030
atggcgcgcgcacccttccccctcgcaccctccccgcggcacggcgtgcccgccctggcgcggttacccggcatggccggcctggcgtgcgcgtgccctgcccacggcgccccggtggtgatgagaatgatggttttggtattgactatggtaatgatggcttgtctaagacacaccacacagaagtctgtcatccccttcttgtcctctcgtctcgctgagcgcccgcttcgtagtccagtgacgggtcagtctagccacttggagaggctgcaccaccgcctacacgaggagcaggagcgtcgacgacaggagctggagcagcagggctcttctttctcgcttcagcaggagatagagtttgtgaggagctactcctctgtgctcccgctggaggcgccctctacaccaccactgagcgccctagccgctggagtagctgttgaaggagaccctgacaacggaggcggcgacgacagctcgagcttcagcatcgacctttcagccgaccaggagccggaaggatgggttgctcaacccatcactcgtgacgccgctcgcgggtgtcacttccacgatgcgctcgacaccctgctgcgctag

SEQ ID NO: 3656 - DNA, 201 bp, Zea mays
  Peptide Sequence Number=SeqID_47031
atgccccagcccgcgacggccccggctcgcctgctcctccccgtgcagcaacctgcctcagcgcggcgtggcgcacccgcccctgctcgtggcgcccggcttgctcgccctggcgcgtgcgcgcctgcctcggtgcataagttcatctacaactattctaattcgactgtccggaataccgtagattatttcggacagtag

SEQ ID NO: 3657 - DNA, 132 bp, Zea mays
  Peptide Sequence Number=SeqID_47032
atgacgactgataggccactagagctgctccacatggacttattcggcccgatagcttacataagcatcggcgggagaaaaatctcaaacccaagagactttgaaaggattcttgggatgagctcaaaatga

SEQ ID NO: 3658 - DNA, 237 bp, Zea mays
  Peptide Sequence Number=SeqID_47033
atgacggcagtcggggtcagtgaggcattgtacgccaaggcggtgagccctgatctattgccagggaatcgacagggacggttgatgtatacatttagtcttaagagtgtcacactaaaacttgacaaaggttctctggaggacatggttgctggagtgacttggtcgtccatcttgccaccgggatggacagtcgagtgggaccctgcctcggctgaggaggagcatgaggagtga

SEQ ID NO: 3659 - DNA, 255 bp, Zea mays
  Peptide Sequence Number=SeqID_47034
atggaggatcttagtgttcaagatgatctgacttatactgagtatcctatcaagattcttgatactttgactcgttcggacaaccgcgccgacaggcgggacccactcgtcgggcgcttctcacgcggcatgcacctggcttgtgggacccacctcagctacctcacgtctatatggggggagcgtgctgccgtgggcattttccgtcactgccatcgttcggacctcggtgacgagtcacgagcaatcctctag

SEQ ID NO: 3660 - DNA, 594 bp, Zea mays
  Peptide Sequence Number=SeqID_47035
atggtctcccattccggttatggtgggtacaagtgcggtcactgcacgacggcagtcggggtcagtgaggcattatacgccaaggcgactcagctagtgcttttggcaaaccaaacccctcagccaaacagctgcatgtctagaggtagaggagtagactcctcacaccggatgacttctcaggagtcctcggaaggagggaatgcacattcccatacggacgggcttgcacaagagggttttccccgtattttgtgggaggtattgcagggagctggttatgccacgcctccccagtatgcggtgcagttgttcgaggagcaccgggtaccccgctgtagggtgaggatgaccttggagcctcatcccttgcagccgggctggcgtttgttggactccgagtctttcggttttagggctaaggatactcttgagtccaccgctctccacgtgctgacgaccttttgtggctttcaccccttggagctatcaactcaccccattggcttattccccacggagaaagaggacgacccaatgtggaaggatcgagtggagcatgccaaggatgtgtgggctctttacccgaggtag

SEQ ID NO: 3661 - DNA, 132 bp, Zea mays
  Peptide Sequence Number=SeqID_47036
atgacgaccaacaggccacttgagctactccgcatggatctattcggcccgatcgcttacataagcatcggcgggagaaaaatcccaaacccaagagaccttaaagggattcttgagatgagctcaaaatga

SEQ ID NO: 3662 - DNA, 726 bp, Zea mays
  Peptide Sequence Number=SeqID_47037
atgggcgcgattaaggtcaaggctcagtccactcaagggacacgatctcgcctcgcccgagcccagcctcaagcaaaggcagccgacccaggaggattcacgtctcgcccgagggtcccctcaagcaacggacgcaccttcggctcacccgaggcccaggcttcgcggagaagcaaccttggccagatcgccacaccaaccgacccctcgggcgccataggaagctccgcctcgcccaaccccagggctcggactcaacctcgacgccggatgacggactccgcctcgcccgaccccagggctcggactctacctcgacctcggacgacggactccgcctcgcccgaccctagggctcggactctacctcgacctcgaacgacggacttcgcctcacccgaccccagggctcggactctacttcgacctcggacgacggacttcgcctcgcccgacccagtgtcggtctggacttatatccgggccatcgagcgctccgggcttgagggcttggatgagtcggagtactcctcggacgaggaggactcctcggactcgtccgaggagggcggtggcggcgatggcggagacgacgacgacgacgggggcgacggtgacgacggtgacgatggcggtgacggcggcagcaggggcggcaacggcggcagcagcaggggcagcaacggcggcggcagcagcaagggcagcaacaaggccagtggctag

SEQ ID NO: 3663 - DNA, 435 bp, Zea mays
  Peptide Sequence Number=SeqID_47038
atggaggatgaggaagaggcgggcttctctacgtacggcggcactccaaataaagccaaggtggtggtggaggatgaggaagaggcggggttggaggatgaggaagaggcgactgtgacactatccatggagaaggacgcgctggagtgcgacatctgctgcctacccttccagtccgaagttttcatggcaagtcagattaccatgcatgtatatatacagtacatattgatcggtaggctccagcatgatgctctgctctgtgtaaaatcagtgcaagaacgggcattctggatgtgcaaagtgctgcatctgcacagacgtgaactgtatgctcgcagccagcttccattggaggcgattttggaggtccagatttcacaaaaatataaggggggaggttttggtcttcatttcttggaagaaggtggataa

SEQ ID NO: 3664 - DNA, 396 bp, Zea mays
  Peptide Sequence Number=SeqID_47039
atggcccaggccaaagctgccttctccatagatgatacaaaggatccttcagctgaagcaagcttgatgggtgggagattttcactacaagaaactgataaatgttcgtgggagcaacaagcggcgacgctatcggcgcgcgagaggaccgggccctcacgtgatgatgacgccagtctgaagcgtgcggacaaggattattccatcgggaaggagctggtgcggtaccgtgtgcgccaggtgagcacgcagaaggtctcatgctccaatcggacgccgccaggatcggacgtgaagattgagatcgaggacagcgacgaggtagcgctgcgcttgatgatccccacaccaccaccgccgtcgaatttcttcgtatggtcctccgagaattattga

SEQ ID NO: 3665 - DNA, 162 bp, Zea mays
  Peptide Sequence Number=SeqID_47040
atggccatgatgggttcaacatcgaaaaagatgtacctctgccaggtgaggaagcgacaaatttttgttgcttctattcaaaggtggtacccaaagcgagcaccaagactagagctgcgggagggaaggccctccgttaaaaactttttactatctatttag

SEQ ID NO: 3666 - DNA, 1392 bp, Zea mays
  Peptide Sequence Number=SeqID_47041
atgaatgttacagaagcatcttgcatctggctccagtccctggctcctcatggcccatataaagatccccactttaatgatagcttcgggagtgagttgatgaaggtccttcccccaaatcaaacagtacccgcggcggaggaaagggcggaggggcttaccggcggcgagactgttccggcgggggagctcgtcggcggcgaggagtccggcctatccagggcacaattgaccaatcaaacgggtcagagagcttcaccagggatcaaggagggtgggcggccgaagtccggcgaggacgatcttggctttccggtgaagttttgccgggtccgagagctggggaagcttcacaagctcttggcgaagctatccgagcggctggcgcggcttggaagcgaccgaagtgggctggtcacggtcgccgaggctcaggtggcaatggcgggcggaaaagagctcgccggagttaaggaggggcgtttggccggcgaagacgacgccgcgctcggtgttctggcgattacctgcattcagtcgccggtaaaagggtatgaggtgtgcaagagggcaaggccgagggctgaggcttcttataggcgagggctcaggcacgggcgcggggttgagcacgtgatcgagctgaccagagctcgtggcgtgcgcggcgcgcatttgagaacaagtccccaacattggcgcccacctccggtgaactcacttccacgttttgagtttcgaacaccttcggcaagcatagaccttctgttggaacttgctctcagcagcaaggaggccaacaggggtgaacagtggcgacaacagggttacgtgctcgggggcaatagctctgttaatctagcctctcacgggcactgtgcgggggctgtaattacaagcatgcctttacagatcaggcccgtaacacaaaggcggccacgcagggcccgttacaatgggccagatcacacgtgggcctcagagccgaacgaggccgcgctgcgggatggcgtcgccgcaggccttcgtctggtgccgaatcgagcagggtgtccccgcccgttttgtctctgtcagaccagcgacctcagcgaaggcctcgagcgaagggtggcgtctttgccttcgccccaacatttgccctccgagggaccagttcgacaaagtcacctggtgccgaagatgtcgctagatggcggagacgctgccctcgctcgaagtggttccgcgggggtttttgatgtgaccgttgatggacggcgtactgttggattgcgggtttcccgaagcgtcgcgccctgtcggattgcgggtttcccgaagagccgcgccctgcctataaaagggggcgggggttggcgctgtttgaactttgccttccgcgctccgtga

SEQ ID NO: 3667 - DNA, 234 bp, Zea mays
  Peptide Sequence Number=SeqID_47042
atggaaggcccaaagagctctacagtagtgccccggaatggggtcgtagagccggcgaccatcgcgaaggattcaatccagccacaggttcccctacggctaccttgttacgacttcaccccagtcgaagaccccaccgtgcggggcgcgtactattaccactacgtaccacaccaccgggcggctggccttcatgccgagtcttcctccgccgccaactcgacgtcgtcgtaa

SEQ ID NO: 3668 - DNA, 1326 bp, Zea mays
  Peptide Sequence Number=SeqID_47043
atggggcgcatccgtgttgccttcgtcttgctgctgttggaggagcacgacctcgcgggggttggcgcccttcagccatcgctcggcttcaaggattttcatcatacagtctggctgcattccctcaccaatggctggggaggagggcagggcgagttggggcctacctctgcgtgggccggcgacccacttcttcctccggtgtttgggggagaggggcatcctccagctgtgtggaggaggcgtcctccagccatgcgggggaaggcgaactgctgcttcttggacatggtgcagctgtccgtcctccaccccgggcggcggtcgtgctgtgagcgggtggctgctgtcaccgacctcgcggagggggcgaacttcgacaacgcgggcctagtcggccgcgagcgtcgtcagctgcagcatgcctggcacgctggctcagctggctctggcgccgcctctgatgttgcctcctgtcgcttggtccgggcgtggctgtccgtccaccgcacgggcgactgtcgcgtcgcacacaggtcgggcatgtccgcggcccttcccgtgtcgccgactgcaccgggggatcgtctaagacgtcccgccattcgtcggcgtggcgctggcgcgcaggtggccgctgtcgtcggtgctgaggtggtggcagctagagaaggtttctccgccgacgagaccgtcgacgccacctgcggtcggacccctggctctttggctttgatggcttgttctcgctcctcgtgtgggggcgtgggcgagggcctttccacagcagcgtctgccctgaggtcatcgctgctgctgtttagccgctcgaagcggaggttgttgtcgctgctggtgcagtggtcgccgacgagccacccgaaatttgttgtcccgcaggccctctggtgtggaggttgttcatacccacgggagtggaaccggagtcctatttgtaatggtaccctgagtatgggtgtttgttcattgtggctgtcgaggcctgaacatctgggtattttgagtgccgaggaggtgcagcagcggcggctggagcttggacagatcgtccgtgagcgggaccaatcctggagtcacgccgccgaggccgggagccgggctgaggtcctcaggggacagccggctgaggctacggagcggctagccgggcccgagtcgccgtccgaggctgggccaggatctgccaagggtggaaacgtcgccgagggtgctgctgctccccctgccgatgtccgaacctataggaatagtttgtctgaaggttctgctatcgaagcagtcgaaacggcacgaaagtcgttctag

SEQ ID NO: 3669 - DNA, 294 bp, Zea mays
  Peptide Sequence Number=SeqID_47044
atgagcaagaacacaagagacacaagatttatcccgaggttcggtcacaccatcaaggtgccctacttcctcgttgaggcgcccacaaagagccgggtctctttcaaccctaatcctccctttgccgaccacaaaggtcaagcccacacaataatctttgctcaaacgagcggattcaaaattcggttgaaccagttttccaaaaatctgcacacgactttttctgacaggactgactggcagactggcagtgacagaggggaacagtgcagaaaccggttgaaccggttttag

SEQ ID NO: 3670 - DNA, 336 bp, Zea mays
  Peptide Sequence Number=SeqID_47045
atggggacagtggccaggacaagctccagcgtcgcagccacagtggaccggtgttgggtggacgcaggcacctccaggcacttggacgcctccaccaccccaaggatcgcagccagtcccgggatgggtgccaccggtctcccagccaccggcgggctctcagccatatcaagcgtggatggcaccgccaccgacgggggttcagcgtcacatgctcatggatcggagggtggtgtcaacgtccaagacttcctcgtccatggtgctggagggagtggccaccttcctggtggcggaggagggagtggccaaaactcccacagcccgccggagtga

SEQ ID NO: 3671 - DNA, 525 bp, Zea mays
  Peptide Sequence Number=SeqID_47046
atggccgaggctcgggctacgctcccgaggtaccctaggacatttccgagaccagcaggagtgatttttgtaacggaatcccaccagagggaggcatcgagccctcggaccctatcgaatgggtccgggtccggcaaatcacctgcaggcccacgaaagaatgaccttacggtttattgggcccttgggcctttcgtgaggtcttttactcctttagtggacccgggggatatctatcccccacaagcccctgatctttgggttaatttagaagtaatcagcccaaagatccgaggtccaacttgcgggtgttttgaagaagaacgtcttcctgctgtcttctcttgctccgatcactcatttgaccgaagcttggtttcatgcttgtgccttagagaaattggcatgaagctatttgcattacgctttggaggtcagcattatgtcatcaatattttgctgcagagacgggtggaagtgcttattgaatgcttgcgactgttcaatgaccacggttggaggtga

SEQ ID NO: 3672 - DNA, 864 bp, Zea mays
  Peptide Sequence Number=SeqID_47047
atggaacttcgaaacaaaacactgaatagcaatgaggtgataaaccgattttaccagcgtcgctctaccagcagaattagtaagggtagccttccaaccagggagccgctcagctatcttatcaatgagcggatagaagtcactctttccaagttagaggcttcatcaaagaccctaatgatttctttgaccagcagtaaattcctcagcgcgaggatcgagtactctatgcagttgaatgcttctcgcatcaaagttcttcaagctcaggatgatctagtaaacaaaatgaaagacgatgcgatgaaggaactcctccatgaatacaagaaccttttgaaagatctaattgttcaggagaagcccgcggcggagaagacgaccgccgggaagaagcccaaggcggagaagcgggtccccgcgggcaagtctgccggcaaggaggacggcgagagcaagcgtggcaggaagaagggaaagaagagcgtggagacgtcgcgcccacatttatcctcatcgaagtggagggagtggagcagttcagagagagatcgtggggggattgcagctggtagctgcaatggagatcgtggcgcgcgggggtggggagccctggcgatgacggcgcgcggggatgggcctcgtggcgcgcgggggtggggcgccctagagacgacggcgcgccagggtggagcggaggagtgggcggaaggggacggcgcgcggggtgggctgtggaggaggacggcgcgctggggtgggctgctctgggccacaagcagatgggcctcctgcgttgtaaacaaatacaagttaaaaataataccatattgtgcactgaactgtgcacacacttgtttataa

SEQ ID NO: 3673 - DNA, 387 bp, Zea mays
  Peptide Sequence Number=SeqID_47048
atgggcaagagtaacaaacgcaagcgcgagccgactcctccgtcggaggacttcggcgactcggaatactcggaggaggagttctcctccgagtccgaggggtctccagctcccacgtacatccgggccatcgagcgctccgggctcaagggctcggatgagtcggagtactcctcggatgaggaggactcggacggcggcgaggacgaggatgacgacgacgacgacggtgacgacgacgacggtggcgacggcgacggtgacggcagcggcagcggcgggggcagcggcggcagcggcgggggcaagggcagcaccagaggcggcaacagcaagggcagcaccaggggcggcggtggtggcagcagcagcaaggccagtggctaa

SEQ ID NO: 3674 - DNA, 579 bp, Zea mays
  Peptide Sequence Number=SeqID_47049
atgtcttcgcgctcccttatgcatcgcgtctttccaccttctgagcccccggatggggaacacccgcaatccttccgccttgtcgttggaggaacgcaacttcgtggaagttggtacctttcagccatcgttcggcttcaaggattttcatcaggcagcccggccgcaccccctcgccggtggtcacccaagacggtgaccaccagctcctgggtggggagaagcaagccgggctgtggtctctgcccctccctcagcttcaaggatgttcatcatccttgctggggcagaggccgggctgagccggagctctacctcccgcacaggttcgtgggtcagcctctccttcagcattcaagggagagggcgctcaccggcctagcgggaggggcagacttcgacaacgcggggccgatcggcggcgagtgtcgtcagcttcagcgcgtcgggctcgccagctcagctggctctggcttggctcccagtgcctcctctcgccgcaagggcggttgttgcgccacgtgcaccggaggaccgcccaagagatcgcgcgctgctagggcggcgttcgtgttctag

SEQ ID NO: 3675 - DNA, 336 bp, Zea mays
  Peptide Sequence Number=SeqID_47050
atggtggcggcgctaggatttgaatggtggaagaacacaatgcaaccagcaacaaggaaacgcgaaagcacacaaattcaacaatgcagattattgaaagaaagtgcgaggctcaaaagggaaaaaaaaacgctcgataaactcaccgatcaacctggaaatctgataccaattgatgtagctgaggtgcccgatctttcggcgagtagagataattccgatttggcggaagttgacccttgcgatccgactacgacgagcaagcccgaggcgccaatgcaatcgctgaaccaactccttgtggttaccgaccttgctgatgcgagatcggcctga

SEQ ID NO: 3676 - DNA, 972 bp, Zea mays
  Peptide Sequence Number=SeqID_47051
atggcccccggtgaggccgtggagctaggagggtggcgcaaccactctcgggccgcggacagtgcccctggcgctgccctagacgccctggacgcgagcacaggtcgcgggcgccgggcggccgggcgtgcaatcagcactcagcagtcgtgcaccgtgctctgggatgtggacgcgggcgtcggccggccaagcacaggtcgcgccgtcgcgggcagccgggcgcttgatgcggcggtagcggctgctgggatgtggacgacgacgacagctaggttagacggcagtcggcagcgaccagcgggcagcggctgctgggagcctgagcctgggatgtggacggctggagacgtgctggacgcgccgtgcgctgctgctggcctggcaggcctgctggatggagaatttgagatggagggagcaaccgcaggccacagcccaccagacctaaatcacctaatgggccttctatttaattcgggtaccgggttcgggcttatcgggttcgggttcgggtttttcgggttcgggattcgggtatcgggttttatgcccaggcctatgctcgacgatgtggaccatggcgtcgagcagaagaacaagcaaaaacctaaagcctatccccctacttggcgtgccaaatgtcggagaggaaattctccggccgggggcaaaacgaagggaatacatagagaagtatccaatgccagtgtcgcccagaagatctccgaacgccataatgtccgtaccacacatagtattgatatcccgcgctgcttcctcggtaacgcgcgagtgatgatgagcacagtgtatgccgcagtgcgggcgtactgcctgccaatggaatggacaggcacgccgcctacaggatgtctggtcgccgcctgtcagcagagtggacagggcacattaaatgccgaggcggcacatcgcctgccagtggagtggacaaggcgtattaaatgctga

SEQ ID NO: 3677 - DNA, 222 bp, Zea mays
  Peptide Sequence Number=SeqID_47052
atggcgacggcgcacccgaaagctacgcatgggcatggctacaccgctacagcctacggagaggctaccggtattattattatggaccgattggtgcacgagcacgaccgaccaggtccggaatcgagatgcaaatgcaatggctccacccgatcgaccaaagcaaccctggccacgcaagattctcccaggctggacctggacgcggaaaggacggcgtag

SEQ ID NO: 3678 - DNA, 156 bp, Zea mays
  Peptide Sequence Number=SeqID_47053
atgtcgcgcatgttcgacgactactatatcaaggattgtggcgtcatctcggcgctggaggtgacgcagaggaggaccgacaacaatgaccactcgccatcgtcgagcaacaacccgctgttgcctgctcggctcggctcagccaagcccccataa

SEQ ID NO: 3679 - DNA, 624 bp, Zea mays
  Peptide Sequence Number=SeqID_47054
atggtgaagagtctaccatccgtaggcgtaatctccactggccaagtttatggagttcctctttatggatctctactgatcaagcctggagtttacccagagcaaagaccatgtaatgaggacacccgcagaaaatggattgaggcccttgctcagccaaacaagcgactgtgttcattgtctgagcacgttcctcatggttaccgtaggaaatcactttttgaaggtctaattcgatataatgttctgttgctaagagcaacatggtttattaaagtcacatacctaaaccagctacagacccgacagacacctaacagtatttcagtagcgggttctgataaccaacgctctcagtggacaaaggatgttgttgaatatttacaacatatgttggacgaattttgttctaaagagggtgcattcgtgcatccatcctttagagagcagtcatcaccaggacctactgctggaaccaatcagataaaaatgaaaactaaagcatctccagctgctggagacattgaagaacacttggtgcacttcaaatggtggtatatggttcgtctcatccaatgggatctcacagaagaattgcttgttccctcagtacttatcgaatga

SEQ ID NO: 3680 - DNA, 93 bp, Zea mays
  Peptide Sequence Number=SeqID_47055
atggaggcaagaagagcttcgatgtaccaagtgcatgggagaaggatgttggagctcagaaatgataatctagatcaagtcaagctgacttga

SEQ ID NO: 3681 - DNA, 438 bp, Zea mays
  Peptide Sequence Number=SeqID_47056
atggccgcagcagcagttcggttgcaactgcgccgatccggatcgaggacaaacccagatggcaatgtatgtgtgtctaggattgaattttcacacatacagccgacttcgtcagtgaacaagaccatgtattataaatggctgactatcgacggacaatgtcgatggggtggagaaaggatgagggcacactcaatggaatggctagcggttgctaaagaaaccacatgtacgtgttggcaactggacgtgtcgcgaagtgtccgtgtagcaagtgtgagaatggaaaatactataaaaaggagacaattgagcgacatctttgctaccatgggattgttcccaaatcccaactacatagtgtggcatgcacatggagagtcggcgcaacgtgacctagaaatgaacgagcacactgacaatgacatgagatgttga

SEQ ID NO: 3682 - DNA, 318 bp, Zea mays
  Peptide Sequence Number=SeqID_47057
atgtttgagaggcagaataagctgcgggccgatcatgagctcaaggcgaaggagaaggagcgggtgctggaggagaaggagcggacgctaggggagcggatcctgggcacccgcctggaggccgagagcggcagactctaccgggcggtagtcgagtacatcctgacgtgcttctggagccacggcccggccatatccttggagccggtgatcgctggtctggtggccgacactaaagacgctgcccgagagggcattaaagacgccgtggagctggtggtcgagcgcttccagcgggatcttactgatgacaagtag

SEQ ID NO: 3683 - DNA, 498 bp, Zea mays
  Peptide Sequence Number=SeqID_47058
atgctgaaggggtacatcgcctgtcagcggggtagtcaggcggcgcgtcctttccgcaataaatgtaggggcagcacggcccagaggtcttacatcaggcccatcccgcaagcttacatcatgcatgacatgccatttggcagcaccaggtctctgcctgggcaaggaatagaagcgttgtgtggacaggttcactccaagctgggcctggacacatgtcgcctccggaccctgctgagcagggcttgggcattctctggtccagaatccccgggatccggtggtgagcagtccggacccccacgcagaagggtccgggacccgtcccggaggttcgttcttcacgtatgggggtccggtgctttccccgcagtaggtccagacccactgcgtgtatcatggggtacgtcctgctccggggccacgtggcagccccggagcggtagatgcggcatggaactgttccccgcgcaaccagagacctccctgccggcgtag

SEQ ID NO: 3684 - DNA, 213 bp, Zea mays
  Peptide Sequence Number=SeqID_47059
atggcggataagcaagcgggcaggaagctcagctcatgtgggtggggatcgcaggagatgatgtcaaagaaaatgaggtcttttgctcgtagtttgcttgggacgaggagtagctcgaggagcagctcgaggggtgaggattcagtttttcagggcacaggttctaccatgagcagacagagagcgctggcagaacatttgcctccacacgat

SEQ ID NO: 3685 - DNA, 1218 bp, Zea mays
  Peptide Sequence Number=SeqID_47060
atgacgcgcatcgacctcaacaccgtggaggaggaggacgaggtggaggcggaggcgctgcctttgccccaagccagtgctcgtggcaccgtgagcctggagctgtggcacgcgtgcgcgggccccgtcccaccgaattctcaggtggaagaagagactggtataaagctgaatatagaagatatggttgatcttatgacactgttggaccctgctactggaggtcgaatgctaccatcactgcaggatgagtggtacgaccccgccgcactcgccgcttcctccgcgtgggacgtagccaagctccgctccaggttctgtgtgccgtccacacccgtggaagacacccagtgccgcgatctccatgccggcgcgcggctctgcgtctcttgttcgctcgacgacgtcaacctcaagttctacgacgccgtccttgattcgaaattaccatcactaccagaatcgaagagattaacgactgaccaaaaaaccctgcaagcacaactaagtgtttcttacagggcacctgcccaaacatccacatttgacatatttggtgattggcaggatatttcacagccaaattttgaggctaatccacctgatggggttttagcggttcctttattgaggcatcagagttggccaggtctaccaaggggtgtagaatttaatcccagtgatagtgatcttctgtggcatctagcagcagaagttgggaacgctctagctgagcgccatccatttatcaacgagttcattaaatttgttgatgatgttagagaatttatttgcactcatcctcaacatataccaggtgttaggcaagatggtcgtgcatcatacttcttccatagaagttttgagccctacatcaatgagaatgatgtaaataactgcttgaagaaaattggaagccatagatccatcatcctggatggaacactgatgggttgcaaggaagtgtttgccctgtatgcagacatgccgagtgataaaagatctcaggaaactgattggagattacatcagtatcatttacaaaacacagtgaaggcagagtcagagatagtggcgtcgaaaatattccttgcatcacggaacagtctgtgtgaattggccgaggaaactcatattgaatctgaatgggtactactttcttatcaatgtccatttgtatatataagattagaaattcctataatatttgtcttgtag

SEQ ID NO: 3686 - DNA, 1341 bp, Zea mays
  Peptide Sequence Number=SeqID_47061
atgtgggctccagagctcctcctgcggcccccggtacctcggacaagggcaaggggcccgcaagcgactcctctgctccgggcgccaccgggaggcctaggacgggcagagggacctgagccctccgccaccaccaccttcggatctgccaccaccgtcaccgccaccagcgtcaggccaaccatcgtcaccgcaggggcagcagcagcaacaacagcaggagcggcagcagcagcagcagcaacggcagcgggcatcccgcttccagggtcactggaaggtctagggccccaacagacatccgctgggagtgtcgccggcgatccgccagcggctatcgcggccttaccagcatcggcgttaagcacaccattggtagtggccgaagaggttcctgctgcgactacccccaccgtacagggtgacgtgggtgctgaggtggcgccgtcgggcccccgggacccgcctgcctccgtcgagggaacaccattgggctcccaagttctggctgggggtccagaggcggcagcgccgccgacagctactgcagatccaatggcggcgatatcgtcgaatacaccatcggcggaaggcgcggggggcgcgtccagcttcatcccaccgccaactccagaggaaccggaggctctccaggaaaccgaggcggcgatcctgcgggagtgggaggcgctcaagaccgagcaccagcgccttggcgactggtgcacccaactggaggagcgcactaaggctgcgtcctgccaattcgcctttgagcgggccaagcttgagcgggagcgcgaggacttcaagggggacctccgaaaggtgtctgaccgggagcaggaggtgacccggaaggagaaagggctggccaagaagaaggagcacttggaccagagggaggaggtcatcacggcgttccatgaaaagctgaaatcctataatgcgatgctggagaaacagcggggcgagcaggccgcgactgaggcgaagctgcaaaagctgcatcgggagctcgacgacaaggctagcaacattgctcgcgccgaggagaacctcaaggcgaaggatgtttccatggagaaactagcgactgatctttcctggcaggagaaggacctcgccttcggggaggagattgggaaaggcggaacaagttgctggccgagtttgagctcgaggcagaggagaaagagaagcaattggaggagaaggagcgggcactggaggagcaggtccgccggttctaggcggcgcaggcagcctaggcaacacagacggccccggcccccaggcggtggaggtgatgaggaagacgctcgacgacctccgggctga

SEQ ID NO: 3687 - DNA, 847 bp, Zea mays
  Peptide Sequence Number=SeqID_47062
atgggtcggcgcgaggcagaacgcgaaggggggaaaagtagctggagggagacaggcgtgggaggtggaacccgcggccttcgtggtaatgatggcgcctcctgtgacgtggccggtctgagccctgagttgggcgaggtggaggctcctccgaggtcgatgtcgagtctgtcttccaaggccgaggtcgagaccgagcctcggggtcaggcgaagcggagaccgtcggctgaggccagggctgagtccgagccctggggtcgggcgaagcggagttcgtcgtcttccggggctgagcccgagtccgagccctggggtcgggcgaagcggagttcgtcgtcttccggggttgagcccgagtccgagccctggggtcgagcgaagcggagttcgtcgtcttccggggctgaacccgagtccgagccctggggtcaggcgaagcggagttcgtcgtctttcgaggctgagcccgagtccgagccctggggtcgggcgaagcggagttcattgtcttccagggctgagcccgagtccgagccctggggtcgggcgaagcggagttttctatggcgcctgaggccggactgggttgctgacagcctcactctatcgagtggcacagcagtcggggcggcgcaggcgacgctgtcccccttgtcaggccggttagtggagtggcgaagtgactacggtcacttcagctctgtcgactggagggcgcgcgtcaggataaaggtgtcaggccacctttgcattaaatgcccctgtgattcggtcggttggcgtggcgacttggccaagctttgtgctgatgggggttaccagctgagatttaggagtcttgagg

SEQ ID NO: 3688 - DNA, 2832 bp, Zea mays
  Peptide Sequence Number=SeqID_47063
atgattggggacgaggtcgctcagttcgggtcctgcacattcacatcgaagaccggcaagaccacaaagcaggtggtcgagttggttccttgcgcccgcaacaagtggggcaactggaatgaattttggttttacgttgctgagggtaccgtcgaaggccatgagggactccccgtgtccgagatgtgctctcatttttactcagcgtacccgccctttgaagtggcggagggggatgtggacgaaggggcccttcagtgcgccgccggcctgagcagtgggcgcgacttggttgaggaatttgtggcgtacggggtatggcccttggcgcatggctgggcgttgggcaaagtgtgccctcgccagatgccttcccatggtgggaagatggtgcgaagtcccgccttcgtacagaatctgcaaaaccgcgacccgaccgcctttgtgcgtgaggcggaggatgcggcggtgcggctcgttgggcgttacgtgccgaggacagagggccagcgcagttgggatatccgcgggtcgaatgaccgcttgaacagggtgttcgtgttaaatcaactgccatatgacggctaccctggtcaagacgatgtggaccgccgtgggaagaaaccggcggtggagattggaggcgaccctgcgccggcggccgccccatcctctaaaaagagaaaattaggtactgttatgggaggtcttggggtttctgatggttttgctagagagctgatgaggacgtgcgcggcccccgggggaaggatgtcttcgcccgagctccgggagtcttcggctcggatgctgagggttactgggggttgttggcctaggaatgttcctatcccctgcgcggccgacgaagactcttttacatctcgcatggttcgtaaatggagagtttttccttacgggcggaatattgctgctgttgtgtcggcagtgatggacaaggatcgccagggagctgcacaaaagcggcaggcggccgtcaggctcattgaagccaggccgaagaggcagcggggggctgcgaaggctgtggcccccgacggaggcaagccgccgctggcggcgaagtcgggcgcccctgcatctagcaaggcgccggagcctccgccgctggcggcgaagtcgggcgcccctgcatctagcaaggcgccggaggcaacggcaggcgccggaggctccaaatcgacaaaggtggtgccgcccgccggcggagtggcggaggtcgtgaaggcggctggagcgttgccgttgccaggcaaacgcgtcgccgacttcgccactaatattagtgtggacgactatcttggtgggtccgacgaaggccaacttgctatagttgcgcctgccgcggcgaccacgacggctgccgtggtgccgaaggcgaagggcggggctcttagcgccggaggcgaggcgtcggccttcgcggttgtcagggatgaggcgggcgctgcgtcccgccggctggaggaggtgacggaggcgctgagtcaggcgtcccgccggctgaaggaggtggctgacttcgccaaccgtacagcgtcaggggccctcacggcggctgtgtctgccgaagtcaagagacttcggacacaacacgccgacgccgtccgtgaaaaatcggccgccgacagcaggtgtcgtaagctgacagacaaggtggccgtactggagaaggagaaggctgacctccggcgccaactggcgggggagaggagggagaccaacgaggccctcgccaaggagaaagctgcgcaggcagaggccaaattggcgcgggtggagggcaacattgccagggagcgcgccgagcagctgcaggagcggctcaccgccctggagagccgcatggagagggccgaggccgtgtcgcgcgcggaggcagagcggacgcgcaaacagctcatggatacataccgtgagctgggcgcggggaccggtgaatttgaagtgccggaccgagaggccggactccgctgcctggagtgggtgcaggaggaaatgcaagcactccccactgtcgtggaggggtttatgtcgtatgcctccctggtcacctgcgagggggcgatgaatgcgctctcccgcgaagggtgccggcacttcgaggtcttcgaccaagccgatgaagatttcgagcgagatatctttaaggttgaggaccccgtagtgaaggaatccgccggagccatctacgaccggatgtggggtgtgcatggtcgcgaggtggtcagggagcgggccgagacggcgagggctcaggtggcgcgtggcgagagggtggacgacttcggggcgttgaacagcgcgccgcctgacccggagccgaccccggcggaggccgtgcctggggccgccctggagccgaccccggagactgcgaaagacgcaccggatgcctccgcatccgctgcggtcgccgaaggcgcgcctgatgcccccgcagctgctgcgccgagtgctgacgatcccgtggcggtggcggcggaaacgacagcggaagcaacggcggagccagcggcggaggctcccgcaacgtcagggccttcgcaggttcaagattttgggcctgcgcacgcaaccgctactactaaatttttggcggcttcgaccgcggaaggtggtaatgaatgtggtggatcttcatctgagttttctgattttgctgactctgggagctcggttgagtggactgaggagtcgtcggaggatttggactactttgcggccttggatgcggctgcggcggaggcttcgccgcacgccgcggacgcaggagatgtgccgggtcctagcaccgggcgacggcgatga

SEQ ID NO: 3689 - DNA, 513 bp, Zea mays
  Peptide Sequence Number=SeqID_47064
atgcagtcggcatgcaactgcgccaagtgggcgcgccccttcgactccaacgcgtccagcatggaggcccaggcccacacgtcatgcaaccggcgcgccggttgctacgtgcgagcaactgcaccgcccgtcgcgccactgccgcgcctccttgactgtggaaccagtaccgcaactcgaggcaaccctgcgtatgacccaacagtgccagcctggcgcatcggtcacgggccgagaccgggaaagggggatatcccgaaaagggatccttctccgcgaaggaaacgggccccgagcccccctactgatcagaggttcgaaggccggcccctcggaagggttcaacagcgcctcagagcgctcgggctccgcgcccactactggtcagaggttcgagggccggcccctcggaagggttcaacggccgcctcaggccactcgggctccgtgcccactactgataaggggttcgtaggctggcccacgaagggttcacagtcgcctcagacatag

SEQ ID NO: 3690 - DNA, 405 bp, Zea mays
  Peptide Sequence Number=SeqID_47065
atggggcacgggcgtccactcggattacccgtcagcagctcactggagacaccatgttcggcgccctccaagggcaacatggcgcttccccccctccttgcggaaaggcgacgcagaggcggctcggactcgggctcagccccggaagacgacgaactccgctttgcccgaccccagggctcggactcgggctcagccctggaagacgatgaactccgcttcgcccgaccccagggctcggactcgggctcagccccggaagacgacgaactccgctttgtccgaccccagggctcggactcgggctcagccccggaagacgacgaactccgcttcgcccgaccccagggctcggactcgggctcagcctcggaagacgacgaactccgcttcgcccgaccctag

SEQ ID NO: 3691 - DNA, 90 bp, Zea mays
  Peptide Sequence Number=SeqID_47066
atggagcgcctgaggtctccagcgagaaatgtggcggaccacaagactgatgtacctgatcacaaacaggaacaaaatggaggacgttag

SEQ ID NO: 3692 - DNA, 360 bp, Zea mays
  Peptide Sequence Number=SeqID_47067
atgggcgtgagagaggtggaaatcccgcggccttcgtgttcgtcccgcgcccaggtcgggcgtaaggagaggatccaggtgtacaatgggagggtaatgatggcgcctcccgttgacgtggctggcccgcgccctaggttgggcgatgtggaggctcctccgaggtcgaggtcgagtccgtcttccgtggccgaggtcgagtccgagcccctaggtcgggcgaggcggaggccgttggctgaggccagggcggagttcgagtcctggggtcgggcgaagcggagttcgtcgtcttctgggctgagcccaagtccgagccctgggtcgggcggagcggaattcgtcgtcttctggggctga

SEQ ID NO: 3693 - DNA, 1491 bp, Zea mays
  Peptide Sequence Number=SeqID_47068
atggctgaaaggtaccaactcccgtggagttgcgttcctccaacgacaaggcggaaagacggcgggtatcccccatccgggggcttggaaggtggaaagacacgatgcataagggagcgcgaagacatggtcgccttccaagggggtcaccctccttttaaaggcgactctccctacttgcgtccccagccgtcgtgggctgagtcttctccaacacgctccaaggtcctcccctacggcgcgggggctgggtcccacacatcacgcaagccagcccagggcagaagaagccaaaccgccgtgcgcggtgcgtgcaaccgcccagcggttacaagcggctctccacttctcccagaccagcgggcgaaagggcgggcagccatgcaggcggcatgcaaccacgccaagtgggcgcacttcttcgactcccaacacacccagcatggaggcccaggcccatgcgtcatgcaaccggcgcgccgaatgcttcgtgcatgcaactacaccgccacttgcgccaccaccgcgcctcctcgactgcggaaccaataccacgactcgaggcgacccagcgcacgacccagcagcgccagcctggcgcgacggacaggcggcgcctccggcaggagaagcgagcgacgctttgccttcgccataatgaccgcgtcaaaaaaggctggcccctcggaagggttcaacagcctcctcagagcatgtgggctccacacccactactggtcagaggttcgaaggctggcccctcggaagggttcaacggccgcctcaggctactcgggctctgcgcccactactgatcaggggaacgatcttgtaatggaatcccatcagagggaggcatcgagccctcggaccccgtcgccaggggaccgggtccggcagatcacccgcaggctcgggggctgctcttgcaaactcggctccggccaaaccattgacagcgtcaacataccagcccgagaacttgggacccgaccgtacacccgggctacggccagctcgcatgagggaacgaccagaccagtcgaagcattgcgcgaggcattaagacctcggaggagtcaaaccactcctccgaggcctcgggggctacacccggcgggtgcgctcgcgcgcacccaccggaacaaaacgcaaccgagaaaggctggtccccttgcaaaaaagtgcgacgaaagcctccaagcgagtgctaacactcccttcgaggctcgggggctcctgtcggggaccataattaggggtaccctcaaggctcctaattctcagctggtaacccccatcagcataaagctgcaaaggcctgatgggcaccataggaagctccgcttcgcccgacccagggctcggactcgggctaagccccggaagacggtgaactccgctccgcccgacccagggctcggactcgggctaagccccagaagacggcgaactccgctccgcccgacccagggctcggactcgggctaa

SEQ ID NO: 3694 - DNA, 525 bp, Zea mays
  Peptide Sequence Number=SeqID_47069
atggcgtataggcgtgttgatccggagccttttcttccaccgggcttcagcgcttcggtggtcctgcaccgtgaggttatggccagttacctaagtgctagaaacaggaaaagaaaaggattggaagagagtgcctgtgtgcagccaagacacagcacagtctggcacaccggactgtccggtggtgcactggacagtgttcggtgcgccgggctggtctgcggcgaactggccactctcgagaaaacttcagcggtgtacggctataattcaccggactgtccggtggtgcaccggactgtccgtgaactagttgtgcttcattttgagctcaagtcttggcttgtgtattgctgcggatttgtgtgtgttgtttctcatccttactcttgtgctttcaccgtgatctttattgtaagggcgagagactccaacttgtggagattcctcgcgaacgggaaaagagataagcaaagaaaagccgtggtattcaagttgatcattggatcacttgaaaggggttga

SEQ ID NO: 3695 - DNA, 741 bp, Zea mays
  Peptide Sequence Number=SeqID_47070
atggaagaaacacacctccacgtgttcgacgcttcctgcccgcgccagagcacgctcgcttgcgcccccgcacgcccagcgccgcgcctgagccaagccagcgccatgacccgcgcctgcgcctataaaaccctcccagacttcgattgtacccttccgcgcaccctcaaacctcaccggagtctagctcgccgccgtttgcccgtgcgcagcgtgtccgcggccgcccaatccctctgccaccgtagaccggccagtggagccattcccaactccgtccagctctcggagaagactgtgcacacctccgtgaagctccccgagcaaggaatcggagtttgcttcgccggagaggccagtccacgctcgccggagctctcaaccccgccggagtacgtggaccgggtaaaccactccaccatccttcgattccttgtgcacacggtcgctacgttaccccgtgaagctcaccatgccctcggattgaaccagttcgccgtggtttggccggtatactcgccaccgacgaggacacccgcctgcacgcgtggaccgggcgattccggccatccccgacgtcaagccgtacctcgacgtgaccgccagagtctccccgagccaaccccacccttcaccggacctccctcgccgccggaggtagccccggatccagcacccgagcctgcaccagaggacctgccagccactgctttggaaggcaagccccggttttatgcataa

SEQ ID NO: 3696 - DNA, 603 bp, Zea mays
  Peptide Sequence Number=SeqID_47071
atggggaagcctgtctcatcactcctcatgctcctcctcagccgaggcagggtcccactcgacagtccaacccggtggcaagatggacggccaagtcactccagcaaccattttctccagagaacctgtaaaaattatgccacaagcaaggctgagtatacttatactcagctagacttacccggttacaatggatcaagcagtctcattagctgcgagaagcagacgattcgaatcgagtttttatccttgcaagggctcaccgccttggcgtacaatgccccactgaccccgactggccgtcgtgcagtgaccgcacttgtacccaccaaaaccggaatgggagacctcgtctcaggtcgcgtgaggggatatgtctgcgggcaggttcactcaggtactaggcttaccgatttaccatatttctcggttatgcataaaaccggggcttgccttccaaagcagtggctggcaggtcctctggtgcaggctcgggtgctggatccggggctacctcctgagcagctccttgctccggcacgaggatgtactctccgtcagcaagattacagtctatcgaaatgcaatgaacatggtttctag

SEQ ID NO: 3697 - DNA, 1152 bp, Zea mays
  Peptide Sequence Number=SeqID_47072
atgaacaaaaacaccggcattcaaagtgccattacaaacggaactccggttccaccttcgcaggtacgagcaaccacactcgatggggggcccgcggagcaacagaagaccgacgaacgacgcgtcgtcgcccgctttggcagcggcgacgacgacgacttctgctccggggggccgaacagcggcagcgatgacctcagggcggatgctgctgccaggaggcccccgcccatgcccaaactcgtgaggcaaggatgggcagaaggccgtagagttggaggtcggtccgtgggcggccctggctatctcgtcggcggaagaacctcttccagctgccgtggtagacgccggcgccgggagcggctccgaagccactcgcgtccgagagccaggcacgtggcagctgccagcgccacggacaacaaccgcccttccccccgatcactgagggaaggagcgggccgccgcccacgcaggggccgaccccaactcggcacactcccctccccagccctagtgatgaaaatccttgaggctgagggaggggcagaggccgcggcccggagaagcgggcgacgcttcaccttcgccataatgaccgcgtcaaaaaagggaccgggaaagggggataccccgaaaaggatccttccccgtgaaggaaccaggctccgagcctccctactgatcagaggttcgaaggctggcccctcggaagggttcgacagtcgcctcagatcacgtgggctctacacccactactggtcagaggttcgaaggccggcccctcggaagggttccacggccgcctcaggctactcgggctccgtgcccattactgatcagggcgggaacgatcttgtaacggaatcccatcagagggaggcatcgagccctcggaccccgtcgccaggggaccgggtccggcagatcacccgcagctcaccggagacgccatgttcggcgcccatcaagggcaacatggcgctttccccctcctccttgcggaaaggcgacacaggggcggctcggactcgggctaagccccggaagacggcgaactccgctccgcccgacccagggctcggactcgggctaagccccggaagacggcgaactccgctccgcccgacccagggctcggactcaggctaa

SEQ ID NO: 3698 - DNA, 378 bp, Zea mays
  Peptide Sequence Number=SeqID_47073
atgagtgaatgtcgccgcgtgccccagcccagatgggtcgacgcgaggccgagcgcgaaggggggaagtgaggtggccggagatgggcgtgagagaggtggaaatcccgcggccttcgtgttcgtcccgcacccaggtcggggtagggtgatgatggcgcctcctgtcgacgtggctggtctgcgccctaggttgggcgatgtggaagctcctccgaagccgaggtcgagtctgtcttccgtggccgaggtcgagttcgagcccctggtccgggcgaggcggagaccgtcggctgaggccagggcggagtccgagccctggggtcgggcgaggcgaagttcgtcgtcttctggggctgagcccaagtccgagccctag

SEQ ID NO: 3699 - DNA, 81 bp, Zea mays
  Peptide Sequence Number=SeqID_47074
cttgattcgtgacactgtccggtggtgcaccggacactgtccggtgtacaccgggaacagtccggtgcccccagaccagag

SEQ ID NO: 3700 - DNA, 216 bp, Zea mays
  Peptide Sequence Number=SeqID_47075
atggccgcttcccccacaccccgcgcccgctctgcccgtcggccccgcctgtcagccgcccgcgccccgcgctgcccgcctggcccccgcctgtcagccgcccgcgcccgcgctacccgcctggccccgcctgttagccgctcaggccgccgcgcgctcgcgcgcccgcccgcagatctaatctcgggcgttgatccgagatccaacggctattag

SEQ ID NO: 3701 - DNA, 1986 bp, Zea mays
  Peptide Sequence Number=SeqID_47076
atgctggtgcggagtcctgccttcgcactggatttgcatggccaagatcccgccgcattcgtgcgtgaagcggaagacggtgcggcgaggatcgtggggcgctacgtgccgaagacggaggctctgcagagctgggatatccgtgggaccaatgacatgctaaatcgggtcttcgagttgaaccggttgccttacggtggttaccccggggaagacgccgccgaccgccgcgggaagaaaccgatgggcggtaccgaggaagggccatcacaggaggctgtctcagccactaagaagagaaaattaggtactatagtgggggaaaggggggtgtctgataattttgttgtagagttgatggggacatgcgtggcccccgggggaaggatgtcttcgcccgagctccgggagtcttcggcgcgaatgctggaggttactaggggtaggtggccaaagaatcttccgatcccctgggcagagggcgaagacatgtctacgtctcgtatagctcgtggcttgaggattttctcttacggacggaatattgctgctattgtgtcggcagtgatgaacaaggatcgccaggatgctgcgcagaagcgccgggcggtcgtcaggctccccgatcctaggcgtgaagcaaagagggcgcgggggagcgcgaaggctgccgccgccggcgttagccagccgacgctggccgcgaaatcggctgcacccggctccagcaaggtgtcggagagtgcgaaggccgttgctaccggcggaaccaagtcgacccagggcgaggccgcgaaggttcgggagttgccttcgccggggaagcgcgttgccgacttcggcacaaatattagcgtggacgactatttcgtcgggtcaggcgaggggcaaatggttgttatcccgcctgcggtggcaaccacggcgtcaaccgcggtggtcggggcgaagggtagcgctttctgcgcaagcggcgagatttcgtcggccgctgccgtcaagggtgaggcgggcaccatgtcccgccggctgagggaggcgtcgctgcagctgtcgcagcagctgtcgcagcagctaagtcaacacgcggacgccgtccgggagaagtcggtcacggagagcaagagccacaggttggcggagaaggtggccgccctggagaccgagaggacggacctccggcgccagctggtggaagaaaggagggaggccaaccaggctattgccgaggcgcaggccacgcaggtggcggccaaactggcgtgggcggagggaagccttgccagccaacgcgcggaagaatgggaggagtggttcaacgctctgcgcggctgcgtggagaaggccgaggcctctacgcgcttggaagtggaacggacgcgcgcacagctcgtggagtcgtaccgcgagttgggtgcgcggacggctgacttcgaggtgcccgaccgagaggcgggccttcgcttcctcgagtggctgcaagaggaactgcaggtgctcccgaccctcgtggagggtttcatgtcctttgcctccctcgtcacctgggaaggggccatgaacgcgttgtctcgcgagggctgcagacacttcgaggtcttcgaccaggctgacgagagttttgaacgcgagatttttaaggccgaagacccagttgtgaagcagtcagtgggggcactgtttgataggatgtggggggcgtatggtcgggaggttgtcagggagcggtcagaccgagcgagggagcagatggagcgcgttgaggacgtcgaggacttcggaagtctagccggcgcgccgcccgaggccgcagagggcaaaccggcgctgccctcggatgctggtgaaggcccgtcggatgcgcccgtgcctgctgctgccggcgaggaccctgtgttggccgctgtgccgacagccgaaggctcccaggaggtggtggtggagccggcggtcgaagaccctatggccgtggccgcgccttcatag

SEQ ID NO: 3702 - DNA, 1239 bp, Zea mays
  Peptide Sequence Number=SeqID_47077
atggccgcttcccccacaccccgcgcccgctctgcccgccggccccgcctgtcagccgcccgcgcccgcgctgcccgcctggccccacctgtcagccgccctcgcccgcgctgcccgcctggccccgcctgcacagtgcttgctctgccgaggctgggtgccgaggttctttcgttttgctttttagtcaccctcctacggggagagatggctcgtcttagacacactgcacgtaagtcggtgattcctttcctgccgtctcgacttgcggagcgtcctttgcgccacaccgtgtccggtcagtcgagtcacctggagagactgcaccaccgcctgcgtgaggagcaggaacgccggcgccagcacagagagcagcagggctcttcctccccaccccagcaggaggtggagtccgtgaggcgccgttcctctgttgcccagctggaggcgccccctgcaccaccgcgggacgtcccggctgttgaaggagctactggaggaggccctggaggaggccctggaggagaccccgacgacgacgatttagaccacagcacagagtcctctgagccgcaggaggcggaaggatgggtcgcccgacccatcacccgtgacgccgctcgcggttgtcacttccacgacgcactcgacaccttgctgcgccaggctttcgaccggcacacctggtcgatcgagtatcgttgtgtagtctaccagcacagtcgcgggaggtacccggaccgctgggaggctacctgcctagttcgccgtccggaggacgatctccggggtgcggaggccgtttcggagcactactccatctccgagagggacactgcagaggcggctatgcaggatgcagcacggcgtgcactctcccagtactgttccttgttcggtggggtggccaacggtcttaaccttaggtactacccccgctgtcctactggcagcaccgagagtgtggttgtctcacctattggtgagggtaaccctaggttgagcagcacagtcaacctagtcgcggtgcttaacactgagctggatcactctctggacgagctgagcagggctcgaacggagattgctgagttgcgtgctgagctagcagagcgccgccaccaggagggtggttcccccgctcctgttgggactcagcacccttaccgctcgccgccacgtggtcaccacacttatggttcccctgcctgtaagaccaggatagatctggatccttag

SEQ ID NO: 3703 - DNA, 327 bp, Zea mays
  Peptide Sequence Number=SeqID_47078
atgaagggtgtgattgctgagcaaggagaaattcagaagtggaagccggaggtggaagcgaagatgaacctgattgcgagggcgttgaaggacattcagggtcaggtggagtatcttggcaagaggtcgctgatcaaccaaccggctgtggaggagcaaggagggctggggggagcggtgctgcaggagattccatcagtcgagattccgtcagcccagggctccctgcatccagcgggacattctcatcagaagcctggggcaaacatggaaggacagcgcctgttctcgtcattcggagttaactttggaaatgagatgttctaa

SEQ ID NO: 3704 - DNA, 696 bp, Zea mays
  Peptide Sequence Number=SeqID_47079
atgtcttcgcgctcccttatgcatcgtgtctttccaccttccaagcctccggatgggggatacccgccgtctttccgcctcatcgtcggaggaacgcaactccgtgggagttggtacctttcagccatcgttcggcttcaaggattttcatcaggaggcccggctgcacccctccgccggcggtcacccaatatggtgacctccagcttgatggtgggggaaagcgagccgggctgcggcctctgcccctccctcagcctcaaggattttcatcatcagggctggggaggggactgcagcgtgcctggctctcgggcgcgagtggcttcggagccgctcacggcgccggcgtctaccacggcagctggaagaggttcttccgccgacgagatagccagggccgcccacggaccgacctccaactctacggccttctgcccgtccttgcctcacgagtttgggcatgggcgggggcctcttggcagcagcatccgccctgaggtcagtgctgccgctgttcggccccccggagcagaagtcgtcgtcgtcgctgctgctggagcgggcgacgatcttcgggccgcgtcgccgtccgaggctaggtcggacctcgccgaaagtgttatcgatgccgaaggtgctgctgctcccttccagcgtcaagacccgagcctgcaggatcggatcgtcttgtag

SEQ ID NO: 3705 - DNA, 1221 bp, Zea mays
  Peptide Sequence Number=SeqID_47080
atgtctaaacagctgtctaagatgcaagcagcacttgtgctgaatgcatcaaggcgctttaggtacactcttgatttgaaaaaggaggaacaaaaggaggagatcaggagaaaaatccgtgcacaggcacatgttataagggccgcttttcgtttcaaagaggctggccgaatccatgtacagtccgaagaaacaaaagtaccatgtgctgatggtgcacttggcttcggaatcaaagaagaccagattacagcactgacaagggatcacaactactctggtctgcagcaatatggaggggtttctggtgtagcacatatgctaaaaaccgatacacagaaggggattagtggagatgactcagatttgctggcaaggaaaaatgcatttggatcaaacacatatcctcgtaagaaaggaagaagctttttggctttcgtatgggatgcttgtaaagacttgacgctaatcatcctcatggttgctgctgctgtttcactggccttgggcataacaacagagggcataaaagaaggctggtatgatggagcgagcattgcctttgctgttcttctagttgtatttgttacagctatcagtgactacaagcaatcactgcaattccaaaatcttaatgaagaaaaacagaacattcgtttggaggttgttagaggcggaaggcgaatcacggtatcaatatatgatttggttgtcggtgatgttgtccctctcaaaattggtgaccaggtccccacagatggtatccttatcagtggtcactccctttccatagatgaatcaagcatgactggagaaagtaaaattgtacacaaagatcagaaatcaccatttctaatgtcaggttgcaaagttgccgatggatatggaacaatgctgacacatctgttgcggtgtttccaaatctcccaagccaccaacataattagagaattgacctctacgaagccccttggggacagcagcaacttctcttccaccaacctgagaactgagacactgagggctgaggtgccaactgcagcagccccaactgttgaaggatcatggtccaaatttggcgagcaaaaacacagccaaccaacaagtgatgcaccgtctcatccatctggtcacaaaacgaataagactctggatggggtaggttcctccgctcaagacgatcaacggtccaaacccgactatgatacaccaaccatataa

SEQ ID NO: 3706 - DNA, 231 bp, Zea mays
  Peptide Sequence Number=SeqID_47081
atggcgaaggatgagttacggagtggaagcctttgtcttcgccgaagactccaattccctttcaatatacctatgacttggtgtgaaatggacttgaaaaacacattagtcatagcatatgaaagagatatgatcaaagcaaaagaaattgcgcgaatcaagaatattgagctcatgcctaagtttggtaaaagtttgttcatcaagaggcttggtaaagatatcggctaa

SEQ ID NO: 3707 - DNA, 558 bp, Zea mays
  Peptide Sequence Number=SeqID_47082
atgcaggaggcatgcaaccgcaccaagggggcgcaccctttcgacttcgacgcatccagcatagagacccaggcccacacgtcatgtaactggcgcgccggttactacgtgcgagaaactgcaccgccacttgcgccagtaccacaccttctcgactgcggaaccggtgccacgactcgaggcaaccctacgcatggcccaacagtgccaaccgagcacaccgatcacaggcggcacctttggcaggcgaagcaggcgacgcttcacctccgccatgatgaccacgtcaaaaaagggaccgggaaaggggatactccgaaagggatccttctccgcgaaggaagcgggccccgagccctcctactgatcagaggttcgaaggctggcccctcggaagggtttgacagccacctaagagcactcgggctccgcgcccactactggtcagaggttcgaaggctggcccctcggatggattcgatagccgcctcaggccactcgggctccacgcccactactgatcaggggttcgtaggctggcctcgaagggttcgatag

SEQ ID NO: 3708 - DNA, 906 bp, Zea mays
  Peptide Sequence Number=SeqID_47083
atgacctcgtcgaagtttgactcccgcccaaactctagcaacaactccgacgagaaatttctatccactcgttcatctttcggggcaacccagaacattgccgtgaccagctcgacgagagtttcgttatcgtgcttctggatcgttgatcggatctccggctcatcgtcaaaaaccgagacgaccaacagtaacgcgaggttgaagggcttgattgtaagatgtaaggagagggtccaggtgtacaacggggagcatagcaatgtgctaacatgtctagcagaggaaagccagagtcctatgtacatgccgttgtggctgtcggagaggttttggcgccctgttcatgtgatgtcgtggccgtcggaggagcgcttgagccccgtggaacccgaggtcgggcgaggcggaggctcctccgaggttgaggctgagtccgggcccgggggtcgggcgaggcggataccgtcttccgaggttgaggctgagtccgagcccaggggtcgggcaaggcggagaccgtcttccgaggtcaaggctgagtccgagcccaggggtcgggcgaggcggagaccgtcttctgaggtcgaggctgagtccgagcccaagggtcgggcgaggcggagaccgtcgtccgaggtcgaggttgagttcgagcccaggggtcgggcgaggcggagaccgtcttccggagtcgaggttgagtctgagcctaggggtcgggcaaggcggagcttcctatggcgcctgaggccggtcttggcggctgtcagcctcaccctgacgggtggcacagcagtcagagcagcacaggcggcgctgtttttctgtcaggtcggtcagtggagcggcgaagtgactgcggtcacttcggctctgtcgactgaagagcgcgcgtcaggataa

SEQ ID NO: 3709 - DNA, 624 bp, Zea mays
  Peptide Sequence Number=SeqID_47084
atggtgacctcccgcttgatggtgggggaaagcgagccgggctgcggcctctgcccctccctcagcctcaaggattttcatcaccagggctggggaggggactgcaccgtgcctggctctcggacgcgagtggcttcggagccgctcgcggcgccggcgtctgccacggcagctggaagaggttcttccgccggcgaggtagccagggccgaccacggaccgacctccaactctacggccttctactcgtccttgcctcatgagtttgggcatgggcgggggcctcttggcagcagcatctgccctgaggtcagtgctgccgctgttcggccccccggggtacaagtcgtcgtcgtcgctgttgctggagcgggtgacggcgtgccgttcgtcggtcttctgttgctccgcaggccctcccccatggagtggggttacttgcctgttggttgcctgaaccgcttcaccaagcgtgagtcgccccgtgtcaaggtgacgagtgagaaggtgatgagtgagaagagatcttttttcgaggaaaatttcgacgcagagggggttgccccccttttagcccccgagggagggtcgggctttgccgaggcgaggccgacccttccttga

SEQ ID NO: 3710 - DNA, 516 bp, Zea mays
  Peptide Sequence Number=SeqID_47085
atgacggcaaagcagcctaggctaccgactgaggtgcctgggtgctggaaggacagcgccgcctgcgccgcaccgactgcagtgccacttgatagagtgagactgacaggcagtcaggtcctgcagaaggcgccacaggaaactccgctccgcccgacccagggctcggactcgggctcggccccggaagacggcgaactccgctccgcccgacccagggctcggactcaggctaagtcccggaagacggcgaactccgctccgcccgacccagggctcggactcgggctaagtcccggaagacggcgaactccgctccgcccgacccagggctcggacttgggctcagccccaaaagacgacgaactccgcttcgcccgaccccagggctcggactccaccctggcctcagccgacgacctccgcctcgcccgacccagggctcggactcgacctcggccacggaagacagactcgacctcaacttcggaggagcttccacatcgaccaacctag

SEQ ID NO: 3711 - DNA, 282 bp, Zea mays
  Peptide Sequence Number=SeqID_47086
atgaacggcggcagagagatagcatacgaagctatcaggcaaagtgaagaagaatctcatcttgcttcaggggaagcaagaaaagctgaagaagtcgcagaacgcaaaaggcgtatagctgaacttcccccccccccctcctcggaaccatacgatcctgacaccgatccagccctaaaggttacttttgacgaatgcaaaatagtgaacgcagcaatagatgaagctgttgagaaacttctaaacgaagctgcagaaagagtgctaaaggaggatgactga

SEQ ID NO: 3712 - DNA, 957 bp, Zea mays
  Peptide Sequence Number=SeqID_47087
atgagattggatagggaagtcgagaccaacctaaggcctaacaaggtgcagcgtggtggtgacgctgagaacccgaacgtcactgccagcgacacgctcgcggacgaagtgcaagtcgatctccacatgcttcgtgcggtgatgctgcacgggattagtggagaggtagaccgtggtgacgttgtcgcagtagacgagggtggcacgctggagagggctgtggagctcctagagaagctggcgcagctaggaggcctctgctacgccgttggccacagcgtggtactcggcctctgcgctggagcgggagacgacggggtgccgtttggtggcccgggaaacgaggtgtggagcagggcttgcagtcggacatcccggctgctccaggatgtcaatggcgtactggcgctggagaaggaagagaccttgaggctggcgctcggcggtgaagccgaggaagtggtgaagaggccccaagtccttcgtcgcgaactcccactaaagggcgtcgattttatgcccccggttacctatgttatccctggaaaatttccctctcaagggttagttattacaggtcattacagcatgattaggtataacacggacggacacacaattaactctacccaaacagtggcttacaagtgggaccaggcagcccagggcggttttacacgggcccaccgtctcaacaacgcgcaggtggcgacagaagccttcgtgctccatgcgctaggtcttcggcagtcattgaggccttctccgttcctggctctgacggggaatggcaaggccttcgcctgcttcgtacgctccctccgtctcagggccttcgcttcatcagtctttgtctgccttcacttttcctccgtgatgattaatctctgtcccgaaacagtcgagcgaggggggcggtacactttcgctccaacaccggttggctggctgcagtag

SEQ ID NO: 3713 - DNA, 354 bp, Zea mays
  Peptide Sequence Number=SeqID_47088
atggagagagtcaagatcggagggtggggaggagtcggcaaggggaaacacatcttcgtcgaaaacaacgtgacgagagatgagtatgcggtgggagataaggcgaaactaggtagagacccaggcgaagaagtgggtatggctgggaaaggtatcggacttaagccggagtggaaaagtccaaaaaaaggcaaggtgggggacaggagaggcccagaggtcacagtggacaagatcaaaggcctgatcaaccctggacggggaagtggagaatggaagacgagagtgacggtcgagttggcaggcatgacagaggcactcagaggaggctcggctgctacaggagatatttga

SEQ ID NO: 3714 - DNA, 849 bp, Zea mays
  Peptide Sequence Number=SeqID_47089
atgatgacaggtgatgatgcggtgggtgaggaagtcaaggcatcgataccccttgtggtcaatgacagcgagtggagctgcaagagagcttgtgttgagcagtggcggaagtattgggattgcaggcacaacaaaagacgcgaaggtgggcataggagggggttgtgccatatagggcgaagtgggggtggggtgattctccgccttggagggaaggcggttgaggagatgagtagtagtgttcagatcctctgcccaatagctggcatgaagagacgcctgaaagaggaggtagcagatcatgttagtggttgtgcggaattggatggagacccaagcgaagaagtgggtgagggtgtgaaaggtgtcggatttgagccgcagaggaaaagtccagagaaaatgagagaaatcacccaggatgaccagatagtttttgtaaccagagaggctgaagagggaagatggccaaagatcacaatgaacaaaatgaaagacttgagtagttttggacgtggaaatagaaaaaggaagacaagaatggcgaccaagctgacatgcatgacaaaggctctcagaggggcgcccctgctacaagatatatctgagctacttgagagcttggacatgatgtcaggctggagggggaccaacgcgctggtgaccggcaggaaaggcagagagagcagaccaggcacattcatgcagtgcggcgaggcggcgacgctgggaagaagttggtcggcgccgaggagaaatgaggtgggcgtgccacggtcgccgtggaagaaggctgaaccggcggacatcgatctgggccatgtggcggtgcctgcgaggtttggctag

SEQ ID NO: 3715 - DNA, 294 bp, Zea mays
  Peptide Sequence Number=SeqID_47090
atggaggctttgagtgtgtcttggaatggattgctagctcttgtattgaatgttgaaggttggaatgcttgggtgagcttgggggcgcaggccgtgcagccgcagctcggccgctcggggcaagagcgccgcagcgggctagactggtggcggctgggtggggctggccggctgggagtggcgactggggcctggggcgctggacgctgggcgcagacgcaggggcagggcgatggcggctggcgggtcacgggtggcggcctggcggggtgggtggccgagaagggaacttag

SEQ ID NO: 3716 - DNA, 201 bp, Zea mays
  Peptide Sequence Number=SeqID_47091
atgtcgcgcgcgttcgacgactactgtatcatggactgtgacgtcatctcggcgccggaggtgacacagaggaggaccgacaacaatgatcagttcatcatcctcgccatcgtcagggcgtggaacatgctctctaatgatgagaccatggaaatcgtggtatatatcgaagtctgcatgatactgatggttgcaatgtag

SEQ ID NO: 3717 - DNA, 222 bp, Zea mays
  Peptide Sequence Number=SeqID_47092
atgaccgttggtggaggctgtctgtcgtatggtgcaccggacagtccggtgcacaccagacatgtccggtgcgccagccacgtcaccaaagccgttgcgattcgaccgttggagttctggcttctgggcccgcctggatgcgaccgttggcgcgaagtagccgttgtgccgcagttacaccggacagtccggtgtacaccggacatgtccggtgaattatag

SEQ ID NO: 3718 - DNA, 381 bp, Zea mays
  Peptide Sequence Number=SeqID_47093
atgaagatccgccgatctggagccgcgtcggatcagcgagtgtggcgggcgagcggatcagcggccgcgcccgcggtctggatctgcgaccgcgcgacgaggcggggcgcaacaggaagctctgcctcgcccgaccttaggcctcggcctcggaaggaggtctccgccccagggctcggcctcaacctcagcctcaggaggaggtcttcgcctcgcccgaccccagggctcggtctcaacctcggcctcggaaggaggtctccgcctcgcccgaccccagggctcggcctcaacctcggcctcaggagaagtctccgcctcgcccgaccttgggctcggaccgaccgcgccatgggggatacatcattaccctacccctag

SEQ ID NO: 3719 - DNA, 2154 bp, Zea mays
  Peptide Sequence Number=SeqID_47094
atggaagtcgtggagctggtcccctatgcccgaaataagtggggcaactggtgggattactggttttatgtttcagaggccaaagtcgaagaccacccaaggctccccgcagccattatgtgctctcattattatgtggcgtacccgccatttgaagtggcggaggatgatgagaatgaaagggcccttcggatcgctgctcgtacgagtagtgggcgtgatctagttgaggaattcatagggtatggggtgtggcccttggcgcatggatgggcgttgggcgaagtatgccctcgcgagatgcgctccctagggcgggatcctgccgcggttgtgcgcgaagcggaggatagggcggtgcgaattgtggggcgctacgtgccgaagacggaggccctgcgaacctgggatatacgcggatccaatgatcgtctgaatagggtcttcgagttgaatcgtttaccgtatggcggttatcccggggaagacgttgtcgacagccgcaggaaaaaaccagcggttgtgactgaagaagaccccgcgccggaggccgccccagccactaagaaaaggaagctaggtactgcggtgggggaactgggggtctccgatagttttgctatggagttgatggggacatgcgcggcacccgggggaaggatgtcttcgcccgagctctgggagtcttcggcgcggatgctggaggttacagggggtcgatggcccaagaacgttcctatcccccgcgcaactggcgaagacttctttacgtctcgcatggcccgtgacttgagagtgtttccttacggacggaatattgctgctgttgtgtcggcagtgatgaacaaggaccgtcaagatgctgcgcagaagcgtcgggcggtcgtcaggatggtcgatcccgataagtcggctgcggagagcaagaactgcaggctggcggagaaggtggccgccctggaggccgagaagactgaccttcgacgccggctggcggaggagaggagggaggctaaccaggccatcgctgaagcgcaggctgcgcaagcagaggctaaggtggcgctggcgaagggtagcctcgccagccaacgcgccgaggaatgggaggcgaggttcaacgccctgcgcagtcgcgtggacaaggccgagacctcggtgcgctcagaagtcgtgcggacgcacgcgcagctcacggaggcataccgcgatctgggtgcgcggactgcagatttcgatgtgcccgaccacgaggctagcctccgcttccttgaatgggcttcatgtcctacgcctccctcgtcacatgcgcgggggcccatgaatgcgttgtcccgcgaggggtgcaaacactatgaggtcttcgaccagtcagatgaaaactttgagcgcgaaatttttaaggttgaagaccctgtggtgaaggattccgcgggggcactcttcgatcggatgtggggtcctcatggtcgagaggcggttagggagcggtctgaccgggcgagggagcagatggcgcgtgccaaggatgttgaagactttggacatctgaacggcgtgcggcccgaggcggaggccaacccggtgctgcccgaggctgaggtcgacccggcactgccctcggaaaccggtgaaggctccttcgctgcacctgcatctactgtgtctggtgaaggctcgttgccagcccctgcgccgatggcggaggatcccccgaaggcggtggcggagctggcagcagaggatcccatggcggcggctgggcattcgcaggttcaggattttgggcctgcgcacgcaaccgctactgctaattttgtggcggcttcgaccgtggttgctggaaatgaatcggatgagtctgtgtctaagttttttgagtttgatgattctgggagttcagttgtgtggacgaaagagtcttcggatgaggacttggattactttgcggccttggatgtggctgcggcggaggcttctccgcgtgtgacggatgctgaagtttttcctggtccgagtgctgggcgtaggcggcgaagggcggtggcgaagcgtagagtgagtgaggtggagggtggtcgtcttcgtgtggatagggctggcaagcgggaattgttgtcctcgtcggctggggcgagtgtaggtaaggggtag

SEQ ID NO: 3720 - DNA, 639 bp, Zea mays
  Peptide Sequence Number=SeqID_47095
atggacgacggagattgggcagctggcttctgtcctcccctccggctagcagaggcggcggcgcccgttcccgcggcggggaactcgccggagacaaggggcgtggaggctctgcgggtccttagggcgaccggggtggcctgggaggttggggaaggcgcggggaacttgctggcggggctaggtcgggttagagacatcggaggggggcggcccacggctgaacgactcggcggcggcgctaatcgactccggcgaggaattaaacgcagcagggagcaacagaagggaagggagggggcagaggaggtcccttacctcaaggcgaaccccagggtcctctcggtggcggcaatggcgcgacgacggcccgggtcgacggtggcggacctctgcggctgcacggaggacggcggagggcacggcggggctccgacgtcgacggagaaacgggctcgggacggcggcggtttaatggcggcggcgctctggcctgtgcgcagcgtgggggaggtgagagaggggtctgcagctcggggcggcggttacgcggggaggaaggtgctgacagccgggacccacgggcagagagagcgggggagcgagcgcgggtgcggggaaagcggccgcgctgactag

SEQ ID NO: 3721 - DNA, 393 bp, Zea mays
  Peptide Sequence Number=SeqID_47096
atgcggtcagaagagacgacatactccaaggtggcgacagtgggtccggacccccacgggaagtgtcagacccctggatgcacagcccggacctccgggcgaggttcaagacatccacagccccagccaccaaaacagccgttggggagggctgctgtcgatggacgcaccggacagtccggtgcaccggacagtacggtgcgccagccatgtcacccaaccgttagggttctgacggtttcgaccattggagctctgacagcctggaccaccggacagtcactgttcactgtccggtgcgccttctggcgctgctctgactctgcgcgaaatgtctgcgcactgttcagttgtcagccgaccgttgaagtcgaccgttgcgcttgggagtga

SEQ ID NO: 3722 - DNA, 2523 bp, Zea mays
  Peptide Sequence Number=SeqID_47097
atgccgcgtcttctcgactgcggaatcagtgccgcggctcgaggcagccctgcgcgtgacccaacagtgccaattgagtgcaacgatcacgggtcagtcagccgcggggataggcgcgacggtcgatatggccaaaagcggaccggcaggacagggaaaggggatattttgaaaaggatccttcccagtgaaggaaacgggccccgagccctcctattgatcaggggttcgaaggttgtgccctccggggttcggcaaccgccccagagcactcgggctccgagccccttactgatcaggggttcgaaggctggcccctcggaagggttcgacagccgccccaaagcatgcagagtcagggatgaccctgggtacgtccgttacatggccgaggctcgggctacgctcctgagcgatgttcgccctgctccgactactgtgccagtcaccaggataagactagcaacagcaagtcgtgacctctcccgagttcgacctcgggcgcaacagggagctccgcctcgcccgacctcaggcctcggcctcagcctcggcctcgggagaaggtctctgcctcgcccgaccccaggcctcggcctcagcctcggcctcaggagaaggtctccgcctcgcccgaccccaggcttcggcctcaggaagaagtctccgcctcgcccgacctcggcctctggccgactatgctacaggggatacatcattgcactagtcctagctagctgcctcaggctacgaaggaacaagaccggtgtcccatctaaggttactccggtaacaggtaatgatggttccccgcgtgcgcccatgacgtcggattgctcccaacctcctacggaagcaagggaacatcagcaggatccatgccgcaccgccagctatgcttctacagggctcaatgcgcctctccggtgggcacgcttgtacctgtacagggctcaaggtgctcctccgatagccacgttagcacacagggctcaaggggaagcttcttatagaagggatgatgagtactgtgcgccgctcggcatgggcgcactgttcaccaacagactggcggcgcgtactctccgcaataaatacaaagactgcacagccggccaggcctggacacgtgttggcaccggacccttgcctgtgtcggggtcctctccgtctcgggaccttgctaaggcccggacctcactcgggggggacctgggacccaccaagggggcccgacatgccttcttcggagctccggacctgtacgtacaggggtccgatgttcctctgcggaggtccaaacccgacggcgtcgtacgggtgcagcgccttcatactgtagaagaggatacccctgattcagggtaccgacagtggctcccggacttccgtgacggcctcgagaagtcgtggcattggcgcaagcggcgttgcagtttttccgcactcagtaaccgatggggtgcgccggtgttctctggagggatccgcgtcagggccgtctcctccggcgatcttatcgtcgaagagcttgcgctcgcggtggtgccgccgatcttcccggctgcaaccccccaccggtggtcatctagagggatgaccaccagccttgtggtggagagaagcgagccgggctgcggcctccccctgccctcagcttcaaggatgttcatcatccgtgctggggagaagggaggcaaactccgggtacgcagggccggccgtctaaggcgccgtcagctgccgcgtgcctggctcttcggcctggatggctttggtgccgcctccggcgctgcctcctgccgcttggacggggcatggctgcccgtccaccgcacgggcgacggttgcgccgtgcgcaggtcggccacatccacggcttcccccgcgccaccggccttaccgggggacgtacaagacgtcgtacgccacgggggcggcggcagcattcttggatggtcttgtcctcactcccgagtgaggacgggagcgaggacctcttcacgcgcgctggggtggccgccattcgccggtacgacactagtgcgcaggtggccgctgtcgtcggtgctgaggtggtcgccgccgctagtgaggctccccactgcagaggtggttgcctccgctggcgagaccatcagtgccacctgccaccgggcccccgactctttggctttaatggcctcattgtcgccccccgtaggaagacgggagcgaggaccttttcgcagtggcgcacgtgccgaagcggtcgccactgctggcgagtcactcggagcggaggtcattgtcgctactggtgcagaagtggtcgctgtcgccggcgatccgtcgatgcagaggtggtcgccgccgctagtgaggctgcccggagccagcttccagcatgactcctgctggtgcagcgtagttcattcctgtagaaatggagctagggccccacttggcgatggagcgtgcaggcccacggtacgggaccaggctgagcggctgcacgggctcgggaccaccccaggagactaa

SEQ ID NO: 3723 - DNA, 210 bp, Zea mays
  Peptide Sequence Number=SeqID_47098
atgacgaccgacaggccgcttgaactactccacatggatctattcggcccgatcgcttacataagcatcggcgagagaaaaatctcaaacccaagagactttaaagggattcttgagatgagctcaaaacgagttcggattaagaatcaagaaaataagaagcgacaatgggacggagttcaagaactctcaaatagaaggctttcttga

SEQ ID NO: 3724 - DNA, 741 bp, Zea mays
  Peptide Sequence Number=SeqID_47099
atggacggcggagattgggcagctggcttctgtcctctcttccggctagcagaggcggcggcgcccgttcccgcggcggggaactcgccggagacaagggacgcggaggctctgcgggtccttagggcgaccggggtggcctgggaggttggggaaggcgcggggaacttgctggtggggctaggtcgggttagagacatcggaggggggcggcccacggcggaacgactcggcggcgacgctaatcgactccggcgaggaattaaacgcagcagggagcaacagaagggaagggagggggcagaggaggtcccttacctcaaggagaaccccagggtcctctcggtggcggcaatggcgcgacgacggcccgggtcgacggtggcggacctctgcggctgcacggaggacggcggcggggctccgacgtcgacggagaaacgggctcgggacggcggcggtttaatggcggcggcgctctggcgtgtgcgcagcgtgggggaggtgagagaggggtctgcaggtgcgcaaatgagggagggggagaaggcgagcggggttctgggctcaagtgaccgagggcgaggtggttgcgagcttcacgcgcgacgtgggcgcggagtccgcggcacgcgcagctcagggcggcggttacgcggggaggaaggtgctgacagccgggacccacgggcagagagagcgggggagcgagcgcgggtgcggggaaagcggccgcgctga

SEQ ID NO: 3725 - DNA, 489 bp, Zea mays
  Peptide Sequence Number=SeqID_47100
atgaccccaccacgtgggcggctccggggccgccatgcggtcagaagagacgacatactccaaggtggcgacagtgggtccggacccccacgggaagtgccggacccctggatgcacagcccggacctccgggcgaggttcaagacatccacaggccgcgctgtctctgcatttaatgcggagaagacgcgccgcctgtctaacccgctgacaggtgatgtgccccttcagcatttaatgcgccctgccgctctgctgacggatggtgaccagaccaccccacaggcggcgtgcctgtccactcccggggcaggcagcatatcagggcgcaaggagatggccctggcaaccagcgttagttgctccaaggcgggtgcattccgccacccggccggagatttcctctccgacaagaacctactccccgttgaggtggtcacaaagaccgggtctctttcaaccctttccctctctcaaacgatcacctag

SEQ ID NO: 3726 - DNA, 471 bp, Zea mays
  Peptide Sequence Number=SeqID_47101
atggacgcaccggacagtccggtgcgccagccacgtcacccaaccgttagggttctgacggtttcgaccattggagctctgacagcctggaccaccgaacagtcactgttcactgtccggagccgccgacgacccccgccgcctgtgctcgtggccagggtagctccgaccacctccgacgccgacccgcacaccgacgtgaccgtcgcgacctcccggacgtcactgaccaccccgccggagctctactgccgccgttttaaattaaataagaaaactactcaaaactcaatattagaaggaaaaataggaatattgtttgaccaggactgtaatcttgctgacggagagtacatcctcgtgccggagcaaggagctgctaaggaggtagccccagatccagcacccgagcctgcaccagaggacctgcctgccactgctttggaaggcaagccccggttttatgcataa

SEQ ID NO: 3727 - DNA, 495 bp, Zea mays
  Peptide Sequence Number=SeqID_47102
atggcttcttcatcaacactggtgaaggtcgtagaaccagttgttggcgatacgaccgtaggcatgctcggtgatgtgggcgctatcccagatccagtggaggaggaggtacctgtcgacacgcccaccaagtgcttgatgagagtcctcaatcgcgacgactactacggcccagacgcttcttctgccgtcgatgcggcggtggtgctgcttgccgaagcgggctgcacgctcctcatcccgccgcaccaccccacggccctcccctcgctgcactctttcgtggctcacctctcgcgcaagctcttcgccggcggggacgcctcctcaaccctggcccccgccccatgcctcctcgagggcctcgccgccttcgcggcctcctcgcctgcacggctccaccagatgcttctcccgacatccctgcacatgccgagcctcgctcacgcactcctctccttccccgcgctccactgctcactcgagcactcatag

SEQ ID NO: 3728 - DNA, 612 bp, Zea mays
  Peptide Sequence Number=SeqID_47103
atgaacaaaaacactggcattcaaagtgccattacaaacggaactccggttccacctccgcaggtacgaacaaccccactcgattggggggggcctgcggagcaacagaagaccgacgaacggcgcgccgtcgcccgctccagcagcggcgacgacgacgacttctgctctggggggccgaacagcggcagcgatgacctcagggcggatgctgctgctaggaggcccccgcccatgcccaaactcgtgaggcaaggacgggcagaagaccgtagagttggaggtcggtccgtgggcggccctggctatctcgtcggcggaagaacctcttccagctgccgtggcagacgccggcgccaggagcggctccggagccactcgcgtctgagagccaggcacgcggcagctgccggtgccacggacaacaaccgcccttccccccgatcactgagggaaggagcgggccgccgcccacgcaggggctggccccaactcggcacactcccctccccagccctggtgatgaaaatccttgaggctgagggaggggcagaggccgcagcccggctcgctttcccccaccatcaaactggaggtcaccgtcttgggtga

SEQ ID NO: 3729 - DNA, 264 bp, Zea mays
  Peptide Sequence Number=SeqID_47104
atgtcagccagaagaacacataaggttccatgtgtgcaattagcttcttatgatgtcactgtactatctgagtctgttgggcgagcggcaattacgcaattttacccaaacagaatcagatgcaccatcttgggtaaaacacacagaaaagaggtttaccaacaagtggttacaccttcgttcattgggcagttacaagttagtcaaaaccaacttgttgaactacttttgacattaagcaaatcctctcagtaccattggtaa

SEQ ID NO: 3730 - DNA, 513 bp, Zea mays
  Peptide Sequence Number=SeqID_47105
atgagcagcccaaggatacacctccaacattgccagcccggccgatgtgtcttggccggatgcccaccaccaaggcggccatcactgcctgctggatttaagctcgagaatggcatggtaacagttcctgccacagaagctgcagtggttgacaagaaggcagatgccaaggagattactgggttggaggtcaaggaggaaaaggcagtgaaaggatgcgtctttgggactaagaggaagttccctagcagacaagtgctggaggaatcgccatatttgatgaacttcatgaggagaggaagctgcgagggggaggaaaggtgggatggcagccggcggcgtcagcaacagcagcaggcacaaggatacgggaatcagcaccaggaagaaagaataaacgatggaggctggcagaccgtcggtgagaaaaagcgccatggaagaccacaacaggcttgtttgggagcaatgatagaggaggagattgaagggtctgtctccagtgcgcactga

SEQ ID NO: 3731 - DNA, 1311 bp, Zea mays
  Peptide Sequence Number=SeqID_47106
atggactctctcctcgccagctacgcctcttccgacgacgacgctgatgaggccccacctgctcctcctcctgctcattcccccgccatcgccacttcctccggtggcggcgcaggcgggtttttctcctcgctcccgcaacccaagtccgcccccgcaccgctcttctcctccctcccggcgcccaaatccacccccacgccgctcttctcctctctctcggcgcccaaatcctcccccgcccctaaccccaccttctcctctatcccgccgcccaagtcttccggaggaaaccctaagcgcgtcgtccagtatcgcccgcagccgatccggcagcccacaggcgacagctccgacgacgaggaggacgatcccaagaagcgccgcgcgagcaacaacgaggcgcgcttgccgcccgtgtctgctggctcgggtcccgtgtcctcgttcctcccgcctccgaagcactcgctcgggctcggcgccggctctggcgcgggagcgaggaggtcggcaatcgatacggctgcgccagagaagctaaatctcggcaccgctctgccttcaagctcggttgccaacacaggagccccggaaaggcctgacaccggcgcaaccgacgacgacgattcggaagatagtggcagtgatggtgacatgcctgcgccggagctggaggaggagcatgaaaaccagcaggcttttaatgctgcaaccggggagcagcagcaaagctatgatgctggagctgggagcactagtggatatgaaacatatgcgtgggatccaaaccactatgcgcaacacggtgcttatggttgggatcctagtgccagtgcgaattatgaggatggaacacagtatgccgcatatgaaagagggcaaagtgcagggtatgttcatgcgcatggaggggagcatgccagtggatatgaccatgttgcggcagtgccatatggagtagattatactgctggaggttatggtcatgaggtagcagcgacattgccaccggtgcatgaaccgatattgccaccagagatgggtaggagtggagggaagagaggtagaaatgatacgccggtccagattttagaagtaaatcaagcagagctgatgaagaacagaccaaagcaggataagtctaagctcacggggttggccttcggtcctagttatcagaatggtagtgcagaaacaataatgtgttatgggtatgctgttagttcccaagcaatgattcttgagaaatatgccacggtgttttcattttcatcgcaacttccattcatcacgaatcaagtaaaataa

SEQ ID NO: 3732 - DNA, 708 bp, Zea mays
  Peptide Sequence Number=SeqID_47107
atgggcgtatggaccgagcactttcttttcctcctgtctccgctcggccaccttcgccgctgcttcgctccatccgcgccaaccctagaaccacccctcgcgtgcctggccttctgcactgctctgtccaccgacccaccaccacctcctcctactaaggttagggcactcgtcgcaggccccgttgcgctcggctcagtgcggaggccgtcgcgggccgtcgttatgtgccttcgccgccgcgcgatccagatgctcctggacgtctccttcgcctacgcgctggatgtattgttcctcgaatcgccctcgttaagtccgggaaggccgaggtggatcccacggttgagcctcgccgatgcgcaggtagccgatgtggttcatggggaactaggtcttaattttgtgctggaacagaatacccttaagtccatagagatagagctaacagaagagatggcgcctaacttgctgcagaccgatatggttatgcagtttggtctgctaggtgagcttgttcgttgtagacaaaatgagtttctgaactttagtttggagcgaaaactttacatttttttggttaacctgactgttttgactgacagcacagaggcccttgagtttgttcaggaaaaaatgtcatcgtttatgaagttaggtgatggttcacagaagctcttgattttgtcatgggctggtgacccatga

SEQ ID NO: 3733 - DNA, 1812 bp, Zea mays
  Peptide Sequence Number=SeqID_47108
atgcattcggcatgcaaccgagccaagtgggcgcaccccttcgactccaacgcgcccagcatggaggcccaggcccacacgtcatgcaaccggcgcgccggttgctacgtgcgagcaactgcaccgcccctcgcgccactaccgcgcctcctcgactgcggaaccagtaccgcgactcgaggcaaccctgcgtatgacccaacagtgccagccaggcgcatcggtcacgggccagcgggcggaagcagcggtcacatcgtcggccaagctcacgtcccctcatgggacagcgagagaaccctctcccacggcgtgaagacggcgcgcccgtattccgttcctcgaacggctcgcgcacgcgcaacggctgccccgcgaaccactcgccccgtcgcattaactccgcggcgggacaggcggcacctttggcaggagaagcgggcgacgcttcgccttcgccataacgaccgcgtcaaaaaagggaccgggaaaggggataccccgaaagggatccttctccgcgaaggaaacgggccccgagcccccctactgattagaggttcgaaggctggcccctcggaggggttcaacagccgcctcagagcgctcgggctccgcgcccactactggtcagaggttcgaaggccggcccctcggaagggttcaacgaccgcctcaggccactcgggctccacgcccactactgatcagggaatcccatcagagggaggcatcgagccctcggaccccgtcaaaaggggaccgggtccggcagatcacccgcagctggtaacccccatcagcacaaagctgcaaaggcctgatgggtgcgatcaagtcaaggatcggtccactcaagggacacgatctcgccttgcccgagcccagcctcgggcaagggcagccgaccccggaggatttacgtcttgcccgaggaccccctccagcaacggacacaccttcggctcgcccgaggcccagtcttcaccaagaagcaaccttggccaagtcgccacgccgacggaccgtatcgcaggagcatttaatgcaaagggcttggactcgggctcagccccggaagacgacgaactccgctttgcccgaccccagggctcggactcgggctcagccccggaagacgacgaactccgcttcgcccgaccccagggctcggactcgggatcaggcccggaagacgacgaactctgcttcgcccgaccccagggctcggactcgggctcagcctcgaaagacgacaaactccgcttcacccgaccccagggctcggactcgggctcaaccccggaagacgacgaactccgcttcgcccgaccccagggctcggactcgggctcagccccggaagacgacgaactccgcttcgcccgaccccagggctcggactcgggctcagccccagaagacgacaaactccgcttcgcccgaccccagggctcgaactcagccctggcctcagccgacattctccgcctcgcccgacccaggggcttggactcgacctcggccttggaagaccgactcgacctcgacctcggaggagcctccacctcgcccaacccagggctcggaccaaccacgtcacatgaggcgccatcattaccctaccccaagctaactcaggctacggggaacaagaccgacgtcccatctggctcgtcccggctccagcgctcctccgacggccacgacaccacacgaaccgggtgccaaaacctctccggctgccacgatggcatggccctcttacagagggttggccgcgcggggaaggacgggacggcgcccgcgtaa

SEQ ID NO: 3734 - DNA, 1050 bp, Zea mays
  Peptide Sequence Number=SeqID_47109
atgccttcgcgctcccttatgcatcgcgtctttccaccttccgagcccccggatggggaacacccgcaatccttccgccttgtcgttggaggaacgcaacttcgtggaagttggtacctttcagccatcgttcggcttcaaggattttcatcaggcagcccggccgcaccccctcaccggtggtcacccaagacggtgaccaccagctcctgggtggggagaagcaagccgggctgcgatcttggtcccgccctcagcttcaaggatgttcatcatccttgccggggcggagagcgaggtgagccggggctctacctcccgcacgggtcgcctggccacctcctcttccagcttctggtggtggaaaccatcctccagctctgcggaggaggcgtcctccagccatgccggggaaggcgaactgttgctgcccagctaggatgcaacattccgtcctcctcgctttcgtggcgaggacgagagcgaggacctgccactggaggaagcttccccaccgtcgaggccgtcagcgccgcctacggaccggcctccggctctttggctttaatgtctgaggtcgttggcgagtcgcccggagcttgtcgccccgcaggctccccggtgtggagggaccctcggccgctcttcgatgagccgaagccgaaggcagcggtgtcagcacggacagaggcggagttggctcgaaaagaagacttggtcggccggagcctggccgggtcgtccactggcgggaccgacgccggagttgagttgtcgaggccacgggccgggctgatgtcctcgggggacagctggctgaggcttcagggtggccgaccgagccgtttgctcgagccggattcctggagaagaccctggcggcgatggcccaggcatggtgctgatgtcgtccttaggagtggagatcctccgaccgtgtcaccgtccgaggctaggccggacctcgccgaaggtgcagttgacgccgagggtgctgctgctcccttcaactgtcaagatccgagcctgcaggatcgggctatcttgtag

SEQ ID NO: 3735 - DNA, 330 bp, Zea mays
  Peptide Sequence Number=SeqID_47110
atgaccgcaaggaaccgcgccttcgcccgtgctctgcagctgggcccggccagtgagccctgcctcaggtatcttcggactcaagtcggtatcacagcagaccagaatattacgaaggttgatacagcgccgaaggtgaatagtacccccgtactgttcacgctgatctggcatttgcttttgcgtcacacctgtactttcatatacttccaagctgaaggtatgtccttcataaccttcgttcaaaagtcattatatcctaagggaaataatgttccgaaggacgaaggacattacaaattaacattttctgtgttgccttgttcttaa

SEQ ID NO: 3736 - DNA, 345 bp, Zea mays
  Peptide Sequence Number=SeqID_47111
atgactagtcatgattccccaaacttggcaagtgacattggcattgaaccacggactgcaacgagcaatgcgctcatggatgaagtgaaggttgatctcaacatgctttgtgcactggtactagacggggttgacagagaggtagacagtgttgacgtcgtcgtaatagacaagtgtgctcttgatgaggcggttgtgaagcatctggaggagctgacgcaaccagcttgcctcatccaccctattagtgacaacccgatactcagcctcgacactggagcgggagaccacatgctgacgcttagaggaccaagatatgaggttgcccccaaaaacatagcataa

SEQ ID NO: 3737 - DNA, 315 bp, Zea mays
  Peptide Sequence Number=SeqID_47112
atggcggagatgttccagtacattcaaagccttggcgccgcacaaggttttgctccaccacatccgttgttccctccagttgaccctactcagtttcatactcctgtccggagttccgatcccggcgcccgcctcgagctccgcttccgccccgaggacccctactgccatccagcctttggccagtcccgcgcctccactggccttctgctgcgcctctccaagcgcaaaggagctgcggcaccttgtgcccatgtggtcgctcgtgtccggactgcttactacttcgaagtgccatacctgaagtttttgtag

SEQ ID NO: 3738 - DNA, 849 bp, Zea mays
  Peptide Sequence Number=SeqID_47113
atggctgaaaggtaccaactcccacggagttgcgttcctccaacgacaaggcggaaggattgcgggtgtcccccatccgggggctcggaaggtggaaagacacgatgcataagggagcgtgaagacatggtcgcctttcaagggggtcatcctccttttaaaagcgactctccctacttgcgtccccagccgtcgtgggctaagtcttctccaacacgctccaaggtcctccccctacggcgcgggggttgggtcccatgcgtcatgcaagctggcccagagcagaagaagccaaaccgccgcgcgcgatgcatgcaaccgcccagatcagcgggcgaaagggcgggcagccatgcaggcggcatgcgaccgcgccaagtgggcgcgcccctccgacttccaacgcacctagcatgggggcccatgcccacgcgtcatgcaaccggcgcgccggtcgctacgtgcaagcaactgcaccgccgctcgcaccactaccacgcctcctcgactgcggaaccagtaccacgactcgaggcgaccctgcgtacgacccagcagtgccagcctggcgcgacggtcaatacgaccaaaaatgggccgacagtaatggcggtggcaggcgggcaggagcagcggtcacgtcgtcagccaagcttacgtcccatccagggacagcgagagaaacctctctcacggtgtgaagaaggcgcgcccgtgttccgttccttgaacggctcacgcacgcgcaacggccgccccgcgaaccactcgccccgtcgcattaactccgcggcgggacaggcggcgcctctggcaggggaagcgagcgacgcttcgccttcgccataa

SEQ ID NO: 3739 - DNA, 825 bp, Zea mays
  Peptide Sequence Number=SeqID_47114
atggatcccaacctcaaatccatgttcgaggagatgatgagattgatgcggacagaagtttccaaggaaatcgccaagggtttcgctgaccatgatgcaattctgaatcagagattcatcgatttatctgtggctgaggagaaccgcaacattcgcatcgaggccctggaggaagctgctaccgaatttgatcgatccttcactgcatggaagccggagatcgaatcttcgatgtctaacatccgcctggagatctccaaactcaacaagttcttcgagcatgatgcgcgcgtcaactccgcctcccagccgggcattctcggcaccgaatcggatccttcgcgacaacctgccggatcgcgcgctgatgggccaatcggccaccgcactgacagtcatacccgggatgatgagtctgggtccctcggaccccagacccatcacccggtcaaggaaggtctggctgcacgatggtttcaatccatgaagcgtaggctcactcatgcgccatgggatactttttgcactctccttatggatcgttttggtcatgacgagcatgaggaagaagagtttatttcaacaaagaagcctgagtacaagacacaagttgatcctttttattcagctaaatcagagtacaggccaacagctaaacctgtgtatccattgccttccccaccatctctagatgatcacaaagtgatggagtcagcgaagcctactcctactggaaacaaacttgatgccttaaaagcttacagaatggctaaaggtctctgcaaaatttgtgctgaaaagttgttcaagggtgtaacactatga

SEQ ID NO: 3740 - DNA, 279 bp, Zea mays
  Peptide Sequence Number=SeqID_47115
atgaggccctgtcaccgattcagtcgagaaggcttgaaggaccgcctcggcagaagagcttccgaacgtgaagacttgttcggccctcgtcctcggggagccgtattccaggtcagtgggcaagatggcctcggccccgtagaccaggaagaacggcgtgaaacccgtggctcggcttggcgttgtcctcaggctctagatcaccgaggggagttccttcatccatcgcttaccgaacttgttgaggtcgttgtaaatccggggcttgagcccttgtag

SEQ ID NO: 3741 - DNA, 354 bp, Zea mays
  Peptide Sequence Number=SeqID_47116
atggcgcctcctgttgacgtggctggtctgcgccctaggttgggcgatgtggaagctcctccgaagccgaggttgagtctgtcttctgtggctgaggtcgagtccgagcccctgggtcgggcgaggcggaagccgtcggctgaggccagggcggagtccaagccctggggtcggctttatgctgatgggggttaccagctgagaattaggagccttgagggtacccctaattatggtccccgacacgaagtgaccgataaaggcaaaggcaaaggcaaaaacatcgtcattggcgatcctcgcacgtcgaatatatcacaagacgagattgctcggaaagcttcggacagatag

SEQ ID NO: 3742 - DNA, 60 bp, Zea mays
  Peptide Sequence Number=SeqID_47117
atggcggacggtggcgacgcgtctctggtgtgcgcgtggtgcgaggttttaatattttga

SEQ ID NO: 3743 - DNA, 737 bp, Zea mays
  Peptide Sequence Number=SeqID_47118
acaacgagcaatctgtgtttcccgaggaggttgcagaggaagtccctgatcagcagtttggtgaaggcaaaggaactagaggtgtagttgcttcgccgtcgtgccgtcaatggggtccaggcacagtgcttgctctgccgaggctgagtgccgagctacgtagtgataccctgccggaccacctaggtagtggtcaatggggattagctctccccgggcagaaagggaatcatgactcatgggtaaaatggttcgagatacaaggattatgttatggttttggttcgactatgatggtgttgttccttaatgaggaaatggagaaggcgaagccgtggaaggagacttccaggagttccaagactacgacgaattctaggtgtgggttggcggcaacccccacgcccacgatcgtcaaaactgaaaccgccctgctcgcccctcgctcacgcagcaaccgtgcctgcgtccgtgtggctgtccagcgcgcttgcccgtggcacctcgctgtaccggagaagcccgcgctgaacgccgccacgccggctcttcaccgcactgagctcgccctgccacgccggagcaccaccatccaagcctcgtttcaagtccgcgcgggcgagctcatcgcaggctcgctcttgcaggcgttgcctctggtcgtggctcccggtaaagaagaaggcgtcgaggtggatctccaggagttccaggacgttgatgagttcgaggattag

SEQ ID NO: 3744 - DNA, 1260 bp, Zea mays
  Peptide Sequence Number=SeqID_47119
atggctctagagcgttcggttgggtattcgggtagagtggaagcggcaagggctacgcttgatcaggtcagagtggaagacatagacactaatgtagctgtcctacaggatttaatagttcaggtgaatctgaaactaaaactgtggcacatggcagaatctaaacttcccattgaattattgtaccaaatagcagtgcatattttcagcatgtgtcatccaggaaatagacaaaaggttgctcgctttggctgggtgggaagagcccttcaagtcttatgtcttcttgttatgtttcctctacatggcttacagaatttcctattcagcactagggaagagcattctcctatgaagataattgattttggtctctcagactttataagaccagtatttcttgctgctgatcagtgccctataggctatagcttgaagatggttgaactggaactattacgtttcctttgtgagaggattgttaagagagaaaaagtgaagaaaatcctattcagcactagggaagagcattctcctatgaagataattgattttggtctctcagattttataagaccagatgaaaggcttaatgacattgttggaagtgcatactatgttgctccagaagtcttgcataggtcatatagcacaaaagcagacatgtggagcattggtgttatcacttatatattgctgtgtggtagcaggccattctgggcacgaactgaatcagtagttgggagaggtgatctttgcatgagtccagtagaatttgaaccttctgtaagtgaagatttagtactggagaagaaatatgaaaatgggcagcatgatgtcagaggcacacatcatcacagaaccagcatgaaacctgaaaaaccaattgacttgcttaggaaagttgatggcgataatatgtgtgctgactgtggtgcttcagaacctgattgggcatcattataccttggcgcacttctatgcatagagtgttctgaggtgcacagaaatcttggagtgcatatatcaaaggtaacaaactctcaacattgtttcttttgcagtgctgatggatcagacacatcacagtacctctctgttagcaagcctaaacacaaagatgtattctctgccaaggagaagtttattcatgccaaggattccggctctcatcaagtgactcctccccctcacgctgactttgcgaacagatgtctcaattctagtggtggagctacgaacaacaatccgatgttctga

SEQ ID NO: 3745 - DNA, 393 bp, Zea mays
  Peptide Sequence Number=SeqID_47120
atggacctgtggaggagagcaggcgccgccgcgccggtgtgcggcgtcgccgacgtgtcgtgcacatcacctacaaggaggcctacaaagaagctttttgttaatgacgttgataagaaggatggaggggctgactgtgctgcagccaaagctaggcttattaggaagagtgatactgctttggccatgtcttcttccacatgtgcagtgagctatgtaattgacccaaaaggcacttcaagcgggcaggaaagtctaaggcccttactaagtacttccaattggtgcataaggctgcaacactgcctagtggagggtgttctggacaaagaaagcttgtaccttaaaacaggaggatacaagaagctggagtggttgtctgaagacttttga

SEQ ID NO: 3746 - DNA, 102 bp, Zea mays
  Peptide Sequence Number=SeqID_47121
atggccggcggcgtgaaaccggacgcgcagatcaccggcagcgagctctacaactttgctatattgactttgagcaaaaacttcaagaatcctgagatttag

SEQ ID NO: 3747 - DNA, 879 bp, Zea mays
  Peptide Sequence Number=SeqID_47122
atggccgtgatgggttcaacatcagaaaaagatgtacctctgtcagggttgtctgaggtccgatggacaaggacaactgtaggtgggcctaatgacttgggaggttctgtcacagctgatatgccgttgcgcacaaggaaatccgcgcgcaagtccactgggccgattggcgtgcctcgccatcatctagctccaaggcatgaggatagcagcagccgcagcaatgatcccattggagatctagaagctcaggtggagcaacttcgaacggaattacgtcatagaaacagtgtgtgggtcgaggatggtcagcgcataaatgaattaagaactgacatccgacctctgcaagacaagcttgccaaacgagatttggcactcgactgggccgtcaactcatattccattgcttgggaccgagatgccaaagctcgagcccatgtggaggagcttagcacgaccgttgataacttgcagaccctgtcagaatgggagctggcccttctggaacagcagatgtcatctcgaactcgtgcacatgacggcgcgggaacataccgtggtcaagatgatacacccaatccaccactggtaccgcccacgctggccgaggctatcgccgccttggtcaccgcgactgctgacaacacccacttcctatgtgaaatggtgggacagcaacttcaacaacaaggcaggagagcttatccgcaaggaccccgcaaaacttcgcatttggatttattggaaacttgtcccccactattcgtcaaagctgaagatcccctcgaagctgacgaatggattcaggttattgagcagaagtttggactcatccgatgcacggagacccagaagccattatttgcggctcagtag

SEQ ID NO: 3748 - DNA, 543 bp, Zea mays
  Peptide Sequence Number=SeqID_47123
atgtcagtcagtgagtaccgagacaggtttctgcagctgtctcgctatgctcctaaaggtttcaacacagatgccaagagagaagaagtgcaaggagatggaggatcacaagcgcaagattggtggacctcagcctgggagcaacaatcgcccccgtttctcaggcaacccacctcaacaattcaagtagaatcagcgcccgcctcagcagcagttttagaggcagtacccttagcatcagcagcagtatcgctagaacagtcacacaggaggaagtcagttccagaggcagaatcagcaggcacctcgtcttcctgccccagcaaccaaccagagcagtcaagcagccccagtgcaaggaggacgcagagcatgtttctattgtggagagcaaggccgttgggcaatgcattgtccaaagaaggtagctcagcagtagtcaggccccagtacccaagcaaagcagaatgtgtctcagccaggagcaggcaatcgcatccagacacgttacaaccatgggagactaaaccatttggaggctga

SEQ ID NO: 3749 - DNA, 75 bp, Zea mays
  Peptide Sequence Number=SeqID_47124
atggcgggcggtgcggagctcgccggagttggggttttgctcggggaagtgaggcgggttttcaaatcctcataa

SEQ ID NO: 3750 - DNA, 1461 bp, Zea mays
  Peptide Sequence Number=SeqID_47125
atgaacacgctactgcatgtcaagttcctgaagaccatgtaccggctggtcgtcaataacttggtcgccatcgtcgtcttcgccgccaccgccggcgtggtcgcgaggacaagccctgaggaggtacaggcgcgggcgcgcgagatccggccggtccactgcctgctggccctgctccttgccgctgccgtcgccaagctgcgtcgcgtgggccggcccaaggacgtgtacctcgtggagtacggctgcttccggcccaagccctggttccgggcgcctttcgcgacgtgcctggagcacgcgcacctgatgccgtacctggtggacgaggagagcgtcagcttcgccatccgcctgctcgaacgctccgggctcggcgaggagacctgcgttccggatgcgtaccactacatgccgccagaccgcagcctcagcgcctcccgcgacgagaccgagttggtcatcttctccgccgtggacgaggtgttcgccaggacgagcgttaaggccgaggagatcgacgtgctcatcgtcaactgcagcatcttcacgcccacgccggtgttcgccgacatggtcgtcaacaggtacaagcttcgccccgacgtgcagaacgtcaacctgtccgggatggggtgcagcgcggggctcgtctccgtcggcctcgccaagaacctcctgcagacggcacggccgggcacgcacgtcctcatcgtctccacggagatcctctcgtcgcagtactacgtcggcacggagcgcgccatgctgctgcccaactgcctcttccgcatgggcgctgcggccatgatcctttccaactccccggagcgcgcgcggtacaggctcacccgcctggtgcgcaccgtgacggccgctcgggacgccgactaccggtgtgtgttccaggaggaggacgacaagggcaacaccgggatccgcctctccaaggacctcgccgccaccgccggccacgcgctcaagagcaacatcgccgccttcggacccctcgtcctaccagcctcggagcagctcctcgtcgcgctgtccttcctcaagcggaagctcctgctcctcagaggccgcgccaaggtgaggctctaccgtccggacttccgcacggcgttcgagcacatctgcatccacgcaggcggccgcggggtgatcgacgaggttcagcatggcctcggcctgtccgacgaggacgtggaggcgtcgcggatgacgctgcacaggttcgggaacacgtccagcagctccgtgctctacgaactggcctacatcgaggccaagggggcgatgaaaaagggcgaccggatttggatgatctccttcggcgccggcttcgactgcaacagtgttgcgtgggagtgcgtcaagccgccagccgacgccgacgggccgtgggtcgacaccatccaccgctacccggtgcagctcccagaaattgtcaacaaataa

SEQ ID NO: 3751 - DNA, 1041 bp, Zea mays
  Peptide Sequence Number=SeqID_47126
atggctgaaaggtaccaacttccgcgaagttgcgttccaccaacgacaaggcagaagaactgcgagtgtcccccatccgggggcttggaaggtggaaagacgcgatgcataagggagcgcgaagacatggcgggcggaagcagcgttcaagtcgtcagccaagctcacgtcccctccagggacagcgagagaactctctcccacggcgtgaagacggccgagcggcacctttggtgggcgaagcaggcgacgcttcgtttccaccataatgaccgcgtcaaaaaagggaccgagaaaggggataccccgaaagggatccttctccgcgaaggaaacgggccccgagcccccctactgatcagaggttcgaaggctggcccctcggaggggttcaacagccgcctcagagcgctcgggctccgcgcccactactggtcagaggttcgaaggtcggcccctcggaagggttcaacggccgcctcaggccacttgggctccgcgcccattactgatcaggggttcgtaggctggccctcgaagggttcgacagccgcctcagacgcagagcgagggatgaccctggcggccaagtccggcctcgggtgccataggaagctccgcctcgcccgatcccagggcttggactcgggcttagccccggaagacgacgaactccgcctcgcccgatcccagggctcggactcgggctcagccccggaagacgacgaactccgcctcgcccgatcccagggctcggactcgggctcggccccggaagacgacgaactccgcctcgcccgaccccagggctcggactcagccctggcctcagccgacggtctccgcctcgcccgacccaggggctcggactcgacctcggcctcggaagacagactcgacctcgacctcggaggagcctccgcctcgcccaacctagggctcggaccgaccacgtcacaggaggcgccatcattgccctaccccaagctaactcaggctacggggaacaagaccggcgtcccatctggctcgccccagtaa

SEQ ID NO: 3752 - DNA, 225 bp, Zea mays
  Peptide Sequence Number=SeqID_47127
atggggaagcctgtccgatcactcctcatgctcctcctcatccgagtgaccgcacttgtacccaccataaccggaatgggagaccacgtctcagatcacgtgaggggtaaagtctgcgggcaggttcactcaggccacgcatccccatggacccgtgtccacagaccattatcattccgttatcaaaatggatacaaccaattcctgacctcgcgtgagtgctag

SEQ ID NO: 3753 - DNA, 2673 bp, Zea mays
  Peptide Sequence Number=SeqID_47128
atgccgtcttcctcctcgtctgctgcgaccacgccgacgatccaggcgtcttctgaagatctctcgtgcactgtggcggcggcggaattacgaccgggtgatacagtggaattcggtgtttcgcggatgtcgttggtccgagtgcaagatatgcaacggttggggtattttggcggcggggttggtcgggtcccgggggcggaggaggtccctgagcccgagggcgagttggttgtttttgaggcatttttcatcgccgtccttcgcctgcctgcacatcgttttgtgtcggaggttctgcagaagttcgaagtccaggctgaagtcgaagatcacccagggctccctgccgccattatgtgttctcattattatgtggcgtacccgccgtttgaagtggcggaggatgatgaaaatgagagggcccttcggattgctgcccgcatgagtagtgggcgcgatctggttgagcaattcataggatatggggtgtggcccttggcgcatggatgggtgctgggcgaagtgtgccctcgcaagataccctccctgggtggacggaagggtcttcgagttgaattgtttgccgtatggtggttatcccggggaggacgtcgccgaccgccgcgggaaaaaccggcggctgtgactgaggacgaccccgcgccggaggctgccccatccactaaaaagaggaagctaggtactgtggtgggagaactgggggtctccgatagctttgctatggagttgatggggacatgcgcggcccccaggggaaggatgtcttcgcccgagctccgggagtcttcggcgcggatgtgggaggttaccgggggtcgatggcccaagcacgttcctatcccccatgcggctggcgaagacttttttacgtctcgcatggctcgtgacttgagagtgtttccttacagacagaatattgctgctattgtgtcggcagtgatgaacaaggatcgccaggatgctgcgcaaaagcgccaggcggtcatcaggctccccgaagctaggccgaagagggtgcgggggactgtgaagggtaccgtccccgtcggtagccagccgacgctggctgcgaagtcggccgcccctgggtccagcaaggtgccggagagcgcgaaggcggtcggcgccggcggaaccaagtctgccccagacagagctgcgaaggtccgggaactgccttcgctggggaaacgcgttgccgactttggcacaaatattagcgtggacgactatctcgttggatcgggcgaggggcaacttgttgttgtcccgcctgcggtggcaaccacgacgtctaccgcggtgcttggggtgaagggtagcgctggcggcgagatttcagcggccactgccgtcaaggacgaagcgggcgctatgtcccaccggctgagggaggcgtcgcagcagctgtcgcagcagctgagtcaagcggccgacttcgccgaccgcgtggtgtcgggtgcccttactgatgatgtgtctgccgaagtcgagagacttcgggcgcagcacgctgacgccgtccgggagaagtcggctgcggatagcaagagccgcaagctggcggagaaggtggccgccctggagggcgagaggacggacctccagcgccagctggtggaggagaggagggaggccaaccaggccatcgccaaggcgcaggcggcgcaggcggaggccaaattggcgtgggtggaggggagtctcgccagccagcgtgccgaggaatgggaggtgcggttcaacgctctgcaggcccgcatggagagggtcgaggcctctacgtgctcggaagttgagcggacacgcaaacagctcgtggactcataccgtgagctgggtgcgcggactgctgacttcgaggtgcccgaccgagaggcgggccttcgcttcctcgagtggctgcaagaggaattgttggcgctcccgaccatcatggagggattcatgtcctttgcctccctcgtcacctgcaaaggggctatgaacgcactgtcccgcgaggggtgcagtcactatgagggcttcgaccgatccgatgaagactttgggcgcgagatttttaaggttgaagaccctatggtgaaggactccacgggggccctcttcgaccggatgtggggcccctatggtcgggaggtggttagggagcggtctgaccgggcgagggatcagatggcacgtgccgaggacgtggaggacttcagacctctgaacagcgcacagcccgaagctgaggtcaacccggtggtggctgaggctgaggttcaggattttgggcctgcgcacgcaaccgctactgctaattttgtggcggcttcgaccgtggtcgctggaaatgaatcgaatgagtctacgtctaagttttctgagtttgatgactctgggagttcggttatgtggatggaagagtcttcggatgaggacttggattactttgcggccttggatgtggctgcggcggaggcttctccgtgtgttacggatgctgaagttttgcctggtccgagtgatgggcgtagacggcgaagggcggtggcgaagcgtagaaattctgaaattcagaccttgagccaaagatcagggatgttcaccttgatccctaactcgaatcctaatggccccattgacaaaattgtgtctaactaa

SEQ ID NO: 3754 - DNA, 756 bp, Zea mays
  Peptide Sequence Number=SeqID_47129
atgcctaaggtgtgtgaaggagatgcttcggatgctgagcctggctggttaggatttggtataagtatagatttcaagatgagtttggagaacccagtgatggttgactatattatgttgaacaagtctgaagccgaggctctacaacaggccttcggggcccgaaagaggcatcaactaaatcgtgtctttgatgccattgggttcttctatactgactatcccatcatggttcaggattcgaagaaaaggaagaagaaagtgaccacaaggcgaatcaagattccgaaggtccacgctagatcaattcctcaagcttcagaggaaatctcggctgcacccgaagccaagactgctacagcggtgactccttcggtagccatagcagccaaagacaagggttcctccaagcctgccctggcaaaggagaaagggaaagggcctgctgaagtggaagaggccaaaaatactatcaaagatgacacaccgcttggtgaagggcccttcgaccaagtcctaggtggccaaaggtatcaagttcaccacgccgcagggaaggtaatgggcgcaaagcagctgggcgaagccgttggctttgccgaacaacttgggtactcttcggggtccactattttttggggcaggcaagatgattatctgtattgctaccctgacaacatggagatagaagtgtgccactatatggtcgacaatgttggatttctgaagctggaagcgaagctaaatcgccgataa

SEQ ID NO: 3755 - DNA, 750 bp, Zea mays
  Peptide Sequence Number=SeqID_47130
atgtggaagctcctccgaagccgaggtcgagtctgtcttccgtggccgaggtcgagtccgagcccctgggtcgggcgaggcggagaccgtcggctgaggccagggcggagtccgagccctgggtcggcgaagcggagttcgtcgtcttctggggctgagcccaagtctgagccctgggtcgggcggagcggagttcgccgtcttccgggacttagcccgagtccgagccctgagtcgggcggagcggagttcgccgtcttccgggacttagctcgagtccgagccctgggtcgggcagagcggagttcgccgtcttccggggctgagcccaagtccgagccctgggtcgggcggaacggagttcgccgtcttccgggacttagcccgagtctgagccctgggtcgggcggagcggagttcgccgtcttccgggacttagcccgagtccgagccctgggtcgagcggggcggagtttcctatggtgcctgcggccggacctgactgcctgtcagcctcactctatcaagtggcaccgcagtcggagcggcgcaggcggcgctgtctttctgtcaggccggagatctaacatgaagagcattaacacatggcataaaactccaaaggactacctttttactactgaaggacctaaggcgcttatgtgcatatctttccggattgttcttcaatttcaacaaggaccaacttatgaacgctactcgcttccaataattattgggctgcgataa

SEQ ID NO: 3756 - DNA, 252 bp, Zea mays
  Peptide Sequence Number=SeqID_47131
atgacgcatctcttcagcggtttcgtcaatcttcttctgaagttgttcctcctgaagagtcgggctggtggcctttctcttttggctcctggcctctcgcaaggagagtgtttgttgatttgtgtccaatgcaaagaggcctatatcctgaaggtgaagcttcatgtaatagcttatgctaaaagcaaatggttaattatgtttttgaggaccttcggaaggagaaggcccccaactatgattgagccctag

SEQ ID NO: 3757 - DNA, 2556 bp, Zea mays
  Peptide Sequence Number=SeqID_47132
atggcaagtgtggcggataaacttgcgtattttagaataaaggagctcaaagatatcttaaatcagctggggttaccgaagcaaggaaagaagcagggtgagctagtcatctgcccgtacatcattgttgggtctgtctcctgtcgtgctgaccttgttgacagggtattggctattttatcagatgagcaaggtcaacatcatcatggatggggaaggaaaaatgctcttacaagggaggcggtggcaaaagttgttgatgacacatacaggcccaaagaggaagcgcctgacttctaccatgtggatactaaggtccgctgcctttgcaatagcacattgctaaatgacaatatgattaaggtattaaatttgatcccaaaggaaggtgaaggggagtcttttgaggatgctcttgctcgtgttcgtcgctgtcttggaggtggaggtgctacggacaatgctgatagtgatagcgacctggaagtgaatagcggatccagaatgaggattgctggaaggttcaagccttgtgttcacatgggctgttttgatcttgaaacttttgtggaattgaatcaacgctcacgcaagttgcacaattgcagtgaagatgttaatgagcttgatgttaaacctgatgggtcatggcgtgtgaagggtgatgccgctaccagagatctatctcagtggcatatgcctgatggtactctttgtgactcaaaggaagatacaaaccctggtgtcgttagtgttaatgagttcaagagagagggtacttctgatggacatagaactttgaaacttggaattaaaaaaacccctaatggattatggcaggttagcagtaaaccagatgataagaaacccgtggttagaaatcacatccaaaacaacacggggtactcaataccaaacatagtacctatgatcagtagccccactgggagttgcagagatggtgaagatgtaagtgtgaaccaagaagggggtggtattcagtttgatatatcattgaaccaagagtttgacagttttgcgcataactttggtcaaacatacaatacagaggataggcaacaagagccacaacataatgctgcagatgtcattgttcttagtgattctgatgaagaaaatgacccgattgttcgcctgccagctgtctatgcaaatactcctacaaatggtgacagtttccctttcgtcactgatgctgctgtatctggatatcctgaagggtaccaggaggatgctggggttggtacaagtggccttggtttattgagcaacaatactggtgattttgaaataaataactggcaaatgcattcttatccacaaccagagcaagggttccagttttttgggactgatactgatgttggcaatccttttgttggtccgcataattcctttagtattacaccagaagactactcccttgactgtaatgttggcatagaggatccatctgcagctcacgatgtctcaatttgccgaaacagtaatgatgtgcatggaagcttggttgataacccattggctttagcaggtgacgatccatctttgcaaattttccttccaagtcaaccttctactgttccccttcaggaagaactgagtgagcgcgctaatactccaaatggagtccaccctgatgattggaggatatctcttacgcttgcggctggtggagggggtaatgaagaacctacaagtgttgatggcctaaaatcacagccaaaagttccatcaaaagaggcaggagttgaacctttacttgatgctgctggtaacccccatcagcacaaaattgtaaaggcgggggccataattaggggtaccctcaagactcctaattctcagctgggctcggactcagccctcgcctccgccgacggtctccgcctcgcccgacctagggctcggactcgggctcagccccggaagacggcgaactccgctccgcccgacctagggctcggactcgggctcagccccggaagacggcgaactccgctccgcccgacccagggctcggactcagccctcgcctccgccgacggtctccgcctcgcccgacctaggggctcggactcgacctcggcctcggaagacagactcgacctcgacctcggaggagcctccacatcgcccaacctagggcgcggaccggccacatcaacaggaggcaccatcattaccctaccccaagccgactcaggctacgggaaacaagaccggccccttacggaagcaagaggacgtcagcaaggactcaacagctccgacagctgtccttccgccaggcttcagcgctcctccgacggccacgacaccacacgaaccgggtgccaaaacctctccggctgccacgatggcatggccctcttacagagggttggcccgcgcggggaagaggatgggactggcgctcgcggaccccccggtctcgaaacgccgacagttggcacgccaggtaggggcctgctgcgtgttgacgaacagcttcccgtcaagctccagatgggcagtctccagcaacctttctag

SEQ ID NO: 3758 - DNA, 843 bp, Zea mays
  Peptide Sequence Number=SeqID_47133
atggggagcacccgcattgccttcgtcttgctgctgttggaggagcgcgacctcgtgggggttggcgcccttcagccatcgcttggcttcaaggattttcatcatgcagtcgtgctgcattccctcaccaatgcttcaaggatgttcatcatccaggatggggagggggcgcaccgagttgggccctgcctccgcgtgggttggcgaccggcgttcgggggagaggggcatcctccaactgtgtggaggaggcgtcctccagccatgcaggggaaggtgaactgctactgcttggacagggtgcagctgtccgtcctccagcccgagcagcggtcgtgccgtgcgcgggccggctacgtccaggccctccctacgctgtcggctgcacagcacgtcgtacgccgcgagggcggtactcgtgttctgggacggtctcgttctcgttcttgtagcgagaacgggagtgaggacctgccggtgcgctttggggcggccgctgcttgctggtgcggtgttggtgggcaggtggctgctgtcgtcggtgctgaggtggtggttgccataggtgaggctgcttctgctgaagcggttgcccccgctgacgagaccgtcagtgccacctgcgctctgggcctccggctctttggctttaatgactggttcttgtcccccatgaggggaccggtcgccgacgagccacctggagtttgttgtcccgcaggacctctgaaccttcggccgctctgcgatgagctggagccggaggcaacggcgtcagcgtggacagaggcggagtcggctcaaaaagaggcttcgtcggcccgggagcatgtggcttcctag

SEQ ID NO: 3759 - DNA, 462 bp, Zea mays
  Peptide Sequence Number=SeqID_47134
atgcaggtggcgtgcaaccgcaccgcggtggcgcaccccttcggcttcgtcgcatccggcatggaggcccaggcccacacgtcatccgccccagagcactcgggctccgtgcccactactgatcaggggttcgaaggatggcccctcagaagggttcgacagccgccccaaagcactcgggctccgcgcccactactgatcaggggttcgaaggctggcccctcggaagggttcgacagccgccccagaacacgcagagtgagggatgactctgggtacgtcagttacatggctgaggctcgagctacgcttccgagtcacttcgccctttcactgaccgatctgacaggaaaacagcgccgctcaccccgctccgactgctgtgccagccacccgggcaaggctgacaacagcaacttcagcctcgggcgcaacaggaagctccgcctcgtccgaccttag

SEQ ID NO: 3760 - DNA, 603 bp, Zea mays
  Peptide Sequence Number=SeqID_47135
atgggcatcacggggatgtgcgggcgggcatcgcgtggaggttatggccagggcgggtatcggttgggggtggagatcagggccaaggagggcgggatgcggtggcatggtagcgtgtgtggattggaggagcgcgggcaaggatggaaggggcgggctaggacgggcgcgacggctatgctcggctgcggcctcctcctcctccgtctacggcctcaacgaccgcgtcccttctcggggctcagggggcgggggcatcgcgggaggtcgcgggcggggcacggagcctgggatccggggccgccccacccaccgccctcgccgatccgccatcaacaccgatcccgtcgatggaaggtgaacggggcggccacgttgacggcggggagcagagatcgaggagcgttgatggcggggagcgtagattgcggatcgaggatctcggatcgagggtgcgtcggccgcgctgctagggctccggttcgcaggattggcgtggatggcggctctgcgtcgcatggatggcagggagcagaggggcggtgggtgggcagagggaaccggcagaacaagcacctgtgcacgcctacactacacaattaa

SEQ ID NO: 3761 - DNA, 96 bp, Zea mays
  Peptide Sequence Number=SeqID_47136
atggctccaacacgtgatctcctcctatttctgttcagtctcctgctcatgtcatttaagttgaattgttgcaagtacacgctactcagtttctga

SEQ ID NO: 3762 - DNA, 465 bp, Zea mays
  Peptide Sequence Number=SeqID_47137
atgcaggaagagaatggctcgtacctgttgggagcgccaagccgctccaccgccgtcgtcgtagccatcgcggtggacgccctcttcaccatggagagctgtgaagccaggggaagggatggagaaaggaggaaatatcaggaggaaagggtgagaaaggtggagagctgttgttgggctgctcacccgcccgagatttctcttggcttcacgctgttggccggagccccggcaccagacctcgcccagtgcccgggccgccgcataggggtggaaacgagccaagccgagctcggctcggctcggctcgttgcggctcgttcacgcaacgagctcggctcggctcggctcgctcatccggcgagctcggaaaagcggctcggctcggctcgctctaggctcgcgagccggctcgccgagccaacgagcccaactataaatttaaatctgttctctaaattataa

SEQ ID NO: 3763 - DNA, 552 bp, Zea mays
  Peptide Sequence Number=SeqID_47138
atgaacgggctcgccaaggacgtgccgacggtgaacgggatgcacgaggagcccacgaccgcacatcccagattgctcatgcagcccactgtgcatctgaaaagcctgtcaccggtggatgcaagtgctgggagggaggacgtggagacgctggcgcaatgccagcggatgattgcgtgcggggagtggctaccgctggccgtggcctatgaccacgtggaagggtccaccatggaggccggtgggatgcaggtgcttgttgatcagaagttggagcacaagatgctggacaatttcttctctgtgttgtcatgtgttatcttcgtgcccttctacacgggattcctccctctcctgttctggagtggacacggcaggctggctaggcagatgaccctcctcatggctttctatgactacctcggcaactctgtcaaggttttgccatctgcttgtatacaattgaaggatatggtgtcagcccctcggccatgctctctgcccattagaagagtgacaactatagaagatgagaaggaaaatgccatataa

SEQ ID NO: 3764 - DNA, 1404 bp, Zea mays
  Peptide Sequence Number=SeqID_47139
atgaagcaagtggaccgtcctccaaataaccccaagcgcataacaattcagtcaagccaggagtgtttcagtgttgacattccctctgcagaacagcctaatccatgtctagaagttgaaaaccctccaaatgttgacagtgaaaatttgaccaatgaaacagttcagattgattctgatgaagatgacttcatgccagctctgaagaagcgtaatgtttctgaaggccacacaagagtgttaagaaaagtcgtgacaaagaggattaaacatgaggagctaccccgacagaggcttaatgtgaggtgcaaccctcaagatgtcattgcaagcattaacattttgaacgaaagacaacgtgaggctataagacgtaaaggaaaggaactcaagatcacaaaggacattgttcatcttatccttggcgtgcctaatcatggcggtggtaaacctttgggtattgacgaagcagttgcagcaagcaacttgagggcagagcttggtgtggccaaagatgagttcaatgtgacatttctacaggatcgtttaaggaaaggcgaggatgatgacctttcaatcagatccgctgccccccaaaataagactggcacaccttgtattaaattttttgataagaatagcataaaagctttgaccaaagctgacaagaggaagccggagtgcaggaccaatatttttgatgcaccgcgccctgcccccatgcctcggccaacttttaacatcaaacttccatctatcaaagagatgatgtcaagtaagatcaacgatctcccacatcgtcatcgatctaaattcacagatattcttgctgcatatgacttggaggttgacaagtcatgcgtagccataaaagacagcattgacaaaattattgagaagcaatattacatagcagacaagtttatagaattgatagatgaggtactacgtgccgagtctgaaaatttggaaaacgagactgatgagccacagcaacaggggaattcggctgattcagcagatcaacagagaggtgaaatggcaacagaggaaatggaacacaatgacagtgggccagtttttgaccagaccccaactcctcatgatgatacactgaaaggtactacaaactctggatctgatccaccccttacagagcaagagtgtgttcgttctctgtgggacttaatttgttccaaggacattgaccaaagcagggttgttatagattacggtgaatacggtgcaaactgtatggatatttatgaatctttcgcggagggcaaatgtcttgagaatgtcttcatgcagtgtttcattgaaacaattcccgagacctacgtgctcatgcccttcatcaactcacattccatcgcatcaacaaggcgttgccacttccattag

SEQ ID NO: 3765 - DNA, 672 bp, Zea mays
  Peptide Sequence Number=SeqID_47140
atggcgctctctctctctctctcttcctcagctcgctctcgtgcttccctctctccctggacgcacgcgcagtgttccgtcgtccctcgccgtgccgagttcgcctctgcgcgcagctccccatgctccatggtcgactcccagcgacttggcgctgcccccgttggtcgcctcggtgtgaaatcgccgtcgcgtccaggattttggcatgtctcatcacgccgtcatcccaagagccgcattagacttaccgtgtatgatgttcaccaagtgctcgacaaaaggttcgaacgagttgtactgccattgtcttcgtcgaatgaaaaatcgtcgcgctggcacgtcgatgtcgtcgatcaccatcctcctctacgccaagccccaagccgtgaggacgctcttgtgctggccacgcgtcaccagctcgacaaaaaggaatccatgggtatttggtcaagaatagaaactgtgtgcttcgctcgtcagacgtgtgtgattaaagacgtcaaccgaaaaccatcgtcgtgcttccgactatcgcgtcgaattagtcatggtacattaattgatcgcgtgatgcggaagacgagccaagttgacctcaagatggtgctaggagtggacatctccgcaagacgacgtcgtcagtcggacgaacctgaagatggataa

SEQ ID NO: 3766 - DNA, 399 bp, Zea mays
  Peptide Sequence Number=SeqID_47141
atggatgtgtatgggtatacagacatgggaatactgagaagtgtaatgtacactaacctcaaaaacatatgtgtagttgaccaactagcaaaataccgtgagagtcataagtatgccaccgatatagaacgctatttccacattatgttggcaaaatgtgtgagggtgaataggacgagcatgcatcctaattgttgcatcttgtttctcacctgtgcacgaaaaagctattctcacctttattctagtagtcggaaccttcagactcgggatgaagttgtacacaatatggaaagtagggtcagaacgaaggttgaaccagcgccgaagctgtgcgcaaggaagcttcggcttaatagcagaaaaaggaaccgacttaagaaggaaaaggctatttag

SEQ ID NO: 3767 - DNA, 144 bp, Zea mays
  Peptide Sequence Number=SeqID_47142
atggtgggtacaagtgcaatcactgcacggcggcagccggggtcagtggagcattgtttaccttgcaaggataaaaaccagattcgaatcgtctgcttctcgcagctaatgagactgcttgaccccttgtactacattgagtaa

SEQ ID NO: 3768 - DNA, 324 bp, Zea mays
  Peptide Sequence Number=SeqID_47143
atgggaagaagaacactgccatacctgctcctttctaccctgacgtcctcttcattcaggggagattggagtcatcgtccatctccgacgatgatcctactaggtagggggaggaacctccctagtgtgatgcccggcgacggagaaacagacgccgaaatgtgtggcgacatcatgaagccggaggacgggattcggcgcaacctgtatctcgggacgaagcctcggaagtgggggaaactcccgatgaacgagaacaccgagaaagacgcaactcccgtcgccgcgatcgccgataggctcaggagtgagagcgagaactag

SEQ ID NO: 3769 - DNA, 72 bp, Zea mays
  Peptide Sequence Number=SeqID_47144
atggggaagcctgtcccatcactcctcatgctcctcctcagccgagtacaatggatcaaacagtctcattag

SEQ ID NO: 3770 - DNA, 984 bp, Zea mays
  Peptide Sequence Number=SeqID_47145
atgccgcgcgctgctagggcggcgttcgtgttctggggtggccctgcttttgcaccaggatggcggcctccggcagaggccggcgacccactcgcctgggaggatttgagtggggatctgccgggaggccggtggcccccgccatcagcgccgaggcggaggcggctcgagaagtccccgtcgccgacgggatcactgccaccatccgcgccccgggcctccggttcttcgtacttgtcctcgcccctcgagcgtcggcgtgggcgagggcaagattgcagcagcgcccaccctgaggcctgcgctgctgtggctcggccatcgggagcgggggtcgttgtcgtcgtaattagaatgggcggcggcgagccgctcgtcagtcttctgttgctccgcaggccttccccatggagtggggttgttcgtacctgcggaggggggaaccggagttccgtttgtaacggcacttcgaatgccgggaccccttggccgctcttcgatgagccgaggccaggggtagcgatatcagtacgaacagaggcggagttggctcgaaaatgggaacctggttggccggagccgagccgggttgcccatcagcggggctcgtcgtcggagtcgatgacccgaggcctcgggtcgggctggcgcccttggaagatgcttggccgaggccccaggggtaactggccgagccgcctgctcgggccggattcccggaggagtccctggaccgcgtcgccgcccgaggctgggtcggaccttgctgaaggcgtcgtcgatgccgagggtgctacagcccccttcagcgtgaagacccgagcctgcaggatcagattgtcttgtagctcgaagcaccaggtcgccaacctggaagtctcggggccggacccctcgggcgtggtagcgtcgaagggactgctggccctcgtcctcggggagccgtattccaggtcagtgggcaagatagcttcggccccgtag

SEQ ID NO: 3771 - DNA, 273 bp, Zea mays
  Peptide Sequence Number=SeqID_47146
atggctcaccggattgctcggtctacgcgtgtaggcgggcggccaaagtccggcgaggacgatcttggcttttcggtgaagttctgccgggtccaagagcatgggaagcttcacaagctcttggcgaagctatccgagcagctggcatggcttggaagcgactggagtgggctggccacggtggccgaggctcgagtggtgtcgccggagctaaggaggggcgtctggccggcgaagaaatacagagctccaaagtcagccccattcaactga

SEQ ID NO: 3772 - DNA, 492 bp, Zea mays
  Peptide Sequence Number=SeqID_47147
atggcccgcgcccgcgcctataaagcacccagggacttcgaccgtacccctccgcacgcgctcgacttcaccggagcccaaaaccaccggcgtttgcccgtgcacggcttgcccgcggccgcccgattcctccgccaccatagaccggccaacagaacccttcccaaccccgttcgaccctcggagaagactgtgcacacctcggtgaagctccccgagcgaggaatcggagtttgcttcgccggagaagccagtccacggtcgccggacttcgcccgaccgccggtgagcgtagaccgggatccagcaccagagcctacaccagaggatctgcctgccactgctttggaaggcaagccccggaacccttttgagatgaatactagttctttggaggacatggttgctggagtgacttggccgtccatcttgccaccgggttggactgtcgagttggaccccgcctcggctgaggaggagcatgaggagtga

SEQ ID NO: 3773 - DNA, 579 bp, Zea mays
  Peptide Sequence Number=SeqID_47148
atgccggtcgcgctggccgagtgcagccgcgccgcgctggccaagtccgaccaacatgccaaggcagaggcgacaggagttggggaaaatgaacagttgtctaattatggggatactaaatcagctcgaactgttatgctggttgaactaaaaaaactcattaaagccaaccctcttctccaggaaaaacttgtcttcccgactcttaaggcatcacgcctccgaactttaattaatcaaagcttgaattggcagcatcaacattgtaagaatcctcgtccaaatccagatatcaaaactttattcactgaccatacatgtactttacccaatggagctcctgcatcacggccactccaacttcctccacctagtccatctttagctcgttggctgacgaatacagccgtcccttcatctgttcagtctgctgttgtagcagcctcgtcaatacctgttccacccaatcaagttgtctccatgttgaaacgcccaactataacagactatcaaagtgcagtgcctgagcaactaatgaagcgcttgaggcctggtggacatggcattggtgagacctag

SEQ ID NO: 3774 - DNA, 381 bp, Zea mays
  Peptide Sequence Number=SeqID_47149
atggctgttcgactgcttgccaataaagattcacgtatgtcaaaatgtgaaaagataaaggatataaagcattatatggatatgcgcttctgggttcttatgccatggaaattcaacgagtgctacacccttttcgtaattgaccatggtaaaaagcacatgacttttatcgactttacacccactcaagattggtctacctcgttctacaagctatggtcatgtggggaaatgataggcgattgggaatttgttagggatgcaaagattcttcgaaggaactttgtgattgatctattaagttacgaggacaattcatgtcgttatgctatccctgcaaacatacaacagagacctatcaatatctctacaaagaaatag

SEQ ID NO: 3775 - DNA, 180 bp, Zea mays
  Peptide Sequence Number=SeqID_47150
atggctccatctccggctggaatcgtgaataaattacttgttcttcttcagcaggctgctgcgctcttgggagagcagcctgtctaccacgccgtacatcgttccattggctgcggggccgccatgcccccagtggcgctgcccgacaaggaggccaagtatttgggggattatcggtga

SEQ ID NO: 3776 - DNA, 606 bp, Zea mays
  Peptide Sequence Number=SeqID_47151
atggtcgaccgaagcgaccccattgctgcctcggcatactcacggagctcatcccgagactgctcctcccgctcatcgtcaaggacgaagaggggttttgaggcgccgcgggtccagaaccggagtgtctgcccacgccactcattgggatcgcgccgcgcggggataaggtcaccgctccccaagacgagccgcggttctgcgcgcccctctaccaaggcgtcgggaccccctgcagtcgatgcatcggataccatcactggcgacggcaagcgacacctttggcaggcgaagcgggcgtcgtttcacctccgccatgatgaccgcgtcaaaaaagccgccctagagcacccgggcttcaagctcattactgatcaggggtttgaaggctggcccctcggaagggttcgacagccgcctcagagcactcgggctccacgcccactactgatcaggggttcgaaggctggcccctcggaagggttcgacaaccgccccagagcatgcagagcgagggatgactctgggtacatccgttacatggccgaggctcgggctacgctcctgttgggggccttcggcttccgaaggtcctcaaaagcatga

SEQ ID NO: 3777 - DNA, 183 bp, Zea mays
  Peptide Sequence Number=SeqID_47152
atggagagaccgacgtcgcatctcttctatcttcgcttcaagtccccaacccaagagtcatcggtactcgccatgtcgtacgcgttcgacgactactatatcaaggactatggcgtcatcttggcaccagaggtgacgcagaggaggaccgacaacaatgaccactcgccatcgtcggggtag

SEQ ID NO: 3778 - DNA, 675 bp, Zea mays
  Peptide Sequence Number=SeqID_47153
atgggttacagggaggctgtcattcatatccaactctggctccttggtgtcctggtctctcactccgagtttgatgttgtggatttcctcatttgtgagatagaggacaccgtgttggatggacttcgtgcccgacgtcagctgccatatgctcactatctctgccacatcttcgcacaactgattcagccaccgcagttccagggcacccttgaggcctctcgcctcctctttgggtcttatcgtcgagctcctgaggatccagtgctagcacctgatccagtgattgacactcaggcagaggatacaactttccatcagtttgagactcagggcgcagcagttcctgatgatgatgatgacgactttgggattctgcctccgcctttgcctccccgctcacgtggtcatgaggccgaaagttccagtgctgctcccactgctcctcctgcggttgaccctgctctggctgctatccttcatactcttacgcagcagcaggctcttatggcgtccgagcaggctcgactggcagctgagcaggctcgtcaggcagcagtccagcagcaaatgtccgagaggatgctctctctctctttcagactattcaggacaggaaggacactttgcagcagcagcttttggcagatagggctgagcaccgggccttcatga

SEQ ID NO: 3779 - DNA, 1137 bp, Zea mays
  Peptide Sequence Number=SeqID_47154
atggctcgtagaagatcccaaaagaacaagaagactcctccaacgaacgcaactcaaaaggaggtaactcttgagatattatgcgatgattgttctaattatgatttatggtctactagtgtgataaatgcctttagaaccatacatcctcaattagaacaaattattgacaagagtatttttccctctagttttaatggaaaaattaattccgaggaggatcaaagatattatcgcttaaactacctagcttttgacatcttaaacaattctcttagcaaagaagattatcgtgccttcatatcaaactatgacgaatccattcccgatgcgcatgatatttggactagaattaaaatcaagtttgatgagtccaaacataataattcatttgatgcctctacttcctttagtttttgtgatactaacccttgcaaggaagaaggagagaatgaacgatggagaccaaacgatgaatccacctctccaaaaggtttgtcttcccatttcgattcccacatgtgttgtgtggctaatgaaaatgatagcggaagcacaaatgaggatgaggaggaagaaagaagctttgtgcatctctacgctcgcctaagccaagaagataaggcggtcatgctcaaacttctagaaagagcgagagaacaaagcgaagctcgtcaaaggctagaagatattctctccataaagatgcaacactttgacgagttgactaaagaacatgaggagctaaagtgctctcatgttgacttggtccaaagcaaatcttcctttgagctagaatttgcaggaacaaatgatgattcatatcaaaagctcaaagaagaaaatgagaggctaaagaagagcttgacacaactaaaagggaaatgcattgcccaaccttctcaagataaccgtgatcacatggtgaagaagcttgagacgggaacaaccgtggcatgcactacatcccttgaagaaaatgtcaaggatttgaggattaccatgaggagggaacaaaatatgaaattcaacacctcctcaaaaagcctcaaccacgcctccacaaaaggtaacatccaaggcaacccaaaattgcaacttgtgctagaaagtcacatagaaatagaaagcacttaa

SEQ ID NO: 3780 - DNA, 632 bp, Zea mays
  Peptide Sequence Number=SeqID_47155
atgtattcccggaactcaccgacggcgacgggactgcaggagtcggccggccctcaacatcctgtccggctggcccggatgccctcccacggtcccacctcgcagccggcctcgccaacctcccaggttccccctctccgcgccgcagtggacccacagacgggagagaaggccgccccccaacctcatactctccttgaaccagaattttttctgcttccttccatcctctcccgtctccctctctcgctctccaccgctcccccctccttccccttgcctctgccctggcaagttacggtcctgcccctgcgaaccgaggccgtcgatatgtcgctcagcgagaagctggaggcggcgcgtgtcgctctcggcaagcgaaaggagcgtgagcgcgagctgcaggccgcacaggcgcagccgctcccggtgccggctaaagccgagccgaggaagccggctccggcttgtgcggccgccgccgccggcggcgacaacaagctcctggccggccacctggcccacgagttcctcgtccacggcacgctcctggggcggcggatcgagccgagccgcggagccccagctccggctcaggctccggcgcgggccgagccggaccccaaaaggag

SEQ ID NO: 3781 - DNA, 705 bp, Zea mays
  Peptide Sequence Number=SeqID_47156
atggctgaaaggtaccaacttccacgaagttgcgttcctccaacgacaaggcggaaggattgcgggtgttccccatccgggggctcggaaggtggaaagacacgatgcataagggagcgcgaagacatggtcgcctttcaagggggtcaccctccttttaaaggcgactctccctacttgcgtccccggccgtcgcgggctgagtcttctccaacacgctccaaggtcctccccctacggcgcgggggctgggtcccacgcgtcatgcaagctggcccagagcagaagaagccaaaccgccgcgcgcggtgcattcaactgcccagcggttacgagcattcctccactattgcccagaccagcggcacctttggcaggagaagcgagcgacgcttcaccttcgccataatgaccgcgtcaaaaagggaccgggaaagggggataccccgaaaagggatccttctccgcgaaggaaacgggccccgagcctccctactaatcagaggttcaaaggctggcccctcggaggggttcaacagccgcctcagagcgcttgggctccacgcccactactggtcagaggttcgaaggccggcccctcggaagggttcaacggccgcctcaggccactcgggctccgcgcccactactgatcaggggtttgtaggctggccctcgaagggctcacagccgcctcagacatag

SEQ ID NO: 3782 - DNA, 345 bp, Zea mays
  Peptide Sequence Number=SeqID_47157
atgacgagagagcagacgaagttcgggttgtcaaacgtgccgaggaggaggtcgcacggtgttggactggggagcagcaaccaatggagatggagtcaggccgcacggatagagaggcagacgacaatcgacattgacggggacctgcggggcaaattggagaggcggacagtggtgcagcgtgcggtgggatgggtgccggcggcgcgagcgagagaggccaccggcagtgatgcttctagaagccggtggatgccacggccacataaaacgctgagaagcaaaagaggacaacaactagcacttgcattcttagccgtcgttctatcatcggaccgtgtatag

SEQ ID NO: 3783 - DNA, 348 bp, Zea mays
  Peptide Sequence Number=SeqID_47158
atggccggaatggctcaccggagttactctggcccgcccgaggctttctcaccgccgttctcccctctctgctcgtggattcatggccccttccccgccattgagttcaccgtggcgccctcttcctctatgctcaactccggtgaccccggaacccccttagctcatgcctgcctcaactccggcgacctcaccgccgcagagaggagcagcaccgcccgcagccgttcacccctccccgacgacgagcagtccgaggttcttgagtgtgttgttggagacctccctgagcaacaacctggtgaaggcaagtgtcctctgacctattatgtcctgcatactttatga

SEQ ID NO: 3784 - DNA, 606 bp, Zea mays
  Peptide Sequence Number=SeqID_47159
atggggtccgcctccgcctcagtgatgacgaccagcctgctggcgctggcgctggcagcgctggctttcgtctccagggccgcggcgcagggcaacggctgttccagcgtgatgatgaccctggccccgtgcatggacttcatctccagcaaggcgtcggagccggggatctcctgctgctcggtgctggctggagtcgtgcagaccgacccccgctgcctctgcatggtcctggacggcaccgccacgtccttcggcatcgccatcaaccagaccagggcactggagctccccggcgtctgcaaggtcaaggcgccgccgctcagccagtgcacaggcatgtcatgtgtcagcaaatggagcctcaagctccacaaactcaaagaatgcagcgagcttactgcttctcatctgcgcattgctgaattaggtctttccctgagtcctgactatgtacttacccatgattctcggcaaattttttgtatggtatggtatgggtttctgatgtgccacatcaaacaacattgcttttcgccaaatgagaaagatcagttctcgcccattgtttcagcggaattattggtgattggcaccacatggtga

SEQ ID NO: 3785 - DNA, 390 bp, Zea mays
  Peptide Sequence Number=SeqID_47160
atggcggcggaaagaacatggtgggcggtttccttttctccggctaaatctctcaggttgcgaaaacctaagaagggggccagaagcggagcaaagaaccgtcgccagaccctcccccgagtatataaagaccaaggcgagacccattcaacgtttcgcccggacctgccgcgggattcaaaaactcaaagcgaaacgaccgttcctcgaacgactcgcgcacgcgcaacggccgccccacgaaccactcgccccatcgcattaactccgcggcgggacaggccgcgcttctggcagaggaagcgagcgacgcttcgccttcgccataatggccgcgtcaaaaaagggaccgggaaagggggataccccgaaaacgacccttctccgtga

SEQ ID NO: 3786 - DNA, 226 bp, Zea mays
  Peptide Sequence Number=SeqID_47161
ccaataaaaagatcaagttttggattcaacaaaggagcaaagaggcaaccgaaggcacctctggtctgggggcaccggactgtccggtgccggcgcgctataattcaccggactgtccggtgtacaccggacagtgtccggtgctccaaggaagcgcggcctccggaactcgccagcctcgggaacgcgcagcagccgctccgctataattcaccggacatgtccg

SEQ ID NO: 3787 - DNA, 678 bp, Zea mays
  Peptide Sequence Number=SeqID_47162
atgtacaagacaaatgtcatggggaccttgaatatgcttggactggctaagagggttggggctcggttcttgttgactagtaccagtgaagtgtatggtgatcctcttgagcatccacagaaggagagctactggggacatgtcaatcccataggtgttaggagctgttatgatgaggggaagagaacagctgaaactcttaccatggattaccaccgcggtgctggtgttgaggtgagaattgcacgcatatttaacacatatggccctcgaatgtgtttagatgatggccgagttgttagcaactttgttgcacaggctttgcggaaacaaccaatgacagtttatggcgatggaaaacagactagaagttttcagtatgtttcagatttggttgatgggttggtaactctaatggaaagcgaccatattggaccattcaacttggggaatcctggagaatttacaatgctggagcttgcacaggtggtaaaagaaacaatcgacccaggtgcatctgtcgagttcaaacccaatactgcggatgatccgcacatgagaaaacctgacatttcgaaggctaaatctcttctcaattgggagccccaagtttcactaaaacaaggcctgccgcgtatggtctcggacttccagaaacgcatcatggatgagaaatga

SEQ ID NO: 3788 - DNA, 438 bp, Zea mays
  Peptide Sequence Number=SeqID_47163
atggcgcttcctgttgacgtggcggtctgtgccctaggcagggcgacgtggggggcggagtccgagccctggggtcgggcgaagcggagtttcgtcgtcttccgggtgttagcccgagtccgagccctggggtcgggcggagcggagttcgccgtcttccggcccgagtccgagcccctggggtcgggcggagcggagttcgccgtcttccgggtcttagcccgagtccgagccctggggtcgggcggagcggagttcgccgtcttccgggtcttagcccgagtccgagccctggggtcgggcggagcggagttcgccgtggcgcctttggcaaggcctgactgcctgtcagactcactctgtcgagtgacactgcagtcggagtggcgcaggcggcgctgtccttctgtcagactggccagtggagcggtggagtga

SEQ ID NO: 3789 - DNA, 480 bp, Zea mays
  Peptide Sequence Number=SeqID_47164
atggccatcacaaacttctgcaacatcaggcatctggcaggggcagcagcagatgagctacgtgatgctgtgctgcttgttttcgccaacaagcaagatcttcctaatgccatgaatgctgctgagatcactgacaagcttggattacactccctgcgccagcgacactggtacatccagagcacttgtgccacaactggcgagggtctgtacgagggcctggactggctgtccagcaacattgcgagcaaggagctccggatgtatcatggaaacttaggacagaatcgcctctgcaacctgttaggtgtcttctaccggcacaatatatcttccaaacccacagtctggggctctaaagatatcttttccctgtgccttgtgagacaaagtccatcgactcgacagagaaagcaacagtttggttttgatgggcagaacaaaagaaagctttactcgactgcggatggtgtctactaa

SEQ ID NO: 3790 - DNA, 474 bp, Zea mays
  Peptide Sequence Number=SeqID_47165
atggccctcgaagatgtagttgacctccctgtcacctcaatggaaagccccctcctctaccccaggctactagagctattggccctgaggttgtcaagctggcggttgagatggttggatgaggtctcgggctcgttcattggcggtgacgtacatgttggctttttggaagagctgctcggatgttgtgggggcctcctgaaggatggtccgcacgaagaccttgtcctgagatcctcagtagaaggccttgatcaccgctacgtcaaatatgttagggaagcaatttctcattgtaacaccccactggtcacacacaatggatatcaccaaaaaccccacccacctaacttactccacacaagaggcgtaataaggaaagaaaatatagcaaaatctggtagcacctcctttgaaactaacataacaaggaggggaaaacatgaagttcatacaggatataaagacatataa

SEQ ID NO: 3791 - DNA, 408 bp, Zea mays
  Peptide Sequence Number=SeqID_47166
atggttttatcaagcaactcctatcacctaatgcagcaatcaagtgagaaagattttgaaatagcaagggaggtggcaaatgcaccggggcttgccttcgtttacaggggtcctccaacttctgtttcttcgcactgggaggtccccgacgacggcagcgcacggagaaactccggcgagccactgtaccggccaaatggggcagtgaccggcgctcccgagcggtggacaccaaatcggggcctgcccgagcatttcccctcacttaattgtgcaaatggtgagctaccaagctctgtccgcgtgaaccgaatgggtggcggacagttgatcgtgttcccaaagattggtggcggtataattcaattgggtgggccggtgagcttacggaggatccaagaatgctag

SEQ ID NO: 3792 - DNA, 360 bp, Zea mays
  Peptide Sequence Number=SeqID_47167
atgggcaagaacaacaagcgcaagcgtgaaccaactcctccatcggaggagtttggtgactcaaagtactcagaggaggagttctcctctgagtctgaggggtctccggctcccatacccttgcgtgagtcgtctgacgactcagacgactcccaggggcttgcggcggagggctcggatgagtctgagtactcctcggatgaggaggactcggacggcggcggcgaggacgaggatgacgacgatgacgacgacgacgacgagggcgatggcggcggtgacggtgacggcagcggcaggggcggcggcagcggcagcaagggtggtgacggcggcggcagcaacagggccagtggctag

SEQ ID NO: 3793 - DNA, 495 bp, Zea mays
  Peptide Sequence Number=SeqID_47168
atgtccggtgcaccagaggactcaaacttcgaactcgtcaccttcgggaatttccagaggcgactccgctataattcaccggactgtccggtgtacaccggacatgtccggtgctccaaggaagagcggcctccggaactcgccagcctcgggaattcacttcggccactccgctataattcaccggactgtccggtgtacaccggactgtccggtgtaacaacggggcaacggctactacggcgccaacggctacctgcaggcgcaattaatgcgcgccagcgcgcgcagaggtcagacacgcccatgctggcgcaccggacaatctacagtacatgtccggtgcgccaccggacatccaggcgggcccagaagacagaactccaacggtcgaacccaacggcttttggtgacgtggctgtcgcaccggacatgtccggtgtgcaccggactgtccggtgcgccatcgaacagacagcctcaccaaacgactag

SEQ ID NO: 3794 - DNA, 300 bp, Zea mays
  Peptide Sequence Number=SeqID_47169
atgcaggtggcgtacaactgcaccacggggacgcaccccttcgacttcgacgcatccagcatggaggcccacacgtcatgtaaccggcgcgctggttactacgtgcgagaaactgcaccgccacttgcgccaatgccgcgccttctcgactgcggaagcagtgccgcgactcgaggcaaccctgcgcatgaggcgcttcgctataattcaccggactgtccggtgcaccaccggacagtgtccggtgccccaagggagagcgactctgaactcgccagcttcgggaatccgctccgctaa

SEQ ID NO: 3795 - DNA, 486 bp, Zea mays
  Peptide Sequence Number=SeqID_47170
atggcgcaccggacagtccggtgcacaccggacatgtccggtgcccccgccacgtcatcagtgtcgttggaatctgaccgttggagttatgacttctgggcccgccttgatgtccggtggcgcaccggacatgcactgttcactgtccggtgcgccagtatgggcgactctgactcctgcgcgcgctgcgcgcgcaataaatgcacagcagcggagcagccttcgcgaattcccgagactggcgagttcctgagccgtgccttctttggagcaccggacattgtccggtgtacaccggacagtccggtgaattatagcgcgccggctctggattttcccgaaagagaagagttggagtctgagacctctggtgcaccggacactgtccggtggcacaccggacagtccggtgcgccagaccagaggagccttcggttgcctctttgccctttgttgaatccaacacttggtctttttattggctaa

SEQ ID NO: 3796 - DNA, 150 bp, Zea mays
  Peptide Sequence Number=SeqID_47171
atggagtctgactatctctttgaggtagatccgggcaagggtggctcctccaaagattctttcttccagtcttctagaaagttggtccctttaattccgaatggctttcgactgagggcgtcggccaccacattggccttcccggggtga

SEQ ID NO: 3797 - DNA, 321 bp, Zea mays
  Peptide Sequence Number=SeqID_47172
atggctcaaagaagatcccaaaagaacaagaacacaactcggaaggaggtaactcttgagatattattttccgattgttctaactatgattcatggtctactagtgtactaaacgcttttagaactatagatccacgattagaacaaattatagacaagagtatcataccctctgattatgatgcttccgaggaagatcaaagatgtatacgcttaaaccatctggctcttgacatcttagttcttgtgatactaacccttgcaaggaagaagaagaaaatgaccgatggagaccaaacgatgaatccacctctccaaaag

SEQ ID NO: 3798 - DNA, 2346 bp, Zea mays
  Peptide Sequence Number=SeqID_47173
atgtgctcccattattatgtggcatacccgcaatttgaggtggcggaggatgacaaaaatgaaggagcccttcggtgcgctgcccgcatgagtagcgggcgcgatttagttgaagaattcatcggttatggggtgtggcccttggcacatggttgggcgctgggcgaagtatgccctcgcgaggtgccctccctgggcgggcagcgagtgcgaagtccagccttcgcgttggatctgcgtggccgggatccagccgcatttgttcgtgaagtggaggacagtgcggcgaggattgtggggcgctatgtgccgaggacagagggtctgcggagctgggatatccgtgggtccaacgttagattgaatcgggtcttcgaattaaactacttgccatacggtggctatcccggggatgacgctgccgaccgccgcgggaagagaccggtggacgtgatcgaggaagggccttcgcaggaggctgccccgaccactaagaagagaaaattaggtactacagtggggggagtgggggtctctgatagttttgctgtggatttgatggggacatgcgcaaccctcgggggaaggatgtcttcgcccgagatcttggagtcttcggcgcgaatgctggaggttaccgggggtcgatggcccaagaatgttctgatcccccgcgtggctggcgaagacttctttacgtctcgcatggctcatgacttgaaggatcgcggatcctatgcgcgaggcgaagaaggcgcggggagcacgaaggctgctgcctctggcagtagcaaaccggtgccgactgcgaaaccggccgtccccgggcacagcaaggcgtcggtgagtgtgaaggctgccgcctctggcgggagcaagccacccccgggcgggctcgtgaaaggacgaaggccgccttcgccggcgcgacatattgccgacttcggcacagacatcagtgtcgatgattattttgttggttcgggtgaggggcaactgactgttgtcctgcctccagtggcaaccacttcaccaacggcggtggtgggggcgaagggtaccgcgcgggacccgtgggccactttctgcgcgagcggcgagattctgtcggccgctgcccctaaggacatggcgggctccatgtctcagcgactgagggaagtgtcgcagcagctgtcacagcagctgaagcaagcggccgacttcgccgacctcgtcgcgtcgggtgccttgactgcggacgttgctgccgaggtcgagcgtcttcgggcacaaatgcggatgctgctgtcgaagaaggtggcctccatggaggccgagatgacggatctctgccgccagctggcggaggagaggagggaggtgaataaggccatcgctgatgcgcaggctgcgcaggccaaagccaaagtggcgctggcggagggcagtctcgcccaccaacacaccgaggagctggaggcgaggttcaacgccttgcgcagccgcgtggacaaggccaaggcctcgacgcgcgtggaggaggagctgttggtgctcccgaccattatgacgggtttcatgtccttcgcctccctcatcacctgtgagggggccatgaatgctttgtcccgcgaggggtgcaggcattacgaggtcttcgaccaagcggacgaaaactttgaacgtgaagtcttcaaggtcgaagaccctgtgctaaagcagtcggtgggggcactcttcgataggatgtggggtccgcacggccgagaggcggtcagggagcggtccaatcgggcaatagagcagatggcgcatgccgaagacgtcgaggaccttggtggtctagacagcgtgctgcctgaggccgcggaggtcgatccggtgccgccctcggatgccggtgaaggcccctcggtgacccccgcgcccactgcggccggcgaagaccccgcatcagcccctgcgccgacgggcgaagacgccttgaaggtggtggccgagccggcagtcgagccgacagtcgaagaccccacagccgcggtcgggccttcacaggttctggggtttgggcctgtgcacgcaaccgctactgacaatgctatttttgtggcggctttgaccgtggctgctgatgacgattcgtttggctctgtgtctaagtgttttgagtctgatgattctgggagttcaattgcgtgggcggaggagtcttcagatgaggacttggattatttttcagcgttggatgtggctgcagtggagccttcgccgcgcgaggagggttccgaggcgctcccaggcgcgagtactgggtataggcggcgaagggcggtggagaaacggagagtgagtggattgtcgtga

SEQ ID NO: 3799 - DNA, 123 bp, Zea mays
  Peptide Sequence Number=SeqID_47174
ctttatgctgatgggggttaccagctgagaattaggagtcttgaggcccctggccacgacgtggcgcggttccccaactccggcgagaaatcgctagttgcaccgcacaccacacgcgcttag

SEQ ID NO: 3800 - DNA, 396 bp, Zea mays
  Peptide Sequence Number=SeqID_47175
atggcgggttggttcttgaaaagtggaggggctcttttgaaaaacaaccacggcaatgaacgagtagttgccccggaccgatggattagagatcaagggcccatatcaacccatgaaggggccacagacacattcttaggggcggttgaagcacccaaggccgaggtcgtgcttctagcggctacagggacacgatcccatggcggcggcttctttctctctatttgctccgatcccgggaatccgcctggaaggtccggcgtttggttggggaagaagatcgagctgcccaagcgggcccacctgtcacaccaggttttggaaggtccttacggagaggcactcaggaaagagcctgagtcccctaaagtaatcacaaggaccccatcgggataa

SEQ ID NO: 3801 - DNA, 336 bp, Zea mays
  Peptide Sequence Number=SeqID_47176
atgggtagcgagtacccatcggtgcattttgagaaggataaggctttggctcgcagattccagccagtattggtgaatgagcctagccaggaggacgctatcaagatattacttggtctgtgtgagaaatatgagacttaccataaatgcaaatacactttagaagggatcaatgcaacagtttacttgtcagcaagatacatccctgacaggcatcttcctgataaggctattgatctgattgatgaagctggcagtagagctcggatggaatcatttaaaaggaagaaggaagaacaatgctccattctctccaagtcaccagacgaatattag

SEQ ID NO: 3802 - DNA, 234 bp, Zea mays
  Peptide Sequence Number=SeqID_47177
atgcaggtgacgtgcaaccgcaccgcggtggcgcacccctttggcttcatcgcatccggcatggaggcccaggcccacgcgtcatggaccgggaaaggggatatttcgaaagggatccttctcagcgaaggaagcgggccccaagccctcctactgatcaggggttcgaaggctggcccctcggaagggttcgacagccgcaccagagcactcgggctccaagcccattactaa

SEQ ID NO: 3803 - DNA, 363 bp, Zea mays
  Peptide Sequence Number=SeqID_47178
atgacggtggcaggcgggcgggagcagcggtcacgtcgtcagccaagctcacgtcccatccgggggcagcaagagaaccccctctcacggagaagcgggcgacgcttcgccttcgccgtaaaaaccgcgccaaaaaagggaccgggaaagggggataccccgaaaaggatccttccccgtgaaggaaccaggctccgagcctccctactgatcagaggttcgaaggctggccccccgaggggttcaacagccgcctcagatcgcgtgggccctacacccactactggtcagaggttcgaaggccggccccccgaagggttccacggccgcctcaggctactcgggctccgcgcccattactga

SEQ ID NO: 3804 - DNA, 450 bp, Zea mays
  Peptide Sequence Number=SeqID_47179
atgggcaagaacaaaaagcgtaagcgtgagccgactcctccatcagaggagtttggcgactcggagtactcggaggaggagttctcctccgagcccgaggggtctccggctcccgtctctcccccggcgtcgtccgatgactcggacgactcccaggggatagccgcggaggtctggacatacatccgggccgtcgagcgcgccgggctcgaaggctcggatgagtcggagtactcctcggatgaggaggactcggacggcggcgaggagggtgaagacgacgacgacgacgacgacgatgacgacgacggcggcagcagtggcgggggcgacggcgacggcagaggcggcaccaagggcggcagcggcggcagcggagacagcaccaggggcagcagcaggggcagcacccggggcggcggcggcggcaggggcagggccagtggctag

SEQ ID NO: 3805 - DNA, 567 bp, Zea mays
  Peptide Sequence Number=SeqID_47180
atggtgaccaccagcccctgggtggggagaagcaaaccgggctgcggcctctgcccctccctcagcttcaaggatgttcatcatcagtgctggggaggggagtgcgccgagttggggtcggtctctgcgcgggcagcggcccgctcctttcctcagcgatcggggggaagggcgttcgccgttcgtggcgctggcagctgccgcgtgtccggctctccggcccgagcggcttcggcgccgctttcggtgccaccttccgccacggcagccggaagaggtttctccgccgacgagatagccggtgccgcccacggactgacctccaactctacggccttctgcttgtcctcgcccctcgagtggggacgtgggcgagggccctatggcagcaacatccgccctgaggtcatcgctgctgctgttcggccgctcggagcagaagtcgtcgtcgctgctgctgaagcgggcggcggcgagccgtccgtcggccttctgttgctccgcaggccctccaatcgtggggggttgttcgtacccgcggaggtggaaccggagttccgtttgtaa

SEQ ID NO: 3806 - DNA, 744 bp, Zea mays
  Peptide Sequence Number=SeqID_47181
atgaccattggtgagggaatgcagccgggctgcatgatgaaaatccttgaagccgagcgacgactggagagcgccaacccccataaggtcgcgcttctcaaacaacagcaagaagaaagccacacaggggttcgaaggttgcgccctgcggggtccagcagccgccctagagcactcgggcccccgagccctcctactgatcaggggttcgaaggttgcgccctacggggtctgacagccgccccagagcacccgggctccgcgcccattactgatcaggggttcgaaggctggcccctcggaagggttcgacagccgccccagagaactcgggctccgcgcccattactgatcaggggttcgaaggctggcccctcgaaagggttcgacagccgccccagaacacacagagtgagggatgaccctaggtacgtccgatacatggccgaggctcgggctacgctcccgaggtaccctaggacatttccgagaccagtgggaacgatttgtaatggaatcccaccggagggaggcaccgagccctcaggccctatcgaaatgggtccgagtccagcaaatcccctgcagaggctcgggggctgccctcgcacccggctgcggccaaaactgttgacaacgtcaacaaaccagctcaaaaacttggagcctgaccatacacccgggctgcggccaggccgtatgagggaacaaccaggccgaccaaggcatcacagcacgaattaa

SEQ ID NO: 3807 - DNA, 1302 bp, Zea mays
  Peptide Sequence Number=SeqID_47182
atgaagcacgtggaccgaccttcgaataaccccaaacgtataacaattcagtcaagccaggagtgtttcagtgttgacattccgtgtgcagaacagtctaatccatgcccagaagttggaaatcctccaaatgttgacagtcaaactttgatcaatgaaacaatacagcttgattctgatgaagatgacttcatgccagctgttaagaagtgtaatgtttctaaaagccatacaagagttctaaggaaagtcgtgacaaagaggataaaagttgaggatctaccccgacagaggctcaatgtcaggtgcaacccacaagatgtcattgcaagcattaacatattgaatgaaagacaacgtcaggccataagacgtaaaggaaaggaactaaaaatcacaaaggacattgtgcatcttatccttggtgtaccaaatcatggcggtggaaaactattggggattgacgaagcagttgcagcaagcaacttgagtgcagagcttgccgctgtccctcaaaataagttaggtacacctcgcataaaattctttgataagaatatcataaaagctttgactaaagccgacaagaggaagtcgaagtgcaggaccaacatatttgatgcaccgcgccctgcccctaatcctcgacccacctttaacatccaacttccatcgatcaaggagatgatgtcaagtaagatcaacgagctcccacctcgtcatcgatctaaattcacagagaaacttgctgcatatgacttggaggttgacaaggcatgcttagccataaaagacagcattgacaaaattattgagaagcaatatgaaatagcagacaagtttatagagctgatcgacgagagaggtgaaatggcaacagatgaaatggaacacaatgacagtggaccagtttttgatcagaccccaacgcctcatgatgatacactgaaagggacaacactgtctggaactgatccactccttacagagcttgattgcgttcgttctctgtgggatttactctgttccaaggacattgaccaaagcagggttgtcatagattacggtgaatacaatggaaactgtatcgatatttatgaatctttcgctgaggggaagtgtcttgagaatgtcttcatgcagtgcttcattgagtgttttcgtgatgattcaaaaaatcatcgtcgaactgtgacttctaatagattagtacttgatgtcaatgtcggggctctgctaaattttgaagagcagaaacgtcatagtaagaatcctcagccgtttgatcaaaatgtgttatag

SEQ ID NO: 3808 - DNA, 1395 bp, Zea mays
  Peptide Sequence Number=SeqID_47183
atgtcctcctcatcctccccttcttgtagtagagtcgtcctcgactccagtgtgtactcctcactcaagctaccagcaagtcttccgtttggcatggtttcagatagtttcaattctccttgtgatgtcccatttgacaagtgggagtttgaaaatccgcgcctggccaagaccatcgcgtccctcttcctggactctggggagccgtccttcgccaactcctcggcgcggacgacgcgccacgtggactgcgcttccgacagccagtccaccgagtccgaggccccggcgaccgacgacttcgcgaacaccatcgtccgggggctccgctccgacgaccgcctcctcttcgagccccacgggccctccagatccatcctcgagaggaagcctccggcggcgcctaccctgcggccgcgagcggcagcgtcctcctcatcctttgttgacggcgtcgcggtggcgttcgactccgcctacccgtaccacgacttccgggcttccatgcaggagatggtggccgcgcacggcatgggcgactggtactggctcgagaggatgccagcgtgtcccaccgccgcctggccctcccccagtgcccccggtgatccggaccgcacccgcttgctcggcctaacgaccggctcctgccccgccgcagccgaagctcccagcgtcctcctgcaggccgagctgaaggttcagcgcgccggtggagttcgacgacgaaactccgtcacgtcatacctctccgcctcccgtcttccagacccgcccaaggaggaggagatccaatcggcgtgcgggcgtccgcggtccatccatcgatccaattccaatctgcagaagaagggatcaaggaacagcgaccagagaaaggctgcgtctgctgctgctcctacggctgctgatgctacgaacaagaggcccagggttagtgccttcttccgcttggatggcagtaaggtttttgctaatcaactgagggaggccatagagcgggagctgaagaagcttcgggcagagcgggaggagctcgacggccggatacggctgctggaatcgcagctcgaggcagggcctgcgggattcaacggtgcggcagcggggaaaggagtaggggatgatgcgtgcggcgggagtggagcgtgccagagccgcgtgggtaacgggtttgctccggacggtagcctcccggcggatatgatctaccggtacagccgccacctccttctcccggacttcggggtcgaaggccagcggaagctgtcacagtcgtcgattttagttgttggagctggaggtttgggctctcccctggcattgtatctagcagcttgtggtgtcgccatgtaccaattagagggaagtggatctgcttcaccctcacggtga

SEQ ID NO: 3809 - DNA, 711 bp, Zea mays
  Peptide Sequence Number=SeqID_47184
atgacaaccgtccccatcgattccccgttcgcgtccaggcctcaccgccttggcatacaatgctccactgaccccggctgtcgccgtgcagtgaccgcacttgtacccaccatagctagcatgggagacccagtctcaggtcgcatgagggataaagtccgcgcccggcttcactcagtggccgcggcggagaaaagggcggaggggcttaccggcggcgagactgttccggtgaagtggtcgaggacgaaggggaggtcgcggggatcacaacggtatgcggaacgccgtcggagatggccggagtcggtcggtccacgcgcgcaggcggggatgctcgtcggcggcaaggagaccggcctgggaggtccacgggatgccagagaagttatgagcgaaaggaattgggcggagactcactggatagctcggtccacgcgcggcggcggaagaccgaagtccggtgaggttgatctcgggcctccggtgaagtccgaccgggtccgagggcttggcaagcttcacgggctactggcggagctaggcgaagcactggcttgcccagaggatggctggagtgggctggccacggtggccgaagctctggcggcaatggcgggcggaattgagcttgccggagctaagggaaagtggctggccggtgagggtgagtgcggggcgaagtggggcgcgcctgggaaggctttatag

SEQ ID NO: 3810 - DNA, 852 bp, Zea mays
  Peptide Sequence Number=SeqID_47185
atggatgctcaatatgatgtgactcaagaatggcttgatagggtgaagatagcaaggaaagggcttcgaggaactaagcgaagggcaagttcaactggggtccagagaggttcaaccggggtccagggcaagttcaaccggggtccagagaggttcaaccggtgtccagggaaagttcagccggggggcggttcaaccggtcttggtcaacttgaccagtctgcagatgttgatcctagggcaatagaccttgccatgagaatcgccgaaaggatgttcctcaaaatgaaggaagatgaggcgaagaacattattgaagaagaagaaaatgatcgatggagaccaaacgacgaatccacctcttcacaaggtttgtctttcaaatccacttctcatatgtgctttgttgctaatgagagtgacagtgaaagcgaaagtgaggatgaggaggagcaagaaagtgatagtgaagatgaggacgatcttcaacaattcttcgctcagctaagcaagaaacatcggatgagcttgctcaaactcatgaaaagagcggaagaacaaaaagaaatgcttcataagcaagaagacttcctcatcagaacaatcgaagacttagagaagttgaccaaagagcatgagaagctaaagtgctctcatgatgatttggtccaaagggcaagttcaactggggtccagagaggttcaaccggggtccagggcaagttcaaccggggtccagagaggttcaaccggtgtccagggaaagttcagtcggggtattttccccgaacctcactgtctgacttgcagtctgccagtctgactggcagactgtctgtcagcctgccctag

SEQ ID NO: 3811 - DNA, 438 bp, Zea mays
  Peptide Sequence Number=SeqID_47186
atgaccggggataaacaaaggcaaaagctcaagcaaaatccattaagcaaaatctccaacacctacatgaaaaaggtggacaaaaagactgctacaccacatttgatcaagaagaaaaagaatggaaaggtgatagcaatcaaagccaacaagcaagccaacaaaggaaagggggccaaacgtatctgggtgccaaaggaagtaatttcaaccatgaaaagcaccaagaagccgccaccgtgtactgaagggaacgaggcccgcggcgtttcggccggaagctcgatagtggagacagcggggagcgtccgagaggagccagaagcggagcaccacttgcgcgtggagaaggcccgcggctctctacggagttacttgaccgtggtgcttggccctcgcgtgggcttccctttgcgtaggggcaccaacgaggattag

SEQ ID NO: 3812 - DNA, 276 bp, Zea mays
  Peptide Sequence Number=SeqID_47187
atggccagcaccggtgctggcgatgacatgcaacctgtagcgtctgtgcatagatcaccagcgtctgcgatcaccagatacagagagggtgtatttgttactcccccgacggcgttgatggcacctggacatattgatgagaacacaagatcggcagacgtggtaggagcagataaacacatccccatgagacatattggggcgcatgaatatgacacacctcatattcttcaaagccatgaagaaagcatggcaaagggaaagaaatgcaaatga

SEQ ID NO: 3813 - DNA, 315 bp, Zea mays
  Peptide Sequence Number=SeqID_47188
atgcccactgctctgaccggcggcgcaccgaagggccccttcgtctgcatcctcttctgccacttcaaagggcggatacgcagagtaataatgagagcacatctcagacacggggagtccctcatggtcttcgacagcaccctcagcaacgacttcgccaacaaaccggtgcgcaggcaagcggagaccggcggcgaagaacgcctcgaaaacgaccaactcaccctccagctcggggacttcctccgtccccgaagcatgagcaactccgccgccaaagtagcccaaccgctgcatatcttcaacgcgggctga

SEQ ID NO: 3814 - DNA, 168 bp, Zea mays
  Peptide Sequence Number=SeqID_47189
atgcaggcggcatgcaaccgcgccaagtggacgcgcttctccgactcccgacatgccagcatggacgcccaggcccacgcgtcacgcaaccgcagggaccgggaaagggggataccccgaaaaggatccttccccgtgaaggaaccaggctccgagcctccttactga

SEQ ID NO: 3815 - DNA, 528 bp, Zea mays
  Peptide Sequence Number=SeqID_47190
atgaagaacgtagaccgacctctgtctaatccaaagcgcattataatccagtctactcaagagtgctttagtgttgacataccccgtgttccggcgaacactgtcagtcacaaaccaatgcatgccggtgatgaggacgatgaatttatgcctgtattgaagaagcgtaaccttgctagtagtcctccaagaatgatgaagaaggtcgttacaaagcggatgaaagcagtggacccccccccccccgacagatgtaaatgttttacattattccccaagatgttagataagcttgatcataatgatatgacaattcgagctggcccagggaaggagctaaaaattacaaaggaaatggtgcaccttatattggggttaccaaatgctggtggaggaaagccattaggcgttgatgagggtgttgctgcaaataatttaagggctgaacttgggttatccaaagaagaattcagtgttgcagctctacaagatcgtttaaggaaaggatttgacgatacttttttctga

SEQ ID NO: 3816 - DNA, 255 bp, Zea mays
  Peptide Sequence Number=SeqID_47191
atggagaaaggccaggagcaagaccgactcgcccgtacccacgtcgatgagcgtcggtcagctcgcgtctgcgaccgtgggcggggcagcaggttggggaggaagaacaaggtgaaggccgggaagacgaatgggacttccaacgacggtgaaaacgatgccactgcgcgggtcagtgtcagacgaatacggggaggaggcgcctgctcccacgccctctgccgagaatggggtggcgcagaggtggaggcatga

SEQ ID NO: 3817 - DNA, 636 bp, Zea mays
  Peptide Sequence Number=SeqID_47192
atgtcttctcgctcccttatgcatcgcgtctttccaccttccaagcccccggatgggggatacccgccgtcttttcgcctcatcgttggaggaacgcaactccgtgggagttggtacctttcagccatcgttcggcttcaaggattttcatcagccagcccggctgtacccccccgccggcggtcacccgagacggtgaccaccagctcctgggtggggagaagcaagccgggttgtgatcttggtgccaccttcagcttcaaggatgttcatcatcctcgctggggtgggggccgggctgagctggcgctctacctcccgcgcgggttcgtgggtcaccctctcccgcggcgttcgagggagagggcgctcactggccctgcgggtggcccggacttcgacaacgcggggctggtcgacggctggcgtcgtcacctccagcgtgtcgggctcgtcggcttggctctcggcggcccctcctgccggagggcggatgccgcgccgtgtgcacggcaggaccgccccagatgccgcgcgcggctagggcggcgttcgtgttctggggtggtcctgcctttgcaccggcgtggcatcttcacgcggaggccggtgccccactcgtccgggaggatttga

SEQ ID NO: 3818 - DNA, 987 bp, Zea mays
  Peptide Sequence Number=SeqID_47193
atgacggatgcggagaaggaggtagcaacagaaagaaggatggactcaccgcatcgatgcgattgtggagaccgtgttgtcatcgacgaagacactgcaaagcatttcgtgtgtccgaacattgattatccatacaggtggcgtaagtgtcgtttcagagagtggttgtatggtcctttgtcccattggccagaggcagaggagacgaggaaatgcagttgggagagttacgacgacaaaggagaggtgctgcgcacaatagagtccaagagactaatgggacagaagatgcgttgtggatctcagctcgtcgattcgtacattaacgatcgcatacacgacatgcgtaggtacgcgaaatctgccttttatgacagcccgaagcgtgcagagtataggaggttgaaggcggcagatgagaagagagcacaggatgtaagggaatgggaagcggctcgagccgagaaacagatgttggataatcttgctgatcgtctcaagggaaagattggatgtggcgtaaactatatggccgatgaggcgcatgcaagcaatgttcaggaaaaaatggcgacggtggagctgatggaggaggaggacgacgacacatctagattgagtgatcttatcgctctcgcagaggcaggattagatggagaagaggaggacgacacatcaaggttgagtgagctcatcgcactagctgaggcaggattacgtgctcaagaggaagaggacgagtttatgtctcaggccgctgaagaggtagaggcggcttattacaagcagaagtctgatgaggctgaggctgaggctgaggatgatctattttcccaagctgcagatgaagcagaagctaattattacaagagaactgttgacaagtgtgatgcacgacaatgcagcaagtggaatgaggttgtcgttgaggattgcacgacagatgactccgaagatgagttacttatatattgtgattctgattga

SEQ ID NO: 3819 - DNA, 261 bp, Zea mays
  Peptide Sequence Number=SeqID_47194
atggcggaaaaaggaaccgacttaaaggggaaaaggctatctagcccccgttgggatgtccataagtcaatagtaaatatgaagggcatgaataaaaatagaaatgatatcaagttacaaatgtaccttcggcttgaaagaaggtcccttgcgcatagtgtggcagaaccacccgaattattccagcttaagtgcctaagtcacgcctcaggggccgtaacacacttaaatcggaataacccgtcagtccttcagatctag

SEQ ID NO: 3820 - DNA, 213 bp, Zea mays
  Peptide Sequence Number=SeqID_47195
atggccgaagctctagcggcaatggcgggcagaattgagctcgccggagctaaggaaagggggctggtcggtgagggtgaatgcgggggcgaaagatatggagccaggaaatccgatctgtctccctgcccaaacccgaggcaaatccaaggttttgtcgtgtctaggtctcgcgtcccaatgccatcttctagcacacgacagaggggttag

SEQ ID NO: 3821 - DNA, 240 bp, Zea mays
  Peptide Sequence Number=SeqID_47196
atggcgggcggaattgagctcgccggagctaaggaaagggggctggccggtgaggagatatggagccaggaaatctggtctgtctccctgcccaaacccgaggcaaatccaaggagacaatcatgtgtcatggagtgccagaaagcaagctacaaagctttgccaaatgcaactgttgaagttattatggatccaatccttactgaaaaagctaagtattcatgcggtcccttgcattaa

SEQ ID NO: 3822 - DNA, 534 bp, Zea mays
  Peptide Sequence Number=SeqID_47197
atgaacgcatacatgtttatcctacgaaccgagtatttcaataatcatcctaaaacaactaactccattacacaacttgtaccacaaacctacttgtcctacttaaagtgtctactcgaaatctcattttataaattcaaggaacatgggacagcgaggagctcacctcgggtttcgacgacgacgcgcagacgctgcgcagatcgacgacgtgaggcccgttctggcgagtgcgacgcagcgaagggcgtcgttgctgctactgctgctcgagcggggacgcagactggcggaggagcacgtgaggaggagctcggcgtgtgctccagcccggtgccgagggatggcagtggccagacttgccggggaagaaggtcggcgcagggagaacttggactacaggaacagcagggggaggaggtcgatggctactggctgagggagacggtggggaaaaaaggagcctgcgctagtgcccacaggtccaaggggaggcagggatgctcggtcctgggcttgctgtgcgcaggttag

SEQ ID NO: 3823 - DNA, 162 bp, Zea mays
  Peptide Sequence Number=SeqID_47198
atggtgggtacaagtgcggtcactgcacgacggcagtcagagtctgtgaggcattgttctctggaggacatggttgctggagtgacttggtcgtccatcttgccatcgggttggactgtcgaatgggaccctgcctcggctgaggaggagcatgaggagtga

SEQ ID NO: 3824 - DNA, 408 bp, Zea mays
  Peptide Sequence Number=SeqID_47199
atggaggcaattgctcttcacggactgaccaccttctgcggattccaccccttggagctgtccactcaccccattggtttgttccccgcggagaaggaggacgacccaatgtggaaggaccgagtggagcatgccaaggatatctgggctatctacccagagcttgaggagctagtggggacgagggagaacaccatcgaggttctcgaggatcagctaatcaacactcagcagcagcttgcagaggctaaccagcacttggatatgcaccaccaggagatccaggacatggaggccaacgaggatgtcgacatcgagggaggagaggagcctgcctccagtttggacactactggctcaaggagaccaccttcccccgagtcaagcgttgcctcgtttgctcactag

SEQ ID NO: 3825 - DNA, 891 bp, Zea mays
  Peptide Sequence Number=SeqID_47200
atggaggacgcacgcgtgctggcggttgtcttcgtcgacggcgagcagagcgtggacttgggcacggtgaccgtgcagccgtcgtttggcggcgtgaagcggcttcaggccgtcgtggcagaccgcgtgggcgccgcgccgcaccagatctcggcgtccctggcgcggccccgccgcgcccgccatgtgcccctcgacgacgccaccgacctcgccgccgccgtcgcgcgggagggttccgggtgctacgtcatcgctgggttccgccgctcccgccggggcggccggtcccgccgcgacaggaagggagtcaacggcgcggccgtggagaagaccatcctgaagcgcctcccgcccacggatctggcgtctctggtcagccctctccctctccctccccgcgccagtgccggtgcctcgcccgggccgctcgtgctctacgacgactacgaggcgcggctgcgggagctgcagcggcagcgcgactggtacttgatgagcaccgcgggtgcgggtccgggtctggaccccgcctacttgcacttgtcggtggcggcggggcatccggataacgaggacccacagcagtggtccccgaggcgacgaccgtccccgtgccccgagtgcgaggcggcggcggcggccatgcggcagccggcgttccactgggagacaggttctctacagcttcttgcgtctctattgctgacgggagggaagggagcggatctggtgatccgtggtaacgtagttcttaacacattatcagcacgctctacctcgacgttgctacgagatcagatctgcatcaactcaccgtcaatccggcaggtctccggcctagccgaactctcctacgcgagaggcttcgattcccctctacacaattga

SEQ ID NO: 3826 - DNA, 231 bp, Zea mays
  Peptide Sequence Number=SeqID_47201
atggaccttgacgcggcagcggaagcagaggaggaggagcgcatactcgaggactttaatgaggctgaggatgctaggttcttcattaatgaggcggccattgcactaacagctccaaatatggtcggcccgagggatagagagacataccttggtcatgcagagctggagatggatctgatccttaccgatgacgatgcctcgattcctgcagtcgccgctgtcctgtag

SEQ ID NO: 3827 - DNA, 684 bp, Zea mays
  Peptide Sequence Number=SeqID_47202
atgctctgccccagctcgcgtccgccgccgcgtcacccccgcctccccacgctcatcccctccgcccccctgcccatgtgttccctggccgcaattcgtgggatgtcccacccgcaccgggcgctggccgagcaccacgacgccaggtccagggcctccaccaccaccacatcgtcctcgtcctcctccgcccgctgcgacgacgaccccgacccgccgccgaggtcgctcagggacccgccctacacgctgggccccaagatcttcgactgggacgagcagggcgccgcctggcaccgccgccacctggagacgccgcccttcctcaacgacatcaagccacgggtgctgctcgtcacaactatttatgttgtttctggccccattgttcttgacaaataccaacttcatgaagctgtccaagagaaagaacgaggagtagagtcgcttggtaggactccttgctacaaagagatgggatctggaaggccgcgcgtgacggtgggtggcacgccactccccgcgctacggcatcaggagcccacccgcccctctatagactacatcgcccgccctctgcagcagatcgccttagccctatcaggaatggagacgctctcggcgaagcatgaggacatggtggacgtgaacctgaagccgacttctaaccaatccaactcgtag

SEQ ID NO: 3828 - DNA, 683 bp, Zea mays
  Peptide Sequence Number=SeqID_47203
atggcggaggaatccgtggagatcgtcgaagatggtgccgccgacggcggcggaataagggaggatggcataggttgccatcctccgcgccatggggagaagcgagtcaccgccttcgcacgcaagatcgacctcgcacggcgctgggatcctctcccgaaccctaggccacccgagtcctccgcaggagcagcggggtcatgcgatccgtggcaagggacttttctaggctcacgagtccatcgccgtcgctctgccctcgtatcccctcccacgacaccgagatgttgccgtcatggactcttgattgacgcttgctctgttcatggactcatgcgcgcacgtcagatgactgcgcggtcggcgctggacgaggtcaccgacacgggcgccttcgaccggtcgccatccaccttccggagctccgtttctagggacgggcggttccccgccgtggcagggcggtaccacctctacgtctcgtacgcgtgcccctgggcgtcccggtgcctcgccttcctcaagcttaagggcctcgaccacgccatcagcgtcacggtcgtgaagcccatctttgagcggaccaaggagagcgacgagcatctgggctgggtgttccccgctgccgccgacaaggagcccggcgccgagcccgaccctctgagagcacctagagggggggg

SEQ ID NO: 3829 - DNA, 513 bp, Zea mays
  Peptide Sequence Number=SeqID_47204
atgaccaagaatacaagagacacaagatttatcccgaggttcggtcacaccaccaaggtgccctacttcctcgttgaggcgcccacaaagagccgggtctctttcaaccctaatcctccctttgccgaccacaaagctcgaatgaagaagaacaagagagatttagagatgaagcacaaaaaccgcagctctcaagctcactcaaagattcctctccaaagattgaaatgggagaggcaagagatgtgtgtgagggagagggaggtgttctgggtagaaatggagttcaaatcgtgctcactgctttgggagagagactgttggtcagaggtcagaggggtcagagaccagctgaactgcccctcaggaccagttcaactggtcttgaccagagagtttaggagagaaaaccccagctcaactgcccggaggcaagttcagctggtgtatggtcaaagaggttcacagctgaagttgagttcagctgaagttgagaaagctcaactcagctga

SEQ ID NO: 3830 - DNA, 513 bp, Zea mays
  Peptide Sequence Number=SeqID_47205
gccaagagggacaccaaggtattttcggattcagaattatggatatggagcacggccaggacgaagcctgaaccagacgaaggtcgaaaacagccgaagctgtgcgcagggaagcttcggcgcgatggcataagggggaaccgacttaaagatgaaaagacttcgggggcctcgacagatttccataaaccttcaacaaatgtgatggacatggatcgtttgagatcaagtccccaacattggcgcccacctccggtgaacccacttccacttcgagtttttgtgaacaccttcggaagctatagaccttcgctatggcgccgaagaaagcttcagcgactgaggcagcaccactacaaccgctggaccacaaccaggagaccgtctctcttcgggagtgaaagtgcattcatcccttttgtgagttttggtgatttggataacaacacatttaaaggtctaacgagtttgctaagtgttgaacaggaaattcagtatgatgaacatacttga

SEQ ID NO: 3831 - DNA, 594 bp, Zea mays
  Peptide Sequence Number=SeqID_47206
atgagtgggtggacaatcaaaatgaaacagttagagaagggggtgatcttgcatgggctcacgtggatgatgcaatcggtgcttctaattcacttcaaggtcgcaacttcccaagaagagactgatatgagtctgtttattcaaggcgttgtcaagctgctgctacacaagaggagagagttatggaagaggaagagcaaggcaacgagggcaatgaacaagatgatgaagagtacatgcctaatgatgatgaagtggatgactttggtgaatccccacataacagtccaactcaagctggtgctggtggtgaagaaaatgcaatggatgatcttgatttgggagatatttaggtttgaggcttcaaatgaggtaagacttattgtttatttcagtttcgttcaatttcaggcttcaaatgagccccaagaccactcaaatacagccccagcaactctgaatctgaagacacaacatcaagtgtgcaagctcagggcatgtctggtactggagtgctgggtgctcaaaaacaagcctcccctgattcaactcacacagaatcacttgatactagagtttatcctagaaacatag

SEQ ID NO: 3832 - DNA, 473 bp, Zea mays
  Peptide Sequence Number=SeqID_47207
tcggagtggcgcaggcggcgctgtccttctgtcagactggccagtggagcggtggagtgacggcggtcacctcggctctgccgggggcgcgtgtcaggatagaggtgtcaggccacctttgcgttaaatgcccctgcaatttggtcagtcggtgtggtgatttagtcaaggttgcttctgagcgaagccaaggccttgggcgagccggtgatgtgtccgccataaaaagggggcctcgggcgagacagaagtctctcgagctttatgctgatgggggttaccagctgagaattaggcgtcttgagggtacccctaattatggtccccgacaggttacgcctgaagcgggtggcagtgggtctgatccagcagtagggactggatttgttgactcgctcttcgcgttctctccttctggtggtgaaggcggcagcggtcaaagttctaaccacccaagtggtggttatctctaa

SEQ ID NO: 3833 - DNA, 57 bp, Zea mays
  Peptide Sequence Number=SeqID_47208
atggaggggagtttgctggcgtcgattggccccgccgtctcctctatggacatttga

SEQ ID NO: 3834 - DNA, 852 bp, Zea mays
  Peptide Sequence Number=SeqID_47209
atgtcgtcgattccgccgccggcgagcgggttgtcggccgccattgtcgttgtcgcgcggcggtggaagaagtatcatgtcatagctgccgtcgaaggacatgaactcaagagtcccgaaacgaagcaccgtcccgggccggagaggttgctagagactgcccatctggagcttgacggggagctgttcgtcagcacgcagcggtcccctacctggcgcgccaactgtcggcgtttcgagacaggggggtcccaaagccgacgacccgagtccgagccctggggtcgggcggagcggagttcgccgtcttccgggtctttagcccgagtccgagccctggggtcgggcggagcggagttcgtcgtcttccgggtcttagcccgagtccgagccctggggtcgggcggagcggagttcgccgtcttccgggtcttagcccgagtccgagccctggggtcgggtggagcggagttcgccgtcttccgggtcttagcccgagtccgagccctggggtcgggcggagcggagttcgccgtcttctgggtcttagcccgagtccgagccctggggtcgagcggagcggagttcgccgtggcgcctttggcaaggcctgactgtctgtctgactcaccctttgcgttaaatgctcctgcaactcggcctttgcagctttatgctgatgggggttaccagctgagaattaggcgtcttgagggtacccctaattatggtccccgacaggattatgggtctgtttggttcagcttttttctgaccagcttttctgaaaatctggctgtgaggagaatctggctgtggggagaatctgagtatgattacgattacatgtag

SEQ ID NO: 3835 - DNA, 855 bp, Zea mays
  Peptide Sequence Number=SeqID_47210
atgtcttcgcgcttccttatgcatcgtgtctttccaccttccaagcccccggatgggggatacccgccgtctttccgccttgtcgttgggggaacgcaactctgcgggagttggtacctttcagccatcgttcggcttcaaggattttcattagtcagcccggctgcatcccctcgccggtggtcacccaagacggtgaccaccagcccctgggtggggagaagcaagccgggctgcgatcttggtcccaccctcagcttcaaggatgttcatcatcctcgctggggtggaggccgggctgagccggagctctacctccgcgcgggttcgtgggtcagcctctccctcagcgttcgagggagagagcgctcactggccctgcgagaggggcggacttcgacaacgcggggctggtcgacgacgggcgtcgtcagcttcagcgcgttgggttcgccggcttggctcccggagccccctcctgccgcaagggcggttatcgcgccgtgcgcacgaaaggaccgcccaagacgtcgcgcgctgccagggcggcgttcgtgttctggggcggccctgcctttgcaccgatacggcgcctctgcacggaggtcggtgccccgctcgtccgggaggatccgagtggggatcagccggcgggctgacggcccctgtcgtcggtgccgaggcggaggcggctcgagaagtccccgtcgtcgacgggatcaccgccaccatccgcgcttcgggcctccggctctttgtacttgtcctcgcccctcgagcgtcggcgtgggcgagggcagggttgcagcggcgttcgccctgaggccatcgctgctgcagttcggccacccgtag

SEQ ID NO: 3836 - DNA, 1908 bp, Zea mays
  Peptide Sequence Number=SeqID_47211
atgcaagccggctcagagcagaagaagccaaaccgccgtgcgcggtgcgtacaaccgcccagcggttacaagcggccctccacttttgcccagaccagcaggcgaaagggcgggcaaccatgcaggcggcatgcaaccgtgccatgtgggcgcacttctctgactcccaacacgcccggcacggaggcccaggcccacgcgtcatgcaaccggcgcgccgaatgcttcgtgcatgcagctgcaccgccacttgcgccaccaccgcgcctcctcgactgcggaaccaataccgtgactcgaggcgacccagcgcacgacccagcagcgccagcctggcgcgacggtcaatacggccaaaaatgggccggcagtaatggcggtggcaggcgggcaggagcagcggtcacgtcgcggcgcccctggcaggagaagcgggcgacgcttcgccttcgccataatgaccgcgtcagaaaaggcgaagatgaagctgtggaaggagacttccaggagttccaagactacgacgagttccgacagagccgaagtgaccgccgtcacttcgccgctccactggccggcctgacaaaaagacagcgccgcctgcgccgctccgactgcgaagacggcgaactccgctccgcccgacccagggctcggacttgggctcagccccagaagacgacgaactccgctccgcccgacccccggggctcggactccgccctgacctcagccgtcggtctccgcctcgcccgacccaggggctcggactcgacctcggccacagaagacagactcgacctcggctttggaggagcttacacatcacccaacctagggcgcagaccacccacgtcaacaggaggcgccatcatcacgctaccccgagctgactcgggccacgggaacaagactggcgtcccatctggctcgctccgccagataggcaatgatgcactctgctacaccccccattgtacacctggatcctctccttacgcctataaaaggaaggaccagggccctcctagagggggttggccgcgcggggacgaggatgagacaggcgctcgcttgaagccgctcgctccctctcccgcgtggacgcttgtaaccccctactgcaagcgcacccgacctgggcacgggacgaacacgaaggccgcgggatttccacctctctcacgcctgtctccggccacctcacttccccccttcgcgctcggcctcgcgtcgacccatctgggctggggcacgcgacgacattcactcatcggcttagggaccccccggtctcgaaacgccgacaaatactattttgagtactgtgtgatgatgtccatgttatgtaactgctgtatggctcgacttagacacactacacaaaagtctgtcatccccttcttaccctcccgccttgctgagtgtccgcttcgccgtcctgtggccggacagtccagccacttggagaggctgcaccaccgcctgcatgaggagcaggaacgtcgacgacaggagcagcagggctcttccttctcgctccaacaggagatagattctgtgaggagctgctcccctgtgcttcccctggaggcgccccctgcaccaccactgggcgccccagcttctggagtagctgctggaggagacccagatgacggaggtggcgatgacaccgacttctctgctgaccaggagccggagggatgggttgctcgacccatcactcgcgacgctgctcgcgggtgtcacttccacgatgcgctcgacaccctgctacgtcgggcacttaaccggcgtacttggtctatcgagtatcgctgtgtggtctaccagcatagtcgcggggtctacccggaccgctgggaggtgacctgcttggtgcgccgcctggagaacagtctctag

SEQ ID NO: 3837 - DNA, 165 bp, Zea mays
  Peptide Sequence Number=SeqID_47212
atggggctcggtgtatgcggctcgctctgccaagtttgggtttcgccccttggggaggagtgcggcggcaatgagactgatggttttggttatgactatggtgctggcgaagatgaagctgtggaaggagacttccaggagttccaagactacgacgagttctag

SEQ ID NO: 3838 - DNA, 1029 bp, Zea mays
  Peptide Sequence Number=SeqID_47213
atggtactcttgctccaaggccagggacgcggcgcgctggcgttcctgggaggtggctacggccgcctgaatggtggcgagggccacgaccaacgcggaggaggcgggcggagagtcctgcagggcggtgctgacggggtccatgtccggcggctgctgcagatcggggaaggccgacggcttgggggcgggccggcggctgggggtgcgccggcggggagaggggagggccgacaactgggagatgtcagcggcaggggagtgaccgacggctgggggaacaagctttggcatggtgctccatcaggacggggccctgatcgcttgccgcagcacgccaaactggccgcctatgagtacgagctcattggtctgatttggctggcgcctgaggactataaaatcaagggcgcagcaccttgtatcagcagaaaagaaactcttggtcttagagaagcctctgtatattatgcggggcaagatttagcacttaaagataccctttctcagacccgcacagtgtgggaagcctacgacactgggtgtcatgttatatatgagctaaagagtaactataaatggtttcgtactttatttatctgctgtttgttcatcaagatgcttgaagagcaccccaagttgcggatgtcgaaagccagcgtgacgcacgaaggtaacaacctgtacatgcagtcaccggaggtgctggagcagatgacacggccaaacctgagcatccccatgtttgagcttctcaaagaggtcccatacaccactgtccatgccacgggcatggcagagaacaacgggaaaaaagtgtcctcgttgaggaagctccgtgtggccttcaagggcatcgaagacgcctccaagatggatacgacctcattgtggcttatgctattggtattattgatggttaaaacttatattaaaggttacaagcgggtgaaagagggaggagaggctcctaggtcttttatcggggtggaagtgaagctaagagctatagagtggacttttacttaa

SEQ ID NO: 3839 - DNA, 78 bp, Zea mays
  Peptide Sequence Number=SeqID_47214
atggaggagttagacaaccatcgctggcataatggtcaccccgagttacgcaagcgcgagcatgttgctccggcttaa

SEQ ID NO: 3840 - DNA, 381 bp, Zea mays
  Peptide Sequence Number=SeqID_47215
atgcaagtggcgtgcaaccgcaccacggggacgcaccccctcgacttcgacgcatccagcatggaggcccaggcccacacgtcatgtaaccggcgcgccggttactacgtgcgagaaactgcaccgccacttgcgctaatgccacgccttctcgactgcggaaccagtgtcgcgattcgaggcaaccctgcgcatggcccaacagtgccaaccgagcacatcggtcatggggaccgggaaaggggacatttcgaaaagggatccttctccgtgaaggaagcgggcccccgagccctcctactgatcaggggttcgaaggctggcccctcggaagggttcgacagccgcctcagagcactcgggctccgcgcccactactga

SEQ ID NO: 3841 - DNA, 186 bp, Zea mays
  Peptide Sequence Number=SeqID_47216
atggcgtatcaaatgctgccgctgtgggttcctatttatacgcctagcgctttgcaacttggcggaccccgtttgtcattgactttcgctattctagcgaagggaaggtacgtccttcatgaccttcgtctgaagatcattatatatcctaagggagataatgcttcgaaggacgaaggtctttaa

SEQ ID NO: 3842 - DNA, 708 bp, Zea mays
  Peptide Sequence Number=SeqID_47217
atgaggcgtgttagtatcctttgtgtccaagagacaaaatggaaaggaaaaaaagcgaaggaggtggagaacactggtttcaaactatggtactcaggaacagtggcaaacaaaaatggagtaggtatcctgattgataagaccctcaaggatggagtggtggacgtcaaaaggaaccagtcttggaaaattgaaacgaccgagccggtaacagctatatacaatacaagatatggtgagactgaggagaggcaaagtatgaaaaattctatttctgaaaagttcataaattctttcttgaagcacgagagtgaatataggaccttaatactgcctctgtctctatctaaaaatatcctttattatttacaggttcttcgctgcttcgagacatccacagagaacttccatctagtggtgcttatgaggggcggtggcggaagtgttattataacaggcacaaccgaacacgcgaaggtggtcgtaagagggggctgtgccgtacagggcgaagcggggagtagggtggctcaccgccttcgagggaaggcagttgaggaggtgtatggcggtgtgcaaggcctatgcctagtagctggcggggagcgatgtctggaagcgaaggcagtgggtcatattagtggtggtgcgaatcatgcgttcggcccagccgttctgggcagaggtgtagggaaacgagaaacataa

SEQ ID NO: 3843 - DNA, 279 bp, Zea mays
  Peptide Sequence Number=SeqID_47218
atgaaggctggagagcaccgggaggataaggagggggaatgttttgtccggtttgggcatggcggtggcctgactccttccggtataaccgttaaggttaggacgtgcgaggaaagaaagagattcggcattcgggttcacgacgaaaaaggagatcggcctcctgggactagtaattgtatcacatttgagtcccaagggattggggcgcttcaggtggtatcagagctattgggttggccgcaggacgtaacccttagcctgatcaaaagtttttga

SEQ ID NO: 3844 - DNA, 1032 bp, Zea mays
  Peptide Sequence Number=SeqID_47219
atggaggtccgctgccaaaccagcttttgccaaaatgaagatggtttccccaagttgttgaaagcatgcatagttcgcctcggaatcaggagccagccagagtatgatggtcgtgaattcgttgagcatggcacagagaagtgtgtcgtggctgtatacattggatccagtccgcaccatgtggaatggagtgtcactgctgctgggcacagattcaaagacacctgccaagtcgtcgctcgtaaggcattaagggccatgtgtcagatttatgaagaagaagtggccaacacaccgctcagattctttccaccctttcagagagaccgtcccgtttggatggctaggatgcgtgcattggaaggtcagcagctgcttgaggacgaccccacagtcgcgtacctcactgcatacctgctcaccctggatgcacaatatgatttcttggctcggcaccaccgtcagatgattgcccgagcagaagatgcagagaagctcaaccgtaagctccatgtggatctcacctcggctcaagcccgtgtagctgccttggaaagtcgtgaagccattgctgttgaagccctgaagcaagccaaggatgagcacgtccagaagttgatggaggcctacttggtaacccataaccaacatagagccctgtggatccaagagcccgcttcatccaaccctgttcaacccatcagagttgaagacccccagattcttgaaggtcacccgatctctatcagaggagagaagaaggctatggataagcaagagtaccctgaatcctcccaagatcccctgccggagttgtttgagcccctcaccatgaagaagattccaacaccatcccttgaagtcaaggaagaagctgcaagcaccccgccagcaccgccgccctctgaggaactacaagagccaatccagcttgaagaagagttcgaccacgtgctgtcatctcagtcgccgctagaagaagtcattaacatcagctccctcttgacccatccaggagatgtctcagattga

SEQ ID NO: 3845 - DNA, 282 bp, Zea mays
  Peptide Sequence Number=SeqID_47220
atggtgatggagcaggtgacacgaggcaacaagtgtgatggagggcgggatggtgttgctggcggtaatggcggcagtgtgtgcgctgcaaagggggcatggggcggtggtagtgcatatggaggcagggcacgcgtgaggggagcacgggtgagtggtggggtcaatgaccctgatgtttgtggtctctggttccaagaatctttgcctctctgtatgcttattctaggcttcaagggtaagcttcctggtatcttcttgggtaaggagcatttctcttga

SEQ ID NO: 3846 - DNA, 282 bp, Zea mays
  Peptide Sequence Number=SeqID_47221
atgtcggacgaccttgttgttcctgtccactttgaagttggccaagaattttgctttcgcctcctggatcatccgctccttgtgctcctcaaactggagctgctcgtcagccggcaagcggagtcgccaaaaagtatgttgacgcttttttggagcgccaaatacccaagaagaaccggcggcggtgctctctggtcaggcgtggacggggcggcggaagatcgccggcggcgcctggatctcgctcccgggagggaccccgtcggggaggagagatcctag

SEQ ID NO: 3847 - DNA, 2388 bp, Zea mays
  Peptide Sequence Number=SeqID_47222
atggatgtggttgagttggttccctgcgcccgcaataaatggggcaactggcatgagttttggttctatgttgcggagggcacagtcgaagaccatccggggctgcccgtggccgagatgtgctcgcattattactcagcatacccgcagtttgaagtggcggaggaggatgcaagcgaaggggcccttcggtgcgaggccggcctgagcagcgggcgcgatttggttgaggagtttgtggcgtacggggtgtggcctttggcgcatggctgggcgctgggcgaagtatgccctcgccagatgccttcccatggtgggaagctggtgcgaagtcccaccttcgcactggatctgcataaccgcgatccgaccgcctttgtgcgtgaggcagaggatggggcggtgcggatcgttggtcggtacgtgccgaagacggagggccagcgtagctgggatatacgcgggtctaatgaccgcttgaacagggtcttcgagttgaaccgtctgccgtatggcggttatcccgggaaagacgatgtggatcgtcgcgggaagaagccggcggtagagactggagacgaccccgcgccggcggccgccccatcctctaagaagaggaagctaggtattgctacgggaggactgggggtttccgatggttttgctagggaattgatgaggacatgcgcggccccagggggaaggatgtcttcgcccgagctccgggagtcttcggcgcggatgctgagggttaccgggggttggtggcctaagaatgttcctatccccctcgcggccggcgaagacttttttacatctcgcatggttcgtgattggagagtgtttccttacgggcggaatattgctgctgttgtgtcggcagtaatggacaaggatcgtcagggagttgcgcagaagcgccaggcggtcgtcaggctccatgaggccaggccgaagaggccgcgggggactgcgaaggctactgccctcggcgggagccagccgctgctggcggcgaagtcggccgcccctaggtccagcagggtgccggaggctgcgaaggcggctgccgccggcggtactaagtctgtcccggcgggagccgtgaaggcccgagagttgccgccaccaggcaagcgcgtggccgacttcaccaccgatattagtgtggaagattattttgttgggttgggcgaaggccaacttgttgttgttccgcccgtcgtgttgaccgcggcggctgccgtggtgcccagggcgaagggtagtgctcttagtgccggtggcgagattccggcactcactgccgtcagggacgaagcgggcgctgtgtcccaccggctgaaggaggcattaagtcaagcggctgacttcgcagaccgcgcggcgtcgggggcccttacggcagttgtgtctgccgatgtcgagagactttgggcgcaacatgctgacgccgtccgggaaaagtcggccgccgacagcaagtgccgcaagctggcggataaggtggccgcgctggagggtgagaaggctgaccttcggcgccaactggcggaggagaggaaggaggctaatgaggccctcgccaaggcgcagtctgcgcaggcggaggccaatttggtgcgggcggagggcagtcttgccaggcagcgcgccgaggaattggaggagcggctcaacgctttgcagacccgtgtggagaggaccgaggcttcgacgcgctcggaggttgagcggacacgcaaacaacttatggactcataccatgagctgggcgcgcggaccgctgacttcgaagtgccagaccgagagcccggacttcgctgcctcgagtggctacaggaggagttgctggcgctccccgctatcgtggaggggttcatgtcctatgcctccctggtcacctgcgagggggcgatgaacgcgctttcccgcgaagggtgccggcactatgaggtcttcgaccaagcagatgaggatttcgagcgcgatatttacaaggttgaggaccctgtggtgaaggagtccgcgggagccctctacgaccggatgtggggcccttacggtcgagaggtggtcagggagcggaccgagacggcgaggggtcaggttcaagattttgggcctgcgcacgcaaccgctactgctaattttttggcggcttcgaccgtggatgatggaaataaatcggatgggtctgcatctaagttttctgattttggtgactctgggagctcggttgagtggactgaagagtcttcggatgaggacttggactactttgcggccttggatgtggcagcggcggaggcttcgtcgcatgctgcggatgttgaagttgtgtctggtgcgcatgtagtcggtctttgcgcggacagtttggtgtag

SEQ ID NO: 3848 - DNA, 1233 bp, Zea mays
  Peptide Sequence Number=SeqID_47223
atgtccttcgcgctcccctcatgcatcgtgcctttccatcttccgagccccccccggatgggggacgcccgcaatccttccgccttgtcgttggaggaacgcaacttcgtggaagttggtacctttcggccatcgttcggcttcaaggattttcatcgtgcagcccggctgcatcccctcgccggtggtcacccaagacgcggcttcggagccgctcccggtgccgccttccgccacggtagctggaagaggttccgccgccgacgagctagccggcgccacccacggactgacctccaactcttcggccttctgcctgtccttgcctctcgagtcgggggcatgggcgagggcctcatggaagcagcatccgccctgaggtcatcgctgctgctgttcggccctccggggcagaagtcgtcgtcgttgccgctgccggggcgggcgacgacgagccgttcgtcggtcttctgttgctccgcaggccccccagtcgcgtggggttgttcgtacctgcggagcacggagccgtgttttttcttcatttcgagcactgagactcgccttatcgattatctgaaccgcttcaccgagcgtgagttgcctcgtgcaaaggtgacgagtgagcacagacggaggcagagttggcttcgaaaaggaggtgtggttggccagagcctggccgggtcgtccactggcggaaccgacgccggagttgagctaccgaggccacaagccgagctgatgtctttgggggtcagctggccgaggcctcggggtggccggctgagccgcctgctcgggccagattctcgaagaagaccctggcggcgatggcccgggtgtggtgctgatgtcgtccttcagagtgggggccctccgaccgcgtcgccgtccgaggctaggtcagaccccgccggaggtgtagttgatgccgagggtgctgctgcccccttcggctgtcgacgtccgagcctgcaggatcagtatccggactcatttgtcggtaacagaattgtttgtgcgggcgagagttgcttttcacggaaggcgatgagtgagggttctgttaccgacgcagtcgagaaggcccgaaaaatcatttcggtagagaagctctcgagcatgaagacttgttcggtccgtggagtcacttatccgaacgtgagttacttatcgcagaagatgatgagtgaggaaaattttgacgcagagggggttgcccccttctag

SEQ ID NO: 3849 - DNA, 456 bp, Zea mays
  Peptide Sequence Number=SeqID_47224
atgggcaagagtaagaagggtagtagttcctcgcctcgctctggtgataagcgcaaacgtgagccgactcctccctcggaggacttcggcgactcggagtactcggaggaggagttctcctccgagttcgagggatctccagcccccacctctcccccggagtcgtctgataattcagacgactcccaggggattgccgtggaggtctggacctacatccgggccgtcgagcgcgccgggctcgagggctcggatgagtcggagtactcctcggacgcggaggactcctcggactcgtccgaggagggcagtggcagcaatggcggaggcagcaacgacgacggaggcgacggcgacggcggcgacgacagcggcaaaggcggcaacggcaacggcgagggcggccacggcggcggcaggggcagcagcaggggcagcaaccaggccagtggctaa

SEQ ID NO: 3850 - DNA, 528 bp, Zea mays
  Peptide Sequence Number=SeqID_47225
atgaaggtgacttctgataatactcaaagtgaagaccttcgagtggattattttcaaaaatccactcgaagctcgggggctacacccattgggtgcacctttggtgcacccaatgaagttcgaagtcctgcagtacgaaatgctgacctcagaagcaaaagtctaagacaaaacaccaactttcaagtgataaaagcagaaggagacaattatagctgcagcaatacgaaagccttgtgcctgcaactagagatggcaatgggtacccgatacccgaaacccgtgggtatgggaaacccattgggtacccgaaacccgcatgagtatgggtttgggcaaaattttatacccgtcatgggtatgggttttttagcgggcgtattttttcttcgcgagtacggatttggggaagtaatacccagcgggtttttacccattgccatctctacctgcaacgctgtacgtactaatgcaggacttctgttagagctgggcagggatgctcctgttcttgctcgtctctggtaa

SEQ ID NO: 3851 - DNA, 489 bp, Zea mays
  Peptide Sequence Number=SeqID_47226
atgactcgtgggcctggccccccccgtgtcaggggctggaccgctgctttcggcgaggacgaagaggcgcggcgattcgctcctcgcatggtggttcgccttctccgcacccaggaaccggcacgccaggtgcatgacatgtgggcttgggcccccatgccagaggtcggagacgttgtttgtggcgaagatgaagaggcgcactaccgtgagtctgtagcacgctccttgcatggcggttcgccttctccgcactcggagaccagcgcactagctgttttagtctgggaggccaagttgtgtgtccggaccccctggaccgcgattccaaatactaggacacccgtcgcagagtggtggagcgtgcaggcttacggccaacaggccgggcttatgagggcggacctcaccgagctggcgtacacgtatgcacaacctagttataaaagggagaaaaactcaacccctcagacttgcttctatggatag

SEQ ID NO: 3852 - DNA, 684 bp, Zea mays
  Peptide Sequence Number=SeqID_47227
atggctgaccctgaaactgcccttaatgttgctagttatatgacgaagttggagctaatgcgggtggttgaggcatggcccatctggtcggagaatggcttgctgaagcaactgaagctgaaggctgctggattggctgttgattgcgtacatactttggaatgtacggagaataatgtgaagcagtatgaaggacttgctttggctgattcttccttgcctcggcttccacaatttccttctgcttttggattggtcgcggtcgtcgtcgcgacgccgacgcgcgcagtggcggcggtgctgaggcgcagcggcgtcgacgacgacactcacatacggcccgacatgttcctgctagctgtgggacgacatcacattgacttggacgttggagcagcaagaccgactgggacgcaggttctgaacgagtacatgaagtgtcgagggcattctatcaacaactttcaacaatattcggatgcctacttgaatgtagaccagtacatggaggcttatagggctttgtgtgagatatgggcttcaccagagtgtattgagaagtcaaacatgaatcaacataagcagcgccatcagcaagacgaggaggatgatgaggtcgtagtcaaccatacctatggggctgatggacacattcagttggcgaagcgaatggtgagggcatag

SEQ ID NO: 3853 - DNA, 189 bp, Zea mays
  Peptide Sequence Number=SeqID_47228
atgaacgtatgtgagctcactcttgctgtctcacaccccccacaggtcaagaacaggtaccgcaggatgaggcgcttggaggatgctgcgattcaagaagatgaggtgtgggtgagcggtggacgcgacgacgacatcctccccgccgccggcgaccactatttgagagcacctagaggggctgaatag

SEQ ID NO: 3854 - DNA, 291 bp, Zea mays
  Peptide Sequence Number=SeqID_47229
atgggcgtgcctgacctctgcgcgcgctggcgcgcaataaatgcactgcagatccatgaaggccaaggcaggatcaaactcactaggctctggtgtaccagttgctcattggatgcaaagacgaaggttgtagttaatgaacataagctcatgcaatttcaagtagccgagtttgttgcggagctttgtgtggatgaatgcaaaaggctttacaagcttaattactttcctgcctccaagaagccacttggtagcaggagaaagatagtagcaggaacaaatcttgcatga

SEQ ID NO: 3855 - DNA, 645 bp, Zea mays
  Peptide Sequence Number=SeqID_47230
atgctgggtatcgacggtaaagtggtgatgccaaaaggtgcgccaaaatccaaagtagcggcaacgtgcgactactccgcagaagtcgttctgcatggtgataacttcaacgacactatcgctaaagtgagcgaaattgtcgaaatggaaggccgtatttttatcccaccttacgatgatccgaaagtgattgctggccagggaacgattggtctggaaattatggaagatctctatgatgtcgataacgtgattgtgccaattggtggtggcggtttaattgctggtattgcggtggcaattaaatctattaacccgaccattcgtgttattggcgtacagtctgaaaacgttcacggcatggcggcttctttccactccggagaaataaccacgcaccgaactaccggcaccctggcggatggttgtgatgtctcccgcccgggtaatttaacttacgaaatcgttcgtgaattagtcgatgacatcgtgctggtcagcgaagacgaaatcagaaacagtatgattgccttaattcagcgcaataaagtcgtcaccgaaggcgcaggcgctctggcatgtgctgcattattaagcggtaaattagaccaatatattcaaaacagaaaaaaccaccaaacttga

SEQ ID NO: 3856 - DNA, 918 bp, Zea mays
  Peptide Sequence Number=SeqID_47231
atggccaccgccggcagcaagcaaggaggaggctcgtccaagccgcctgcggctgctggtcaggagttggacccgaggtacgagtgggaggagaacgccagcagcttcatcctccgcatccacctctcagaaggcttcaggaaacaagatttcagggtgcaagtcgacggcgccggccgcctcaccgtccgcggccagcgctccgacgccgccgccgccaacgccaacgccaggcactcccgcttcaacaaggtcttccagctgccatccacctccaacctcgacgacatcgccggccgcttcgaccttggagtcctcacgctcaccgtgcccaagcgcctgcccgcgcccgcaaaggaagaccagcagcaggccaagaagcccgaggatgccgatgccgatgccgctgccgccaccaagcaggtggcgggagccaagggcgccaaatcggagccggagcagcagcacaaggaggcggcggcaaaggaagataagcccaaggcggccgccgccgccgcagcacctgcaccggcagccgacacgacggcaaaggaagataagcccaaggccgccgccgcagcacctgcaccggcagccgacacgaagaagcagcccgagacgcaggccaacgcagagagcaaggcgacggatccgaccgaaagcctggcggagcggcgcaccgaggaagagcgggccaatgcaaatgctgcagctgcggcggagcaccagagaaaggcatgccgtggcttcaaggagcgcgtggcggaggagctccaggggctggcgggctccgagtgggcggagggccttgtggagacggtcaagaggaacagggaggtgatcgccgtcgccgtcgccgccttctccctcggcgtattcgtctccagcaggctcttctccaggtccagcaggaactag

SEQ ID NO: 3857 - DNA, 882 bp, Zea mays
  Peptide Sequence Number=SeqID_47232
atgggggacatactcattcctagccttatggttggagactgctctcgcaccttgtgtttgcgtgtctctaggctttgggaattccttgatcctcaggatgacagtaggctcttgcatactgatcttgttttgcttgatgaagagggaaacagcatacatgcccagatctatcctcctttgtgccaacagttcagtgcgctgctcgatgagggagggatatacaacttgaatgttaatgccctcgccatctctatggtagatgtgctcggtgttgtcagcgtgatctcccgtgtttcatcactacacacaaggggacgacaggctgaggttatgaagagaacagtcactataagcaatgcaagggataccgggccaaccgttgatgttgtgctttggggcgagcgggccacgactttcccagctgaacaggtccacagggacagtgaatcctcaccacagatcataatatttgttggcactctcttgtcttcctcaccaaatctgattactgtcattcctaaactggcgtgcctaaacagtgctgaaaccaaccacctccctgtcatttgggatcagggcaaagcagctgctgagagtacagtaattgcagttcctgaacataagaagctcaaggatattaagtacctccatcattttgaaaataagaagaaggaatggcttgtcatcgtaaaggtgctcaagattgatagctcatggtggtacaacgcatgcaaaaaatgccttaggacaaccaaaccgcatggtgacacatacaagtgcaccaataattcctgtgacaacataggatcgcctaccccaaggtgctgcatgaatgctgccgtagcagagaaagccaaatatgagaagcctggtaaagcataa

SEQ ID NO: 3858 - DNA, 2169 bp, Zea mays
  Peptide Sequence Number=SeqID_47233
atggctgaaaggtaccaactcccgcggagttgcgttcctccaacgacaaggcggaaggactgcgggtgtcccccatccgggggcttggaaggtggaaagacacgatgcataagggagcgcgtagacatggtcgcctttcaagggggccaccctccttttaaaggcgactctccctacttgcgtccccagccgtcgtgggctgagtcttctccagcacgctccaaggtcctcccctacggcgcgggggctggggcccacacgtcatgcaagctggcccagagcagaagaagccaaaccaccgcgcgcggtgcatgcaaccgcccagcggttacaagcagttctccacttttgcccagaccagcgggcgaaagggcgggcagctatgcaggcggcatgcaaccgcgccaagtgggcgcacctctccgacttccaatgtgcccagcatggaagcccacgcccacacgtcatgcaaccggcgcgccggtcgctacgtacaagcaactgcaccgccactcgcaccactgccacgcctcctcgactgcggaaccagtaccgcgactcgaggcaaccctgcgcacgacccagcagtgccagccaggcgcgacggtcgatgcggccaaaaatgggccagcagtgatggcggtggcaggcgagcgggagcagcggtcacgtcgtcagccaagcttacgtcccatcctggggcagggaagcgagcgacgcttcgccttcgctataatgaccacgtcaaaaaagggaccgggaaagggggatacctcgaaaaggacccttctccgtgaaggaaacaggctccgagcctccctactgatcagaggttcgaaggctggcccctcggaggggttcaagagccgcctcagagcacgtggactccacacccactactggtcagaggttcgaaggccggcccctcggaagggttcaacggctgcctcaggccactcgggctccgtgcccactactgatcaggggctcgggggctgctctcgcaaactcggctccggccaaaccgttgacagcgtcaacataccagcccgagaacttggaacccgaccgtgcacccgggctacggctagctcgcatgagggaacgaccagaccagccgaagcattacgtgaggcattaagacctcggaggagtcaaaccactcctccgaggcctcgggggctacacccggcgggtgcgctcgcacgcacccaccggaacaaaacgcaaccgagaaaggctggtccccttgcaaaaaagtgcgacgaaagcctccaagcgagtgctaacactcccttcgaggctcaggggctactgtcggggaccataattaggggtaccctcaagtctcctaattcccagctggtaacccccatcagcataaagctacaaaggcctgatgggtgcgataagtcagggatcggtccattcgagggactcgatcacgcctcgcccgagcctagcctcggacaagggcagccgacccccggaggatttccgtctcgcctgaggcccccctccagcgacgaacatacttacggctcgcccgaggccctgtcttcgccaagaagcaaccctgaccaaatcgccgcgccaaccgaccagatcgcaggagcatttaatgcaaagaaggacagcgccgcctgcgccgctccgactgctgtgccgctggacaaaggctcggactcgggctcagccccggaagacggcgaactccgctccacccgacccagggctcggacttgggctcagccccggaagacgacgaactctgctccgcccgacccagggctcgggcttgggatcagccccagaagacgacgaactccgctccgcctgtcccagggctcggacttgggctcagccccagaagacgacgaactccgcttcgcccgaccccagggctcggactcagccctggcctcagccgacggtctccgccttgcccgacccaggggctcggactcgaccatgaccacggtagacagactcgacctcgacctcggaggatcctccacattgcccaacctagggcgcggaccgaccacgtcgacacgaggcgccatcattaccctaccccaagctgactcaggctacggggaacaagacggcgtcccatctggctcaccccgccagataggcaatgatggcgccccgcacgctctgtga

SEQ ID NO: 3859 - DNA, 1179 bp, Zea mays
  Peptide Sequence Number=SeqID_47234
atggcactcatcatcaagagctttcgccaaatcctcaagcaaaggagggggaaggactacaagtcccgctccaagagtgtgtgctaccaatgtgtgaaagtgacagggacgaagataagaaggggaaggagaagaaaagatactacagaaagaagggcggcgatgcacatatatgtcgggaatgaggctccaacgaaagctccaccgactcctcctccgacgaggacgccgccaacatcgccatcaataaaggcctcctcttccccaacaccggccacaagtgcctcatggcaaagaacgataagaagaagaaggcgtccacacctgcggcgcggtgcacgttctgcctcctgcaacccgccccgctcgtggccgcatccctcccgcagcagcaccatcaacggcgcaacagccgcatccagtccctcccgcatcaacgacatcgcagttccatcccgcggccgcatcccagttcgcgcaatccatggtccacgattcgcgcttaatcctcggccacatcccagttccatcccgtggcgcaatccattgactcccggccgcatcccagttcgtgcaatccatggtgcaatccagttccgcctggccacatcccagttccatcccgcgaccgcaccatcaacggcgcaacggccgcatccagtccctcccgcatcaacgacgcaatccattgaccccgattcgccgcaaccagtcctccccgccctcccgcatccagttcacgcaaacaactccattgaccccgattcgtgcaatccagacgcaatccaccaattcgcgcaatccagatgcaatccagacgcaattcgcgcgaggttccgagaaaggtttccatccttctccacgctctcctggaagactaccatccatggcgtcgccgcggccgcccccgcaatcaactccattgcccccgcgattcccttcccgacggcactcaccttccatcgttcctgcccctcactcgccggccaatcaagtcctgagcgtctgcctccacacacctcccttcccgtcatccctagagaagacaaggaggtgcacggattattgagccagcgaccagattggaacaaagatttacttctccaaggatgcaaactgaagttggtagatttggagggtgctattcaagtcgatgtggaggagtgtgattttctatag

SEQ ID NO: 3860 - DNA, 150 bp, Zea mays
  Peptide Sequence Number=SeqID_47235
atggcgggcggaaatgagctcgccggagctaaggaacggtggctggccggtgaggggaacgggaaagggaggatgaaaatgggcgagttcgatgactactgggcgcacgcgtacaagggcaactcagcggtcccgcactccgacccatag

SEQ ID NO: 3861 - DNA, 486 bp, Zea mays
  Peptide Sequence Number=SeqID_47236
atggatcaggatatccaagagaacatcaatggtgcagaccctgatactaagcggtggttagaagatcacaagcatctggtatttggcttcttcaaggacgcagtcgctgtgacatgtatcctgcacagacttaaccgttgtccacgttcatcaacgactaatcacccgcaatcctcccttgttcaactgaaagaccccgtttcacaagacgcttggagcagacttcgtcacatgctaactcgcagcggaagaagaaggccaccgcggcggcggcggccgcctcctccaagcgggagggagagggagcgggagcgggagcggaacaaggaggcggacgaggtcaccgtggagctccgcgcggtggggttcgacaaggaggtggtgctgaagcagcggcggcggatgcggcggaggcgccgcctgggcgaggaggagcgcgcggccatcctgctcatggcgctctcctccggcgtcgtgtacgcctga

SEQ ID NO: 3862 - DNA, 144 bp, Zea mays
  Peptide Sequence Number=SeqID_47237
atggcagcacagcagcagcagcagcgaagcaagcagaaaaagcagcccggatggggtaatactgtccctactgctttcgtgcgccggcggcgcgggcgtggaggggatcaggggaaggccagcgatcgggagaccgggagctag

SEQ ID NO: 3863 - DNA, 399 bp, Zea mays
  Peptide Sequence Number=SeqID_47238
atggctcctgatggcttttgtcgagcgtcgtatttcaccgagagcttggcacttgacaaagacttctttgtcgagtgtctttctatgtcgagtgttctgtcctcggtaaacgagatctgtggaaccggcggcgcgagggagcttctttgcgtcgcgctgctgctggccgccgttgtcgtgcagcacacctgctcggcccggccgctgcagcaggagacgacgacgacgccggcgccggctaaggagggttttggtggcctactgcacgcggccgcgcaggttcacgtggatgccgccggagcggcggcggcggcggcgcaagggcaggttggtgacgccgccgtgccgtacgaggacaagcggctgagccccggagggccagatccccagcatcactaa

SEQ ID NO: 3864 - DNA, 231 bp, Zea mays
  Peptide Sequence Number=SeqID_47239
atggcaactcgtgccgcctgggcccccagcttgagggcatcttgtgctggagaagctggcaccgtcttaagggccttccggggagccagaccggccgaaccgtgcctccgtttgctaggaggaaaaggcgccgccgaggttcgccctgctgccagcttcgacactgttcccacctcgggcacccagggcgccgaagggacggtccacccaggcgcagtcacgacgacctaa

SEQ ID NO: 3865 - DNA, 113 bp, Zea mays
  Peptide Sequence Number=SeqID_47240
atggcgcctcctgttgacgtggctggcctgcgccctaggttgggcgatgtggaggctcctccgaagccgaggtcgagtctatctgaagcgtcccgatcctttgggactcaaat

SEQ ID NO: 3866 - DNA, 315 bp, Zea mays
  Peptide Sequence Number=SeqID_47241
atgccgttgtggcagccggagagattttggcacccagctggtgtgatgtcgtggccgtcggaggagcgatggagcctggcggagggacagctgtcggagagggtgatgatggcgcctcctgttgacgtggctggcctgcgccctaggttgggcgatgtggaggctcctccgaagccgaggtcgagtctgtcttccgtggccgaggccgagtccgagcccctgggtcgggcgaggcggaggtcgtcggctgaggccagggcggagtccgagccctggggtcgggcgaagcggagttcgtcgtcttccgggacttag

SEQ ID NO: 3867 - DNA, 420 bp, Zea mays
  Peptide Sequence Number=SeqID_47242
atggctggaaggtaccaactcccacggagttgcgttcctccgacgatgaggcggaaagacggcaggtatcccccatccgggggcttggaaggtggaaagacacgatgcataagggagagcgaagacatgggaccgggaaagggggataccccgaaaaggatccttcctcgcgaaggaaccaggctccgagcctccctactgatcagaggttcgaaggctggccccccggaagggttcgacagccgccttagatcgcgtgggccctacacccactactggtcagaggttcgaaggccggcccctcggaagggttccacggccgcctcaggctactcgggctccgcgcccattactgatcaggggttcgaaggctggcccccgaagggttcacagctgcctcagacgccgagcgagggatga

SEQ ID NO: 3868 - DNA, 2268 bp, Zea mays
  Peptide Sequence Number=SeqID_47243
atggggattgatctcaacgccgtgggggaggacgacccggcgggcgcggtgtgcgcggagctgtggcacgcgtgcgcgggggctggagtggcgctgccgcggcggggcagcgccgtggtgtacctgcctcaggcgcacctcgcggcgggcggctgcgacggtggtggggtgtcggcgccggccccgccgcgcgtgccgccgcacgtggtgtgtcgcgtcgtcgacgtcgagctacgcgcggatgcggccacggacgaggtgtacgcgcggcttgcgctggtggcgatggatacgatgtttggccgaaacatcaatgatggtgaaactgaagagaagaatggcgaggaagaggatggcgacggagaaaagaagcacgcatcacacatgttctgcaagacactcacagcttctgataccagcacacatgggggattctctgttccacggcgagctgcagaggactgctttccaccattggactatgagcagcttaggccttcccaagagcttattgccaaggatttgcatggcatgaaatggagtgtatgcttcttcatggttcacatgggaagtgaatgtgcactattttcccccaaggaacgtaatgttatgcttggtaaatgctatgtgcaagaactagtggatgaaactgggtcagcaacagtaattcaggatgaatttctaaagcaagagttcatttactgtggtcaacctcgaaggcatcttctgacaactggatggagttcatttatcaataagaagaaactagtctcaggggatgcagtcttgtttcttagaggtaatgatggtgagctaagattgggtgtgaggagagcagttcaactgaaaaatgaagctctacttgaagctgtcaactgtactgattcgaagctacttatgctgtctgctgtggccaattctttggacaacagaagtatatttcacatctgtttcaacccaagggttggtgcatcagaatttattgtgccgtattgcaagttcttgaagagcttgaactatcacttttcagttggaaccagatttaaagttggctgcgagaatgaagatgctaacgagaggtcctttggattgatcataggtattagtgaagttgatcccatacactggcctggatcaaaatggaaatctctcctgcttgcaatgtacctcaacaagttggtaatggtcttccactttgctgttttttttttgggtggaagtaggatcaccattaagataaagtgggatggtgctactaagtacagccaccagaatagagtatctccatgggacatcgagggagttggcagctcagtttcagttactcaccgactttcctcttctgtttcgaagcgaacaaaactgtgcttccctccaagcgatttggacacgccaattctagatggaaacggtcgtccagactcagtggaaactgaacgtttccacagggtcttgcaaggtcaagaattggtgcactctagtattcatggtactgcatgctctcattcatcagatagccccagatgtcaaggctcttatggcaggagattctctgctgatgcgtggaactgcaagatgaatgatgtaatgagtgggcctcgacacctaaatgccactgggtttgcttaccagcccctaggcttcagtgaatctgtcaaattctcagaggtcttgcaaggtcaagaaatgtctcaggcggttccttccttcatgagatctgctttcaactctggcacgcagaatggcagggttcgaccatttgattatgtgcagagatcagatgcaactcaaggatacgctctccagcagtttaatctgccagcaacagaagtgcattcgccctcttctgttcttatgtttaaccaaaccatggtaccacatgctgagctagatggtgcgaccaaccgtgaagaagtacatggcagcaggtacttgtcatccaatgcaatagggagagaagctgaaccatggccatccatgcagcagcaaagagcgagtgtaaatggaagcgagcctctcgacacaactgaagcctcagctcctgcaaggaacgctgaatctggatcggtcggcaggggcgcggggcgaagcaactgtaagctttttggtttctccctgactgagaagatccttggaacggatggtggtggtgtgaaagaagggaactacgaagtggaccgtcaaactccccgggtgctagacttgtttgggcacggttctacgcctggagctctgcatgctctctgtgctgctcccttgggaatatga

SEQ ID NO: 3869 - DNA, 582 bp, Zea mays
  Peptide Sequence Number=SeqID_47244
atggcgcctcctgttgacgtggtcggtccgtgccctagtttgggtgaggtggaggctcctccgaggtcgaggtcgagtctgtcttccaaggtcgaggtcgagtccgagcccccgggtcggacgaggcggagaccgtcggctgatgccagggctgagtccgagccctggggtcgggcgaagcggagttcgtcgtccttcgggactgagcccgagtccgagccctggggtcgggcgaagcggagttcgtcgtcttccggggctgagcccgagtccgagccctggggtcaggtgaagcggagttcatcgtcttccggggctgagcccgagtccgagccctggggtcgggcggatcggagttcgtcgtcttccggggctgagcccgagtttcgagccctggggtcggacggagcggacagtcggtgcggcgcaggcgacgctgtcctcttgtcagaccggtcagtggagcgacgaagtgactgtggtcacttcggctctgtcgactggagggcgtgcgtcaggataaagctttgtgctgatgggggttaccagctgagatttaggagtcttgaggggtacccctaa

SEQ ID NO: 3870 - DNA, 531 bp, Zea mays
  Peptide Sequence Number=SeqID_47245
atggccacggccgcgccggtgtccgtcgaggggttcaactgcaccgccaaccacatgtacccatgccaggcgtacgcgctctaccgcgccggcttcacgggcgtgccgctctatctcgcggccatcggtgatctcttcgccgtcagccgcttcatggtcgcgcacgccaacaacctctccacgacggccgcgccggccaacggacagccgctgctcgtgccgctccagtggggctgcccttcccggtcccccagctcgtacgcgccgatgcagtaccagatcggctcgggggacacctactggatcgtctccaccaccaagctgcagaacctcacgcagtaccaggccgtggagcgcgtgaaccccacgccggtgcccaccgtcctcgacgtcggcaccatggtcacgttccccgtcttctgccagtgcccggccgccgtcgacaacgccacgacgctcgtcacctacgtcatgcagctcggggacacgtacgtgtccattgccgccgccttctccgtcgcctatccatag

SEQ ID NO: 3871 - DNA, 546 bp, Zea mays
  Peptide Sequence Number=SeqID_47246
atggcctcagggcggacgccactgcaaccttgccctcgcccgcaccgacgcacgaggggcgaggacaagtacaaagagccggaggcccggagcgcggatggtggcggtgatcccgtcggcgacgaggacttctcgagccgcatccaccccggcaccgacgacaggagccgtcagcccatcggcagatccccactcggatcctcccggacgagcggggcaccgacctccgcgcggaggcgccgtaccggtgcaaaggcaggacagccccagaacacgaacgccaccctagcagcgcgcgacgtcttgggcggtcctcccccccgcgttgtcgaagtccgcccctctcgcagggccagtgagcgccctctccctcgaatgctgaaggagaggctgacccacggacccgcgcaggaggtagagctccggctcagcccggcctccgccccagcaaggatgatgaacatccttgaagctgagggcgggaccaggatcgcagcccggcttgcttctccccacccaggggctggtggtcaccgtcttgggtga

SEQ ID NO: 3872 - DNA, 142 bp, Zea mays
  Peptide Sequence Number=SeqID_47247
atggacgatggagctataaccgaagagcttcggcttgacatgatgacgaagaccatgtatgatgaggaccaaaaagggacaaagactctccaatccttaatgattcgtgttatggttatagatgaatgtcatgggcataaaa

SEQ ID NO: 3873 - DNA, 309 bp, Zea mays
  Peptide Sequence Number=SeqID_47248
atggccttgttcagccaaagtcaactctgtctgggtgcaccggacagtgtcgggtggtgcaccggacagtgtctggtgcgccaggctgactcaggcgaacttgctgctctcgggaagcgattaacggcgtacgactataattcaccggactgtccgtgtaagggcgagaggctccaagttgtggagattcctcgcaaacgggatatagtaaagcaaagcaaaacaccatggtattcaagtgagtctttggaccgcttgagaggggttgattgcaaccctcgtccgttgggacaccacaacgtggactag

SEQ ID NO: 3874 - DNA, 1137 bp, Zea mays
  Peptide Sequence Number=SeqID_47249
atgtcttctcgctcccttatgcatcgcatctttccaccttccaagcccccggatgggggatacccgtcgtcttttcgcctcatcgttggaggaacgcaactccgtgggagttggtacctttcagccgtcgttcggcttcaaggattttcatccgccagcccggctgtacccccccgccggcggtcacccaagacggtgaccaccagttcctgggtggggagaagcaagccgggctgcgatcttggtcccaccctcagcttcaaggatgttcatcatcctcgctggggtgggggccgggttgagccggcgctctacctcccgcgcgggttcgtgggtcaccctctcccgcggcgttcgagggagagggcgctcactggctctgcgggcggcccggacttcgacaacgcgaggctggtcgacggcgggcgtcgtcacctccagcgtgtcgggctcgtcggctcggctcccggcggcccctcctgccggagggcggctgccgcgccgtgtgcacgggagggccaccccagatgccgcgcgctgctagggcggcgttcgtgttctggggtggccctgcctttgcactggcgtggcatcttcacgcggaggccggccgaggcggttcgagaagtccccgtcgccgacgggatcaccgccaccatccgcgcttcgggcctccagatcttcgtacttgtccttgcccctcgagcgtcggtagcgggcggcagcgagccgctcgtcagtcttctgttgctccgcaggccctcccccctggagtggggttactcgcctgttggttgtctgaaccgctttaccaagcatgagtcgccccgtgtcaaggtgacgagtgaggagtcgaccagccgaggcctcgggtcgggctggcgcccttggaagatggttggccgaggccccagaggtgaccggccgagccgcctgctcgggccggattcccggagaagaccctggcggcgatggcccgggcgtggtgatgacgtcgtccttcggagtggaggtcttcggaccgcgtcgccgtccgaggctaggtcgaacctcgccgaagttgtcgtcaatgccgagggtgctgctgcccccttccagcgtcaagacccgagcctgcaggatcagattgtcttgtag

SEQ ID NO: 3875 - DNA, 657 bp, Zea mays
  Peptide Sequence Number=SeqID_47250
atggcggctctcagctctcttacggaagcaggaggacgtcagcaaggactcaaccgctccgacagctgtccctccgccaggctccgtcgctcctccgacggccacgacatcacaccagctgggtgccaagatctctccgcggcggcggcggttcccatctggcgtgcgagcggcggtgatcctgggggccagcagcggtgtcgcctcgaggcaggcgaccgacggtggcgctccactaggaacgagcgacggtggcgctccacagggagctcgcccgcctcgccgccaggtccgtcgcgcgcctgcctgctggggctggggctcggcgggagcggaaccgccgaggaggccgagatggccgccgcgctcatggacgtcgcggccgccagcgccgccgcctccgccgctgtgttctcgaccgtcgcgtccgtgtctgccgccgcgtcgtcgtgctcgaacaagaaggccccgtcggccttcgtggctgctgccttcgccaagaagccggagacgccaacgacggccgatgtcgcgcaggagaagcacgaggagcttgagcgatgcatcgacgagtgcgagagcggcagcgaggtggtgttcaggagcattgttcggaatagggtttcgttgctcaacatccatagtccggcgatctag

SEQ ID NO: 3876 - DNA, 708 bp, Zea mays
  Peptide Sequence Number=SeqID_47251
atgcaggcggcatgcaaccgcgccaagtggacgcgcttctccgactcccaacgcacccagcctgaaggcccaggcccacggggaccgggaaagggggataccccgaaaaagatccttccccgtgaaggaaccgggctccgagcctccctactgatcagaggtaccctaggacatttccgagaccagcgggagcgatcttgtaacggaatcccatcgaagggaggcatcgagccctcggaccccgtcgccaggggaccgggtccggcagatcacccgcagaggcttgggggctgctctcgcaaacccggctccgaccgaaccgttgacagcgtcaacataccagcccgagaacttgggccccgaccgtacacccgggctacggccagttcgcatgagggaacaaccagaccagacgaagcattacgcaaggcattaagacctcgaaggagtgaaaccactcctccgaggcctcgggggctacacccggcgggtgcgctcgcgcgcacccgccggaacaaaatgcaaccgagaaaggctggtccccttgcaaaaaagtgcgacgaaagcctccaagcgagtgctaacactcccttcgaggctcaggggctactgtcggggaccataattaggggtaccctcaagactcctaattctcagctggtaacccccatcagcataaagttgcaaaggcctgatgggtgcgattaa

SEQ ID NO: 3877 - DNA, 900 bp, Zea mays
  Peptide Sequence Number=SeqID_47252
atgttgaatttatttgaaaaatatgcttcggacgcggagccttggttaatcagacttcattacaattataagttcgaagataagtttagggagcctagtgacagatggttagattatgttgaggcaaaatgcaatgaaatacttggttgtgttaagatcgaggatgctattgctctgatagccgaaaaagttgttcctttgaaaccgctctcagaaagtgaagaagaagaggatgaagaacgaatagctccagttatagctcattcttcgatattggcgaagggggatgtggctatacctagaagtccgaagcttggactaacgactgtactggtgacaccttcgtcaattgtaatagccgaggagaagagctcgaagcttcattactcaaaagacaagtgtattgcatcacttgaagctgaattaaaacgagcaaaagaggaatacgaagttgaaacaaacaagaaaagacaagcatctgctcaagcagttgttgacctcagtgctgctcaagtgaagatagaggatctcaaggatgaagtaaaccacgtaaggcaacttaatgagaactatcagattttggcagcaaactgctacaccctcgataataggtgttataatgaattgatgaagatcttttcttctgtcggcgctacctctcatgagaagaattttgtggatggcgacatagatgggttgatccagtggatgcttagtgaaattcacgcatacaaaaacgtgatcattgaagtaaatcatagtgaagccaaagctaaggatgttgctattgaagcagaagcagtagctgccagggttgcaaagaaagccgcatatgatgttgttcttaaaatctatgagcagatcgatcatgaggtgatgcacgaccacaaaggaaattga

SEQ ID NO: 3878 - DNA, 225 bp, Zea mays
  Peptide Sequence Number=SeqID_47253
atgacgaagatcagagcttgccgaaggtggtcaagcacaggacgtagcctgggcaaaattacattcatgtccctgacatttactattagccaaaaggaactgtgtatctcgcagccaacttacattggaggcggttttggaggtctagattacacaaaatacaagggggaggggggctttggcttcgggatcaaggtcttctctcgtgatagggtgaagatataa

SEQ ID NO: 3879 - DNA, 78 bp, Zea mays
  Peptide Sequence Number=SeqID_47254
atgaagatggaaccagttgtcgtcgacttcttcgacgatatgctccagcacaatggtgttgctatcttctgtttctag

SEQ ID NO: 3880 - DNA, 1914 bp, Zea mays
  Peptide Sequence Number=SeqID_47255
atgggtctctgtttcagcaagaagcagcaagagaagcgccgagacgtgcagccatccagtgacgccaagaagagcggatgccggaaatccggcagggacaccgtgcttgtcgccgatgccaagaaggctcctcaggcaaaggcgccagcacttcccaagaaggctgtagccaggccggaggaggcaacagctgacaagaggaccgtgttcgtcgtcaaggccgcggcagcggcggcggccgccgaggttgcggccgccgcgaagggaagacccgaggatgcgcaggcgaagagggcggcgccggaggaggagctgaggcccggcgctgtgggccgggcgccagtgcggacgtcgagctgcaccaaggaggagttggacgcgatcctgatccagtgcggccgcctcagccgtagctcgtcgtcgtccgggaaggcgccgtcgggcgagcaccggaggtacgccggatccaagcggagctacgacttcgaccacgagaggaggggcggtggcggcgacgtcgacgaatgcgattggggcagggagggggccgcggtggccaggccctcaccgcgccggaggtcgccagaacggaagcgctcgtcgagccacgatggccgtgctggcagcgggagcgggagccagagccggaggattagcaggtcaccggggcggcgagcggacgtcgttcccgccccggggagctccgcgaccggcgagcgaggcgcgaggcagcagccgggcaagatggtgtcggtcccggccagggagaaggggcgcgcgccgtcgcccgtgaaggctgcttcgtctggcaagaggtacccatcaccaaggtcaaactcgcccgcgagggcagcggcctcgggtaatgagaatgccggggtgcagtcgacgcacggtccctcgctgagccgcagcacctctaggaaggccgagcagtcgccgttccgtcgcaaccccatggcggaactcgacgagaacacgctcggcaaccaccaccaccataacagcaacggcaggcctctaaagaaatccgttgatggtgccgttgtattgccacaaaagaccgcggagcggacaaaggatcagatctccagctgccgaactgcgaaggagattgcggatgaggccgtggcttcggacaccaaagcagcgcctgcaaggatgaacgcgacccactcggtgagcattgtggccgagaacgtcaccaatccgaggccggggagccggtcgtcgaggcgctcctcacgcgacttcgagcacaatggcaacacctacgcatccctgttactggaggacatccagaaccagcagcagcagagcaccagcgctgccactgtcgctgcagcgccgaccttcgcgcttccggcgtgtgtgtcgaaggcctgctctatccttgaagcggtcgccgacctcaactcctcgtcgtccgagaacaagaacttcgagctggagaggtcggtcaacgataaggaatccgtcaacggcaggtacggcggaaagggtgcggtcaccctcgtgatggagtcggaggtcggcgtgaaggacgatctcatggagccgagcatgcacaagtacgtctcggtgcgtgacattcgtggggagaccgagccgcaggagtcagcagggagcaacagctttgccggcaacgcctggacgtgctcgtgggagcccaattccgtcgactccgcagaccggacctggacggcctcgcagtcgtacaacggcgacgaggtggagcagtcatggcagagcaagcagaagccgtcgtcatccaaggagcccagccacgttggttctactagcgatgttcaggtccagcgcgtgcggggtgctcaccgcctccgcggcagcagcagtgctgtcaacggccagtccgatgttcggggtgtctcggcgagttcgtcgatcgcttaa

SEQ ID NO: 3881 - DNA, 963 bp, Zea mays
  Peptide Sequence Number=SeqID_47256
atggtcacgatcttcactgggccacggaactatatgggccggtcgccgatgcccgaggccgccgagatggtgggaggcagcaagccgctgggggaaagcgtattcgcggtccacgcggtcgccggtgcggcggcgatcagcgcctccgccgtcgccgtgtaccccctcgatacgctgggagcgacggggcagaagcagaagatggggctccggcaggtggtggaccggctcatggccgcttccggccctgcagatggaagggaggacaactatgtctattattctgaggctatgaaggctggcatagctgctggtgctgtagaggctgttttctgcacaccatttgaacttttcaaacttcgaaaccaagttagttctgtgattccttcaaaagctatgggccctgcaaatgttgctcaagaatcatttccactgctttccaaactgttgcctggatatgttcctgatataagggtgtggaacaacaccatgagccttttatctgatctttctcccaagcatcctgacatgttgggtgctctgaaacagcacccatggatgcttacgggctctgggaaacccccattaccgtctgatgtgcatctaccttctagagtgatattgcttgaaggatggggtgctctttggagagggctcagatcagggatagctcgagactgtgtatttggtggctttgcaggagcgatagcagctgctgcttcacatacatttgatactgctaaaagtcgttcagagtgtactgtggtgcctaaggtcctggttgattcgaaccttgctggaagcatctcttgggatcttgtcaaacagatattttgctgttccgaatggattgggactcctgcaaagttacagctattgccattccatgggatttttcggtatttccctcgtcaagaatcaaaccgtggaaatagtatgctgcagcctgggataaacatgtaa

SEQ ID NO: 3882 - DNA, 765 bp, Zea mays
  Peptide Sequence Number=SeqID_47257
atgcctgagactcttaaaccgaaccatatcgtgaaaatattattcaacttcgtcaaggtacaagatcgctttccgtcctggatccgtgttctgcttcgggaccatctcgtctgtggcagacgaagaaggaattccgcatcacatagcggatccgccggagaagaagccttccctgaaaatctccgagaaagccggaacaaggcagcaaatagcgcaacctccagcgccccgggcaaagactacgtcctgcaagtcaggagccgagaattcatttacacgaagaaccccattgtccacctcgtccacagaagagtggacacggattacgaagaaaaaagaagcaagcgggatagaagctcgtcaagcttctcttctgacaccttcgccctcaaagaaggacagaaaaaagtttgtcaccacaacaactcctttctaccccgacgtcctcttcatcgggggaagagtggaatcatctcccatctccgacgacgagccaaccgtgcctggggaagaacctcctcagtgagaagctcgccgacggaagaaaccgacgccggaatattcggcgacatcccgaagctggggaacgggacccggcacagcctgtatcccgagatgaaatctcggaggtgggagaaacccctgacaaacgagtctttagagaaaggaggaactctcgccgatgagatcgccgacaggctcaagagcaagctgaacaggatgcgaggctacgccgagagaaccctctcttcgcgcgaaacctga

SEQ ID NO: 3883 - DNA, 801 bp, Zea mays
  Peptide Sequence Number=SeqID_47258
atgacaaatcaatcaaaagcggaatcagcatctcatggagtaggcacacggtcccaaatagacaatttcgaagtatgggaagaagatggaatgattcatactcgagaatcattacgtcttaaaaccaatatctcgatatacaagaaggaggatgttcctcctaaatttgtgaatgggaggccgttcttgacgacggtgcaactttctaagttgtcgactccagatattagaatgcatgagtggtacatggtggctagcaacaaatacaaactcgaggacttcacatttgttgtgccagaaaatgcattttggagcaaagataatatagatcctgtgcgacatttattctttgatgatctctggtcgttgtaccaccgacaaaggatggaaaccaactacttaaccctcttttgcttttttgtacatgcacacataaacgggagtcaacgattaacacttttacacgtaggatgcaatacatggatgataagaagaaacaacttaagacagggttttcttgacccgttgatgatatcccaagctcgctacaaagaagttgctcggagacatggagaagaatacaaagacttggatgatgctgaatttgagaaagccgtcaaacagaatcagagaaaagaaataaagaaagatcttggcggcgaacatccagaggacaagcctaatttgtcaatatcattatttccatatggtgacaaacaaccttcgggtactgtcttgtgcggttattatgtatgcgaatggtgtcgtgtcaccttacattacatggtcaatcgtgaggat

SEQ ID NO: 3884 - DNA, 612 bp, Zea mays
  Peptide Sequence Number=SeqID_47259
atgtccggtgcgctgtccggtgcgccactaaaattcatctccgaaccaggtgctctcgggtttctgcgaagggaatgcctcttccctggtccagccaggccccacctggcagagggtgcaccggacagtccggtgcacaccggacagtccggtgccccagggccagaaaccctaactcttgtttttcagttgattttcaaggcggttttcgttctaacttgccgcgctgcaggagttgccggaacagaagaggtcacagatactgccacagcagtagtggtaacagcagatgctggtggcactggcggctgtgggcagacagagctgagaaccggagaggtgaaagccaaagtgaccggccggagtggagaaggaccaacagaaggaatagggggccggtctgaatcgctggcacaactggagcctgaagcggaggagcttgagtgtcgaactaatgaagagctgcatcctcggcctgagagtcaaaaacaggagcagaagctggcacaggagtctcaggcgcaggacggtaggatccaaaaacgaggcgtgaggcctcaagtgtgccctaaaaccgaggaggctgatcagctgcgcaaagatgtggcataa

SEQ ID NO: 3885 - DNA, 429 bp, Zea mays
  Peptide Sequence Number=SeqID_47260
atgggcacggcggcgcactcggcgctcgggctcggcggcgctcgggctcgaggacggggacggcggcgcttggcctcggagacggtggcgcttgggctcggggacggtggcgcactcggagatgggcacggcggcgcgctcgggctcggggacggggaaggggacggtggcgcactcggagatggggctcggcggcgctcgggctcggggacggggaaggggacggtggcgcactcggagatgggctcggcggcgctcgggctcggggacggggtggagggcgcctcggagacggtggcgctcggggacggggacgggcgctcagctcggagacggtggcggttgggctcgggctcggcgacggcgtggagggcgctcacggctcggagacggggacgggaacggcgacgcagcagcctggcggcgtag

SEQ ID NO: 3886 - DNA, 279 bp, Zea mays
  Peptide Sequence Number=SeqID_47261
atggtggacaaagtgcaaatcaatacaaagaatcagagaaaagacaaatggaaaagacttggctcgagcagccaagactctgctcagtctgggtgcaccggactgttcggtggtgcaccagacagtgtccggtgcgccaagctggcgctgatcaactggccgctctcgggtctcgaaggcggcggcgagaggctccaagttgtggagattcctcgcaaacgggaaagagaaaagagaaaagaacaccgtggtattcaagttgatcattggatcacttga

SEQ ID NO: 3887 - DNA, 777 bp, Zea mays
  Peptide Sequence Number=SeqID_47262
atgtggagattgagatgggatttgggagcgacaggtaggcagcgagtaggggagctcagcattgagtgcgagaacactgcgacacttactgttgaagatgtgaacttaggttacgtcgaagtcgtcagagaagtcgaggcgacgacgtgtaccaggcaaggtctcgctggaattgcttgctggtggctcatgattcctattcctggggcggtcgttcgagcttttcctgggagtatggcatgggttacatacttcagcgtcgtagcgcctagtatgagcctcgtggagaagcaatggctagtccatgaggctcatacttcagcgctgcagcgcttggtactcggacctcggctcgaggcattttctctaccccttcttaccctaaaaagtgagtctaatgatgatgtagtggttcctgttgggtcccccatggttagtgtggagactttggtgcttggatcacccacaactggggttgactggccccatatggcagatgggatatgtcagagaccatacttggtggcgtaccatcatatcgatagggacctatcgacaccccttcgtcgaccattggcgcgcagggagccgttgcttggctggttcaccggacagtccggtggcacaccagacagtccggtgaattatagtggagcgcgccgtagaattcctgagagtggctggtttggagttgtacgacctggtgcaccggacattgcggtgctccaattttcagcacactcaagttcttatgctccaattaaattgagtccctaa

SEQ ID NO: 3888 - DNA, 480 bp, Zea mays
  Peptide Sequence Number=SeqID_47263
atggggagtcatgatctccgggcaaaatgggaatcacggctcatgggtaaagtgtgcgacctctgcagagggttagaaactgatatatcagccgtgctcacggtaaagaagaagtcgtcgaggcgaatctccaggagttctaggacttcgacgagttcgaggattaggctagcgacctcccccattagacagagaaggcatggctgtgatgttataatgctgaaggaccccaagaagagattatgccctatagtctaccacctctcgatacaaaggaccctcaagcgcttcctcaagagagctcaaaatgagtttgagctcacggtaaagaagataatgagcgacaacgggtccgagttcagaatcttcagtggaggagttttcttgaggaggaaagggatcaacaccgagttcctccgctccctacacaccacagcaaaatggtgtggtagagaggaagataaggacgctaatcgatga

SEQ ID NO: 3889 - DNA, 1050 bp, Zea mays
  Peptide Sequence Number=SeqID_47264
atggcactggggttatcgagcccacagaaatcccaaccagagtcgggctcgtcatcttcctcggaatccgggggcccgtacgaggctaacgcccagcaagtccttcgcgagcgtgctggcgtcatccgtccgcttggggttggcgtgttgcggggaaacgacgctcgtcttcgtctcagacgcgaggtcaacgcccgacgtgtcccccgctggggcgccggcgtcgtcgactcgctcgacagccaacgaggcgccgcctcctgcttggccatggttgccccgcctcctcctccgtcggtggggaaggtgacaggacagacccggatgctgctcttccgccacgcggggaagacatcgtcgattccgccgccgtctggcgggctgacggccgtcgttgtcgcgcggcggaggaaggagtaccatgtcgtagctgccgtcgagggacatgaactcgagactcccgaaatggagcagcgtcccgggctagagcggttgctggagactacccatctggagcttgacgggaagctgttcgtcaacacgcagcaggcccctacccggcgcgccaactgtcggtgtttcgaccccgggagggcggatgcgcttgcagtagggggttacaagcgttcgcgagggagagagagagagagcctgtccgtcagcccgttctcccgcgcggccaccttctcgtacgagggccctggaccttccttttatagatgtaaggagagggtccagcctgagctagctaggggtagggtaatgatgtaccccctgcggcgtggtcggtccgagcccggggtcgggcgaggcggtgactcctccgaggtcgaggtggagtccgagccctggggtcgggcgaggcggagtccgtcgtccgaggtcgaggctgagtccgagccctggggtcgggcgaggcggagaccgtcttccgaggtcgaggttgagttcgagccctggggtcgggcgaggcggagcttccgatggcgcctgaggctggactcggctgctgtcagcctcaccctggcgggtggcacacagtcggagtag

SEQ ID NO: 3890 - DNA, 456 bp, Zea mays
  Peptide Sequence Number=SeqID_47265
atgcaggcggcatgcaactgcaccacagagatgcaccctttcgacttcgacgcatccagcgtggaggcccaggcccacacgtcatgtaattggcgcgccggttgctacgtgcgaaaaactgcaccgccacttatgccaatgccgcgcctcctcgactacggaaccagtgccgcgactcgaggcaaccctgcgcatggcccaacagtgccaaccaagcacgtcggtcacagggaccgggaaaggggatactccgaaagggatccttccccgcgaaggaagcgggccccgagccctcctactgatcagaggttcgaaggctggcccctcggaagggttcgacagccgcctcagagcactcgggctccgcgcccactactggttagaggttcgaaggctggcccctcagaagggttcgacagccgcctcaggccactcgggctccgcgcccactactga

SEQ ID NO: 3891 - DNA, 1077 bp, Zea mays
  Peptide Sequence Number=SeqID_47266
atggagagggccgaggcctctacacgctcggaagttgagcggacgcgcaaacagctcgtggactcataccgcgagctgggtgcgcggactgctgacttcgaggtgcccgaccgagaggcgggccttcggttcctcgagtggctgcaagaggaattgctggcactcccgaccatcgtggagagcttcatgtcctttgcctccctcgtcacctgcgaaggggccatgaatgcgctgtcccgcgagggggtcgaagaccctgtggtgaaggattctgcggggcccctcttcgatcggatgtggggtcctcatggccgggaggcggtcagggagcggtctaatcgggcgagagatcagatggcgcgtgccgaggatgtcgaataccttggggatctgaacagcgcgcggcccgaggccgaggtcaacccggtgctgcccgaggctgaggtcaaccctgaagctggtgagggctccttcgtcggacctgtgcccactatgtctggtgaaggctccttgccagcccctgcgccgacggcggagggccccctgaaggcggtggcagagctggcagcggaggatcccaaggcggcgacagggccttcgcaggttcaagattttgggcctgcgcacgcaaccgctactgatactgctaattttgtggcggcttcgaccgtggttgcggaaaatgattcgggtgattctgtgtctaagttttttgagtctgatgattctgggagttcggtggtgtggacggaagagtcttcggatgatgatttggattattttgcggcattggatgtggctgcgacggaggcttctccgcgtgtggtgggtgctgaagttcccggtccaagtcttgggtgtaggcgtcgaagggcggtggcgaagcgtagagtgagtgaggtggaggttggtcgtcttcgtgtggacaggactggcaagcgggaattgttgtcctcgccggctggggcaagtgtaggtgagggggatttgcgaagtctttttgagggtgaggagctgaggataatgctatttaactatagggagatgggtattatcccgaaggttgaaccaatgtaa

SEQ ID NO: 3892 - DNA, 297 bp, Zea mays
  Peptide Sequence Number=SeqID_47267
atgaagaccaagacgatgagccacctcaagatgatcaagacaagaaagatgatcaataaattcaggatcaaagaccaccgcacccaagagtccactaagcaattcaaagagatcgccccgttaactccatacttgccatacaggatagaggatgcactaagagatccggtctgggtggtggcaatgcaagaggagctcaacaacttcacgaggaatgaggccgaggtggcggtgctccccctgctctgcctgagctatgcgacggatgggtcgtccttccactgtgattgtggctag

SEQ ID NO: 3893 - DNA, 1101 bp, Zea mays
  Peptide Sequence Number=SeqID_47268
atggcgcctcctgttgacgtggctggtctgcgccctaggttgggcgacgtggaagctcctccgaagccgaggttgagtctgtcttccgtggccgaggtcgagtccgagcccctggttcgggcgaggcggagaccgccggctgaggccggggcggagtccgagccctggggtcgggcgaagcggagttcgtcgtcttctggggccgagcccgagtccgagccctgggtcgggtggagcagagttcgccgtcttctggggcttagcccgagtccgagccctgggtcgggcggagcggagttcgccgtcttccggggcttagcccgagttcgagccctgggtcgggcggagcggagccggtcagtggagcggcgaagtgacggcggtcacttcggctctgtcgactggggggcgcgcgtcaggataaagctttatactgatgggggttaccagctgagaattaggagccttgaggcgcgcgttctccatgttcagttctcctgcgcgctcttcttcctccacgcgacatgcgctcagccgtgcttccctccctccctctacttctccctctgcgcgccgagcttcttcctgctcgcgcccagccgctcatccctcccctacgcgctcctctccgctgagctcttccccagccgcgccgtgcttctttctctccagttcgccgcgcccatggccgagcttggccctgcgccctcctgctgctcgccatggtggccaccggatgcgctcctcctggccccggctctctgctgcgctcgccccaggtcgccgccgtcgagttccctgcgcgcttctctgctcggcgtcctgcttgcccccgatgccgcactcggtcgctatggcgtgcccaggctccagctcccctacgcgctctgcttccttgcgcgcgcgagctcgcttgtgatgctcctgctcctgctccagctcggtccctgctccagcccctgctcgccatggaccttcctgcgcgcgcgctcctctgctcctgcgcgctcccaattttccatggcgctcggccgcgcaaagccttcatcggccatggggcctcatcgtcgctgtccttgcttccctgcagctcggtcatga

SEQ ID NO: 3894 - DNA, 1740 bp, Zea mays
  Peptide Sequence Number=SeqID_47269
atggcgtccctgcgccagctccacaagtgcaggcgcaatgccgccgccaccgccgccttcctgctcaccctcctctccgtcgccgtcgcgcgggaccaccgccccggcgtgggccggagcagcgaggcggagctgcgggcgccggcgccggcgcccgcgcaggccggccggagctgcgaggcgcagctgcgggcgctgccggaccacgcggcgcggtgccggtacctgtcgtgggcctcgcacccggcgtgcgcgccgcgcgggtacgtgcactacctgcgcctcttctactgcgccttcggcggcgcgccgtggctcggggccgccgcgctcgcgctctggctgctgctcctcttctacctcctcggtgacaccgcgtcccagtacttctgcgccgcgctccagggcctgtccgccgcgctgcgcctcccgccggccatcgcgggcgtcacgctcctgtcgctgggcaacggcgcgcccgacgtgctctccagcgtcgtcgccttcgcggcggccgacgccgacgccggggacgtcgggctcagcagcgtcctcggcggcgcgctcttcgtgtctaccgtcgtcgccggcgtcgtcgccatcgtcgcctcctcgtccgggacccgaggaggccccgtcgagatcgagcgcgccgggttcgtgcgcgacgtctgcttcctcctcgtcgcgctctgctacctcctcgccgtgctgctcaccggctccgtcaccgtctgggccgccgcctccttcctctccctctacgccgcgtacgtcctcctcgtctggacgtcccactgctgcgcggaggacggcacgacgaagcccgccgtcgacgacgtcgctgccgcgggtcccgatcccgacctcgccgcccctctcctcgccgaggaccccgacgaacctcccgcgctccccatctcgtccaagcacgccgaggccgccgcaccgccgcggcgggggaggagcagcctcgcgcgccacgccctccacgcgctgcagtggccgctgtacctgccgcgtcgcctcacgatcccggacatcgcggcgcaccggtggtccaagcgctacgcggtggcgtccgcgctcctcgcccctctcctcctggcggcgatctcgtccccctccagccccgccgccgccctctccggcgcggtggccgggacggtcctcgcggcggcggccgcccgcggcacgtcctcctcgtccccgcccgcgggccgctgccggcgcctcccgtggctcgccggcgggttcctcatgtccgtgctctggtcctacttgctggcgcgggagctggtggcgctgctggtctccatcggcctgattgccggcgtgagggcgagcgtgctgggcgcgaccgtgctggcgtggggcaactcgctgggggacctggtggccgacgtggccatggccatgcacggcggccacggcggggcccagaccgcggtgtcgggctgctacgcgggccccgtattcaacacggtcgtgggcctgggcctgtcgctgacgctggcggccggggcccggttcccgcgcccgtacgcgatcccggcggacgcgtcggcgtaccaggcggcaggattccttgcggccgggctggtgtgggcgatcgtggtgctgcccgcgcgaggcatgcggctggacaaggtgcttggggtggggctgctcctcatctacctcggcttcctcggagttaggctaggctctctgtctctcggaggagcaaacggctcatga

SEQ ID NO: 3895 - DNA, 62 bp, Zea mays
  Peptide Sequence Number=SeqID_47270
atggcgcgacggtggaccggggcgacggtggcggacctctgcggctgcacggaggacggcgg

SEQ ID NO: 3896 - DNA, 1386 bp, Zea mays
  Peptide Sequence Number=SeqID_47271
atggagagtcatgatctccgggcagaatgggaatcacggcttgtgggtggttatgagattgatggttctggttatggttatggtgctgctagtccactacagccaaacaggatacttgctgagtatgttgatgtgtactcacccttgctctacacaccaaaccccccccaggttgtcagcattgcaaccactgctcaggcgaagatgaagctgtggaaggagacttccaggagttccaagattacgacgagttctaggtgtgggttagcggcaacccccagtcggctgcctgtgaaggccgcgttatctacgtttcttttccgcactttgatttattgtaagaactatatggacgtctcagacatggctcgacttagacacactgcacgaaagtcagtcatccccttcttaccctcccgccttgctgagcgtccgcttcgccgtcccgtggccggacagtccagccacttggagagactacaccaccgcctgcgtgaggagcaggagcgtcgacgacaggagcagcggagctcttccctctcgctccaccaggagatagagtctgtgaggagctgctcccctgtgctttctctggagccgccccctgcaccaccactgggcgccccagcttctggagtagctgctggaggagacccagacaacggaggaggcgacgacagctcgagccacgacaccgacttctctgctaatcctgagccggaaggatgggttgctcgacccatcactcgcgacgctgctcgcgggtgtcacttccacgatgcgctcgacaccctgctacgtcgggcatttgaccggcatacttggtccgtcgagtatcgctgtgtggtctaccagcatagtcgcagggtctacccggaccgctgggaggcaacttgcttggtgcgctgcccggaggacagtctccagggtgcagaggcctgttcagagcactattctatctctgagcgggactcagctgaggcagccatgcaagatgctgcacggcgtgcgctttcgcactactgctcggttttcggtggggcagctgacggtcttgacctgaagtattacccccgccgttcatctggcagcacaggaggcgtgattgtctcacctgtcggtgagggcaatcctaggttgagcagcacagtcaacctagccgccgtgctaaacacggagctggaccatgcactagacgagctgagtagggctcgtgctgagatcgccctgctgcgggctgagcgcgcggaacgtcgttatctggacggtggatccccccgctcccgttgggactcagcacccgtaccgctcacctcagcgtggacaccagtcttatggcaatcccgcctgcaagaccaagataaatctagaaccatagatcgttag

SEQ ID NO: 3897 - DNA, 201 bp, Zea mays
  Peptide Sequence Number=SeqID_47272
atgtccggtggcacaccggacagtccgggatccggggtcatgggccacaacatgccaccaccggtcataccagcaccaggaggagcttatgcaggggagggagctactccaggagagaattcaaacccgttacacgacttcgtcaacgagtttttcgcttctataggtagtggtcacaactccaatgaccccgatatttga

SEQ ID NO: 3898 - DNA, 561 bp, Zea mays
  Peptide Sequence Number=SeqID_47273
atgccgtcttcttcctcatctgctgcaaacacgccgctggctgacgcatcgtccgaggataccttgagcaacgtggcagcggaggagctacatccgggtgatacggtggagttcggtgtttcgcggatttcctcgcggagtggggcgtgttccggcgcggaggaggttcccgagcccgagggcgagttggtcgtgtttgaggcgtttttcaccgctggccttcgtctgcctgcacatcgctttgtggcggaggtcctgcagagatttgaggtccagaaaaggaaaattggacataagattgcacagtttggatcgtgcacatttacgccgaggaccggaaagacttcgatggaagtcatggagttagttccctgtgcccgcaataagtggggcaactggtgggatttctggttttatgtttctgaaggtgaagtcgaagaccacccagggctccccgtggccatgatgtgctcccattattatgtggcatacccacaatttgaggtggcagaggatgatgaagatgaaggagcccttcggtgcgctgccccgcatgagtag

SEQ ID NO: 3899 - DNA, 1149 bp, Zea mays
  Peptide Sequence Number=SeqID_47274
atgaccgaggcgaaggggtcttcgcaggactcttggtccaagttttgtgccagcggcgagattacttcggccgccaccgccaaagacatggtgggcttggttgcgcagcagctgaagcatgcaacacagcagctaaagcatcataatgaggtggtacgggacaagtcagccacggagaacaagacccacaagctgaaggagaaactgacggctacgaaggctaaaaaggaggacctcggccgccagctagcggcggaaaaagaggatgcgaacaaggcctgtgcggaggcccaggtcgcgcgtgccgaggccaagctcgccatgcaacgcgctgcggaggcggaggcgaaccacagtagcctgtgcggctgtctggacagggcggaggcctcgacccgcatagaggtcgatcgagcgcatgcattgcttgtggacgcgtactggcagcttggtgcacgtatcgccccctttgatgcgtctggtaaagaagtgggcctccgctttcttgggtggttgcaggaggagatggaggtgctgccgacgattgtaacgagtctcatgtccttcgccgcgctcgtcacctgtgaaggggccgtgaatggcttgtcccgtgagggatgcaggcacttcgaagtctttgaccgttcggacgaagacatcgaacgcggaatcttccaggtcgaagaaccggtgctaaagcgctctgctggggtgctttatgataagatgtggggccctcatgaccgtgatattgtatgggaaaggttcgaccgggcgatggagcagatggcgcatgatgaggaggtcgaagacctcggggacttggagagcacagtgcctctggcagtgggtgcgagggcgagggtcgaggagtcaccggtgtcgccgactgatgctagcgagggacccgtggaggcctccgtgccgactggtgaagacactttggtggcgattgcgccagctgccgaagacccggcgacgtcggtcgacccttcgcaggttccgacgtgtgggcctgcgcagacaacccctgctgacgttacgaattttgtggcggtcgctaccgtagtgcctgctgattatagtgtgtctggttctgaatctgagtctttttcgtttgatgatgagtttgggagtccgttttcctag

SEQ ID NO: 3900 - DNA, 945 bp, Zea mays
  Peptide Sequence Number=SeqID_47275
atgtccggcggggatggacctcctcccgttttttatgatgacgattttccttattggaaaattcgtatggaaacatatttagaggctatagacattggagtctataaagccgtcacccaagggttccccgaacctagagatgccacaaatcttgtgggtgatgagtacaactatgaaaaatggaatgcaaaggccaaaaacactctttttaggggtctttgcaagggtgtactcaatagagttagaaatcacaaaaatgctcatgatttgtggttagatatttgtgctctacatgaaggaaccaaaaaggaagtcaatggtttgggactcactcaaatttcacaaccgtatgttgtcaatgctcatgaaatgtatatgcacatcaatgacaaggatgggtcttcctccaagaagaaagatttggctctcaaagctagtcaagaaaagaaaggcaagaccaaaatccaagttgaggaagaatcctcaagtgatgatgatctcgataccaacattgccttgatggtgaggaagacaacaaagatgcgaagaaactcaatcgggaaggcatcaaatttgattgaagaaagaagaaatttttctctagcaagagaaagcccatctccgagatggattgcaacaattgtggagaacttggccatcttgatcatcaatgcaacaagcccaagaaaaacaaattcaagggcaagaaagatgatgaaagtgatgatgagaagaaataaaagaagttattcaagaagaaagaaggcaagcacaatatgtttcacaaaaagaagaatggaaaagcatatattgttggtgattggctcgccgacattgaatcctcaagcggctcttcttcaagtgaagaagatgatgaaaaggtcgccgccatcgtcgaggatttctcttcaccaccatcatcaccttcatctacttcacacctag

SEQ ID NO: 3901 - DNA, 639 bp, Zea mays
  Peptide Sequence Number=SeqID_47276
atgggcctaggggtcccttttatagccccaaggcatctaggagccgttggaggccaacaaggaaggctatccttgccttctgtcgggtggcgcaccggacagtccgacggctgttgcagattcgtggcggttggcgcaccggacactgtccggtgccccctgccgatcgttggcgcgggccacgcgtcgaccgcggattgcgcggccgaccgttgcgctggcgaccgttggctcaccgaacagtccggtgcaccaccggacagtccggtgaattatagtcgtacgccgccaaattctcccgagagcggcctgttcaccggagttcagcctggtgcaccggacagtccggtgtgccagactgagttggacttcggcttcctcgccatagaacatgcagtagaatctgcgtggctgctgcgtccgtccccggcctctccctctggtgccattgccgcggccttggggggtattctagacggtggacggtttctccggctgggtgctgattggctatgttgtgcacctattgttggcttcggctgtcccgaccagagtctagctgcgaaggtctggtccaggttctgctggactgcggagggtcctttggcttcctctgagattcacctttcgttgatgtag

SEQ ID NO: 3902 - DNA, 377 bp, Zea mays
  Peptide Sequence Number=SeqID_47277
ccgtgtgctcgcgctttcttctcactgtctgtgggacccccgctatcagctcctccctcgggacagaatctggcggcggaacaaacctggccgcctttgccgcgcgcgcgccatggccggatcttccgcggacatgggaattccgttgctcaaactccgaccacctttgcctggcctataaattcattggccctggaactcaccgcctcggtcgaccagaaggaaagcagcgcgtgatcgccaccgtgtgccatggcctttggagagagaggaacctcaccggcggtgatgaagaagcaccatcacgcgaggcggctgacctatgcctcaatcaccggtacgagcatgttcctgtagtttgccattggcttcgctaa

SEQ ID NO: 3903 - DNA, 186 bp, Zea mays
  Peptide Sequence Number=SeqID_47278
atggggaaaggggggaggggatgggggatggaggagagggggatggggaagcccaccggcgacgggtacggggcggccgagcgggtctgtctgaacggcgacggggaggggcggcggcctaggcaggggcggcggctagggcagggggcggctcaaaagaaatgcaaggttcggcatggtgcataa

SEQ ID NO: 3904 - DNA, 646 bp, Zea mays
  Peptide Sequence Number=SeqID_47279
tgatgccctgctggatcaccttggtagtgatcaatggagagtcatgatctccgggcagaatgggaatcacggcttgtgggtaaaagacattgtggtacaggtggttatgagattgatggttctggttatggttatggtgctgatggctcgacttagacacactgcacgaaagtcagtcatccccttcttaccctcccgccttgctgagcgtccgcttcgccgtcccgtggccggacagtccagccacttggagagactacaccaccgcctgcgtgaggagcaggaacgtcgacgacaggagcagcggagctcttccctctcgctccaccaggagatagagtctgtgaggagctgctcccctgtgctttctctggagccgccccctgcaccaccactgggcgccccagcttctggagtagctgctggaggagacccagacaacggaggaggcgacgacagctcgagccacgacaccgacttctctgctaatcctgagccggaaggatgggttgctcgacccatcactcgcgacgctgctcgcgggtgtcacttccatgatgcgctcgacaccctgctacgtcgggcatttgaccggcatacttggtccgtcgagtatcgctgtgtggtctaccagcatagtcgcggg

SEQ ID NO: 3905 - DNA, 345 bp, Zea mays
  Peptide Sequence Number=SeqID_47280
atgggcgtcccttgctattccctgcgcccagctctctctatccagcacgccccattttcttccatggaaaaaccagcagcgagccccctcctcgctgtcctccgtggtgcccgccggctgttcgagaaattgtgcagcaagccgcatgctgccggctcgctgtttggtggagccattggacagcacgccgtgatgccgccgagagaaccacgtgttttgcgtggagaagaaggcaagccgctcgacgctcgtcgatgtgtggagcaatgcacaaagccgaatcgccatcgtcctcacaaacaccgtttggttttgtttatgatatgtgctatagaaaagtggtag

SEQ ID NO: 3906 - DNA, 903 bp, Zea mays
  Peptide Sequence Number=SeqID_47281
atgtcaaaaacccccgcggaaccacttcgagcaagggcagcgtctccgccatctagcgacgtcttcggcaccagtcgctggtctgacagagacaaaacgggcagggacacccttcgctcgattcggcaccagacgaaggcctgcgacggcgtcatcccacagtgcggcctcgtccagctcagaggccccacagagtacgtgctcatccccgagcaaggatctgtccaagaggaggaccaggagcaagcttcagagactgctattgaggatctccccgcagccccagcaattgaaatgaattcacccacccccgccagtggaggagactctcgtttcagttctgacttcctttctcgcgatagctttccttccatcttgtgggaagtgcttaactccgccggttaccctacgccccctttgtacacggtgcggttgtatgaggagcatcgggtacctcattgtcgggtctggctgactttggaggctcatccccttcagccgggttggtgttctcttgattctgagacaattggactcaggatggacgacaccgttgaagcggcagccatgaagactctgacgactttctgtggctaccatcccctggagatggtaatgcaccccttgggactcttccctgctgagaagaaggatgatcccatgtggtgtaaccgcgtgagccatgtgaaggatgtgtgggcaatgtatcctgacttggttgggaggactgccaagctcactctcgacagtcgagaagattttgtggtcaacctatccacagagttggtggagaaggatctgcaggtggagaggctgagccagcacatcaccaccttggagcagcaggtggagatccgagacaacactattgatgtcttggagaaccagcttcacgatgtgtag

SEQ ID NO: 3907 - DNA, 1101 bp, Zea mays
  Peptide Sequence Number=SeqID_47282
atggctgctactcgagggatgaacccctctttaaaggcagactcccctgctcgaagcgttgtgagaagcctcccccgatgcccaccggggtatccatcccatgacacgggggcccggtcctacaggtcatacagctggcgcgctggccttcgagtgcgaagaaggcgaactgccgcacatgaagcgtgctaccgccccgcggtggtacgcctcctccatcttcgctacgaccaacggtcaagaaggcgaaccaccgtacaaggagcatgctaccgccccgcggtagtgcgccccctcgtcttcgctgcaaccagcggtccaacctctggcatgggggcccaggcccacatgtcatgcacccggcgcgccgatttctgggtacagagaagttgcaccgccgctcgtgccaataccacgtctccttggggccgctcgtgtaaatgcagcgactcgaggcaccccgcgcatggcccaacaaagacattaagtgcggaggtcacgggtcagtcagccgcggggatcggtggggcagtcggcgtgaccatgggccgaccggcagtaattgcatcaacgggcgcgcaggggcagcgagccaatcgccgatcaaactttggccccacctgcaggctcgtatcctcccctaaggcgggcccaggggccactgtcggtaccctgaatcaggggtaccccttactgaagtatgaagacacagtgcccgtacgacgttctctagccgcacggcggcgccagggccatcctgcagacggcacacctatccagtccattgtcaaacagtgcgcccgtgctgcgcggtgcactgtgttcatcatcccttatatgagaagcttcccctacacgtcgatgcaacgcagatctcggatgtcagggcacaagaagattgctctagcagcaaacattagtggctccaagtactacatccgttatgttcctaggcccacatgtcggggctcagtacccttgtacatgccccccttagctataaaaggggaggcatgcaatgttacaactcagacacacttagaccaagctcaggctctcagctctcaagcttccacagcaatccaacacacagtggagtag

SEQ ID NO: 3908 - DNA, 519 bp, Zea mays
  Peptide Sequence Number=SeqID_47283
atggcagtggccaccactgcaccaacggctcgccagcggcggcgactacctcagctccgagcggctcgccagcagaggcaaccacctctgaagcggacagcctcactagcggcggcgaccacctctgcgccgggcagcctccccagcagtggcgaccgcctcagcgtgcctgccatggcgaagaggtcctcgcctccgtccccctacgggggtgaggacaagaccatccaagccatgcagctgggagcacggtggaaggcggtgcttgcgatctggcaggatcgcgtagccaaagttcgcctccttcacaaggctggtgatcatccttttccttcgaatgctggagaaagaggtgggcaccagcccgtgtgggaggtgaagccgcgactcagctcgctccccaccaccacgaggctgatgaacatccttgaagccaagcaccgatggaagaatgccgctcctacaaggccgtgcacctccagcagagggaagacaagaccggtagcaccagcccgctag

SEQ ID NO: 3909 - DNA, 648 bp, Zea mays
  Peptide Sequence Number=SeqID_47284
atgtcttcttcctcccttatgtgtcgtgtctttccgtcttccaagcccccggatgggggcccggttgcttccccccgctggtggtcacccaagatggtgacctccagcttgatggtgggggaaagcgagccgggctgcggcctctgcccctccctcagcctcaaggattttcatcaccaaggctggggaggggagagtgccgagttgggctgcagcgtgcccggtcttcaggcgcgagtggcttcggagccgctcgcggcgccggcgtctgctacggcagctggaagaggttcttccgccggcgcgatagccggggccggccacgggctgacctccaactctacggccttctgcccgtccttgcctcacgagttttggcatgggcgggggcctcctggcagcggcattcaatctgagcgccaagtctcgcctgttgattatctgaaacgcttcaccaagcgtgagtcgccccgtgtcaaggtgacgagtgagtacgaacagaggcagagttggcacgaaaatgggaacctggttggccggagcctagctgggttgcccgtcagcggggctgacgccggagttgatcagccgaggcctcgggtcgggctggcgcccttggaagatggttggccgaggccccaggggtaa

SEQ ID NO: 3910 - DNA, 444 bp, Zea mays
  Peptide Sequence Number=SeqID_47285
atgaagcacaatgagttcacaactagcacggagctcaaatcactaagacagtcgatcaagtgcgaggagacggagtgtggaagacttagaatgcttagagtatgcttcagtatctcctccatgcgcctaggggtcccttttatagccctaaggcagctaagagccgttggaggcattcttggaaggctaatcttgccttctgtcgggtggcgcaccggacagtccggtgcgccaccggacagtccctgtagctgtccggtgcgcgatctccttccttttctggtgcaaccgaccgttgcagattcgtggcagttggcgcaccggacactatctggtgaacaccggacagtccggtgcctcctgccaaccgttggcgcgcccaagcgtcgcgcgaagattgcgcagccggccgttggcgcagtcgaccattggctcaccggatag

SEQ ID NO: 3911 - DNA, 303 bp, Zea mays
  Peptide Sequence Number=SeqID_47286
atggcgaagatgtcctcgcctctgtccccctatgggggtgaggacaagaccatccaagccatggagctgggagcacggcggaaggcagtgcttgcggctggtgatcatccatttcctccgaatgctggaggaagaggcaggcaccagcccgtgtgggaggcgaagccacggctcagctcgctccccaccaccgcgaggctgatgaacatccttgaagccaagccctggtggaagaacgccgctcctacaaggccgcacacctccagcagagggaagacaagaccggtagcaccggcccgctag

SEQ ID NO: 3912 - DNA, 387 bp, Zea mays
  Peptide Sequence Number=SeqID_47287
atgaggccaattgggaaagagaagatgaactcagagcagaatttcctcaattattctcggaagtttcgtaatctcgaggacgagattctttttaagagggctatgctattgctacaacttaactttatgcagtcactcccgcttatgatattaatgttccaaatggaacgggggcacctggcaagcgcttatagtaccggctcaggcagattggatacgggcatagttcccaaagctttaccctgtggactggactataagttggttacggtaggtgtaccttatgcagttgaccatttccaacatttgcgtaatgaggactctagggagaagcctcatagtgagaccctggccattcacctcggaagtgaatacgggtctagctaa

SEQ ID NO: 3913 - DNA, 918 bp, Zea mays
  Peptide Sequence Number=SeqID_47288
atgcgagctggacgtagcccgagtgcacggtcgggtcccaagttctcgggctggtatgttgacgctgtcaacggtttggccggagccggatttgcgagagcagcccccgagcctctgcacagggcgagaggacggtcaaggacagactcgtcttttttacatgcgctcctacgtcgcctttccgcaaggaggaggggggaaagcgccatgttgtcctcggagggcgccgaacatggtgtctccggcgagctgctcgcggggttgcctcgagtcgcggtattgactccgcagttgaggaggcgcggtagtggccccggctgcattccctcgccggcggtcacccaagacggtgacctccagttcgatggcgggggaaagcaagccgggctgcggcctctgcccctccctcagcctcaaggattttcatcaccagtgctggggaggggagtgtgccgagttggggtcggtccctgtgcgggcggcagcccgctccttccctcagtgatcggggggaagggcgtccgccgttcatggcatgggcagctgccgcgtgcccggctctctgagccgagcggcttcggagccgctcccggtgccgccttccgccacggcagctggaagaggttccgccgccgacgagcttgccggcgccacccacggaccgacctccaactcttcggccttctgcccgtccttgcctctcgagttgggggcatgggcgagggcctcatggcagcagcatccgccctgaggtcatcgctgctgctgttcggccctccggggcagaagtcgtcgtcgctgccgctgccggggcgggcgacgacaagccgttcgttggtcttctgttgctccgcaggtccccctagtcgcgtggggttgttcgtacctgcggaggtggaaccggagttccgtttgtaa

SEQ ID NO: 3914 - DNA, 648 bp, Zea mays
  Peptide Sequence Number=SeqID_47289
atgcaggcggcatgcaaccgtgctaagtgggcgcgccccttcgactccaacaagcccagaatggaggtccaggcccacgcgtcatgcaaccgaagcagcggtcacgtcgccagccaagctcacgtcccatccaggggcagcgagggagccctctcccacggcgtgaagacggcgcgcccgacaggcggcgcctcaggcgggagaagcaagcaacgcttcgccttcgccataatgatcgcgtcaaaaaagggaccgggaaagggggataccccgaaaaggacccttctccgtgaaggaaacaggctccgagcctccctactgatcagaggttcgaaggccggcccctcggaggggttcaacagtcgcctcagatcgattgggttctgcgcccactactggctggccctcgaagggttcatagtcgcctcagacacagagcgagggatgaccatgggaaactccgcctcgcccgaccctagggctcggactcgggctcagccccggaagacggcgaactccgctccgcccgacctagggctcggactcgggctcagccccggaagacggcgaactccgctccgcccgacccagggctcggactcgggctcagccccggaagacggcgaactccgctccgcccgactgtaa

SEQ ID NO: 3915 - DNA, 630 bp, Zea mays
  Peptide Sequence Number=SeqID_47290
atgtgcctaggggtcccttttatagccccaaggcagctaggagccgttgagaacattcttggaaggcagatcttgccttctgtcgactggcgcactggacagtccggtgcaccaccggacactgtccgcctgttcgccagagccagcctggcgcaccggacactgtctggtgcaccactggacactgtccgcaagcgcgagccgactcctccatcagaggactttggcgactcggaatactcagaggaggagttcttctttgagtccgaggggtctccagctcccgtccctcccccagcgtcgtccgatgactcggacgactctcaggggattgccgcggaggtctggacttacatccgggccgtcgagcgctccgggctcgtgggctcggatgagtcggagtactcctcggacgaggaggactcgtccgaggaggacggtggcggtgatggcgaaggcgacgacaacgacgacgacgacgacggaggcgatggcggcgacaacggtgacggcggcgacggcggcggtaggggcggcaacgacggcaacggcaggggcggcaacggcggcagcagcagggggagcagcggcggcggcagcagcaagggcagcaacaaggcgagtggctag

SEQ ID NO: 3916 - DNA, 369 bp, Zea mays
  Peptide Sequence Number=SeqID_47291
atggcgcccaagagaaaggcctcgagttcatctgctacagtgattcctcccatcgaccccaacagccagttgcctttcgcaggacattggtggtggcgcctctcccagaagctggtacaaccttggatgttcagagacctgtcagtgttcgcccgagacgtccttgccgagccaatcaacttgatctttctgctgatgagcagaaaaagaaaaagagacgtcttcgacaagtatctagtttggatcggggcgctggtccttcggttcctgctgctgaggaggttcccgtgcctgaatttactgacgctgaccccaatgggtgtggcattggtggacaggatggctagtcagctgaggtcgcaagcttga

SEQ ID NO: 3917 - DNA, 306 bp, Zea mays
  Peptide Sequence Number=SeqID_47292
atgggtgacaacgaggccattaaagccaaagagttggaggctcggccgcaggtggtgttggtggtctcgccagcggaggcaaccacctctgcaccgggcagcctcaccagcggcagcgactacctctgcaacgggcagcccccgccagcggaggcgaccacctctgcaacgggcagcccccgccagcggaggcaaccacctcagcaccgacgacagcggccacctctgcaccagtggcttgtcggtgacggcggacaccccagcgcatgcaaaaaggtcctcgcccccgtcctcctgcgggggtga

SEQ ID NO: 3918 - DNA, 192 bp, Zea mays
  Peptide Sequence Number=SeqID_47293
atgtcgactgggaaacgccacctagatcagatcgaactcctcagtgttaggcggctcctcctgaaccacctgatcatctcctgtggggggggtgtgagacagcaagggatcctcagcaacgggctcttctactcgccacaatacaaacaagcacaggatacggggaaaattaacattacaccaaacatataa

SEQ ID NO: 3919 - DNA, 645 bp, Zea mays
  Peptide Sequence Number=SeqID_47294
atgtccattccggtggcaggcggcgctagggccaccctgcagactgtgcacctgtccagtctgttgtcgaaacagtgtgcccgcgctgcacggtgcactgtactcatcccttatatgagaagcttccccctgcgcgacgaagctacgcagatctcggttgttagggcgcatggagattacacgggcatggcaagcagtagatccatccttccatttgtccctgggcccacatgtcggggctcagaacccttgtacatgccccccttgaactataaaaggggaggcatgcaacgtgagaggactcagacacaagtcattcaggcttacacacagctcaagcttctacaacaatccaacacacagtggagtagggtattacgctccggcggcccgaaccactctaaatcctcgcatgttcttgtgcttgatgatcgcttaacaagacaggcaaaacgcctaagcccctccctcatcttaggatttagggcgggcgcctccgccacccagccggagaattccctctccgacagtatggttgactacgacctcatcatcgtcctcatcctgctgatggcgctgcctatgtcgattcctgttagacttctcaatccactcgggcgaagcccatatctcacacaaagcctt

SEQ ID NO: 3920 - DNA, 1092 bp, Zea mays
  Peptide Sequence Number=SeqID_47295
atgatgacatctgaattgaatagccaggcttgcagtttaggactctctgcgaaagcaggagggcctgacagcctgggggccggctctgaagagcgggagcccattccatggggtggtccagagcctgtgtggccgcttagcctggtcccgtacccgaaaccctgcacactccaccactccatgacgggtaccctagtatttggagctataagtcctatgggtctggcaacctggggtccggaactagagaatggacacttgtctcctggagaggtccgaagccgagtagccgctcagcctggttctgtaccgtgggcctgcacgctccaccactctgcgacgggtatgctggtctacagcctcgacaaatcgagcctacatcccaagggggccaagtaccaaggaggaatcggttacgccacacacaacagggacaagtggtataaactactagacgccagtggagtcgcgttggaagttcgcggccgctgtccttgcggaaccctccaagacggtgtgacagcggtgatggccgcctcaatgcgcgtgccattacgaagaggtcctcacccccgtcctcctacggggggtgacaacgaggccattaaagccaaagagttggaggctcggccgcaggtggcgctggtggtctcgccagcggaggtaaccacctctgcaccgggcagcctcaccagcagcagcgaccacctctacaacgggcagcccccgccagtggaggcgaccacctctgcaacaggtagcccctgccagtggaggcgaccacctcagcaccgacgacagcggccacctcttcaccggtggcttgccagcgatggtggacgccccagcgcgtgcagaaatttcctcgcccccgtcctcctgcggggcgttggaggcggcaccaaagccaccgaggccaaggagcccgacacgctgcagctgacggcgcctgcagccggccgaccccgcgtagctgaggttcgcctcctccgaaaggctagctgtcggacggtgtcgccgactgtagctgaatggttcgtgccagatgcacgaaagacaatggacagtgtttacaggttcgggccgctttga

SEQ ID NO: 3921 - DNA, 387 bp, Zea mays
  Peptide Sequence Number=SeqID_47296
atggcgggacgacgtcgaccggttgctcagtatggcacactctacctcgaccagggagtacgtgatgaaaaactgctggagaagttggccacgcatgacgtggagactgtccccacgctctttgctctggccgacaagtgcgccagggccgccgagggccgtgcatggcactcggccccacaaaccggggttgcccagtcgggaggctcgggtgccgtccccgggacatcctccaaggacggctctccacctcgtcaccgacctagcaaagaaaaggtcgacgacggcgaggtggccgcagctgaacgggacctcaggtaccagtcgcccgagggggacctgaaggatgtcttcaccgaaggttcctattccggtggggacaactag

SEQ ID NO: 3922 - DNA, 778 bp, Zea mays
  Peptide Sequence Number=SeqID_47297
atgtcttcgcgctcccttatgcatcgtgtctttccaccttccaagcccccggatgggggatacctgccgtcttttcgcctcatcgttggaggaacgcaactccgtgggagttggtacctttcagccatcgttcggcttcaaggattttcatcacacagcccggttgcacccctccgctggtggtcacccaagacggtgacctccagctcctggatggggagaggcaagccgggctgtgatctcgatcccgccctcagcgtcgagggtgttcgtcatcctcgctggggcggggagcgaggcgagccggggctctacctcctgcgcgggtcggtgggccacctcttcttccagcttctggtggtggcaatcgccctccagccctgcggcggagacatcctccagccatgccggggaaggcgaactgttgctacccagctaggatgcaacattccgccctcttcctcgcattcgcggcggggacagcagcgaggatctgccggccggcgcgctataattcaccggactgtccggtgtacaccggacagtgtccggtgctccaaggaagcgcggcctccggaactcgccagcctcgggaacgggcagcagccgctccgctataattcaccggacatgtctggcgcgcccatactggcgcaccggacaaggaacagtgcatgtccggtgtgcaccggacatccaggagggcccacaagtcagaagctccaacggtcagaatccaacggcagtgttgacgtggtgggggcaccggacatgtccg

SEQ ID NO: 3923 - DNA, 705 bp, Zea mays
  Peptide Sequence Number=SeqID_47298
atgcaaccgagaaaggctggtccccttgcaaaaaagtgcgacgaaagcctccaagcgagtgctaacactcccttcgaggctcgggggctactgtcggggaccattattaggggtaccctcaagactcctaattctcagctggtaacccccatcagcataaagctgcaaaggcctaatgggaaggaccagggccctcttagagaaggttggccgcgcggggacaaggacgagacaggcgctctcttggggccgctcgcttccctctcccgcgtggacgcttgtaaccccctactgcaagcgcacccgacctgggcgcgggacgaacacgaaggccgcgggattcccacctctctcacgccggtctctggccgcctcgctcctccccccttcgcgctcgcactcgcgctcgacccatctgggctggggcacgcggcgacactcactcgtcggcccaagggaccccccggtctcggaacgccgacagtctcaaaggagactaatgtattatgtctaagtgctggaaacaggaaaaatcaagttggaattaaagatggctttgttcagccgaagtcagctcagtctgggtgcaccggacagtgtccggtgcgccaggctgactcaggcaaacctgctgctctcgggaaatcgtcggcggcgtacggctataattcaccggactgtccggtgaccgttggcgcgaagtag

SEQ ID NO: 3924 - DNA, 528 bp, Zea mays
  Peptide Sequence Number=SeqID_47299
atgggtgtggacaagggacgacttgtgaccgtggttggaggtgagcggttgccttcttcttctataaatagtgcctttgcctctctggttttttcacatctcttgctgttatctgctgcttgctttcttctccttctcgcgcttccaccatgggcaagaacaacaagcgcaagcgtgtcggagtactcagaggaggagttctcctctgagtccgaggggtctccggctcccatccctctgcgtgagtcgtctgacgattcagacgactcccatgggtttgcggcggaggtctggacttacatccgggccgtcgagcgctccgggctcgagggctcggatgagtcggagtactcctcggacgaggaggactcgtccgagggcggtggcggcgatggcgacgacgacgacgacggaggcagtggcggcaatgacggtgacggcggtgatgacggtgacgacggcggcagcggcggcagcaaggatggcgacggcggcagcagcaggggcagcaacagggccagtggctag

SEQ ID NO: 3925 - DNA, 1614 bp, Zea mays
  Peptide Sequence Number=SeqID_47300
atgggcgccgggagcagccgcgcggacgcgccgtcgcggcgccgggcgcgcctcggcctcggagggtgcttcgggacccgatcctcctcctccccagccgccgccgccgaagcgcacgacggcgggagcttcaccttggccgggtcctcctcctccagcgctatcgaggtacaatcagggcgaccagtacgtgccctgaattttcaggcttctctagctgctaaggatctccagatttccaccgcgtcaagtccaaggctgcattcctcttcaagtaccataagccatcacctcagattcaatcacctcaattgccatgaaaacaaggaagatggcctggggactgaaaatgctgaaacaagtggccttgaaagctcatctaggaaggctgtcatggttaggggaagtttcagtaatgaagctgttaatagtgatatgtcaggagaagggataagttttataggatcagagctggaaaatattcctagcacagtctccactaatgaaactggtggctcagccgctgaatctggtttgggcccctcattgatggcatctgaaaggatcatgtctgacttagaaggagaggtatctccgcaagggacctcatccacaactgccatgacaagtgaaagatcagatgtatctcaagctagcttaacatctatgtttcctaactcttcaattgcatcatctgtgattgtggaaccaatgccagatccaatctctaccagggcagatgtccccatattcagtgggccacatggtgagcctggagggagtatattacatgatgacatgatgagcattttctcaaatgacggtctaggacgctctagggattctagcagcagtgaaacaaggaggagtcacagaaggattctatgggacacgttttccaggcgtggctcaagaggttatccagaatttgatgctgatgacctcggattttacagcacatggctagaccttggtgatgacatttttgaagagttgggggaatcaagatattttcatcgcaggcgacatggttcgatcagaattagggagcatcgccgtgctgtttttgatagtggtaatgaacaaggcactgctgcatgtcctttggggattcatcaaactggccgatgcacatgtgattctttcttggttgctgaagaatctagtgcccgagcaagtatatcaagaattgtcatgttaactgaagcgttatttgaggtgttggatgaaattcaccgtcaacctgcatcactttcactttccatggtctctgttcaggctcctgaatctgtagtcaattcgttgccgtgcaagagctacaaaaagctagaggcaccccaacgcagtgatgatatggaacagtgccatatctgcctaactgaatatgaggatggagaccagatacgaattcttccttgcaagcacgagttccacctgcaatgtgttgacaaatggctgaaagaaatacacaggaagcatttgggatccccttcctcaacgtttcctgtcgtcgcactgctgcagggtgtgccctctgtgccgcggagacgtctgcgaagtcgcctcgtgaagaccttggcgctgccatcccttcctcacggcaccggcagatag

SEQ ID NO: 3926 - DNA, 135 bp, Zea mays
  Peptide Sequence Number=SeqID_47301
atggcggggagcgtccgagaggagccggaagcggagcaccacttgcgcgtggagaaggcccgtggctctctacggagttactcgaccgagtgtagattgaaacttagcctttgtggtagagatagcaacacttag

SEQ ID NO: 3927 - DNA, 417 bp, Zea mays
  Peptide Sequence Number=SeqID_47302
atggcgaagctaaccgaagcgttggcgcgacttggacgcgactggagagagctggtcacggcggccgaggctctgaaagcttggcgggcggtggcgcggcgtgctcggggcaatttccggctagggacagggagttgtagcgtcaccaaggtgccagtgtcagaatgtctggtcccgaggtcaatctacgccaaaaccatgtcaaatgaatttggtttgagttcaaacttttccagggcgtgttcaagggaatttggcacaactttgatatttggatctcctggttttgagtttcgaaaaacagagaacgcagttgatccttggaaagaggtatcttcggaatcaggttgcgggtatacaagagcatggtcaagacgaagcttgactgaaatggaagacgatcatgacgaaggatga

SEQ ID NO: 3928 - DNA, 336 bp, Zea mays
  Peptide Sequence Number=SeqID_47303
atggccgtgatgggttcaatatctgaaaatatgtacctctgtcaggactgcgaggcaaatgctctagcccaggtagcggaactaagcgcatccctggagaatctgcgagcgtattgtaacaccctgcatgaagaggtgcacgtgttatacgatctgctgcatccgaatgtactgctagtggttgcagcaatgggagccagaccatctggagcagctagtggaggacctgatggggagctggatctttttggagcccctccttccatgaacgtcgcagatgaacgttctcccgaggctggcagtggagcaggagcggccaaggacgaagaaaattag

SEQ ID NO: 3929 - DNA, 165 bp, Zea mays
  Peptide Sequence Number=SeqID_47304
atgggggtggtgaagggaaagcccccattggtagaaaaaaacccacaaccccttggggttatcctgcgcttggaagaagaactaggaaaaggaaaaaatatagtgatagttttattcttcgtcaccctcgtcatttattggcaaaaatcgaaaatgtcaatatga

SEQ ID NO: 3930 - DNA, 228 bp, Zea mays
  Peptide Sequence Number=SeqID_47305
atggcgatctccatcgtcctgctcagtgtcaccgccgtagtcctgctccatctttgtggtcaacgcatcaaggcgtgccaggatggtgtcgagtgtggtgcgagtcgccgtttgagcaagcacaaggagcaacaaaataggagctacacgaagcttcacctaaaacagagttcagatgtggtctacagaaaatcaggaagttctgtgaaaagcgtgcgagaactttga

SEQ ID NO: 3931 - DNA, 168 bp, Zea mays
  Peptide Sequence Number=SeqID_47306
atggcgagagtagcgtgtaccctccatggcaagaggctggacggtggtgtatctgtgctctcggtgaggaagcagcaaaaacgtcgcatcttccttcaattccttgtgcgggatatccaaatgcgtgaatgtgatggactaaaaaatctgcggttcctaatggaatag

SEQ ID NO: 3932 - DNA, 828 bp, Zea mays
  Peptide Sequence Number=SeqID_47307
atgggcagaggcaagagaggtcggggactgcctcgtcgcgctggcaacaaacgtaagcgcgacccatgtcctccctcagaggacttcagcgattcggagtattcagaagaggtttcctccatgtccgagggatcaccggctctcgcttttcccccggtgtcgtccaatgactcgaacgactcccaggggttagccgctgaggtctggatgtacatccgttccgtggagcgtgccgggctcgaggggtcagatgagtcggaggtctcctcggatgaggagaactccggctcgtccgaggagcggagcagcgacaacagcgatgatgagggcggcgtgtcacacccgggttttaggggtccaaagcctgggcgcgaacataatcaccagtttataggaatctccaatgcagggatccctcgcatgaccgccatcgcagcaaaatcatcccaaggacctccctacactgaccagtcccctactgtccttgcccctttcaggagggctcttttgcataatcgcttggctgaaagggtatggataactacgggtcgttggatcacgatcaagcggtgcggattagatttggtcgcaattgaactgccgtcgcacgagcagggcaacctccgtacctcccggctgcagtccaccgcgccaacaaaagcagcagcacaggattttgggtgttacaaattctacttttcaaactcaaacttgtctcaaaattttgagtacaaagatgtaattgtggacattactccacaacccatcacactcaatcaaagatccaaatcagacaagtatcataagaacaaacattcaagtgcatag

SEQ ID NO: 3933 - DNA, 294 bp, Zea mays
  Peptide Sequence Number=SeqID_47308
atggctccaagggaattcgaacccacgacccccatgcaaatgcgagcagtagctaccgctacaccacatgaggcgctcgtgttggcaaagctcatcgccgacgagaagaagcttggcgactatcagttcaacaactggaagctgtcctacgtggtcgcatgcgccgctatgtacgacaagctccggcgagccgcctcttggacgcggtccagagcggctgcaccgcgctgtccatcgtcaagcagggggacctcatggttatcgccaacgtcggcgactcttgggttgttctag

SEQ ID NO: 3934 - DNA, 618 bp, Zea mays
  Peptide Sequence Number=SeqID_47309
atgaacagtacccctgtactgttcatactgcattgtaaccgcactcgcgtcactcccacattttcaccttctgtcaagccgaagcatctgagagcaaggaccaacaccagatatgcaaccttagtgcataatccggaattgggggagcaggatattgtggtgaagaacagtggcaggaaaagtaagctaggccaaggaggtaggggtgtgactggagttaggactgaagggaagaagaaagacgggacatggaagttctgtattgattatagaaagctcaatgatatgacaatcaagaacatttacaacttacaagcttacggaaggcacaacggaagccggaaggacctgctcggcgcctcggcggacgacggaagctcggtggtcagcgcgtcgcgctcgcggtcggacctgctcggcggacggcgaagccggaaggcacagtggctcagcagacggagcacgaagggacagggacaggccgtaggcggacaacggctcgacgcctcggcggacggaggcacatgggcagagggacagggacaggcggacaaccgctcggcgtcggcggacggggacaatggctcggcggacggcagaaggcacagcgacgactga

SEQ ID NO: 3935 - DNA, 252 bp, Zea mays
  Peptide Sequence Number=SeqID_47310
atggccttggccgcggcccctgcccgctttcgcatgtcggtccgcgcgtaccgtgcgcgtaccgcggtgctgtttcgcgcgcatcgtcgtgtgtgggggctcgagcggtttctcgagtgcctctccgtaaggacctgttcgttggatgaccgcccgggaaaacagtgcaaccatgagggtggtaaagaaagagaagaaggcgtcaaggtggatctccaggagttccaatacgttgatgagttcgaggattag

SEQ ID NO: 3936 - DNA, 735 bp, Zea mays
  Peptide Sequence Number=SeqID_47311
atggcgctggcagctgccgcgtgcctggctctcggacgcgagttggcttcggagccgctctcggcgccggcttctgccacggcagctagaagaggttcttccgccgacgagatagccagggccgcccacggaccgacctccaactctacggccttctgcccgtccttgcctcacgagtttgggcatgggcgggggcctcctggcagcagcatccgccctgaggtcatcgctgccgctgtttggccccccggagcagaagtcgtcgtcgtcgccgctgccggagcgggcgacggcgcgccgttcgttgttaaaggaacccctcagccgctcttcgatgagccgaggccagaggtagcggtgtcagcgcgaacagaggcagagttggctcggaaagaagacctggtcggccggagcctggccgggtcgtccgctagcgggaccgacgccggaattgacctgccgaggcctcgggtcgggctgatgtcctcgggggacagctggccgaggcctcggggtggccagccgaaccgcctgcccgagccagattctcggagaaggccctggcggcgacgacccgggctgggtgatgacgttgtccttcagagcggagacccttggactgcgtcgccgtccgaggctaggtcgaacctcgccgaaggtgttgtcgacgccgagggtgctgctgctctcttcaagcgtcaagatccgagcctgcaggatcggatcatcttgtag

SEQ ID NO: 3937 - DNA, 582 bp, Zea mays
  Peptide Sequence Number=SeqID_47312
atggagcaccgtcccgggtcggagaggttgctggagactgcccatctggagcttgacgggaagctgttcgtcaacacgcagcaggcccctacctggcgcgccaactgtcggcgtttcgagaccggggggtccctaagccgacgagtgaaatgtcgccgcgtgccccagcccagatgggtcggtgcgaggccgagcgcaaaggggggaagtgaggtggccggagatgggcgtgagagaggtggaaatcccacggccttcgtgttcgtcccgcgcccaggtctgcgccctaggttgggcgatgtggaagctcctcctaagccgaggtcgagtccgtcttccgtggccgaggtcgagtccgagcccctgggtcgggcgaggcggagaccgttggctgaggccagggcggagttcgagccctggggtcgggggaagcagagttcgttgtcttctggggctgagcccaactccgagccctgggtcgggcgaagcggagttcgtcgtattctggggctgagcccaagtcggagccctgggtcgggcggagcggagttcgccgtcttccgggacttagctcgagtctga

SEQ ID NO: 3938 - DNA, 774 bp, Zea mays
  Peptide Sequence Number=SeqID_47313
atggcgcctcctgttgacgtggcaggtctgcgccctaggttgggcgatgtggaagctcctccgaagccgaggtcgagtccgtcttccgtggccgaggtcgagtccgagcccctgggtcgggcaaggcggagaccgttggctgaggccagggcggagtacgagccctggggtcgggcgaagcggagttcatcgtcttctggggctgagcccaacccgagtccgagccctgggtcgggcggagcggagttcgccgtcttccgggacttagcccgagtccgagccctgggtcgggcggagcggagttcgtcgtcttctggggctgagcccaagtccgagccctgggtcgggcgaagcggagcttcctatggccggtcagtggagcggcgaagtgacggcggtcacttcggctctatcggaggaagggcgcgcgtcaggataaaggcgtcaggctgcctttgcattaaatgctcctgcgatttggtcggtcggcgcggcaatttgctttatgctgatggtggttaccagctgagaattaggagccttgagggtacccctaattatggtccccgacacccctactgcaagcgcacccgacctgggcgcgggacgaacacgaaggccacgggatttccacctctctcacgcccatctccggccacctcacttccccccttcgcgctcggcctcgcgccgacccatctgggctggggcacgcgacgacagttcactcgtcggcttagggaccccccggtctcgaaacgccgacaagattga

SEQ ID NO: 3939 - DNA, 780 bp, Zea mays
  Peptide Sequence Number=SeqID_47314
atgaagtcccgcatggaactggggttgccaagtccagagaaatcccaacagaagctgggctcgtcatcttcctcggacccagagggcccgtacgagggtgacgtccagcaagcctttcgcgagcgtgccggcgtcgtccgtttgctcggagttggcgtgtcgcggggagacggcgctcgccttcgtctcaaacgcgaggttgatgctcgacgcgccccccgtaggggcgctggggccgtcgactcgctcgacagtcgacgaggcgctgcctcccgcttggccttggttgccccgcctcctcctccgttggcaggggagaggacggggcgagctcgaatgttgttcttccaccacgcggggaagacgtcgtcgattccgccgccgacgggcgggctgtcggccgccattgtcgcggtcgtccggcggtggaaggagtatcatgtcgtagccgccgtcgagggacatgaactcaaggctcccgaaacggagcaccgtcccgggtcggagaggttgctggagattgcccatctggagcttgacgggaagctgttcgtcaacacgcagcaggcccctacctggcgcgccaactgtcggcgttttgagacccaggggtccctaagccgacgagtgaaatatcgttgcgtgccccagcccagatgggtcggcgcgaggccgagcgtgaaggggggaagtgaggtggccggagatgggcgtgagagaggtggaaatcccgcggccttcgtgttcgtcccgcgcccaggtcgggtgcgcttgcagtag

SEQ ID NO: 3940 - DNA, 297 bp, Zea mays
  Peptide Sequence Number=SeqID_47315
atggcgccaaaaccacttgggttctataccaaaaatgtggtataccacttaaggcaccccctggaaaaattggagaccgagactcagacgtttgacagcactttgacatcagttttgtcgctgtgtgggcatgttggccaaaagcttaataataactgtaatcttgctgacggagagtacatcctcgtgccggagcaaggagctgctcaggaggtagccccagatccagcacccgagcctgcaccagaggacctgcctgccactgctttggaaggcaagccccggttttatgcataa

SEQ ID NO: 3941 - DNA, 780 bp, Zea mays
  Peptide Sequence Number=SeqID_47316
atgacctcccacagatcctccgatgacggaaatgcactaacccacactgacggacttgcacgagagggctttccccgcattttgtgggaagtacttcagggggccggatacacgacaccccctcagtacgcggtgcagcagttcgagaagcaccgagtgcctcgctgtcgggtgaggatgaccttggagcctcatcccttgcagccaggatggcgctctttggactccgagtctttcgggtaccgggcagaggacacgatcgaggcgatcgctctgcatggattgactaccttctatggattccatcccttggagctggctacccaccccattggcttgttcccccctgagaaggaggacgacccaatgtggaaggatcgggtgatgcgcggtgaggcaatgtcccatctgatggcactgctggaggcaacaaagatcacgttggataacagagaggagctcgtggttgatttatctcaagaaatggtggagaaggacttgcaggtggagcagctatccactgatattcaagagttggaggagctggtgggcaccagggagaacaccatcgaggtcctagaagatcagctcattaacactcagcagcagcttgctgaggctaacgagcacctggacatgcatcaccaggagatccaggaccaggaggccaacgaggacgtcgacattgagggaggagatgagcctgcctccagtgtggacactgctggctcgggaagaccaccttcccccgagtcgagtgttgcttcgttcgctcactag

SEQ ID NO: 3942 - DNA, 174 bp, Zea mays
  Peptide Sequence Number=SeqID_47317
atggctaaggcaactttcagggagaatgacagacgaatggaatttgttggggatgcaaagattcttcgaaggaactttgtgattgatctgttaagttatgaggacaattcgtgtcgatatgtcatccctgcaaacatacaacaaagacttatcgatatcgctaaaaaggattag

SEQ ID NO: 3943 - DNA, 342 bp, Zea mays
  Peptide Sequence Number=SeqID_47318
atggctgggcttggcggacaaggaagattagagagcagggagaggcttcagctgctggatcccctggcctgcatcctgtgctccacgggtgtgccggagtggagggaggtgacgcccatggagcagtcctgctgccgagcgccatggagcaaggaggagagatggcgtcggtgtggtcccagggagctcggccatggctgcacctgctgggcgccatggaaaccgcaggggggcatgggcgtcatggctgggaggaagctcctgcgcgcagccgtgaggagaagggctccctgccctagcgtgcgtgaaggagcaggaaggaggatggcgtggggagaataa

SEQ ID NO: 3944 - DNA, 705 bp, Zea mays
  Peptide Sequence Number=SeqID_47319
atgccaggactgccatccgagaaggagtcgatacccaacctcatcttgcgaggctttggcaccatcgaccgtgtgaaggcgaagctggagcaggcctgccctgaagtggtgtcatgtgccgatatcttggctctggtagcaagggacgtcgttgtactgaccaaagggcctcacggggatgttccaatctggcggagagatggtagaagatcggtgaagcaagatgcactggacaacctccacgcgcccttcttcgatgttggtcggaacatgtgccagttcttcatgcccaagggcctcaacgccaaggaccagattgttctgctaggcgtgggcgtctgccgtgtgccgactactgtctggtggctggtgtccagcggggtggaatccggtgggggcgtcaggtcggactccggtggacggagggacgcagtccggtggccgacgggctggcaggtggagctcgacgcgtcgcgcgggacagggacggggcgaacgacggaacaggcagatgacactcgacgccgacagaagcttggcggccgtggctcgggggtcgggactcggggctcgggcagaccgcagatggcctcacggccagccgaccaggcacagcggcgtcgcggcttaacgtgggtgagcagggagctcggcgccatgatctacggcgccgagctcggacatgtaggcgccagcaaagcataa

SEQ ID NO: 3945 - DNA, 372 bp, Zea mays
  Peptide Sequence Number=SeqID_47320
atgtccgtggagggcatcgtcaaggtctccgtccactacgacatctcctacttcacaccggccaagctccataagatgaaacttgttgtggacatctttctttttcacggcacacctttcacagaaatcgggtctagtttgggcaaccaaagtttggttaggttggagcaaagaagggttatgaaccacactgaaatgttgtgcgtccaagatgaagtggagatggatggtcgggtggtggagcagaaagggcggatgacggcggtggcggtggagatccggaagaaggaatctggcgagctggtggccatcgggaggcagtggatgacggcctccaggcccaaaggcgctactgctcatagcaagatctga

SEQ ID NO: 3946 - DNA, 753 bp, Zea mays
  Peptide Sequence Number=SeqID_47321
atggctcgtagaagatcccaaaagaacaagaagacacctccgaaggaaaacaatgagtccaaaggtcaaggcttcgtctactcaagggacgcgatctcgcctcgccagagcccagcatcgggcgggaacagtagtcccaggcgaattcacgcctcgcccgagggcctcctcaagcaacgggcgcgccctcgactcgcccgaagcccagctcgggcaggcttcgttgtgaagccaccttggccaactcgcctcaccaaccgaccgtatcgcaggcgcattcaatgcgaggatcgcctgacaccttatcctgacacacgcgcctcagtcagcaaggtcgaagaaaacagtgccgctcgccccctctccgactgttgtgccaccccgccaggggtgaggctgacaacagctaagtccagcctcaggcgcaacaggaagctccgcctcgcccgaccttggggcctcagcctcaggaggaggtctccgcctcgccgaccccagggcacggccctcgcctcggcctcggaatggtggtctccgcctcgcccgaccccagggctcggcctcaacctcggcctcggaaggtggtctccgcctcgcccgacccttaaggctcggcctcaacctcgacctcgggaggaatcgcatccttgcccgaccccggcctcggcctcaggaggagtcttcgcctcgcccgaccttgggctcggaccgatcgcgccgcgggggatgcatcattaccctacccctagctag

SEQ ID NO: 3947 - DNA, 837 bp, Zea mays
  Peptide Sequence Number=SeqID_47322
atgcaggtggcgtgcaaccacaccacgagggcgcaccccttcggcttcgtcgcatccagcatggaggcccaggcccacacctcatgtaaccggcgcgccggttactacgtgcaagaaactgcaccgccacttgcgccaatgtcgcgccttctcgactgcagaaccagtgccacgactcgaggcaaccctggcaagcgccacctttggcaggcgaagcaggcgtcgtttcacctccaccatgatgaccgcgtcaaaaaagccgccccagagcactcgggcttcaggctcattactgatcaggggttcgaaggctggcccctcggaagggttcgacagccgcctcagagcactcgggctccgcgcccactactgatcaggggttcgaaggccggcccctcggaagggttcgacagccgccccagagcacgcagagcgagggatgactctgggtacgtctgttacatggccgaggctcgggctacgctcccgaggcgcattcaatgtgaggatcgcctgacaccttatcctgacacacgcgcctcagtcggcaaggtcgaagaggagatctccacctcgcccgaccccagggctcagcccccgcctcggcctcggaaggtggtctttgcctcgcccgaccccagggctcagcctcaacctcggcctcggaaggtggtctccgcctcgcccgaccctaaggctcggcctcaacctcgacctcgggaggaatcgcgtcctcgcccaaccccggcctcggcctcaggaggagtctccgcctcgcccgaccttgggctcggaccgaccgcgccgcgggggatgcatcattaccctaccccctag

SEQ ID NO: 3948 - DNA, 1077 bp, Zea mays
  Peptide Sequence Number=SeqID_47323
atgatgaccaccagttcgatggtggggagaagcaagccgggctgcggcctctgccccaccctcagcttcaaggatcttcatcatccttgctggggaggagggcggggcgagccggggcctgcctccgcgtggtctggcgacccgcttcttcctccgcgatcgggggagaggggcgttcgccgtccggggagctggcagctgtcgcgtgtctggctccccggtctgagcggctctggcgctgcttccggtgccacctcccaccgctggggcggagcgtggctgtccgcccaccgtacgggcggctgttgcaccgtgcgcaccgggggaccgtccaagacgtcgcacgccgctagggcggtgtacgtgttcttggattgtcttgtcctcactctgacacgacgcctccgcgcggaggctggggtggccaccattcgttggcgtagcgccggcgcgcaggtggccgctgtcgtcggtgctgaggtggtggtcgctagaggaggtttctccgccgacgagaccgttggcgccacccgcggacagacctccggctctttggctttgatagcttgtcctcgcccctcgagtggggacatgggcgagggccttgtcacagcagtgtctgccctgagttcatcgctgctgctgtttagccgcccggagcggaggtcgttgtcgctgctggtgcagcggtcggcggcgagccaactggagtttgttatcctgcagaccctccgatgtggaggttgttcatacccgcgggagtggaaccagagttccgtttgtaatggcaccttgagtaccggtgcgtggacagaggcggagtcggctcgaaaaggggctttgtcggcccagaagcaggtggcttcccaggccgaggaggtgcagcagcggcggctggagcttggccaggtcatccgtgagcaggaccaaccttggagtcacgctgccgaggccgtgagccgggccgatgtcctcgggggacagctggctgaggctacggagcgggcagccaaggtgtccgcttgggccgagaccctagaggagaccctggctgtgatggcccaagcacggtgctga

SEQ ID NO: 3949 - DNA, 186 bp, Zea mays
  Peptide Sequence Number=SeqID_47324
atggcgtcattcatccacacccaccatctgcgcgctgcacctcgtcgagctcctcgtcttcgaggtcaccccggtgctgacctccacgtttccccgatcatcaccaactacaccatcgagatgttgtcgtgcaggttcgagggatcagaggcacttgagcagcagaatggactcttctcagagtag

SEQ ID NO: 3950 - DNA, 1242 bp, Zea mays
  Peptide Sequence Number=SeqID_47325
atgatgatgagcggtcgagcggccaccgcggggcggtacccgttcacggcgtcgcagtggcaggagctggagcaccaggcgctcatctacaagtgcctggcgtccggcaagcccatcccgtcctacctcatgccaccgctccgccgcatcctcgactccgccctcgccacgtcgccgtcgctcgccgccttcccgccgcaaccctcgcgaagcccgccgacgaggacccggagcccgggcggtgccggcgcacggacggcaagaaggcgctgctccaaggaggcgtacccggactccaagtactgcgagaagcacatgcaccggggcaagaaccgttcaagaaagcctgtggaaatgtccttggccacgccggcgccggcctcctccgccacaagcgccgccgccgccgccacctcctcgtcccaggcgccgtcctaccacagcccggcccccgccgtgccgtaccacgcgccctacggcgccgcgtaccatcacacgcagacgcaggtgacgatgagccccttccacctcctccacctcgagaccacccacccgcacccgccgccgccgccgccgccgccctactactacgcggaccagagggactacgcctacggcaaggaggtcggcgagcgcgccttcttctccgacggcgcgggcgagagggaccggcagcagcaggccgcggggcagtggcagttcaagcagctcgggacgatggaggcgacgaagcagccgtgcaccacgccgctgctcgtccccgcccgccgggccaaggaagacgaggaggaggaggaaacgcggcggcagcagcagcactgcttcgttcttggcgccgacctgcggctggcggagcggccgtcgggggcacatgacgccgccgcgcagaagccgctccggcatttcatcgacgagtggccgcacgagaaggggagcaataaggcggggtcgtggatgggggggctcgacggcgagacgacgcagctctccatgtctatcccgatggcggccgctgccgacctccccgtcacctcccgctaccagattcttgtccaaaggagacctaagtttattaagaacgccatcgccatcgccatcgcccatctatgtggtcgctataccaacacggtcgcgccagatctacgagctccgctgaacgctgccaagcgtgcacatacactcgctatacgctcgccctcctttcgtgcgctgacgacttacctatatgatgcccgctactag

SEQ ID NO: 3951 - DNA, 480 bp, Zea mays
  Peptide Sequence Number=SeqID_47326
atgtccggtgcaccaggggactccgacttcaaactcttcactctcgggaatttccaaaggtcactccgctataattcaccggactgtccggtgtcggtgctccaaggaagagcggcctcaggaactcgccagcctcgggctttcacttcggctgcttcgctaaaattcaccagactgtccggtgtacaccggactgtccggtgtaacagcggggcaacggctatatcggcgccaacggctacctgcagcgcattcaatgcgcgccagaagcgcgcagaagtcaggcacgcccattctggtgcaccggacattgaacagtacatgtccggtgtgcaccggacatccagacgggcccagaagacagtgctccaacggtcgacccaacggctctttggtgacgtggctgtcgcaccggacatgtccggtgtgcaccggactgtccggtgcgccatcgaacagacagcctcaccaaacggctag

SEQ ID NO: 3952 - DNA, 276 bp, Zea mays
  Peptide Sequence Number=SeqID_47327
atggcggtggcgcgacggcggtggcgcgacggcggtggacgcggccggcggtgggcgcggcggcggtgctcggcggtgggcgcggccgcggtggccgcgacggcggggcgcggcggtgggtgcgccgtatcggcggggcgcggcggcggtgcgcgtggggaggctgtgcggcgccggcggcgagccgggaggctggagctggcggcgatcgcgggcggcggcctccatatctggttcgagacgtctacgctgcggaacggcaagttgtgtgaatag

SEQ ID NO: 3953 - DNA, 855 bp, Zea mays
  Peptide Sequence Number=SeqID_47328
atggcgaagccgcaggaggtccgcagcgtcgactccttctcgcagctaccgttcatccggccggcgccggcgccgagggacgccaccatccgtctgtttggccgcgagttccccagcgaccacaaccagcagcagcaggacgccgcgtccgactcccccgacgctgccaacaacggcagcacggtcacgtgcgagagcaacggcgcggccaagagcggcgccgcggccgagaggaagttcgagtgccactactgctgccgcaacttcccgacgtcgcaggcgctgggcgggcaccagaacgcgcacaagcgcgagcggcagcacgccaagcgcgcccacctccaggcctccctcgccatgcaccgctacgtgcccggacacatgtacggcctcttcaactactacccccacccccaccccatcggcggcggcgcccgctttgaccaccccgcgccgccgccgccgccgctgcagcactacccgatgtggacgactagcgccagccccgcggggccctacggcggcggcccgggctccatgtcgcagccaatcaacggtagcccggtgcccgcggggctctggagggtgccgccgccccccgcggctactgccatggagaatttcggcgtgtccgcccggcacggcgctagtggtggcacggccttcccggtcgggccgcctggtggggaggcagcagcgtgcaaggacgataaggcggcggtgatgatgagcttgctgtccccctccccctcgctctcgtcgtgctcgtccacgtcgccggagacgaagctagcaggtaggtatgaactggcccgccagaaggagactgttgttagcttggacctccatttgtaa

SEQ ID NO: 3954 - DNA, 663 bp, Zea mays
  Peptide Sequence Number=SeqID_47329
atggcgtcggccggatgcccgcacccccgttcgacgatcctgtacccagacctgccctgcgatcccgacgtgtgtgccaagagttgcgccaagggattgaacaacggcaacggcacctgcgtgaggccgattggatgtgattgcgtgttctgcgtgccaacagccggccaagctgcacctttggaaacggagctgtcttccgcaacgaaatgctcttccgatcctgcggcaaatacgtcctatcgtgcatccctgaagctcggcaatggagagctaggttacctctgtccgcgggaggggaaaaaaacgatcgcagacgaatggtgtacagaagctgcacaacccgatgcagactacggtggtccggcagcgcggatgaccttggctgcggcagcgcggagcaggtcggtggcggcgacgaggaggacctcgatctgggaagtgctatgttgcggcggcgtagagttgcttggctgtggagatgtggagaaggtcggcaatggcggagctatggaagtcggcgcggagtcgcttgcctgcaccgaaggcgatatcgtcgaagtcgatcgacgaaggaagcctccagttgcctgcatggaagacccccaccgaagaaccgcacgaacaagaaaaaagtcctatgtcctcatgtctacgaggtag

SEQ ID NO: 3955 - DNA, 447 bp, Zea mays
  Peptide Sequence Number=SeqID_47330
atggcggccggcggggaaggagcgtccacggatgccgaagaagaggaggccctgacaggcaaagggcggatcaagacctgtcgactaaaagctacgctcgagcgaacattggaagagcctaagcttactttggaccatgaaccttccagtggccttggaagcggggcacacattgccgatgctgtcgctacccccgcggtgacggcggtcggtctgacacaggcggtggtggtggtggtatctgatctgaagatggtggcggcggagggctcgtgcccctctgcccgtcctagacccgaggaggaactctggggccacatcagctggctgggggccaccgaccggtgcaccaggaatgtggatcccccgatgggggtcccgaccaccggtctggcggaccgccacaccactctcatcaagggtcggcagttgggccagcaccgctga

SEQ ID NO: 3956 - DNA, 537 bp, Zea mays
  Peptide Sequence Number=SeqID_47331
atggcctcgacgtgtcggggccggatgctaggattcttaaggtggaactggtgtcatgacccccaaggggcaatccctattgggaccctacctgcacacggcctaggccaggaccggctacagggtggtggggcgtgtaggcttgcggtacttgaccataccaagcggcctaacggccccaaaccaccccatcgtctggttgccgggtctggctactcaattcggatgtcactataccagctagggagggagactgcatgggtgggaaagagaccgaccccgcaattctgtttttatgggaaaaacttatggagatgctctatattccattggttggggagagacgatcgacttgaggaaagcgacagtagcgccatgggtgatgctgaccacaggggtggcttccggccacttggtgaatttgtcaatggcgacaaagaggtaccggtacccgccgatagccctaggaaatggtcccaggatatccacccccatacagagaacgaccaggagggcggaatcatttgcagagcctga

SEQ ID NO: 3957 - DNA, 630 bp, Zea mays
  Peptide Sequence Number=SeqID_47332
atgggtccacaggtcccagtggggggcaatccccaaatatccttcgcaaaccgccgtgaagatggctgcttgcgagatggagttaggactaagattgtgcagctccaccgcgtagacgtgcagaatcgctcgcataaaacgactcgccggcactccaaacccccgctcgtgaaaggagacgaagctcagcacataccccggcggcggggatggggcggctccgctcggaggggccatccactccggctgcgagtcactggagagagggcgaagcaaaccttcagcaacaagggcctccagatcacccgccgtggcggtggagaaaggccacgggtcgcgcggcgaaacaacggtcacccggtcggccatcaccaagcagaagaggtggcggcggggaggacgagggaccgggaaaggcgatactccaaaagggatccttcctcgcaaaggaagcgggccccgagcccccctactgatcagaggttcgaaggctggcccctcggaagggttcaacagccgcctcagagcactcgggctccgcgcccactactggttagaggttcaaaggctggcccctcggaagggttcaacggccgcctcaggccactcgggctccacgcccactactga

SEQ ID NO: 3958 - DNA, 537 bp, Zea mays
  Peptide Sequence Number=SeqID_47333
atggggagcgcccatgttgctttcgtcttgctgctgttggagaagcgcaaccttgcggaggtcggaacccttcagccatcgctcggcttcaaggattttcatcaggcagcctggctgcattccctcaccaatggtcacgcaggatggggtggaaaccatcctccagctctgcggaggaggcgtcctccagccatgcgggggaaggcgaactgctgctgcctggccagggtgcagcattctgtcctccgtccgggcgactgtggccggctgcgccggggggtcgcgcaacacgtcgtacgccgcgagggtggtactcgtgttctaggacggtcccgttctcgttttcgtggcgaggacgggagtgaggacctgctggtgcgctttggggcggccggcgctcgctggtgcggtgttggcgggcaggtggatgccgccgtcggtgccgaggtggtggcagccggagaaggtttctccaccgacgacactgtcaacgccaccctcgctctaggcctccagctctttggctttaatggctag

SEQ ID NO: 3959 - DNA, 1083 bp, Zea mays
  Peptide Sequence Number=SeqID_47334
atgccgacacttgctgctgtgagggacgaggtgggcgctgtgtcccgccggctgaaggagatgaaggaggcactaagtcaggcggctgacttcgcagaccgtgcggcgtcgggggccctcacggcagttgtgtctgccgaagtcgagagacttcagacgcaacatgccgacgccgtctgggaaaaatcggccgccgacagcaagtgtcgcaagctggcggacaaggtggccgcgctggagggggagaaaactgacctccggcgccaactggtggaggagaggagggaggccaatgaggccctcgccaaggcgcaggctgcgcaggcggaggccaatttggcgtgggtggagggcggtcttgccagggagcgcgccgagcagttggaggagcggctccgtgccctgcagagccgtgtggagagggccgaagccgcgacgcgcacggaggctgagcggactcgcaaacagcttatggattcataccatgagctgggcgcgcggatcgctgagttcgaagtgccggaccgagagcccggacttcgctgcctggagtgggtgcaggaggagttgcaggcgctccccaccatcgtggaggggtttatgtcttatgcttccctggtcacccgcgagggggcgatgaacgcgctctctcgcgaagggtgctggcactatgaagtcttcgaccaagctgatgaagatttcgagcgtgatatctacaaggtcgaggactctgtagtgaaggaatccgccggagccctctacgaccggatgtggggcccccacggtcgagaggtggtcagggaacgggccgagacggcgaggggtcaggtggcgcgtggtgagagggtggatgactttggggctttgaacaacacgctgcctgtcctggagtcgaacccggcggaggccgccctggagccgctcccggagaccgccgaaggcgcccctgaagcccccgcagccgctgcagccggcgaaggcccacccccggagaccgccgaaggcattcctgatgcccccgcagccgctgcagccggcgaaggttcaagattttgggcctgcgcacgcaaccgccactactaa

SEQ ID NO: 3960 - DNA, 1026 bp, Zea mays
  Peptide Sequence Number=SeqID_47335
atggaggtagtggagttggttccctgcgcccgcaacaagtggggcaattggcaagatttttggttctacgttgcggagggtaccgtcgaagaccattcggggctccccgtgtctgagatgtgctcgcatttctactcagcatacccgccttttgaagtggcggaggaggatgcggacgaaggggcccttcggtgcgccgccggcctgagcagtgggcgagatttggttgaggaatttattgcgtacggggtatggcctttggcgcatggctgggcgttgggcgaagtgtgccctcgccggatgccttcccatggtgggaagctgggttttgaattgaatcgactgccgtatggcggttatcccggccaggacgatgtggatcgtcgcgggaagaaaccggtggtagagtctggagacgaccccgcgccggcggccgccccgtcctctaagaagaggaaactaggtactgctatgggaggacttggggtttccgatggttttgctagagaattgatgaggacatgcgcggccccggggggaaggatgtcttcgcccgagctccgggagtcttcggcgcggatgctgagggttaccgggggttggtggcctaggaatgttcctatcccccgcgtggtcggcgaacacttttttacatctcgcatggttcgtgagtggaaagtgattccttacgggcggaatattgctactgttgtgtcggcagtgatggacaaggatcgccaaggagctgcacagaagcgccaggcggtcgtcaggcttcatgaagccaggccgaagaggcagcggggggctgcgaaggctgctgcccccggtggaagccagccgccgctggcggcgaagtcggccatccctgcatccagcagggcgctggaggctgcggctgccgctggtggttccaagactgcgaaggctgcaccggcgtccggcagggtgccggaggccgtgaaggcggcccgagggttgccgccgccgggcaagcgcgtcgccgacttcgccaccgacatttag

SEQ ID NO: 3961 - DNA, 702 bp, Zea mays
  Peptide Sequence Number=SeqID_47336
atgtcgactatatcgaaggtgacttgttctcttcgcgcgttgggcgtcgtgccgaatgacaacggtagatctattttgccaacggggaaggtgcctttgcctccaaaatcgggttttgatgtggaggatttggatgatgtggtggtggggggaggacttggacctcttgatgatgacggtacaagtggttgggttggtgatggatttgctcgttgtggtatggttgctggtggtattgctgggggtgataatcttcaccgtggaacaggcagtaaaatcttcgtgactgctgtgcctggcctctgcctcttcctcttgtgttgttgccgcagttttgctatgaggggcggggtgttggttggtgatggtgtttacttgttgctggttgagctcctcggacctggcgtatttttcgaacaattggtagagctcctacaagtttttgggcagatctctgatgcagtggctgtacaggatgctgatgcgaagaccgctgattgcataatggattgctatgtgatcgtcgacagatgcatcctggtataccaggtcagggttggggcttcgagcgtgatgatgaaggatttggccatggtggctgttggggggccttcgtcttccgaagcgccgaagctacgcgcaagggagcttcggcatgacagcagaaaaggaaaccgacttaaaagggaaaaggctatttag

SEQ ID NO: 3962 - DNA, 141 bp, Zea mays
  Peptide Sequence Number=SeqID_47337
atggccatgatgggttcaacatcggaaaagatgtacctctgccaggtgaagaagctgcgaacttttgttgcttctgttcaaaggtggtaccaaaaggagagcaccaagactaaagccgcgggaggaaagctcctctgttaa

SEQ ID NO: 3963 - DNA, 504 bp, Zea mays
  Peptide Sequence Number=SeqID_47338
atgaaaaaagatagaaatttgcaaaatggaattgggattcagatgagtcaggttcagattaaaaaagtcaaggagaccacgaaagaagggagaaatgggaagagcaaggtcgcggataagaaaaggaacatagacaacagactaatgggtatcttctgtcggaacagtgaccccacggcaaatccgccaagaacaaagttccttcggaggaagaactccaacatcgacaaggtggaggagatccgattcagagacaacagacatatggttacctgcaaagggcaactggctgttggggtcgatgggagggatcactactacagcagaattctggttcttccgcttgggcgccatcgcaatctcgtcggcggattgaacagaagcgaaatcagagagaaacagaagtatggcttgaggcggaaaggtgaagttagggctcagaacgcagaggcatgcgacgacgtgataaagatggggttttcccgggttgggcaccgtttctaa

SEQ ID NO: 3964 - DNA, 306 bp, Zea mays
  Peptide Sequence Number=SeqID_47339
atggcctcggctagtcttggaggtactcgggtggattcggagttgcttccctcccacgggaggtgcccgccccatcctgtgccctcgctgtcaggcgtaggagaccactggtcgaccaaattcattgaaggagggggcctgaaaaggtccagttctccccaagggcttctcctgctgctccagatggtccggctcccatcccgacaggatccgcagggacgttcgggtgcagttgtgaatacaacacatgaacttcttcatgtaatgtattacaataaacctgcaagttatcaacagctgagctaa

SEQ ID NO: 3965 - DNA, 534 bp, Zea mays
  Peptide Sequence Number=SeqID_47340
atgggacaaagccctgagtatgaagtgtactttcgcaagacttacccgacaaatctgcccgaggcaaagcttacccatgacgaggcatgtgaccagttaaagggtcctcgagcaagactaagcataggaaaaaccttttgtaaaacagggattcaaaggaaggctcggtcccgcagatatgaaaatagaaacagctgcctgcctgatgttcctcagaattgttttagctttggtagaaaaggaaaaagaaaaggtgtgaatagtactggactgaatcgggcccagaatattctaagagtcactgacatcttacacagaggtccccagaactttgtttcttctccaaataggtccctaaccacggcgcgctcgccggctatcaccgacgcagcccgtactggccatgaccgatggtggctgtctagtctagctacaggggaggcattactgacccaaggtgacccaggaacaatcgtcaattttggcttgaacactttgagaacggcctgcccatgtgcacggcggaaaccgtga

SEQ ID NO: 3966 - DNA, 405 bp, Zea mays
  Peptide Sequence Number=SeqID_47341
atgagatgtatccgtggtggcaaaaatgagccagatatttatggtgatagtggatctcgtggtgaccaaaacatgatgtctaagcgtattcgattatttgatgtggctggcacctctcagagtggtgcagaagttgatcctaatcctccaccgccgccaatccctccaacactagctgatgcagttgccgcgctggtgaatgcgacggctgataatgcacgtgtgctgtgtgaagtgcttcagaataagaatcagcatggggctcgggtaccttccaataatgccaggaatgcttcttatatggaattcatggagactcgacctcccactttgataaaagctgaggagccacttgaagctgatgaatggctttgggtggtggagcaaaaattcggtcggatatag

SEQ ID NO: 3967 - DNA, 516 bp, Zea mays
  Peptide Sequence Number=SeqID_47342
atggaatattattggatgctcgacaagcttggcggagcttttgctcccaagccatcttctggacctcacaagtccagggagtgcctgcctctgatcctcatcatcaggaacaggctcaagtatgcaccgacgtaccgtgagatgtcatttccatccctaagacaaacgagaactacaggctgctttcgtcttcacccaatcagggatgaggatgccaagttcaagctctacaaggtgaggtctgttcagtttggccagaaagacatcccctatctgaacacctacgacgaccgcaccatccgctaccccgacccgctcatcaaggccaacgacaccatcaagatcgatctggagaccaacaagatcatggacttcatcatgtttgacgtcggcaacgtggtcatggtgatcggcaggaggaataccgggcgtgtaggagtgatcaagataagggagaagcataagggcaacttcgagaccatccacgtgctgcttggagctttttgctatgtctag

SEQ ID NO: 3968 - DNA, 316 bp, Zea mays
  Peptide Sequence Number=SeqID_47343
atgtccggtgccccagccacgtcaccagtgccgttggaatctgaccgttggagttctgacttctgggcccgcctcgatgtccggtggcgcaccggacatgaactgttcagtgtctggatcggctcgggcgagacagatggagcattggtgactttgggcgagacggagatttccctaaggcgggagacccttagggagggacctcgggataatctgggtacccctaattatcacacccgacagtttgggatgaaggacacaaagcccgccaagacaccactgggaaccgatgggcacttggacctcgacaagggag

SEQ ID NO: 3969 - DNA, 606 bp, Zea mays
  Peptide Sequence Number=SeqID_47344
atggagactcggctgcacggcgagaagtccggtgagcgtgaaccgatagaaatggaggggccaggggaaactagagggtgtctcgtgttgctgcgaggaggcggagctcaccagggcaatggacacgacaagagctcgacggcggccatggaacgtacggcggagtacggcggtgctccacgggtgtgcgcgtggtgcgagagagaggtgcgagggggtctactgggggcgctactgagtgaggggagtgggcgagtgagtgtgggctccaaaagaggttgggcgcgtagagggagtggccgagaaatgcgtgacgtggacgcttccacggtggagtgtgcgggcgggatgttagggaaggggaggtggctgacagatagacataatatcccacttcgaaactcagatcccttcttattgtgtcagcatagcttcgctgcggggactatgctgtctttagattctctcgaaccattctcatattctctacgacttcaagcaaaatttcgggaccgaacacctacctttcgccgggttggtcccaatgcaacgaagttcgacaattcctcccatatagtgcttggaacagtgacatctttaaactag

SEQ ID NO: 3970 - DNA, 1128 bp, Zea mays
  Peptide Sequence Number=SeqID_47345
atgtcctgcaagctctccgcgagcgcgctggcgtcgtccacttgctccgggattggcgtgtcgcgggaagacggcgctcgccttcgtctcaaacgcgaggtcgacgccccgacgcgcccccccgttgggggcgccggggacgtcgactcgctcggcagccgacgaggcgcggcctcccgcttggcccttggttgcccccgcctcctcctccttttggcgggggagaggacgggacgagctcgaaatgttgttcttcccaccacgcgggggaagacgtcgtcgattccgcccgccggcggggcgggctgtcggccgccattgttgttgtcgcgcgggcggtggaaggagtatcatgtcgtagctgccgtcgaaggacatgaaatcaagactcccgaaacggagcaccgtcccgggccggagaggttgctggagactgcccatttggagcttgacgggaagctgtttgtcaacacgcagcaggcccctacctggcgcgccaactgtcggcgtttcgagaccggggggtccctaggccgacgagtgaatgtcgctgcgtgccccagcccagatgggtcgagcgtgtgggcgagcgcgaaggggggaagcgaggtggccggagacgggcgtgagagaggtggaaatcctgcggccttcgtgttcgtcccgcgcccaggtcgggttgggcgacgtggaggctcctccgaagccgaggtcgagtctgtcttccgtggccgaggccgagtccgagcccctgggtcgggcgaggcggaggtcgttcggcagaggccagggcggagtccgagccctggggtcgggcggagcggagttcgtcgtcttctggggctgagcccgagtccgagccctgggtcgggcagagcggagttcgccgtcttccgggacttagcccgagtccgagcccctgggtcgggcggagcggagttcgccgtcttccgggacctagcccgagtccgagccctgggtcgggcggagcggagttcgccgtcttccggggctgagcccgagtccgagccctgggtcgggcggagcggagttcgccgtcttccgggacttagcccgagtccgagccctaggtcgggcggagcggagttcaccgtcttccggggctga

SEQ ID NO: 3971 - DNA, 420 bp, Zea mays
  Peptide Sequence Number=SeqID_47346
atgggcaagagcaagaaaggtggaagttcatcgcaccactccggcgacaagaggaagcacgagccgagtcccccctccgaggacttcggtgactctgagtactcggaggaggagttctcttccgagtccgaggggttgccagtctacgcctctcccccagcatcgtccgatgactcggacaattcccaggggatctctgccgaggtgtggacgtacatccggaccgtcgagcgctccttgctcgagggctcggatgagtcagagatctcctcggacgaggaggactcctccgactcgtccgaggaggggagcggtggtgacggcgatgacgagggcgacgacggcgacaagggcgacggcggcagcggcaaggacgacggcggcagcggcagggccagtggcaaagcgccactggcttaa

SEQ ID NO: 3972 - DNA, 645 bp, Zea mays
  Peptide Sequence Number=SeqID_47347
atggggcggcgagcgataagggtgctgaatcctgacaggagcgggggaaccatcctgatggcggcgctctgcgcgctcaggacgcagttccgcaatctccacccaagccttgcccaactcgtcaagagcgtgatccagctcggtgttgagcatggcgaccaggttgaccatgctgctcaatctaggattaccctcaccaacggcatcctgcatggctgcctcagtagtgtccctctcagtgatagaataatgctctcagaaggcctctgcaccctggagatcatcgtccggacggcgcaccaagcaagcccaacgcaacaaggtgtcgagagcatcgtggaaatgacaaccgcgggcggcgtcacgagtgatgggtcgggcgatccatccttccggctcctgctcctccaagagctccgtgttgtggcccaaactgccaccgtcgtcgtctctgtctccatcagggtcttctccagcagccgggatgccctgtggtggtgcagggggcatctctggctaagacgtaggggagggctacctcccagactccacctcctgctgaggcacggggcaagagtcatgttgctcttgctcctagcttcggcactcctactcctcgcgcaggcggcgatgcagtctctccag

SEQ ID NO: 3973 - DNA, 1977 bp, Zea mays
  Peptide Sequence Number=SeqID_47348
atgtcggtagtcgagttagttccttgcgcccgcaacaagtggggcaattggaatgagttctggttttatgtcgcggagggtaccgttgaagaccatgaggggctccccgtgtccgagatgtgctcgcatttttactcagcgtacccgccctttgaggtggcggaggaggatgcggacgaaggggcccttcggtgcgccgccggcctgagcagtgggcgtgatttggttgaagaatttgtggcgtacggggtatggcctttggcgcatggttgggtgttgggtgaagtgtgccctcgccagatgccttcccatggtgggaagctggtgcgaagtcccgccttcgtgctggatctgcaaggccgcgatccggccgcctttgtgcgtgaggtggaggatggggcggtgcagatcgttggtcgaattgatgaggacatgcgcggccccggggggaaggatgtcttcgcccgagctccgggagtcttcggcgcggatgctaaggtgatggacaaggatcaccagggagccgcacagaagcgccaggcggttgtcaggcttcaagaagtcaggccgaagaggcagcgaggggctgcgaaggatgctgcccccggcagaggcaagccgccgctggcggcaaagtcggccgtccctgcgtctagcaaggcgccggaggctgcggctggcaccggtggctccaagactgcgaagactgtgccggcgcccagcagggtgccggaggtcgcgaaggcggcccgagggttgccgtcgtcgggcaagcacgtcgccgacttcaccaccgatattagtgtggacgactatctgggtgggtcggacgaaggccaacttgttgttgttgcgcccgccgcggcgaccacggcggctgccgtggtgccaaaggcgaagggcggcgctcttagtgccggaggcgagatgctggcactcgctgccgtcagggacgaggcgggcgctatgttccgccggttgaaggaggtgaaggaggtactaagtcaggcggctgccttcgcagaccgcgcggcgtcgggggcgctcacggcagttgtgtctgccgaagtcgagaggcttcggacgcaacatgctgacgccgtgcgggaaaaatcggccgccgacagtaagtgccgcaagctggcggacaaggtggccgcactggagggggagaagactgacctccggcgccaactggcgggggagaggagggaggtcaatgaggccctcgcccaggcgcaggctgcgttggtggaggcaaaggccgaggccgcggcgcgcacggaggctgagcggacgcgcaaacagcttatggattcataccgtgagctgggcgcgcagaccgctgagttcgaagtgccggaccgagagcccggacttcgctgcctggagtgggtacaggaggagttgcaggcactccccactatcgtggaggggtttatgtcttacgcttccctggttacctgcgagggggcgatgaacgcgctctctcgcgaagggtgccggcactatgaggtcttcgaccaggctgatgaagatttcgagcgagatatctacaaggttgaggaccctatagtgaaggaatccgccggagccatctacgaccggatgtggggtccgcacggtcgagaggtggtcagggagcgggccgagacgggcgagggctcaggtaacgcggcgcgcgacgagagggtggatgatttcggggcgttgaacagcgcgctgcctgacccggagtcgaacctggcggaggccgtgcccgagtccgccctggagccgccaccggaaactgccgaaagcgctcctgacgtccttgcatccgctgcggccggcggaggcccgcccccagagacagccgaaggcgctcctgatgctcccgcagccgctgcgccgagggctgagggtcctgcgacggtggcggcggaggcaccagcggaggcaacagcggaggcgcccgcgacggctgggtcttcgtag

SEQ ID NO: 3974 - DNA, 243 bp, Zea mays
  Peptide Sequence Number=SeqID_47349
atgacgatagaggaagtcagcaacagaggccacaatattcctcgcaagcttcgggtcagcaacaaagctatcttcggccgccagctccaaggggcagaggcgccaagggcttcggaggaaggatttctcaagaagcataaaaactcttctttacgaagcatgaaaagaagggaaggtgttttttcgccgaaggctcaaaaacgcttcatccataatggtttcagccatgctaataatttctga

SEQ ID NO: 3975 - DNA, 465 bp, Zea mays
  Peptide Sequence Number=SeqID_47350
atggacaaagatggccacctggaggatggagtggggtgtgaggtgctagagttgaattccgaactcctccagcagcagctggaagaacggcgaatttggcagcgccaacccgtagaagagataggaaacgaagagcacaaactccccggcggcaagatcgccgaggggagtagtgccggcccggatccttccggcaaacgcaagcgagccccatcagagcaggcaacacaccgagttgagcgcctcctcggtctggtaatgatcagggcgaaccaccatggccatggcgaccacggcggcgaaaaactagggagcaggaacgcggagaggcgtggaaggcttggaggcgaaagggcagagcagttggggaaagggcaaaagcaaaaccactgcgcgaggaaaaacccctttttcatgggaaggctccccgcgcaccctggaaaaatccgcctgacgcacacctag

SEQ ID NO: 3976 - DNA, 327 bp, Zea mays
  Peptide Sequence Number=SeqID_47351
atgggagaccacgtctcaggtcgcgtgaggagggcaatctgcgggcaggttcactcaggtcgtccaccaacggcatcttgtggttggcaccacatcactggctcgatcatcatctctcggtcctatatgaggattcagctgttagcaaggtcaaaaagtgcaattacagcagcactgtccagatttggacagattctgacttgcaacttcaaaaattcacaactgaagattcaggcatccaaacaagatgatcctagactttctggaaagatcaccaaaaatagtgatccaagactttttggaaagcttagaaaaagccctacataa

SEQ ID NO: 3977 - DNA, 321 bp, Zea mays
  Peptide Sequence Number=SeqID_47352
atggagaaccacccgggaaaacagtgctaccacaagggtggaaagctagtggaggactaccttacacgaaagggcaagggcgatagaggagctgcatatagggaggttctcgtgtcgatcatgctgcgatggcttttcagacgagggattcctatattgcccttctcagaaaccgtagcgggtattttgaagctagtggaactttgtaaaggtctcatagtgctaccctgcctcgtctcctcggcagagatgaatgggaagtcacgatcccttggcaaatgggtaacacgacttatgggtaaagatgcacaacctctatag

SEQ ID NO: 3978 - DNA, 387 bp, Zea mays
  Peptide Sequence Number=SeqID_47353
atggacatggagcacgccgagatcgggcctgggagatcctgcgcgcagggggaaaggctccctgttggggaggttcgcaggggcgtgccatggagcagggaacagggaaggtcgcagccaagaggaggtcaagggcgccgacgtgctcccagggagctcctgctcctgcgacaagaagcagagggaggaggagcggccgccatgggagagagctcgctgccggagaagaggggcgcccagctgcagccgtggagaagaagggagagctgctgttgccgtgggaggactcctgcgcgaggtagaagaagacaggggaaatcggctggagaagagagaagagatactaagctaagtcgagtaagatttgatcagaggacgacatactga

SEQ ID NO: 3979 - DNA, 333 bp, Zea mays
  Peptide Sequence Number=SeqID_47354
atggcgaagcctggccacgctactcctcctggtcctctcctgcggaagaatgaccgcacttgtacccaccataaccggaatgggagaccacgtctcaggtcgcgtgaggagggcaatctgcgggcaggttcactcaggattcagctgttagcaaggtcaaaaagtgcaattacagcagcactgtccagatttggacagattctgacttgcaacttcaaaaattcacaactgaagattcaggcatccaaacaagatgatcctagactttctggaaagatcaccaaaaatagtgatccaagactttttggaaagcttagaaaaagccctacataa

SEQ ID NO: 3980 - DNA, 1005 bp, Zea mays
  Peptide Sequence Number=SeqID_47355
atggcttccttgttgcgctggaaggacaagtacgtgaaggagaggctgcagggcctgtcctgctcctcggcggccgccacctccgtcgtcccctccaatggccgcgccatcgaccggcactctccgcacctccgggaccctcaccggcgtctcccgccaccggtgcccaagccacccagacccagctctagtttcagtactaccaaagattcgtcctcctcctcctacaagcagcggcagcagatttgccacttcgacgtcgatggcaaagacaaaaggaagaataagaagaagaagagcacagcagcagcagccgctggtagtggtagctcgccgtcggagcataggagaaacggcaaggagaaggcgctgcagctgcagcaggtgagccccgcgagctcgtcccggttcctgctcaactcctccaggctcatgatgcagtccgacgacgaaaccactgccgtcgactccctgccgccacttccgtccccgcggcggccctccttcgttgacgccgccgccgaggacgacacagacacattccccagcagccacggcgatgccgcgtcgccggctgttccgtcaagaaggcctcagctcgtggcgccggcgccgccactggaattattcgctgagccgtctgcatcaggcgcaggctcctcctcctcttcgtcgtcagagataactggaggccatgtcgtcgccgccgctgacaacactgtcgtggtgagatcatgttccacgagaacagggcagcaccaggtagtggttttgagggtatctctgcactgcaaggggtgcgctggcaaggtgaagaagcacctctccaagatggaaggcgttacttctttcgacatcgacatcgcgacgaagaaggtgacggtggtgggagatgtgacgccgctaggcgtcctcaacagcatctccaaggtcaagagcgcccagttctggcctgactctcgctcctctttctctacgccaccgcgtgcctctgcctccttctga

SEQ ID NO: 3981 - DNA, 294 bp, Zea mays
  Peptide Sequence Number=SeqID_47356
atggcatggcatatggcgacactagacacacagacgtggctaagaggggaggttcctggattggggttggccgacgaggacgtcgatcttctaaggggggtggattatgatatcctggcccttgggatgggatatcctggcccaaggcttaatataattaatagagtaatcatatcaacaaggtgcatcttctttttcggaagcctatctcgaagaacctccaagttaagcgtgcttggcttggagaaatttggatgggtgaccgaccgagaagtttttctcgggtgcgcatga

SEQ ID NO: 3982 - DNA, 507 bp, Zea mays
  Peptide Sequence Number=SeqID_47357
atggacgagggttgcactcaacctctttcaagtgatccaatgatcaacttgaataccacgactttcttacttatagtctttctcccgtttgcgaggaatatccacaagttggagcctctcacccttacaataaagatcccaaagaaggcacaagagggtccgatttatagccccaaggcagctaggagccattgtatgcaaacttggaaggccatccttgccttctgtcgagtggcgcaccggacagtccgactacggtcgatggtacaggtcaggacgttgagacggagcagaggcaagctgcaaacatggtggtgcagagctaaacaaccaagaggcggcaaaagaagcagagagtcgtccagacgcagatacgacggaggagatgggacttccggatccaagaaagtagtaaaccttgtcctcgaccctaggaaccgtgaccagcggccgatgcggaggtttacatgtgtccaccgttccgcctctgcatctgagcaagagtga

SEQ ID NO: 3983 - DNA, 333 bp, Zea mays
  Peptide Sequence Number=SeqID_47358
atggataactcgtcgaagttcatcaagacgggtcccattgaatgcaaccagtggacgcccagaattaggtcgaatccttccagtggtaatgcgtatagattggtgctgaatcgttctgtctcgatctgcaatgtcgtcctaaggcagacaccatcactggccaccttctcgccattggcgactttgacggtgagactagttcttggggtcagctataggccgaggcgtggtatggcagcattgctgatgaaggtatgcgacgacctggagttaaccaacgctgtcacagactcacaggctgatcttggatggtcacatggatcttcagtatag

SEQ ID NO: 3984 - DNA, 519 bp, Zea mays
  Peptide Sequence Number=SeqID_47359
atggcggacggcccgagcaccagatgcgcggcaacgagggaaccagaggttgaagacgcaggaaccaactggtggcggcgcgggcaccagtggccagtgctcgtgggcaacgaagacaagcccccgccactcctctcggcacagtgcagacacaccgccgtcgccacctgccatgtctgcgcgtcgccggggtccatgcgtccatgttcgtccagctccagcggcagggtggtggtggtggtggagtggactgtggactggcatgcagttggatcccccgcctccatggccatccctcgctgccgcatggcacccgtgtgcgcccgcgtgctgtcagctggagctggcgcaagaagattgacccagagcccaggcacgaggcatctcgcgctgaccggcggcaggacggaatgggagtcgggtggccggaggaggatcggtccgccgaccgccggtctatggacagctatcgaggcctcgcctcaccgcctggcatttcgcttgagcttgacagcctaa

SEQ ID NO: 3985 - DNA, 561 bp, Zea mays
  Peptide Sequence Number=SeqID_47360
atggcgactccgacgagaggcaagaaacggctggtcgtcgacgtcgatctcgagttggacagtgagaccgaagtggctgccgccttcagtcgtttgtcagtgtcaatcctcgccaagcctacaggcgacggtagcggcaaggagcactccaccagcaagcccgtcacctgtgtggccacatcaggcacgttccacacccagcaaactcaccagcaacatcccgaatccaacaacagccagatgcgatgtactccccagcagcagattcagtgctcggcacctcgctcagtgtcgttggaagatttggccggaaacgagattatggattcgccagatacggccaaagaggtgtcagtgaactttgcaatgtggcgcgtgtatgagcttgctcagtcacttgaggaggaagcacatcgtttagaagatcttgaagctggtccgtcgccaccattatctgagtatttcaataaccaatttgatgaagatgaacatatgggcggtggggaatgggcactggatgatgttagttctgaagagctttcggatcgtcagatgaagtag

SEQ ID NO: 3986 - DNA, 750 bp, Zea mays
  Peptide Sequence Number=SeqID_47361
atgggggacaggagcaaacaatgctacgtgtgggcgcccgatgctgcaccaagtggtcacgttactcagaggtcaactgccagcggcctgcgatgccacggcacgacgatctgccctgcccgcccgtcatttgtgacgtggacccggccgcggccagccaccaacggcaatctgcaagtaaaccgacctgccgccggcccgccactcaatacagtgctgctgctacctactacatgctacgcccagtacagtacagatgttgatcctagggcgatagatcttgccatgaaaatcgccgaaaggatattcctcaaaatgaaggaagatgaggcgaagaacaaaattgaagaagaaaatgatcgatggagaccaaacgacgaatccacctcttcacaaggttcgtctttcaaatccacttctcatatgtgctttattgctaatgggagtgatagtgaaagcgaaagcgaggatgaggaggagcgagaaagtgatagtgaagatgaggatgatcttcaacaattcttcgctcagctaagcaagaaacatcggatgagcttgctcaaactcatgaaaagagcggaagaacaaaaagaaatgcttcataagcaagaagacttcctcatcagaaaaattgaagacttagagaagttgaccaaagagcatgagaagctaaagtgctctcatgatgatttggtccaaaggatcactccttcaatggatcaagttgggtgctcgataatgaatgcataa

SEQ ID NO: 3987 - DNA, 219 bp, Zea mays
  Peptide Sequence Number=SeqID_47362
atggctgataaaggcaaaggtaagggcatcgtcatcagcaattctcgcatgtcagatatatcacaaaaggagattgctcgaaaggcttcggacgagaaggctaaaaggtttagttcatatgcttttggttcgtcaaactgcaccaaaaggcaggggcatatgttggaggctaaaatgagcctggcgacggtcggactgtccgcggtggtggcgcggacg

SEQ ID NO: 3988 - DNA, 81 bp, Zea mays
  Peptide Sequence Number=SeqID_47363
atgccgagaaatatggtaaatcggtacctccttgatttggttgatggtgtgacttggccttcatccctgccaccgggatag

SEQ ID NO: 3989 - DNA, 348 bp, Zea mays
  Peptide Sequence Number=SeqID_47364
atggaatccgtgagtggtctcatgaagcattggcttacttttatgtcaaaaaagtatccagaagatttaaccccagagatgagagaagctttacaaaatgaaggtggtgatagttatgaccaatgcactgaagatgacaaatctgaaaattatgctgccaaagatacgagtagcatccaagaagattcaaatgctgacgtgacctctcgaacaaacgaagtgcataacatggttcatgtcgagcagcagcaacaacaatctgtccatagaagtcttggacaaactcaagtccatacatctacaccacatgagcaaacaccttcaaagatagcaaaacaacacaattaa

SEQ ID NO: 3990 - DNA, 273 bp, Zea mays
  Peptide Sequence Number=SeqID_47365
atgaagacaatgcgatcaacatcagccagcaagatcaaagtggcacagcggaagcgtgtgtgggtcctaacccacaggtccaaggtatcctcaagaattgtatcgattggtctcgagaatctgaaggtcaaagcaactagtccgcaagttaagcttgcagagtcaaagtcaactcaagaaagtcgtgatcaaccaatgaaccaatctcattttcttgctagcctcttcttgaatctcgagggcgagattctgttaagggggttagatttgtaa

SEQ ID NO: 3991 - DNA, 594 bp, Zea mays
  Peptide Sequence Number=SeqID_47366
atgagctgtgagcatggcagcaaagcttggcggttctacaaccctgccacaaagcgtgtgttggtgtctcgtgatgctgtgtttgaagaaaatcgagcatgggactggggtgatgccgagaaggtagactatgagaaccctttctgtgttgagttcatgcagattggtggggatcaacagctggacaatacaccagtcagggagaaaaactttgctggaccatccaggtcaccatccacgacacagcacatgccagtcctcattttatcagagagtgccgaaatagagcgtcgcggaggaagacagctcgtgcgggatgaagaaatctactccccctacgagcgtggatccaatccctgccttggtggcttccttctcgcggaggggcctgagaagccgaccgaggcggtgatgacgccagggagcgtggaggaggtcgcgacggcggtgtccagggggaagcactaccgtggggtgaggcagcggtcgtggggcaagttcacggcggagatcatacacggaaacacggaaaccgccaggaccgccccatcggcaccctccccgacggcaccatacacggaaacacggaactaa

SEQ ID NO: 3992 - DNA, 393 bp, Zea mays
  Peptide Sequence Number=SeqID_47367
atgcatatatcttacgcattgcattcattagattgtaatctcgccgacggagagtacgtgctcatccccgagcaaggaactgtccaagaggaggaccaggagcaagctcccgaggctgctatcaaggatctccccgcagccccagctattgaaggcaagccccgctatggtgggtacaagtgcggtcactgcacggtggcagccggggtcagtggagcattgtatgccaagacggtactccttaggatgattggttgctggtgtgacttggccttcatccctgccaccgggatagatggtcgagagggtctccccgcaggcacgattggccttgccctggagcggcaagcggaggtagggcttggctggtctggcccctacgaaggcccttaa

SEQ ID NO: 3993 - DNA, 540 bp, Zea mays
  Peptide Sequence Number=SeqID_47368
atggaagcggaggggacgagggattgggaaaggagacatttcgaagaagtccttcttagcaaaggaaacgggccccgagccctcctactgatcaggggttcgaaggttgcgccctgcggggttcggcaaccgccccagagcactcgggctctgagccctttactgatcaggggttcgaaggctagcccctcggagggattcaacagccgccccagagcatgcagagtcagagatgaccctgggtacgtccgttacatggctaaggctcgggctacactcccgaggtaccctaagacatttccgagaccagcgggaacggatgacgacactattcaccctgttcagaccactgtgccaaccaccagggtaagactgataacagtaagtcaccacctctcccgagatcggcctcgggcgcagcaggaagttccgcctcgcccgatcccagcctcgggctcggaaggaatcgtcgccacgcccaacccaggccttggcctcagcctcggcctcgggaggaggtctttgcctcgcccgacctag

SEQ ID NO: 3994 - DNA, 1419 bp, Zea mays
  Peptide Sequence Number=SeqID_47369
atgtcgtcatcgggttcgcctccaacgagcgagccgacgaccgtcgttgctgtcgtgctgcggggtgaggagtatcatgtcatagctgccgtcggaggacatgaactcgagactcccaaagcggagcaccatcccaggctgaagaggctgctgaagattgtccatctggaacttaacgggaaagataaggtgtcaggcgatccccgcattaaatgtgcacgtgatacagtcggtggcaaggcaatttggccaaggttgctattctacaaagtttgcccgagcttcgcctcgggcgagccgggggtttgctcactgcctgaggggaccctcgagcgagccgtgaatccgttcgggactactattcttgcccgatgctgggctcggatgactgcgcggtcggcgctggacgaggtcaccgacacgagcgccttcgaccggtcgccatccaccttccggagctccgtttctagggacgggcgattccccgtcgtggcagggcggtaccacctctacgtctcgtacgcgtgcccctgggcgtcccgatgcctcgccttcctcaagctcaagggcctcgaccacgccatcggcgtcacggtcgtgaagcccatcttcgagcagaccaaggagagcgacgagcatctgggctgggtgttccccgttgccgccgatgaggagcctggcgccgagcctgaccctctcaacggcgcccaaagcgtgagggagctctacgagatcgccagctccaactacgccgggaagccaaccgtccccatgagcctccaatcccgtcactccaaatccaccaaacaagcagcggatctgattccccctcctcctttccagcacgcagaagtgcagaacagtccaacagccaagttgattccagtgttccattgcatttcaggtgctgtgggacaagcagttgaagacggtggtgaacaacgagagctccaagaacatccggatgctcaacgccgagttcaacgacatcgccaggaaccccgggctggacctcacccggcccacctctgggcctccatcgacgaggccaacgagctggtctacgatgccatcaacaacggcgtctacaagtgcggcttcgccaagaagaaggacggctgcgtgctcgtgccgaatttggggtcgctcaccagcatccatgacagggcgcgtgaactcttctactacctcaagggtgggcaggtggactatggcgaggagcacaacaaggcttgcggccacaacaggctttccctggtcatggtacttctgaagattgtggttgttgttatggacggtggaaatggcagaggaagttgtggtggaaaagaccaaaacaatgataaaaagcctctacatcttgtcaaaggtgcctttggacaggtgttcttgaatagtatacatattcaagtcaaatag

SEQ ID NO: 3995 - DNA, 807 bp, Zea mays
  Peptide Sequence Number=SeqID_47370
atggagaaggaccgtcaagacgctgcgcagaaacgctgggcggtcgtcaggatcgtggatcctatgcgcaaggcaaagagagcgcgggagagcacaaaggctactgcctccggcagtagcaaaccggtgccggctacgaaaccggccgcccccgaacacagcaaggcgtcggcgagtgcgaaggctgcctcctctagtgggagcaagccacctccgggcggacccgcgaaaggacgagagctgccttcgtcggcgcgacgagttgccgacttcggcacgaacatcagtgtcgaggattattttgttgggtcgggtgaggggcaattggttgttgtcccgcctccggtggcaaccacgtcgccaacggcggtggttggggcgaagggtgccgcgcgggacccgtgggccgctttctgcgcgagcggcgagattctgtcggccgctgccgctaaggacgtggtgggttccatgttccagcggctgagggaagcatcgcgacacctgtcacagcagctgaagcgtgaggccgacttcgccgaccacgtcgcgtcaggtgccttgactgcggacatggctgccgaggtcgagagtctctgggcgcagcatgtggatgctgtccgggagaagtcgactgcggaaatcaaaaaccgcaggttggcagagaaagtggccgccatggaggccgagaagacggacctctggcgccagctggcggaagagaggagggaggcgaaccaggccattgctgatgctcaggctgcacgagccgaggccaaggtggcacgggcagagaacgaatcaagctga

SEQ ID NO: 3996 - DNA, 318 bp, Zea mays
  Peptide Sequence Number=SeqID_47371
atgaagccagctccaaaggccgcaacacagctcccaatcctcacgacaacaacaaagctctttcaggccatcagccccaaggggcaggggtggcgggggcttcggaggaaggtaataaacctgcggcttctgttgtttcggcaagtcattcacaagcttcctgggcccaccttccattaccaccaccattgccacctactcacacccgaagccagtagccagaagggcaccggcacgcccaacagcagcgcgacttctgagaggagtctgaagctcgtacagtcaatagcaatgtgccagaatcgaatcatatactaa

SEQ ID NO: 3997 - DNA, 1296 bp, Zea mays
  Peptide Sequence Number=SeqID_47372
atgccaactggtaggctgagcggcaacatcacccaggactgggagccggtggttctgcgccgtacgaagccgaaggcggcggacctcaagtcgtcgaaggcggtgaaccaggcgctgcggtcgggcgcggccgtggagacggtgcgcaagtcagcggcgggcatgaacaagcactccacgacggtggcgcccgcgcgtaagctggacgagacgacggagcccacggcggtggagcgggtggctgtggaggtgcgcgcggccattcagaaggcgcgcgtggccaagggatggagccaggcagagctggcgaagcgcatcaacgagcgcgcgcaggtggagtacgagagcggcaaggcggcgccggcccaggccgtgcttgccaagatggagcgcgctctcgaggtcaagctccgcgggaagggcgtcggcgcgccactggcggccgtcgggaagatcgtaattgggggaatactatatgatgtgaaggacttgttgcgatgtttgattgacggagtccctctcgggggcgagatccaggtggcattggtgaacgctgctagctctgcgcacacgcgtagagatggcaatgggtacccgaaacccgaatacccgacgggttttacccgatatgaaggtgggtacgggataatttatctacccgcggaggaggaaggctttcctcaccttcttcgaagccgcgcgctgtgcttggggatccgcaagaagcccgaatatgtctggaaagagtaccgtgaaaatggaatggaaaacaacaaaaacacccccacctggaagaaaagactccaggctctgtcaggaggagatcccatagaagatgatcccactatcgtctacatggccggatacctccacaccctcgacaaccactacgatgagctctcctcccattgtacccacctaaactcccgagtggaaagcctagagcagcaagtcaaagagcttacgcaagagaaggcatccctccaggagagcctcagcatagtagagggcgaggaagccaacacccgtgaggcctaccgaaccttgaagatagactttgacaagaagctaaaagcactcgcccccaaaaagaagatccagaagaagaccgctaaccaaggatgccagacagagaagaaaaagaagaaggcccctctagccctacctccccccagaatagatgactggtccgacgaagaagatgtatccctagccagcctcgatgatcttctcaaggcatttggggacaccttagacaaggaactcgctagtacctcgaagaacgatctcgtgtag

SEQ ID NO: 3998 - DNA, 768 bp, Zea mays
  Peptide Sequence Number=SeqID_47373
atgaagtctcgcatggcactaggattaccgagcccggagaaatcccaaccagagtcgggctcgtcttcttcctcggaacccgggggcccgtacgaggctaacacccagcaagccctccgcgagagtgctggcgtcatatgtccgcttggggttggcacgttgcggggaaaagacactcgccgtcatcttaggcgcgaggtcaacgcccgacacgtcccccgctggggtgccggcgtcgtcgactcgctcgactgccgacgagatgccgcctcctgcgcggccatggttgccccgcctcctcctcctgcggcgaggaaggcgacgggacaaacccggatgctgttcttccgccacggggggaagatgtcgccgagttcgccgccgccgggcgagctgacggccgtcgttgtcgctatcttgctgcaggggaaggagtaccatgtcgtagctgccgtcaagggacatgaactcgaggctcccgaagcggagcagtgtcccgggctgaagaggttgctggagacaactcatctggagctcaacgggaagttgttcgtcaacacgcagcaggcccttatctggcgcgccaactgtcggtgtttcgatcccggggggggggatgcgcttgcagtaggggttacaagcgttcgcgagggagagagagcgagcctgttcgtcagcccgtcctcccgcgcgaccctccgcatggaggccctggaccttccttttatagatacaaggagagggtccaggtgtacaatgggggtgtag

SEQ ID NO: 3999 - DNA, 1035 bp, Zea mays
  Peptide Sequence Number=SeqID_47374
atgacttatgcggagaggtctaatgacagccttgtggaagttttcaaaagtatgaatgtggaagaagtaccaagtgataatggagatcctgttcatgaggtcactgaggatgacggagtcgagggaagtatggatgatgttgttgaagttgaacccgatgattcaacagatggcggtgtccttgtgaatgggaatgatggtgaggaacactgggagaccatagacactatgttttctcggttccagtcgattgacaacaagacgtgcgccaacaagggcatcccggctgctggaggagaccccgacggagacggggacgacgacgacgccggtggcagttcgagccacgacacggagcgttcagaggagccggagccagagggatggatcgtgagacccatcactcatgacgctgctcgcgggtgtcacttccacgacgctctcgataccttgttgcgtcgggcttttgaccggcacacttggtctatcgagtaccgttgtgtagtctaccagcatcgtcgcaggctatacccagaccagtgggaggctacttgcttggtgcgtcgtccggacgatgatctctggggtgcagaggccttctcagagcactattctatcactgagagggatactgccgagacagccatgcaagatgcagcacgacatgcactttctcagtattgctcgttgttcagcggggtagctaatggccttgacctaaagtactaccctcgccgttcgactggcagtgctggaggtgtgattgtctcgccagtcggtgagggcaatcccaggctgagcagcatggtcaacttgatcgtcgtgctcaacacagagttggaccacgcccttgacgagttgggcaaggttcgggcggaggttgcggaattgggtgctgaatgcgcgacacgccactatattgatggtggttctcccgcccctgtagggattcaacactcttaccgttcaccgccccgtggtcgcttcgactatggtaccccagactgcaggacccgcatagatttagatccatag

SEQ ID NO: 4000 - DNA, 300 bp, Zea mays
  Peptide Sequence Number=SeqID_47375
atggcggacgtcgaggtgtgtcgggcgtgtagacagcgagcccgcgcgtggctgctgaacgcggacgaggacgagagctggcacagcgaggcggtgccgacgcggtgggtaaggtgcttgtcacggggcttcaccatgcaggggtcgtggctggggagcccagccgccatggccgctcggtcagcgcgttgcgcatccgcagggcggtttcggctctgggatgagggcacacacgtcgcgggggaggcagtttttggaagatgcacaggaacgcctggaagaggcctcgcgatggcctag

SEQ ID NO: 4001 - DNA, 375 bp, Zea mays
  Peptide Sequence Number=SeqID_47376
atgtcaaccctgaagccatcacttgggaggagttcagggacaacttccgtcgctaccatgtgcccagggactgatgatagtgaggaaggaggagtttctcgtcctgaagcaaggtcccttgtccgtcaaagacgtcaacaagatgccaagaggcagtaccgctttctgagaggattggttgatcccctccattatcagttgatgaaccacagtttccccaccttccagcatttgatcgacagagcaatcatgaccgaaaggaagcgttgggagatggaggataggaagcacaagatcggtggacctcaggccgggagtagcagtcgtccccgctactcaggcaactcgccacaacaattcaagcaaggccactag

SEQ ID NO: 4002 - DNA, 585 bp, Zea mays
  Peptide Sequence Number=SeqID_47377
atggttttatcaagcaactcctatcacctaatgcagcaatcaagtgagaaagattttaaaatagcaagggaggtggcaaatgcaccggggcttgccttcgttcacagctctgctggaaaaagaaaaagaaaaagattaaggggaactgggccagattcagcccagcggcccaagaccagggaggaaagcgcccgcgcgcggccgcgccctggcggctttacagaaaggtcctcggggtttttgttaactggagatgggttcggtcactgttacgttgagtcactgactggctcaacgtcggtggccgaggaatcgagcaacaacgcgcggcggtcggaggaggaagaagggtactggtgcagtggctgggtgtccaacaccgtggcacttgctccggcgatcaacgaggagcaagggcgagtcacggcgatgcggtggaaaggggcagacacgcggcgcaagaccgagcgacggcgatcaccgacgtgcctatcactccaaccgcaaagcagaagggggagacgacgggcaaaaaccctatattctgaaagatacaaggctccaaagttgagccaatatcactga

SEQ ID NO: 4003 - DNA, 87 bp, Zea mays
  Peptide Sequence Number=SeqID_47378
atggtgaagaacaagttagagggcttggcgccgatggaccgaggcaatggtgaagggtgtgtagagaaatttaatggccaggtttag

SEQ ID NO: 4004 - DNA, 717 bp, Zea mays
  Peptide Sequence Number=SeqID_47379
atgggtttttatggagttttgggacatatgcatctcgcggcattgggccaagggggagtgttaagaaacccttcttgggccatgttggaacttgctctccggtgcaaggtatctgagtgcccagcgtcctgtgttaaggacgcatgtgccctctgtaacaccccaggtgttactcagggtgtccaccccaggcaaaaagataggatttggagcagagaagcgaccgtacacagtgactttgccaagatacgcacgctaggacgctctaatccgccgttgaaccatggcagaagcaagcttccacgtgttcgacgcgagctgacatccgggggcgcgctcagagcacgcccgtgcgcgaacccccgcgcgcccgcggccacccgtgaccacgcccacgccacggctataaagcccgccccagtgcttggctgccttccccgttgcctcctccgtacctcgcctgacttacccgagccagccattagctccggcgacctccccgcgacccgccagtgccgcccgagccgccgacgacccccgccgcctgtgctcgtggccagggtagctccgaccacctccgacgccgacccgcacaccgacgtgaccgtcgcgacctcccggacttcaccgaccaccccgccggagctctactgccgccgggggctttgcgcaatgtcagtgacccatgccaatagtggaccgaggactgttttgtga

SEQ ID NO: 4005 - DNA, 819 bp, Zea mays
  Peptide Sequence Number=SeqID_47380
atggcccgcgcccgcgcctataaagccctcccaggcttcgactgtactcttccgcgcacactcaaaccccaccggagtttagctcgccgccgtttgcccgtgcgcagcgtgtccgcggccgcccaatccctctgccaccgtagaccggccaatagagccattcccaaccccgtccagccctcggagaaggctgtgcacacctccgtgaagctccccgagagaggaatcggagtttgcttcgccggagaggccagtccacgctcgccggagctctcaaccccgccagagtacgtggaccgggtaatccactcaaccatccttcgattccttgtgcacacggtcactacgttaccccgggaagctcaccgtgcccttggattgaaccagttcgccgtggtttggccggtacactcgccgccgacgagaacacccgcctgcgcgcgtggaccgagcgattccggccatccccgacgtcaagctgtacctcgacgtgaccgccagagtctccccgagccaaccccacccttcgccggacctccctcgccgccggataacttagaaaaaccctacaaaaataaccccaaggatacaagagcaatacaaattccctatgtatatcctcaacaaaaacctaagcctaaagactgtaaccttgctgacggagagtacatcctcgtgccggagcaaggagctgctcaggaggtagccccggatccagcccccgagtctgcaccagaggacctgcctgccactgctttggaaggcaagccccggtttatgcataacctgttaattatgctattttacttcactcaatga

SEQ ID NO: 4006 - DNA, 504 bp, Zea mays
  Peptide Sequence Number=SeqID_47381
atggagacaagacaacgggccgacttacccttcgtctcatacgccatcggacgaagacctgtgatgaggtcgtctcatattgcgacctcgtccagcatggaggcccgcagctattgccgtctcgtgcgaaaaccctgtttacgtcactacacgcccccgttggatcatcttgcaccggagagcaagttccaacatttggcgcccaccgttcgtgctacgaaaaaaccacccgcgatggcacccaagaaagctagctcgaaggctgacgaggctgcgaaggcagcactgctggccgcaaaaaggggcaaggccctcgccctcacccactccacccaccaagaggctactgaagacgacgttctccgcacctgcgaaagcgatgctctccgcacctgtggccctgaaggccagccgcaacctcccccaggcttcgcttcaccagagggcgcggacttcactgaggacggcgaaatcatcggcgtctcagcggaagaacaactatag

SEQ ID NO: 4007 - DNA, 243 bp, Zea mays
  Peptide Sequence Number=SeqID_47382
atggcggcggtgggtgcgctgcaaaggggggtgggtggcggtagtgcgctgcaaagggggcgtggggcggtggtagtgcgcatggaggcgggcacgcgtgcgggggcacaggtgggtggtggggtcgatgaccctgatgtttgtggtctctggttccaagaatctttgcctctctgtatggcttcaagggtaagcttcccagtatcttcttgggtaaggcactttgctcttcagatgggttaa

SEQ ID NO: 4008 - DNA, 486 bp, Zea mays
  Peptide Sequence Number=SeqID_47383
atgaacttcgccagtcctggtcttccgatgatggcgttgtacccacagtcgaaacgtgccaactcgaacctcaggaactcggttctagaagttctctggggtttcaaaggtgacggacaggtagatgtgtccgagtgggtactccccttcagtcggcacgatgccgaagaagggggtatccgactcagtgaggtctttgatagcaacccccagggcctggagtgtccaggggaaagtgacattgatgctgcttcccccgtctaccaatactttctttacccagatttctcggatcaccggatcaaccgtagcagtgatgtagatgtccgcctcccagaacaattgttcggaggtggctggtgctttctagagtatggctcggatgaaaaccgagtcgttggatccccgatagaagtcttcaattacggccacttcagcgacttcggggatgtcgttcctcattgtttaaaaccttttgaggaatga

SEQ ID NO: 4009 - DNA, 747 bp, Zea mays
  Peptide Sequence Number=SeqID_47384
atggcccgcgcccgcgcttataaaaccctcccagacttagattgtacccttccgcgcaccctcaaacctcaccggagtctagctcgtcgccgtttgctcgtgcgcagcgagtccgcggccgcccaatccctctgccaccgtagaccggccagtggagccattcccaactccgtccagccctcggagaagactgtgcacacctccgtgaagctccccgagcaaggaatcggagtttgcttcgccggagaggccagtccacgctcgccggagctctcaaccccgccggagtacgtggaccgggtaaaccactccaccatccttcgattccttgtgcacacggtcgctacgttaccccgtgaagctcaccatgccctcggattgaaccagttcgccgtggtttggccggactgtaatcttgctgacggagagtacatcctcgtgccggagcaaggagctgctcaggaggtagccctagatccagcacccgagcctgcaccagaggacctgccagccactgctttggaaggcaagccccgtggactttacccctcacgcgacctgagacgaggtctcccattccggttatggtgggtacaagtgcggtcactgcacgacggccagtcggggtcagtgaggcattgttctctggaggaaatggttgccggaataacttggccgtacaccttgccaccgggttggactgtcgagtgggaccctgcctcggctaaggaggagcatgaggagtga

SEQ ID NO: 4010 - DNA, 228 bp, Zea mays
  Peptide Sequence Number=SeqID_47385
atgcccacccgggccaagatagtgaacggtccaatatatctcgggcatcctggcatggatggcaagattgtgaacaatgacgtgaggattataaaccatgttgtgcagacatatgagaggcacatttgggatcagggcagcagctggccaggagatgttatctcaagaactgcgtttgggacaactatcaagaagggtggagaattttcgagctgcaaggagaactag

SEQ ID NO: 4011 - DNA, 237 bp, Zea mays
  Peptide Sequence Number=SeqID_47386
atgaacgtatgtgagctcactcttgctgtctcacaaacaccacaggtcaagaccagaactcctgttatatataaagatgtgacattcgatcctgtgccactttacatcatatgtgtgagacttggtcccagcatacctggtaccttggagaggatcatcaaggacttgggaaaggccaaggtgttgaggaggagcagcaaaggccgccacaacaggaaggagatcaagtccgactag

SEQ ID NO: 4012 - DNA, 423 bp, Zea mays
  Peptide Sequence Number=SeqID_47387
atggacgagggttgcactcaacccctttcaagtgatccaatgatcaacttgaataccacggtttttcctttctttgactttctcccgtttgcgaggaatctccacaacttggagcctttcgcccttacaatgatgatcacaaaagaagcacggaagggtctcttttatagccccaaagcagctaggagccgttggaggccaacaaggaaggttatccttgtcttctgtcgggtggcgcaccagacagtccggtgcaccaccggacagccactgttcatgtccggtgcgcgatctccttcctattctggcacagacgatcgttgcagattcgtggcagttggcgcaccgaacactgtccggtgccccctgccgaccgttggcgcgggcggccgttggctcactggacagtccattgaattatag

SEQ ID NO: 4013 - DNA, 585 bp, Zea mays
  Peptide Sequence Number=SeqID_47388
atggacgagagttgcactcaactcctttcaagtgatccaatgatcaacttgaataccatggtgttcttctttctttactctttcccgtttgcgagaaatctccacaacttaaagtctctcgcccttacaataagaatcaaggtgaaagcactagatccggtgcaccaccggacactgtccggtgcagatttctttcctattctagcgcagccgaccgttgaagatttggagccattggcgcaccggacactgttcggtgcacaccggacagtccggtgctcccttctgaccgttggttcggccacacgtcacgcgcggattgcgcggccgaccgttggctcggccgaccgttggctcaccggacagtccggtgaaccaccggacagtccggtgatttatagtcatacaccaccatcgagtcccgagagcggactgttcaccgagactggtcctggcgcatcggacactgtccggtgcaccaccggacagtccggtgcacccaaactgagcagagtcttggctgctcgagctaagtctttgccatttgtcttttctctgattctagcacttagacaaatatgttag

SEQ ID NO: 4014 - DNA, 687 bp, Zea mays
  Peptide Sequence Number=SeqID_47389
atgggtgctgagcctcgacatgtgggcccaggggcaaaatggaaggaagaactaatgcctgcaacgcccaggcgatcttccgtgcaccataatgtccgtagtgcatatagtattgatactccgccgctgtttccccgaggccgtgcggcccagaggccttacgtcaggctccacccactggcttatgtcacgggcagcgtgccacgtggcagcatcggggctccgcctgagcagggagcagaagcgtacgtggtatggtccggacacgtgtcagctccggacccccgcctggccttgattaaggtctgggtattctttgtctcggaatcctgggaccctagtgtgagtggcatggaccccgcacagaggggtccgggacccgtcccaggggtccggtctgcacccgtggaggtcctggacctaactcggggggtccggtctgcttatacaggatccggtactttcccatgggggtccgggcccactgttgataccttggagggtgctaatcatgtttgtataagtgctagggaacttctcaagtcgagcaaaaaatggagtaaagaagtttggctaaacttgggccagtctgagcctcaccggatagtcgcccgagacgctctcgggcgagtcgtgactccgcccgaggttgacctcgggcgagccgtgactgcgtctcccacctga

SEQ ID NO: 4015 - DNA, 465 bp, Zea mays
  Peptide Sequence Number=SeqID_47390
atgccccctgcaccaccacagggcatcccggctactagaggagaccctgacggagatggagacaacgatgacgccggtggcagttcgagccacgacatggagctctcggaggagcctgagccggagggatggatcgctagacccatcactcgtgaagctgctcgtgggtgtcacttccacgatgctctcaataccctattgtgtcgggccttcgaccgacacacttggtccatcgagtactgttgtgtagtctaccagcatcgtcgtgggctctacccggaccaatgggaggctacttgtttggtgcgccgtccgaacgatgatctccggggtgcagaggccttctcagagcactattctattactaagagggatactgccgaggcagccatgcaagatgcagcacgacgagcactttctcattattgctcgctgttcagtgggctagatgatgccttgacctaa

SEQ ID NO: 4016 - DNA, 261 bp, Zea mays
  Peptide Sequence Number=SeqID_47391
atggagtctgactatctctttgaggtaaatccgggcaagggtggctcctccaaaagtggttttcactggaatgaaatgggctaccttgacgtcacatcgggccacatactgagctatttcattcttcatccccttccaccagtatctggtcttgaggtccagacggtgtttgaaccaaaggactccttggttatctgtcctgaggtccgggagctgttccttgcgggctttctccacaagccttgccgtctctgggtctag

SEQ ID NO: 4017 - DNA, 471 bp, Zea mays
  Peptide Sequence Number=SeqID_47392
atggtggatgacgacggtggtcctgttcgtggagatggtctgcaaccgcgttcgaagtccatggaagagaaggggagtctcgggcggcggagggaggctacgctcagatttgtcccggagtgcggcgtgagcctgagccagatgctgatgggaaattttgcagatgctgatcatcatcgccagccagtagctctctattctgaaaaacttggagcagtagtcttaaaagatcgcccgatccagttgaacacagcgacaacatgcaggcacgggaggccagaaagctgccacctccggcagttattgaaggcatcaacaatgtttgaggagaaatggtcgtatcgacagcctctgaaaatggcgtcggaccaatgctcgggcttgcttgctatgatccactcaacagcttcagtggatatgttcctaatgctctcgattgacacgttaaaatcctcgatactacatgcttga

SEQ ID NO: 4018 - DNA, 1017 bp, Zea mays
  Peptide Sequence Number=SeqID_47393
atggagatgaggctctgcggcctgcgcgacctcctggacaaaacggaggcctcaacgcgcgtggaggtcgagcggacgcatacgcagctcgtggacgcgtacagggagctgggtgcgcggaccgctcccttcgaagcgcccggtcaggaggtcgaggacccggtgctgaagcggtcggctggggcgcttttcaataggatgtggggccctcacggccgagagactgtccgggagaggtccgaccgggcgatggatcagatggcgcatgatgaagaggtcgaggacctcggtggtttggacagtacactgcccgaggcatcgggggtggagctggcgccgccatccgatgctggcgagggccccttagcgactcccgcgccgactggagctggcgaagaccccgtaccggccactacgccgacgggtgaggacgcttcgaaggtgatgtgcgaactagctgctgaagacccagcggcgtcggccgagccttcgcaggttccgacgtttgggcctgcgcaagcaaccgctgctggcaatactatttttgtggcggcctcaaccgttgtgcctacagatgataatttatctggctctggatctgagtgttttgagtctggtggtgagtctgagagttcgttttcctggatggaggagtcctcggatgaaggcttggattattttgctgcgttagatgtggccgcagcggagtcttcgccgcgtgtggaggttggcgaggcggctgatcttcctagtgtgagtactaagtacaggcggcgaagggtggtgtcgaaacatagtgtgggtgaggtttcgcgaagtggtaggcgccgtcgtatggggatggagcgcggtcgtcttcgactagaccggattggcaaacgagaattgttgtcttcgccgattggggcgagcataggtgagggggatctgcgaaatctttttgagggtgaggaattgaggataatgttgttcaattatagggagatgggtattatcccgaaggttgagccaatgtag

SEQ ID NO: 4019 - DNA, 201 bp, Zea mays
  Peptide Sequence Number=SeqID_47394
atgaggcagagaagatggctagagctgatcaaggactatgacctggaggccggattcctcgccgccgacaagctcaccccccctgcgagcgtggaccgacctactccgaccaccaccgccgacgacccgcacctcaacatgatcgccagagacccccggacctcgcccgacccttcaccggagcaacctcgccgccgataa

SEQ ID NO: 4020 - DNA, 849 bp, Zea mays
  Peptide Sequence Number=SeqID_47395
atggtgaaggggtttacccagtccacgtgcgccggcgagttcttgaactccggtgagcgcgatttggcttctccggtgacgcgggccctcggttcaagcttgagcaaggctcacggtctcaccaggaagctatctgggggcttgaatcgaacggagggggactggagaggggttggccacggcggtggctcttggtcggcactggcgggctgcagggaggtcgccggaggcaacggctggctcgggcgagtccggcgaggtacggaggggataacggggaaggcaaccgagcgctggggcgggttttataggcgcggacgcggccggggcgccggctcaaccgtttggcgcgacgcgggcacgcggggcgcgcgcgcgggcgtgctctggcgagctcagagcgcgtcgaacacgtggcgcgttgcttctgcccgtgttcttcgctctgctgagcggccaagcgtacgaatctcgccctaccgcctatgggagatctcttccctgcacctagggctacctagttcatgccggattcctcgccgccgactagctcacccgcctgcgcacgtggaccgacctactccgaccaccaccgccgacgatctgcacctcgacgtgattgccagagacccctggacctcgcctgacccttcaccggagcaacctcaccaccggcatgcatcttattcattgaattccttagattgcaacctcgctgacggagagtacgtgctcatccctgagcaaggagctgtccatgaggaagatcaggagcaagctcccgagcctgctattgaggatctccccacagccccagcaattgaagacaagccccgattttatgcataa

SEQ ID NO: 4021 - DNA, 282 bp, Zea mays
  Peptide Sequence Number=SeqID_47396
atggagggcagcaccaaagcaaggtcggatggctctaccatagcaagaccaacagaggagggcacgatagaagcagcagaggaaggcacaacagaggcagcagaggaaggcacgacagaggagggtaccacagagccaacagaggaaggcacgacaaaggagggtaccacagagccaacagaggaaggcacgacaaaggagggtaccacagagccaacagaggaaggcacgacagatgcggtccaccttgcacccttcaccaaatttgcttctagcccatag

SEQ ID NO: 4022 - DNA, 651 bp, Zea mays
  Peptide Sequence Number=SeqID_47397
atgagggtgaccggggtgagtggcataaaaaagatcccattcccatggcttccgatgaagattattttatgtcttgtttggctcagaattttaaatttttttccttacggaagatacattggcgttgttgtaatagctgttgtggataaggaccaccaggagtccacacaaaaaaagcagaaggcgctgctacggcttgtggacccacgacgtgaggcgaagatgttgcgccctagcgcgaagggttccgctgcggttgcgacaatgcttccgcctacggagctggcggcatctgccaggaaggtgccctcgcctgcgaaggctagtgaagttgagggagcaaagggtactaagattggtggagccggcgacgtaagccgggaactgtctgtggatgattacttgatcgaaggtgtgagcatgttcgatgctcacaccagactagcggctggtgacgagggcagagggatcgccaatgcatctgcggctggtggcgtagcggcaactgttgcacggcagctgcgatatgctgctgccttccctgatcaagtggcgtctggggcgctggtggacgtagcgaccttacagttgcgctccgagagaaagcggtcggaggacaagattgagcgtctcttgacgcaaaacacatag

SEQ ID NO: 4023 - DNA, 904 bp, Zea mays
  Peptide Sequence Number=SeqID_47398
atgcccagggagagcctacgtcctccccgcctcgctcatgatcagccgagttggccgccgttctcatgggccctctcgtcggtgccctcacgggccctctcgccggcgctgcatgcgagtaagccgtgtgcggctccatcaaagggcttcaccgaggggtttcttacaacggacgacggcgtccacgcgcgacggctcgtcatgccatttgcggtcgtgaacaggaaccaggttggaatatttatccctactactattaagacaccagtgtgggcgctggcgcggccaatgcccccgcctcgtctccacctaggcacctacgcgcagcctgccgactgccatgtggacccgcctcggcaacacatattcctactgccaactggacccacctcggctatccctcagcgcacatgcccgaccagccatgccaggcttgccagcgcagccgctcgactagccaggccccggcaaagccttcccggcttcccctacatgcaccagcgaccaatcctttggaagccacggcaatggcgcccagatctgctttgccttcccctacgcgctgcacccacaaatttggcaggcacagcaattccgcccaggaccccgtatcgccttcccctacgcgctgcacccacaaatttggaagcttggtcaatggcgcccagccccagcatcgcgttcccctacgtgctgcaggctccagcattaccttctcctatgcgctgcacccacaaatttggaaagcccaatcttcgtcgccgattttggaaagcacgatctcggtcaagcaatcacaacaactataccccaaatttcgcgctcaccctcattaaaaaggtcgccattccatcctgcgcccaccatcgaccattgactccatcctgcgcccaccaacgtctag

SEQ ID NO: 4024 - DNA, 1146 bp, Zea mays
  Peptide Sequence Number=SeqID_47399
atgaggtcagacacggagcacggacgtgtcctcagtcgctgttgtcatgtgtcagtggatgcagtcgtcgctatcgcccacaagaaacctcgcttcgtggaaagattagtatttaacatttggatgaggaagtcaaggacaccgacctcaagcgctctaccaggaagtccgaggaggccgtcctcgccgacctcgcttggctcggcctcgaatgggaggaagacctgttggtggaagggtgtttttcacaaatatgaagatagccttctcagcactgagcttgattatcttcctaacaacacacacgaattgtccaactgtgctcataaaagaacacctgtgatgcctagaaggaaccctccaccacctccaagagagcaatctaatagtttttttaccgcatggaagctcaaaggcaggagatgcaccgttagaggtctctctgacacggagatacaaaattcttggaaaagtagagcagaacaacctcaacccgagccaaaatgtgagaaagacccatttaacagctttgttgcagattttgacactcacaatctcaacattgccgttggtaaggcatccgaacttgaacttgaagtctccaatctaaaggagcagttgaagaaaatcacattagaaaaggctgagatgacaaccaagcatgaaaagttatctgcaatctgccgatcacagcgtcaggagatccaagagctgaagctcactcttgttgagccaacgcctccctcaaacaaagtcagctcaaggacacaagattctggatctcagcgaaaggaaaagatccaaggcactgtgtgggagcttgaacaagggatgcttgctattgctagcaactcctcatcagccagttctgatgccaaaacatggcaggctttccctgacacaaagactcaggcccgaccaaaggtcgatcatgcaactaatgggagccaaaacataaccaagaacacaacgtcaggtgcttcccccgatgcgtggggttttggtactgataatttcagaacaccagcaacaacattaagagctaccacacagatcaacagggcagctgcccaacggagctcatcccaaagatttaacgctggtgtggccaaggtagagcagccatctggatgggctggtttttaa

SEQ ID NO: 4025 - DNA, 393 bp, Zea mays
  Peptide Sequence Number=SeqID_47400
atggagggagaaactgtgatttgtaggctatgccacaaggaaggccgcaagtctttccaatgcaaggcgatgaccgaggataaacaaaggcaaaagctcaagcaaaagccatcaagcaacgtctccaacacctacatcaaaaaggtggacaaaaaggctgctacaccatatttgatcaagaagaaaaagaatgtaaatgtgatagcaatcaaggccaacaagcaagccaacaaaggaaagggggccaaacgcatctgggtgccaaaggaaataatttcaaccatgaaaagtgtggcggaaccgcccaaattattccaacttaagtgcctaagtcccaccttaacagctatactacacttaaataggaataaaacgtcagtcccttggatctag

SEQ ID NO: 4026 - DNA, 417 bp, Zea mays
  Peptide Sequence Number=SeqID_47401
atggcatcgatgtggggggcgctacgcaggtcgacgtctcgggcgtcgaaggttagcgtcttcttgcttttggggcgtgagggtggaggatgttttgttgtcgctggtgtggaggtgggggtgggggagggttgtcggctggctgcgcccgtgccatcctatctttggtggccttcgtctctgggcagtctctggtttggtgggcgcagtcttcgccgtgaaaaagacagtagaatcagcgcggcggctgcgtacatccccgacccctaccgcgagttccatttccgcggccctaggggggatattcctgacggcgaggggcgtcaccagtggggtgctggttggcgatgttgtgcacctgttgctaattgcggccgtctcgaccggagtctggctgcggagttctcgtccacgtga

SEQ ID NO: 4027 - DNA, 339 bp, Zea mays
  Peptide Sequence Number=SeqID_47402
atggagacggtaatcaccgacggcggcaccctctgctcgtactggctatggtggcggcaacgtgggggcacgactggtctgctctacttggtaaattggcttcatggcgatattaggcagcgcaacattgaggatcccgcaaatcctttcttggttggacaagtctgggtttgtggccttgtacagaagggcaatgatgtcgtctatgttaatgatgatggtatagaacaacggtataatttacctcaagtcaagaaaattggagacactctagactttgaaattaagaggtggtctgctaggaaagagggcaacttgtgtgctttgttatcaacttag

SEQ ID NO: 4028 - DNA, 429 bp, Zea mays
  Peptide Sequence Number=SeqID_47403
atggacacctgcctagatcttacttacagcagagctgttagcacgacattggccgtagaagccaaaaacacaggccatggaaaatcaaagggatttggaggtgacaggtctactcagggacctgagaagcgaaccaggggacaaatatttactaaggaagtagtcttccatgtgccaataacattggctgaactgaaatttcccaccaacatgagtgtcttaaagggccaagacatagatgtaattctgggcatgaattggttagcccagcataaagctatcctcaacactgacttaaggactatcaagttgagccatggccatgaagaggttctcttatccatccctgtagttgtcccagccaaaccatttggacgggtttatgaagctatcatacccagaaatctaggatattccggttgtatgtga

SEQ ID NO: 4029 - DNA, 1161 bp, Zea mays
  Peptide Sequence Number=SeqID_47404
atgcaggcggcatgcaaccgcgccaagtgggcgcacttctccgactcccaacacgcccagcatggaggcccaggcccacgtgttatgcaaccggcgcgccgaatgcttcgtgcatgcaactgcaccgccacttgcgccaccaccgcgcctcctcgatcgcggaaccaataccgcgactcgaggcgacccagcgcacgacctagcagcgccagcctggcgcggcgcgagagaaccctctctcacggcgtgaaggcaacgcgcccgtgttccgttcctcgaacggctcgcgcacgcgcaacggccgtcccgccaaccacacgccccgtcgcattaactccgcggcgggacaggcggcgcctctggcaggagaagcaggcgacgcttcgccttcgccgtaacaaccgcgccaaaaaaggccccccggaagggttcgacagccgcctcagatctcgtgggccctacacccactactggtcagaggttcgaaggtcggcccctcggaagggttccacggccgcctcaggctactcgggctccgcgcccattactgatcaggggttcgaaggctgttccccgaaggggctcggactcgggctcagccccagaagacgacgaactccgctccgcccgacccagggctcggactcgggctcagccccagaagacgacgaactccgccccgcccgacccagggctcggactcgggctcagtcccggaagacggcgaactccgctccgcccgacctagggctcggactcgggctcagccctagaagacgacaaactccgctccgcccgacccagggctcggactcgggctcagccccagaagacgacgaactccgcttcgcccaaccccagggctcggactccgccctggcctcagcctacggcctccgcctcgcccgacctaggggctcagactcgacctcggccatggaagacagactcgacctcggcttcggaggagcttccacatcgcccaacctagggcgcagaccagccacgtcaacaggaggcgccatcatcgccctaccccgagctgactcgggtcgcaagaaacaagaccggctccatcgctcctccgacggccacgacatcacaccagctgggtgccaaaatctctccggctgccacaacggcatgtacttagggcgctag

SEQ ID NO: 4030 - DNA, 744 bp, Zea mays
  Peptide Sequence Number=SeqID_47405
atgtcttcgcgctcccttatgcatcgtgtctttccaccttccaagcccccggatgggggatacccgccgtctttccgcctcatcgttggaggaacgcaactccgcgggagttggtacctttcagccatcgtttggcttcaaggattttcatcatgcagcccggctgcacccctccgctggtggtcacccaagacggtgacctccagctcctggatgtggagaggcaagccgggctgtgatctcgatcccgccctcagcgtcgagggtgttcgtcatcctcgctggggcggggagcgaggcgagccggggctctacctcctgcgcgggtcggcgggccacctcttcttccagcttctggtggtggcaaacgccctccagctctgcggcggagacgtcctccagccatgccggggaagctggttcgcgtcccttgagcgggaacgcgaacgagagccctccggcggccgcgtccacctgggaccatggctgctgctgcaggggtcgctggcgggtcccccggagtccctcagctcagtcggccttgttgtccgaggctcctctagcttagttaaagggaccccttggccgctcttggatgagccgaggccagggagcggagatccttggaccgcgtcgccgtccgaggctaggtcggacctcgccgaaggtgtcgtcgatgtcgagggtgctgctgcccccttccagcgtcaagacccgagcctgcaggatcagattgtcttgtag

SEQ ID NO: 4031 - DNA, 99 bp, Zea mays
  Peptide Sequence Number=SeqID_47406
atggcaagagaaattattcagagaagtgaaaggggcatccatgatgctagagaagtggctaaggctgctaaaaagagcacagagcccgaaggcttttaa

SEQ ID NO: 4032 - DNA, 1083 bp, Zea mays
  Peptide Sequence Number=SeqID_47407
atgagctccgacgggcgcctccgccgcgcgctggccgcgttcggcggcgacgtgtgggacctcgtggacgcggcgctcgccgccgccgcgcgggacagccccggcgacctgcgcgcgcgccgcgacggcatcgtccagcgcctctacgcaggggcagcccgctgccgcaactgcgacgccgacgcaaccccggcgcctgctcagccgaggaaggcgaatgacgccgtcgctgctgctgcttctcctgcggcggcggcgtcggcgtttccggcctcgcctgaacaggaggtcgacgcggacggcctcgacgacgtcgacgacgcggccgacgctggcatggagagcaagattctggcgatcagggatttcctggaggacccggaccagtctgaggacgacatagtgagcctactgcagaacctagcagacatggatatcacttacaaggctctccaggacacggacatcggccgccatgtgaatggcctgcgtaagcacccatccagcgaggtccggcaactggtgaagctgctcgttaggaaatggaaggaaatagtggatgattgggtgaggctgcacaactcatgtggtgatggtagtggctccatcataagtatgctccaaagcttttcgaattacttcgtgtttggtgatagttttgataccttttcattcatggtggcttcagacttcaagtatccccccagcccacagaggcataatgttttgagctcagagagatctagcaaccacaatttggtggagtcaacaatggagaagcgtagaacgagccctgctcctgcatacaataacaccaagcagaacaacagcaacaactattccagtatttcatcgtcagcaccagctagagcaatacgggagcaaaagaacactcttttggattctgagaagctagactcagctaggaagaggcttcaggaaaactaccaggaagcgcaaaacgcgaaaaagcagaggacgatacaagtgatggatatccacgacataccgaagccgaagaacaggaacaccttcgtgcgcaagagcggcagcagcgccggattcccggcaaagcaccggtga

SEQ ID NO: 4033 - DNA, 669 bp, Zea mays
  Peptide Sequence Number=SeqID_47408
atgcaggcggcatgcaaccacaccaagggggcgcaccatttcgactccgacacatccagcgtggaggcccaggcccacacgtcatgtaaccggcgcgccggttactacatgcagggaactgcaccgccacttgcgccagtaccgcgccttctcgactgcggaaccggtgccgtgactcgaggcgaccctgcgcatggcccaacagtgccaaccgagcacatcggtcacggggaccgggaaaggggatactccgaaagggatccttctccgcttaggaagcgggccccgagccccctactgatcagaggttcgaaggctggcccctcggaagggtttgatagccgcctcagagcactcaggctccgagccctcctactgatcagaggttcgaaggctggcccctcggaagggttcgacagccgcctcagagcactcgggctccgcgcccaccactggtcagaggttcgaaggctggcccctcggatgggttcgacagccgcctcgggccactcgggctccgcgcccactactgatcaggggttcgtaggctggcccccgaagggttcgacagccgcctcagagcacacagagcgagggatgactctgggtacgtccgatacatggccaaggctcgggctacgctcccgaggtaccttaggacatttctga

SEQ ID NO: 4034 - DNA, 279 bp, Zea mays
  Peptide Sequence Number=SeqID_47409
atgtccctgcgccgccgcgcgcctctctgtcagcgtgcctccctgtcccccgcattagattcggcctggtgtgattgcaacttatgtgaagaggttgagccgttcgcggagaagccgttcacggagaaagaggggcgggggcggggaagtgaaaaggttctgtcgggagcgtgcgggagggacgaaaacggtctgggtggggcggttggctcggacctggcgcgtagattcggcctgggtgcattctctatattgaatgcacccaggtgtaatatataa

SEQ ID NO: 4035 - DNA, 402 bp, Zea mays
  Peptide Sequence Number=SeqID_47410
atggtgctggcggtcgtggtgctgctgggcgccgtggccgtccttgtggtggtgctgctgctgcagcccccgcgtgccgtacgtggcggtgcgggcgggctggcggtgctccgcgcctacctgttccgcgtgcccgccaggggcgtcctcccgctggcgtacgtggcgcgcgcgcagggcgccccgctaggcgacgccggcagcgccgccatggaggccgcgcttcgcgacggcgtggtgctgttccgggtggatggagaggcccatacgcgatggaaggtcgcggggatcgtcggcgtcgaccagtggacgcgcctggcgtgccagctccgcttcttctggcccaacagcaccgtgctccccttcagatgcatctccaagtccaagttcttgttcttctga

SEQ ID NO: 4036 - DNA, 441 bp, Zea mays
  Peptide Sequence Number=SeqID_47411
atggacatcacaagtaagatggacattgcaaaagtgagactcgggtgcgtagctcggagacaactgatcaagccaaggacgaaggcaagaaaagcttcgaggtaccaagtgcacgggagagggtcaaggaggctgaggaacccaaagccaagggtgaagaagaaggcttgcaaagtcaaggagaagcccaaggcagctcagtctggcacaccggactgtccggtggtgcaccggacagtgtccggtggtgcaccggacagtgtccggtgtgccaggctgaactctggcgaactagccgctctcgggaattcaccggcgacgtacggctataattcaccggactgtccggtgtgcaccggactgtccggtgagccaacggtcggccgggccaacggtcggccgcgcaatatgcgcgggacacgtggccgagccaacggctag

SEQ ID NO: 4037 - DNA, 453 bp, Zea mays
  Peptide Sequence Number=SeqID_47412
atgaggctgaagctgagccttagacaacttcttcagggagaggaagaacaccacatcatcggcgtaaagcgagatccggtgatggatggaattggaagaaatgggctgcaacaacccatgctcctcagccttgaccataagcgcattgaggacatccataagaagaataaaaagcagcggagacaaggggtcgccttgccgcaaaccccttttatgagaaatgaagctcccaggcaccccattgagaagatctgggtggaagaggtcataagaataccactaatcacatccctccacacgggaccaaagcccaatgtctccaatacttcaagaaggaaaggccaagagatcgagtcgaagaccttggaaatgtcctcaatgtggcacctcaacctattagaaagaaccttagtaaccaacttggtcctcaaggccaagagaattctaggctga

SEQ ID NO: 4038 - DNA, 684 bp, Zea mays
  Peptide Sequence Number=SeqID_47413
atggccgaggctcgggctacgctcccgaggtacccaaggacatttccgagaccgacgggaacgatttgtaatggaatcccaccggagggaggcatcgagccctcggaccctgtcgaaggggtctgggtccggcaaatcacccgcagaggctcgggggctgctctcgcacccgggctacggccaaaactattaacagcgtcaacaaaccagcttgataacttggaacccgaccacgcacctgggctacggccgggccgcatgagggaacgatcagaccggccgaagcaccacgaaaagcattcagacctcagaggagtcaaaccactcctccgaggcctcgggggctacacctggcgggaaaacagcgccgctcgctccgctccgactgccgtgtcagccaccccggcgacgactgacaacaagtcacgatcgaccaccgagttcagcctcgggcgcaacaggaagctccgcctcgcccgacctcatgctccggcctcgggaggaggtttccgcctcgcccgatctcaggctccagcctcgggaggaggtctccgcctcgcccgacccccggaccccggcctcaaccccggtctcgggaggaatcgcgtcctagcccgaccccggcctcggcctcaagagaagtctcctcctcgaccgaccctgggctcggaccgaccgtgctaa

SEQ ID NO: 4039 - DNA, 306 bp, Zea mays
  Peptide Sequence Number=SeqID_47414
atgtcatgtaaccggcgcaccggttacgacgtgcgagaagttacaccgccactcgcgccaatgctgcgcctcctcgactgcggaaccagtaccgcgactcgaggtagccctgtgcatgacccaacagtgccagttaaaggtgacggccacggggactgggaaaggggacgttgtggaaaggatccttctcggcgaaggaagcgggccccgagccctcctaatgatcaggggttcgaaggctggaccctcgaaagggtttcgacagccgccctagagcactcggacttcaagcccattactgattag

SEQ ID NO: 4040 - DNA, 594 bp, Zea mays
  Peptide Sequence Number=SeqID_47415
atgcattgcgcccttccaccttttgagcccccggatggggtgcaccagcgtcgccttgctcttgctgtcgttggaggagcgcgacctcgtggagatcggcacctttcagccatcgctcggcttcaaggatttttgtcatgcagcccggctgcattccctcaccaatgggtagtttggtggggagaagcaagccgggctgcggcctccgccccgccctcagcttcaaggatcttcgtcatccgggctgaggcggaggagcacaccgagtggggggttgcctccgcgtgggccgggtgcagctttccgtccttcgtccgggcggcggtcgtgtcgcgcacgggccgaccacgtccaggtcttcctcgcaccgtcagccacgccggagggttgcccagcacgtcgtacgccgcgagggcggtgctcgtgttctggggaggcctcggcgaggacgggagcgaggacctgccgatgcgctttggggcgtccgccattcgttggcgtggcgccggcgcgcaggtggccgctctcgttggtgctgaggtggtggcagccggagaaggtttctccgctgacgagaccatcggcaccagctga

SEQ ID NO: 4041 - DNA, 162 bp, Zea mays
  Peptide Sequence Number=SeqID_47416
atgaggctagccttcatcttttataagctaggagaagggttggacaacggtggattctttgagaatgatccacaaggcaagggtaaaaccagcgttttaccccaggtcataagtgggaagcggaccgacgccacgctgtggcttagtgctaggcgtggttaa

SEQ ID NO: 4042 - DNA, 409 bp, Zea mays
  Peptide Sequence Number=SeqID_47417
ctcggagacaactgatcaagccaaggacgaaggcaagaaaagcttcgaggtaccaagtgcacgggagagggtcaaggaggctgaggaacccaaagccaagggtgaagaagaaggcttgcaaagtcaagggatgttggagccaagtgatgagaagccaaggcagctcagtctagcacaccggactgtccgggtggtgcaccggacagtgtccggtggtgcaccagacagtgtccggtgcgccaggctgaactctggcgaactagccgctctcgggaattcaccggcgacgtacgactataattcaccggactgtccggtgtgcaccggactgtccggtgagccaacggtcggccgggccaacggtcggccgcgcgatctgcgcgggacacgtggccgagccaacggctag

SEQ ID NO: 4043 - DNA, 405 bp, Zea mays
  Peptide Sequence Number=SeqID_47418
atgggcaagaacaacaagcgcaagcgtgagccgactcctccatcggaggagtttggtgattcagagtactcggaggaggagttctcctccgagcccgaggggtctccggctcccgtctctcccccggcgtcgtccgatgactcggacgactcccaggggatagccgcggaggtctggacatacatccgggccgtcgagcgcgccgggctcgaaggctcggatgagtcggaaggcggcggcgacggcagggacagcaccaagggcagcagcaggggcagcaccaaagggcagcagcggcggcagcggggacggcaccaggggcagcagcaggggcagcaccaagggcggcggcggcggcaggggcagggccagtggctaggtgccactggtcttcttagatattag

SEQ ID NO: 4044 - DNA, 1812 bp, Zea mays
  Peptide Sequence Number=SeqID_47419
atggagaagtgcaaaccaatcaagacccccatgcctacaaatggacatctcgacttagatgagggagtgaccgtgtgtaatcgtgtgccgtctcccgtcctgcctggatcgtcacctctcgtgatgccgcgcacgaagaatgcgtcggcatcagggggtggcgacgacgaggaccctcgtcgccccttcaggcaggtgaagggcaagactgtctttttggagcagcaggaaggccgcaagaagcggcgttcggacagagaggctcgtgcagcagcagcagctgcagcagccgctgcacaggcagcacttggagatcagccggatgttccatcagatcagattgctttccgtgctcgtcgtctcgcctcccggtctcgctcctccactcacacctccgcttccactccgccacccactctgcctgctccagtcactcctattgctccatccacctccaccgccatacccactaccagcactacgccagcttccactgcttcccctgcccccgctcccgcttcagctcctcctgtccctccacctcgcttccgggagcgtgatgagactgaggttcgtcctctggtttcggatcctcgtctgtttgatcttcagcgtgctactgcagcccgggtacgtcggttcaggtacgtacccgtggagtcatggctaccagctcagagagacccagcagcaggtgttcttttcagcacacggattcaggagtcattcttcagggctcagatgtctgctcagattgcgctgcgagtgcaccgcctattggatcttccagcctttttactagcagccggtgctgagtctgaggcgcatctcacctatctgcctggcctcctgactcttctgactatcagcggcagatatgttgaggagtgggtccgcgtcttctacgcctctgtttggattgacccggatcatcattggatgaggttccgctttgagcgcgaggatgtcacgatcactgccagtcagatccatcagctatttggattccctgagtcgacgactcgccttcacagcctctgctacggcacttcagatcctcctcgtcgccctcacggcggtgttgctccagggacagctcacgtcgcggctctgttccgcccgcctttcacagatgggtcgcgacgttctccagctgacttcactacagcagcgaagtacttatatgagctcatcagacggacactcctgccaaggatgggatacagggaggctaccactcatattcagctttggctccttggtgccctggtatcccactcacagtttgatgttgtggacttcctgatctgtgagatcgaggacactgttctggatgggattcgtgctcgtcggcagctaccttatgctcactacttgtgccacatctttgcgcagctgattcagccccctcgttttcagagcacccttgaggcctcacgccttgtttttggatcttaccgtcctgctcctgagattccagtgcccgcttatgctcctgtgtttgacactcaggccgaggacgcagcacttcgacagtttgacacccagggtacagcagctgatgatgatgatgatgatgattttgggattcctcctccgcctccgcctcctatgcctccacgctcacatgatcatgaggctgggagctctagtgctgcccctgctactcctcaggctatggaccctgctcttgcttcgattctccagactctcactcagcagcaggctcacctggcagccgagcaggcccgtttatccgataggatgctctcaatgtttcagaacatgcaggacaggcaggatgcactttag

SEQ ID NO: 4045 - DNA, 2121 bp, Zea mays
  Peptide Sequence Number=SeqID_47420
atgtcgtcgagcacgatccggaaggccctgggcgcggtgaaggaccagaccagcatcagcctcgccaaggtcactagcaacatcgcgcccgatctggacgtgctcatcgtcaaggccaccagccacgacgacgagccggccgaggagcgccacatccgcgagatcctccaccttacgtccggatcccgcgcccacgttgctgctgccgtggcagggtgctcccgcaggctctcccgcacccgcgactatgtggtcgcgctcaagtcgctcatgctcgtgcaccgcctccttgtcgatggcgacccgtccttccaccgcgagctcctacatggcacacggcggggcacccgcctgctgaacctctctgattttcgggacgaggcgcactctggatcgtgggatcactctgcctttgtgcgcacctatgcgctctaccttgaccagcgcctcgagttcttcctccatgagcgcaagcaggggttaaatgctggcagcagcagcagtgctaatggcccatcaccacgggaccgtgatcgctggggttcgcctgatccctatggccgccgctctccctcctactcgtcaccccctgggtatggaggatatgatgattaccgcgagaggaatggtgggaacaatgatgacaagaggccaccgaccccggtgagggatatgaagcctgagcgtgtccttgctcgtatgcaccacctacagcagctgcttgacaggttccttgcttgccgccccactggtggtgcaaagcaaagcaggatggtgctggttgcgctgtatcagattgtgagagagagcttccagctctactctgatatctgcgaggtgctggcggtgctgctggacaggttctttgacatggagtatgcggaatgcgtgaaggcttttgaggcatatgctagtgctgcaaagcagattgatgagctctctgcattctattcatggtgtaaagatactggagttgcaaggtcatctgagtacccagaggtgcagcgtgtcactgataagttgctggagacgctagaagagttcatgagggaccgggcaaagaggcctaagagcccaccacgggagcctgaacctgagcctgttaaggaagaacctgagccggatatgaacagcatcaaagcgcttccagcaccagaagattataaggagcctgaacctgtgaaggtggaggaagaggtgaagccggagccacccccacagccacagggtgacttggtggatctcagagaagatactgttagtgcagatgagcaaggtaataggcttgctctagcactcttccagggaccgcccgctgctggtggaaacaatggttcatgggaggctttcccttcaaatggtggcaacgaggtgacttcggcatggcagaatcctgcagctgaacctgggaaggctgattgggagcttgccctcgtagagacagcaagcaacttgtccatgcagaagccagcaatgtcaggtggtatggacccgctgctgctgaatggtatgtatgaccagggtgttgtgcgtcagcacgttagtgcacaggtgaccaccgggagtgccagcagcgtcgccctgcctgctcctggacagaagactcagatgcttgctctgcccgcaccggatggttcaatgcagactgttggtggtgacccctttgcagcgtcccttgccgtcccaccaccatcctatgtgcagatggcagatttggagaagaagcaacagctcttgtcgcaggagcagattatgtggcaacagtaccagagggacggcatgcaagggcaatcgagcctgaacaagctcgaccaggcttaccacaatggtttcgcgcccaacccgggcatgccctatgggatgcccgcggcgtacaacactggtgaccttgattacccgtgtgccgtctcccgtcctgcctggatcatcacctctcgtgtgagctttccaggatgccgcgcacgaaaaatgtgtcggcgccagggggaggcgatggtgaggatcctcgtcgccccttcaggcaggtcaagggcaagactgtttacttggagcagcaggaaggccgcaagaagcggcgtacggacagagcagcccgtgcagcggcagctgatagtcgcctag

SEQ ID NO: 4046 - DNA, 561 bp, Zea mays
  Peptide Sequence Number=SeqID_47421
atgggcgggggcctcttggcagcagcacccgccctgaggtcagtgctgccgctgttcggccccccggagcagaagtcgtcgtcgtcgccgctgctggagcgggcgacggcgcgccgttcgtcggtcttctgttgctccgcagccccccatcgagtggggttgttcgtacctgcggagtatctggacttttttgtcggtaacagggatgtttgtgcgagcgagagttgcttctcgcggaaggtgatgtgtgaggtatccgtatcccggaggcgtaggagtccctcggctcggtcgaccttgccgcttacgcgcactcttacccgtccatggggctctgtcaccgactcagtcgagaaggctcgaaggatcgcttcggcagaagagcttccgaacgtgaagacttgttcggtccacggaatcacttatccgaacgtgagttacttatcgcagaaggtgatgagtgaggtatccgtatccccgaggcgtagtagtccctcggctcggtcagccttggctgtttacgtgtactctgtcgttttcaggatccacttttcgaagtag

SEQ ID NO: 4047 - DNA, 366 bp, Zea mays
  Peptide Sequence Number=SeqID_47422
atggcgcctcctgttgatgtggctggtctgcgccctaggttgggcaatgtggaagctcctccgaagccgaggtcgagtctgtcttccgtggccgaggtcgagtccgagcccctgggtcgggcgaggcggagttcgtcgtcttctagggctgagcccaagtccgagccctgggtcgggcggagcggagttcgccgtcttccgggacttagcccgagtccgagccctgggtcgggcggagcggagttcgccgtcttccggggctgcgcccgagtccgagccctgggtcgggcgctttatgctgatgggggttaccagctgagaattaggagccttgagggtacccctaattatggtcccctacagtag

SEQ ID NO: 4048 - DNA, 204 bp, Zea mays
  Peptide Sequence Number=SeqID_47423
atgggggagttgaagtacttcttgggatttcaagttgttgggggccttcgtcctccgaagaattatggatatggagcacgaccaggacgaaggctgagccagacgaaggtcgggggcagccgaagctgtacgcagggaagcttcggcgcgatggcacaagggggaaccgaccttaagatgaaaagacttcggggtcctcaatag

SEQ ID NO: 4049 - DNA, 357 bp, Zea mays
  Peptide Sequence Number=SeqID_47424
atggagcctccctcgatgaattggcctccccctcaacagcagcctcaactcctccagtctcagcatgagctagatcgagtggaccccaagtggtggaagaagtggggtcagatcataagaagttttgttcagaaaagcccgaacaaagatgcgattggacacacaacaagcagtgttgatcgcttcggcccaaaaacgcctaggagtcctatgctcatcaagaatcgtcctggccatctcaacaagggttcgattcttgcattcattaatgccattctgctagggcacatacggagaggaaaactgatgcttgagtcccaaagaagcacagaatgttgcaaatggagtattttttaa

SEQ ID NO: 4050 - DNA, 2646 bp, Zea mays
  Peptide Sequence Number=SeqID_47425
atgccctttcacggaggaagggaggtgcgaaatcctgcctttgcactgaatctgcgaaaccgtgacccggccgcctttgtgcgcgatgcggaggacggggcggtgcggctcgtggggcgttacgtgccgaggacggaaggccagcgcaactttgatatccgcgggtcaaatgaccgtttgaacagggtcttcgaattaaatcaattgccgtacgacggctatcctggtcaagacgaagcggaccgccgtgggaagaaaacggcggtggagactggagacgaccctgcgccggcggccgccccttcctcaaaaaagagaaatttaggtactgcgatgggaggacttggggtgtctgatagttttgctagagagttaatgaggacgtgtgcggccccgggggaaaggatgtcttcgcccgagctccgggagtcttcggctcggatgctgagggttaccgggggttgctggcctaggaatgttcctatcccctgcgcggctggcgatgactgttttacatctcgtatggttcgtcagtggagagtttttccttacgggcggaatatcggtgctgttgtgtgggcagtgatggacaaggatcgccaaggtgcggcgcaaaaacgccaggcggctgtcaggctgcatgaagttaggccgaagaggcagcggggggctgcaaaggatgcggcctccgacggaggcaagccgccgctggcggcgaaggcgggcgcctctgcacctagcaaggcgccagaggcagcggcgggcgccggaggctccaagtcaacgaaggtggtgccgccggccagcggagtggcggaggcttcgaaggcggcccgagcattgccgttgtcgggcaagcgcgttgccgacttcggcaccgatattactgtagacgactatcttggtgggtcggacgagggccagcttgctatggttgcgcctggcgcggagatcgcgacggcggccatagtgccgaaggcgaggggcgaggcccttgacgccggaggcgaggtgtcggccctcgcggtggtcagggacgaggcgggcgcagcgacccgccggctgaaaggagtgacggaggcgctgagtcaggcgacggaggcgctgagtcaggtggctgacttcgccagccgtactgcgtcgggggccctcacggcagctgtgtctgccgaagtcgagagacttcggacacaacatgctgacgctgtccgtgagaaatcggcctccgacagcaagtgtcgtaagctgacggacagggtggccgccctggagagggagaaggctgacctccggcgccaactggcggcggagaggagggaggcaaacgaggccatcgccaaggagcaggctgcgcaggcggaggccaaactggcgcgggcggagggcaatcttgccaaggagctcgccgaacatctgcaagagcggcttaccgccctggagagccgcgcgaaggggaccgaggccgcgatgcgtgcggaggctgaacggacgcgcgctcagcttatggatacatatcgcgagctgggcgcgcggaccggcgacttcgaggtgccggaccgagagcccgggcttcgttgtctgcaatgggtgcaggaggagctgcaggaactccccactgttgtgggggggtttatgtcgtacgcctccctggtcacctgcgagggggcgatgaacgcactctcccgcgaagggtgccggcacttcgaggtcttcgaccaggcagatgaagattttgagcgagatgtctataaggtcgaagaccccgttgtgaaggaatctgtcggggccctctacgaccggatgtggggtccgcatggtcgtgaggtggtcagggagcgggccgagactgcaagggctcaggcggcgcgcggcgagcgggtggacgacttcagggctctgaacagcgcgctgccagacccagagccgacccttgcggaggctgtgactggggtcgccctggagccaaccccggagaccgcagcgatcgcgacggctgcccccacatccgctgcggccggcgaagacctgcccccgaaggtggccgaaggcgcccctgatgcccccgcagctgctgtgccgagtgctgaagatcccgcggcggtggcggcggaaacaacggcggaggcagcggcggagccaacggcggaggctcccgcagcgtcagggccttcgcaggttcaagattttgggcctgcgcacgcaaccgctactactgagtttttggtggcttcgaccgcgaaaggtgggaatgaatatggtgggtctgtatctaagttttttgattttactgactctgggagctcggttgagtggactgaggagtcgtcggaggaggacttggattattttgcagccttggacgtggctgcggcggaggcttcgccacacgccgcagacgcgccagacgtgccaggtcctagcaccgggcgccgacgacgaagggcggttgcaaagcgtagggttagtgcggaggaaggggctcggcttcgcgtgagtagggctggtcggcaggagctgttgtctttgccggccgccgcgggtacaggggaaggggaactgcgaagtctttttgcgggtgaggagcttaggataatgttatttaattatagggagatgggaattattcctaaggttgagccgatgtag

SEQ ID NO: 4051 - DNA, 765 bp, Zea mays
  Peptide Sequence Number=SeqID_47426
atgcggcttcatacccttagagatgatgtggttttataccctcagagtccagtagcatctcggggtgtttttggatcccggggtgttacaattagcgagctcgaccatgactccgatgatgttgtatcttctttgagcgatgaggagactgagaggcgagtcaaggacaagttgaactggctaagcttcatcgccgacaccgcaggaggcctctgcaccttggcacttggtgaggacgcggtcagcaccagcgatgacaaagacatcgacaacgacactgcttctgagatagaagagttgaacgctgctttggctagtcaagatgcttgtgagaggagaaagtttagatccatgtacgggagcactcttagggaacttgagtctgctagagcttcagttatggtgtcagacgagactgaatgtgatgtgtgcgctctacacatgtcgaacatcaccaatttccagactaagtatgccaccttgctagatgagcacgacaagttgagatctaggtctagcctattgagtgcgtgtaccatttgtcctggcttgcagactgagctagcaaagagagacgttaggatagctttgcttgagaaggctagctcagtgagtgcccctgcacctacacagtgtgcactttgtgagggtttgcagtctgtcgttgagtcctgcagacacgacaagacaagaatcgaggaagaaaacacataccttcgatctgttttgagttgggtgtcgtgtagtgagccccaattggcatga

SEQ ID NO: 4052 - DNA, 315 bp, Zea mays
  Peptide Sequence Number=SeqID_47427
atggccctagtctctggaggtggttctgtttctaacccctcacctgttgtgtttgctctatcttctttgttgtctatcacatgggaacaagtggagagccttggggatgaggagctggcactcgtggccagccagttcacgcggttccacaacaaccatatgagccgatggcatggcaggtccaaggacgaatgctatagctgtggcgatcccgaccacttcgttgtcagctaccccaagaaaggcaaggcggagtctggcccatgcgaccatcactctagtcggcgcaagggcaagtactccataggcaaatga

SEQ ID NO: 4053 - DNA, 255 bp, Zea mays
  Peptide Sequence Number=SeqID_47428
atggcccatgaaataatgaagaagagcgaaaaagatatccacgactctcgagaagcagcaaagaaagctgagaaagctgcagaacttgagagacatatagctgagctatctcctccaccggagccgttcgaccctctggccgatccggagacaaagaaagcgatagaaatcattaatatggccgaagctattgtcgacgaagttgttaccaaactgcttaacgaagttgcagaaaaagttctgaaggaagagtag

SEQ ID NO: 4054 - DNA, 252 bp, Zea mays
  Peptide Sequence Number=SeqID_47429
atgggagaaacagagcaggggctgggtgagctcgaagccggccatgggaaggcgaggggaaggagctcggactggagaagcaaggggaggaagcagcaggcacgacatccatggaagcaggggcgtgcgccatggttggagcaggagcacgccggcgagctcgcgcggccgacaagtagagcaggagggagctccgcgagctgggcgagcatgggcggacgagcgtgccagggagctcggctgcgcgtatag

SEQ ID NO: 4055 - DNA, 519 bp, Zea mays
  Peptide Sequence Number=SeqID_47430
atgagaaatcctgccatcaccgaccaacttcactgcttgctttcgttgtgggcgcaattggcatggtcccgtgatgcttctcgaccgagtgttctccccccaacaacagtacaacctgccctcgctagcgcacaccttggtcgtggtggcggtcgccctgctctctcggtttctcttcaacccaagcgctttcgattggatgggaggcatagaagggcgattcgaccccatggctatggttttatggacgggcgcggcaacaacctgattcatctagatttgcggcggccgcaaccacctacgccgagatcctcggctataagatgcacagtagtgggaggggagtggctgatggggcggcccctgttgggggtatgcttcgtagccgaagatcctaaaaagaacaccttcgaaaggtcttctcagaagcaagcaccgaagctattatctataaagcttcggcacaaagacagatctcaagatgaagggtcgaaccgacttaaagatgaattgacttaa

SEQ ID NO: 4056 - DNA, 342 bp, Zea mays
  Peptide Sequence Number=SeqID_47431
atggtggaagtcctcataccagtcatcctcgttgacgaagccttcttggtgaagctctctatgctggggccttcggttttgctcatcctgagcaagatgacgaacttcttcagaggcttcgtatatctgcctttgcaggcctcccgaagagaaagggtttcatggttcgggtccagcggctgcagagcagtagcccctgttgctgaagctttctttggcggcatgacgaaggtcgatgcttgccgaaagtggtcggaaagggttcaccggagaaatagaaatgatatcatgttgcaagtgtaccttcggcttgagggaaggcacgggacgcagcccatgtaa

SEQ ID NO: 4057 - DNA, 1059 bp, Zea mays
  Peptide Sequence Number=SeqID_47432
atggcgcctcctgttgatgtggtcggtccgtgccctgggttgggcgatgtggaggctcctccaaggtcgaggtcgagtctgtcttccgaggccgaggtcgagtccgagcccctgggtcgggcgaggcggagaccgtcggctgaggccagggctgagtccgagccctggggtcgggcgaagcggagttcgtcgtcttccggggctgatcccgagtccgagccctggggtcgagcgaagcggagttcgtcgtcttccgaggctgagcccaagtccgagccctggggtcgggcgaagcggagttcgtcgttttctggggctgagcccaagtccgagccctggggtcgggtgaagcagagttcgtcgtcttccggggctgagcccgagtccgagccctggggttgggcggagcgaagttcgtcgtctttcggggctgagcccgagtccgagccctgggttcgggcgaagcggagttcgtcgtcttccggggctgagcccaagtccgagccctggggtcgggcgaagcggactgagcccgagtccgagccctggggtcgggcggagcggagttcgtcgtcttccggggctgagcccgagtccgagccctggggtcgggcggagcggagtttgtcgtcttccggggctgagcccgagtccgagccctggggtcgggcgaagccgagtttcccatggcgcctagggccggacttggctgatgtcagcctcactctgtcgagtggctcagcagtcggtgcggcgcaggcgacgctgtccccttgtcagaccggtcagtggagcggcgaagccacctttgcattaaatgcccctgcgatttggtcggttggcgtggcgatttggcctaggttgcttcttggtgaagactggggcttgggcgagctgaagctttgtgctgatgggggttaccagctgagatttaggagccttgaggccgaggcggggtcccactcgacagtccaacccggtggcaagatggacggccaagtcactctggcaaccatgtcctccaaggaacctgtaaaattatgccacaagcaaggctga

SEQ ID NO: 4058 - DNA, 1485 bp, Zea mays
  Peptide Sequence Number=SeqID_47433
atggccaagccatgtgagcaagtccttgcagcaaatgatggccactcagttgatcagcaaatggcccaacttatggctactcttcaacaaaaggaagacgaattggttgctcttcgtgaacaaatggctcgtgaacaagtggctaaccacaaccataataatgacagggatgcctctaccagccataaccaacaacgttctgaacctgcactcactcttgaggcaatacaaagaatgatttctgagggtgtgagagcacaatacatgcaaacacattattccatgcgtccagggtatgtgaaaccatatccaccagaagttgacatggtacccttcccaaacaactatcgccaaccacagttcactgcctgccaagacacctcccataatggcgctctcctcctccggcaattcgtacaaacattgtcaggacctgctttcacatggtatagggtgcgtccaatcaccttcgaagagttagcatcaaaggcaacagatatagagaactatatgcaacatatctctaggcaggcaagaccatacaataagcctgtgatggaaagaaatggaccacgggataaagttcccagtaaaccaaaacagatgcaggccatggaggctacagtagtccctcgaaaattgcaaactgggggcgccattgaaagaaatcaacacagaggtgatgcatcagctcctagaaggccaactttgagtgagcgacaaaatcaaacatattccttccctgtggaagaagtagatgatctttttataggcttaagagagttaggcctcatagaactccctaagcccaaaaggccagaagaggcctctaagttcaaggaaccgaatttttgccactatcatcgtatcttgggtcatacccttaaagattgctttgtggtgaaaaacatcatacagaaattgatagatgaaggcaccataaatgctgacctcctcaaaagtatgaagaaaggaaagaaggtggctacatcaaatgtcgccacttttcggaatgatttggtgagtcatgcaactttaaatatgtcaccaaactatgatcaatacatgtatgatcaatttatgatgatatcaaaccctgagaatgtgaatgtgactatgccaggatatccaaaacagcaagttgagtccaagcatgaaagcaaggctctccgccgatggatccacaccccaagagatggaacctccacgtcacaaagatcaagaaagcgtcgacagcaattctcaagacgacttgctctacgacgagtgatggaaaagggtgaaggcccgtgcatctccttaaatgtagagaagcacgagcacaacccaatggaggagtatgacactttcgccatcggagtatttgaggatgatgatgaaccactttacttccccgaggaagaagtgccagaagttgatgaaatacagcttagatcaggccgccaatttcctagtttcatctcagccaggaaatccccaaaatga

SEQ ID NO: 4059 - DNA, 375 bp, Zea mays
  Peptide Sequence Number=SeqID_47434
atgcataggagtccaatactcaagaacaaaagaagcccgaagaaatcagcgaaggaacccaagaagcgggctgtcagccagcgcctggtggcgcaccggacagtgctgtccgcaccggacattcggtaccggactgttcggtgtgcaccggacagacgacaacggtcagatccaacggtcgactgctacaagcgccaacggtcggctgtcgtgacgagctcgatagtggagacagcggggagcgtccaagaggagccggaagcggagcaccacttgcgcgtggagaaggcccgcgactctctacgaagttactcgaccgtggtgcttggccctcacgtgggcttccctttgcgtaggggcaccaacgaggattag

SEQ ID NO: 4060 - DNA, 285 bp, Zea mays
  Peptide Sequence Number=SeqID_47435
atggcgcttttgccgcccgttttcccgacatcactgacgtgcgggcctgggtcctcggtgtctcacgccacgctgtgcgccccacgctcgtgccactgccacacgggccccatctcgcgcctcggcctggtagactggttgaggacccgtcttccacctctcggtcttcgtcgccgcgcggaaagcgccgcgccaggcggatccatcgccacctcgcgcggattcctcggttgtgcgccaagtgcatattgggatccgcggcactacagccctgctcgcccataa

SEQ ID NO: 4061 - DNA, 762 bp, Zea mays
  Peptide Sequence Number=SeqID_47436
atgaggttgcggaaaccaaagcagaaggcaagcgcaaatggcatggtaaagaaccactgtcggcccctctttcggggcaagcgacacctccgacaggagaagcgggcgctgtttcacctccgtcatgatgaccgcgtcagaaaagggaccaggaaaggggatattccgaaaaggatccttctcagcgaaggaaacgggccccgagccctcctactgatcaggggttcgaaggtttcgccctccggggttcggcaaccgccccagagcactcgggctccgagccctttactgatcaggggttcgaaggctggcccctcggaagggttcaacagccgccccagagcacgcagagtcagggatgaccctgggtacgtccgttacatggccgaggctcgggctatgctcccgaggaaccctaggacatttccgagaccaacgggaatgatttgtaatggaatcccaccggaggaaggcaccgagccctcgtaccctatcgaatgggtccgggtccagcaaatcacccgtaggccttggcctcagccccagcctcggggaaggtctccgcctcgcccgaccccaggcctcggcctcaggggaaggtccccgtctcgcccgacctcaggcctcaacctcagcctcggcctcgggaggagtcacatcctcgccgacctcaaccccggtctcgggagaagtctccgcctcgcccaacctcggcctcggaccgactatgctacaggggatgcatcattaccctaccgctag

SEQ ID NO: 4062 - DNA, 1317 bp, Zea mays
  Peptide Sequence Number=SeqID_47437
atgtccgcaacccggaacgcgccccaattccctctccccctccctatttccctctgcccgcgctcacccgtcgtccgccgtgcagccgccaccgtcgacccgggccaccgtcgcgtctccgtcgccgccgaggagtccccggagcccgccttgagggggctcaggctgtttcctgagtacctctccagggcagtgaaactggtatatcagccgtgctcacggttaagagcagccttgggatcctctttgattagagatacagatggttcaagatacaaggattatgttatggtttcgatggctcgtcttagacacactgcacgtaagtcggtgatccctttcctgccgtctcgacttgcggagcgtcctctgcaccgcaccgtgtccggacagtcgagtcacctggagaggctgcaccaccgcctgcgtgaggagcaggaacgccggcgccagcacggagagcagcagggctcttcctcctcaccccagcaggaggtggagaccgtgaggccccgttcctctgttgcccagctggaggcgccccttgttccaccgcgggacgtcccggctgttggaggagctactggtggagatcctggaggagaccccgacgacgacgactcagaccacagcatggagtcttctgagccgcaggaggcggaaggatgggtcgcccgacccatcacccgtgacgccgctcgcggttgtcacttccacgacgcactcgacaccttgctgcgccaggctttcgaccggcacacctggtcgatcgagtatcgttgtgtagtctaccagcacagtcgcgggaggtacccggaccgctgggaggctacctgcctagttcgtcgtccggaggatgacctccggggtgcggaggccgtttcggagcactattccatctccgagagggacactgcagaggcggctatgcaggatgcagcacggcgtgcactctcccagtactgttctttgttcggtggggtggccgacggtcttaaccttcggtactacccccgccgccctactggcagcacagagagtgtggttgtttcacctgttggtgaggctaaccctaggttgagcagcacagtcaacctagtcgcggtgcttaacactgagctggatcactctctggacgagctaagcagggctcgaacggagattgcggagttgcgtgctgagttggcagagcgccaccaccaggagggtggttctcccgcacctgttgggactcagcacccataccgctcaccgccacgtggtcaccacacttatggttcccctgtctgtaagaccaggatagatctggatccttag

SEQ ID NO: 4063 - DNA, 540 bp, Zea mays
  Peptide Sequence Number=SeqID_47438
atggggaaggactatgagataggcgagcgcgtgggcatgagaagagaggaaagaggtgagctgggcctgggtggtggcttagactggaggaaagattttaaattcaagtatgagagcacgcttatagagcttgagtcttctaaagcttctattgtggtgtctgacgagactgaatatgataacattgttcgccccgctccggctactgtgtcaaccaccagggtaggactagcaacagcaagtcgtgacctctcccgagttcagcctcgggcgcgacaaggagctccgcctcgcccaaccccaggcctcggcctcagccccggcctcggggaaggtctccgcctcgcccgacctcaggcctcggcctcgagggaaggtccccgtctcgcccgacctcgggcctcggcctcagcctcggcctcgggaggagtcacatcctcgcccgacctcaaccccggtctcgggagaagtctccgcctcacccgacctcggcctcggaccgactacgctacaggggatgcatcattaccctaccgctag

SEQ ID NO: 4064 - DNA, 423 bp, Zea mays
  Peptide Sequence Number=SeqID_47439
atggccatctctctgctggtcccggcgcgcagatctggccggagcagccatggccatctctctgctggtcccggcgcgcagatctggccggagcagccatggccgcctccctctgtgcagctccctctactgctccctctgcgcagctccctctccttgtgtctttttttggttgattgtaaactaattcacttcttgttgattggaaaccagattgattgcacaaagaaggagagccaagaacaactgcagcaaagagctcgaaagagaaaacgacacggtcatgcacccgtaggacaaattacttatgccaagtactattcttatttgctgaacaatcctaatgttgcacaagggtttgtggaggtgtcgttgttgtacaagcttagtatgcttactgagttcattaatggtaatatgtag

SEQ ID NO: 4065 - DNA, 255 bp, Zea mays
  Peptide Sequence Number=SeqID_47440
atgaacgtatgtgagctcactcttgttgtctcacatccccccacaggtcaagaacagatggtcaataccaggaagggtggaggaattgatctacctcccaatcgacacactcggaggatatttagacaaccacaacaacaagaagaagagatgaatcctccaccgtccaaaactgatctagctgtttcagcccagatgcaaataatgcaacagatggcagacaccatggcggatatgcatgcgcagatgcggtag

SEQ ID NO: 4066 - DNA, 738 bp, Zea mays
  Peptide Sequence Number=SeqID_47441
atggcgcctcctgttgacgtggtcggtccgtgccctaggttgggcgatgtggaggctcctccgaggtcgagtctgtcttctgtggccgaggtcgagtccgagcccctgggtcgggcgaggcggagaccgtcggttgaggccagggctgagtccgagccctggggttgggcgaagcggagttcgttgttttccggggctgagcccgagtccgagccctggggtcgagcggatcagagttcgccgtcttccggggctgagcccaagtccgagccctggggtcgagcggatcggagttcgccgtcttccggggctgagcccaagtccgagccctggggtcgggcggatcggagttcgccgtcttccgggactgagcccgagtccgagccctgggtcgggcagagcggagttcgccgtcttccggggctgagcccgagtccgagccctgggtcgggcgaagcggagtttcctacggcgcctgaggctgggcctggcagcctgtcagcctcactctgtcgagtggcacagcagtcagggcggcgcaggtggcgctgtccttctgttaggccggccacctttgcattaaatgcccctgcgatttggttggttggtgtggcgatttggccagagttgcttcttggcgaagactgggcctcgggcgagccggaaggcgccgaacatggtgtctccggtgagctgctggcgggtaatccgagtggacgcccgtgccccatttattag

SEQ ID NO: 4067 - DNA, 234 bp, Zea mays
  Peptide Sequence Number=SeqID_47442
atggcgcctcgcacgctctatgacgacggcggctctcagcccccttacggaagcaagaggacgtcagcaaggactcgacagccccgacagctgtccttccgccaggctccagcgctcctccgacggccacgacaccacacgaaccggggaccccctggtctcgaaacgccgacagttggcgcgccaggtaggggcctgctgcgtgttgacgaacagcttcccgtcaagctctag

SEQ ID NO: 4068 - DNA, 102 bp, Zea mays
  Peptide Sequence Number=SeqID_47443
atgtggaagcagaagctgaacctggagaacccgaaaacccggaagaggtgcgggctgaaggtgaagaagctagtgaaggaggaaatgagcaacaaggaatag

SEQ ID NO: 4069 - DNA, 426 bp, Zea mays
  Peptide Sequence Number=SeqID_47444
atgggtcggcgcgagacggagcgcgaagggggaaaaccagagggagtcaggcgtaaaaggggaaacccgcggccttcgtgtttgtcccgcacccaggtcgggtgcgcttgcagtagggggttacaagcgtccgcgtgggagggagtgagaggcctgcacgcgccgtcccgtcctccccacgcggccaaccctctggcctccctctccctcctcttctatcccccgagggcgacacctcccctcccccgtttccccctccggcgtggcccccctcacctcgtcggcgacggccggtccggccagctcgcccgctcgctcgcgccgtcccgcggtcccatagcctcgcccgcccgcaccgtcggtgcccaggacggctggctcggctcctgcgccgcccttccctcctcctcaccctcccaaggttga

SEQ ID NO: 4070 - DNA, 867 bp, Zea mays
  Peptide Sequence Number=SeqID_47445
atggccagtgaagatgatgcgtccacgtggagcatcgacttcgcgtgggggctgtccacgacgggcagcaatggtcccgacgaccacaggcgctggtggagatggcgaacgacgagcaactgccgctgcagtgggcgggggcggtggtggtgccgccaagtcaacatccatgggggccaatgcagacgatcctgcgtcaaacaccggcgccggtggcgacggagatgcaatggggagtccacactccaccaccggcagcggaaccaccgctgtccatccatggagaacgcagaagtgcacattttgcacttgcacacggcgttcagggatctcgtgcaccggtgggagtgctgtggcttgcccaacggtgaacgcttccaacattgcatcatcaacaacatgaagaacttcgcgcatacgacgtatgcgcatggaaacgttgggtatagatacccatgggtatttagtacccggtcgggaatgggtatgggaggatttttgtacccgtggtcgggttcgagttcggggatgggagcggatctacgttcatgggtacagaatacactcacaagtctgggtacagtcgtacaggcaacctatgtatgcgtatgcccggtttttgcccgtgggccgtgggtttcgtcgcggccgacaggacgggcaggtacgccgtacggttcaatggcactggataacaaaacagtgaaaacacacgtggacgtggcgaatgaggacacgcatggggccaaccaatccacggcgatgaacagaggcggcgggcatcattccgacttcccagcacgtggccgtgccgtgggctcgcaaaaccaggaggctatcctacccatgctgcctacagcaacttaa

SEQ ID NO: 4071 - DNA, 555 bp, Zea mays
  Peptide Sequence Number=SeqID_47446
atggcccttgatccggccgccgcgttggccgtttgggggaggtctcggcgcagcactgctctccggcgtggagcagaggacatgcagtggaactgcgatgtcaggcccgacccggccatggctcgcctaccaggctcggccgcggccacctggtggcgcttggtgcgacccaccgaggcgctggcgcggtcaggcgctcggcgcggcatagcgctcggcgctcggcgcgaccgacacgaggagcagtggctctggccaggcgcacacgccctggcggctcggcgcggcctctgcgtggccacaggcgcgctcggcgtggcctccaccaggcgcgctcggcgcgctcggcgtgaggcgctcgacgcggctccaccaggcacgctcggcactcggcgctggcgagagccgccacggcgggcccgctggccacctcccgtggcgaaacgcggcggcggctgggagcttctcgctccctggcggcgccaagaaagcccctggtggcgacggcggctacaggggcagttagggttggaaaccctagccgccccaagatga

SEQ ID NO: 4072 - DNA, 657 bp, Zea mays
  Peptide Sequence Number=SeqID_47447
atggaccacaaatcccttaatgacacaagatatgagcatagcatcattatgagggtaatctttgagctgaaggtcctcctaggagaagccggctctgaacctgagccgcctgttattggaaacactagctttgtagccgaagatgcttcagcttggttgctgaatgaagccatcagctcaaaagtggaaatggttcgtaccattcaaaccactcagatcaacaccaactacatcactccgccacgacaagttcctgtctacccagtggtagttgaggaaatccctatggatctccctcgcattcatgtggagaatggagtcattctggaggacagctcggaggagtttctgcctacgcccaccccgttggcagaatcactagcctttgcagctggatcgtcagcttcagcaccgcctgcaccggcagttcaagcccctgctcccggaggcaacgactcggacaactctggtgacgatgatgaagacgaccaagaagaagaagatgaggaaaacatcaacgagcaagccaacgaagaacaacaagaccactatgtagggttttggcctgtcactgaacattacacctcaatgttcgagacagggcacttccctaacctgctgcaggatgttctgcacgcgttgggaacctacgtctga

SEQ ID NO: 4073 - DNA, 939 bp, Zea mays
  Peptide Sequence Number=SeqID_47448
atggacggcgcaacgggctccagcgaggccgtgggtgacgacggggcgagctcgcgacgggtggtgaacggagacgacgcagcgaaccgttgcgcagcaaggcgaggcgcgacggaaggcggcataacacgacaacgacgtagaggcagggcgtggcctgggcacgcaggccaggggacagacgacggcgagctgcttagagcggacgtctggttcgacaaagatggtcgcggttggggcgtgcgcggcgagagcttcctgcgtggccgtggcctccggcgaccagggctaggacgagcacgaatgccgcgacggcgatggggaatccgcgcctggggctgccggtgtgctcgcacagacccttgccgctcaggggtcgagacagggagtgttgaacctccatggctgctcggtcaatgtgttgatggagatcggatggggccgagcagcagaaaagcgagacaaggcgaggagaggagagagggaggaagaaggtgctatgcgcggctgcgagttggcgagtgggcgcagggactcggacgatgttcacgacccactgatgcaattcttgaggatctcctgaacctgtgggttaggacccacacacgctttcgctgcaccaatctgatcttgttggttgatgttgattgcattgtcttcattggggagttggaggttgccaaaaggacaggtgcaagaggaaagaataacgagaaaagacaagacttgcaaggcgtcaaagaagggggagcagtcaatggcgaaataggtaagacattatcctcgaacaaggatggaaaagagaaggcttttaaagggaggttcaaacataatccatggacagagtcaaggcaagactcaccaaatggcaaggtggagaaaacaatcaaggataagataagtgaggttccagcagaagagttgagtagaggtacaagg

SEQ ID NO: 4074 - DNA, 1014 bp, Zea mays
  Peptide Sequence Number=SeqID_47449
atgaccattggtgggggaatgcagccgagctgcgtgatgaaaatccttaaagccgagcgacgactggagagcgccaacccccacggggtcgcgctcctccaacaacagcaggaaaaagacaacacaggtgcaccccatctaggggctcggaagggggaaagacgcgatgaatgcgaggagtgtgaaggcatggctactgcccagggggtcgatccctttttaaaggcagatctcctcactcgaacccccaagcgtcacgggcaaagtctccaccgacatgctccagggttcccaccctacgacacgggggctgggtcccacacgtcatgcgagctgacccgaaacgcgaagaaggcaaaccgccgcacgcgaagcataaccagcgcagcgactcaaggcagccctgcgcgtgacccaacagtgcccattaagtgcgacgatcacgggtcactcagccgcggagataggcacgacggtcgatatgatcagaggcgggccgacagtaattgcagcaataggcgtgcggaagcagcggtccaatcacctacagggaccgggaaaggggatatttcgaaaaggatccttctcagcgaaggaaacaggccccgagccctcctactaatcaggggttcgaaggttgcgccctccggggttcggcaactgccccagagcactcgggctccgagccctttactgatcaggggttcgaaggctagccccttagaagggttcgacagccaccccagagcacgcagagtcaaagatgaccctgggtacgtccgttacatggccaaggctcgggctgcactcctgaggtaccctaggacatttctgagaccagcgagaacgatttataatggaatcccaccggagggatgcaccaagccctcgaaccctatcaaatgggttcgggtccagcaaatcccctgcagaggctcgggggctgctctcgcgccaggctatggccaaactgttgaccacgtcaacaaaccagcttataaactcggagcctga

SEQ ID NO: 4075 - DNA, 453 bp, Zea mays
  Peptide Sequence Number=SeqID_47450
atgtccatcagctcgctcgccctggtgggagtcttgcgacccagcttgctcactaggtcacggcaagtggtgccggcgaggaaacgcgccgatgacatccgagtcggtgatgttgggcagctcggtgcgctgcttcaaaaatcgccggatgtagtcccgcagggattctcccggctgctggcggcagcttcggagatcccaggagttcccagggcacatgtatgtgccctggaagttgccggcaaaggctttgaccaggtcgtcccagttggagatctgcgcaggaggcagatgttccagccaggctcaggcggcgtcgaagcaaccacctccattcacaacacccaagcattccaaccttcaacattcaatacaagagctagcaatccattccaagacacattcaaagcctccatctctccaagtttcacaattgagaaaagagatcattag

SEQ ID NO: 4076 - DNA, 57 bp, Zea mays
  Peptide Sequence Number=SeqID_47451
atggccaagtcattcatcattgccctcgaaggcccagccctcacctgtttcatctaa

SEQ ID NO: 4077 - DNA, 609 bp, Zea mays
  Peptide Sequence Number=SeqID_47452
atggcacccaagagaaccacctcgaaggctgacgaggctgcgaaggcagcactgctggccgagaaaaagggcaaggcccttgtcgacaccacccaccaagagccctgcgaaaacgacgcaaacagcaagagacagcgcaacgaacaacccactaccgaaggcagccttcgcacctgcagctctggaggacaaccgcaacttcccccaggcctcgctccaccagagggcgcggacgccaccgaggacggcgaagtcatcggcgtttcggccgaagagcagctacagctgcgcgccttgcgcatcaagaaccgcaacctccagaagcaaaaagagatcctcgaggctaagcgtcaacgtgtgcccgcacaagccaaggtgcgacagatgatacacgacgaagagcagaaggcccaagagcttgaacaagagatcgcgctcatgcagagcgaaggcaattcggcctgcaacacgacccacccctccaacagcgcgcacaaatcgaagacctgttcatccctcagcgcggacacgccatccctcacgccacggcattccaaggcgtcaactaccttgacgagcgaagtcccctggcacctcatctgcaagtga

SEQ ID NO: 4078 - DNA, 585 bp, Zea mays
  Peptide Sequence Number=SeqID_47453
atgagcgacgacaacgcgaatgcctcctgctcatggagtttgttcgggagccctgggctttatttaactacaggaagccctgaccagcggcggcggcggttccatcgggcgtgcgaggaggcgcccgtgagcaggagagccccggccgccgcggcgctctccagccggcggattggcggtcgtggagggggcgcgaggaggagctcagcgtctgcggcggtacagcttcaggaggcaccggtcgggcgcggcggagtgggcggcggtggtgctgttcatggtgcttgcggtcgtggtgctgctgggcgccgtggccgtccttgtggtggtgctgctgctgcagccccgcgtttcgtacgtggcggtgcgggcgggctggcggtgctctgcgcctacccgttccgcgtgcccgccaggggcgtcctcccgctggcgtacgtggcgcgcgcgcagggcgccccgctgggcgacaccggcagcgccgccatggaggccgcgctccgcgacggcgtggtgccgttccgggtggatggggaggcccggacgcgatggaaggtcgcggggatcatcggcgtcgaccattga

SEQ ID NO: 4079 - DNA, 66 bp, Zea mays
  Peptide Sequence Number=SeqID_47454
atggctaaagatgcattcattaacaaaggaaaggccgtaaaatttatcacaggaaaaatactgtga

SEQ ID NO: 4080 - DNA, 552 bp, Zea mays
  Peptide Sequence Number=SeqID_47455
atggcgctccacaagctctatgacgacggcggccccccagctctcttacggaagcagaacgacgtcaggagggactcgaccgctccaacagctgtccctccgccaggctccgccgcacctccgacagccacgacatcacaccagcaaggaaggaccagggccttctcagagaaggttggccgcgcgggaccgaggacgggacaggcgctctcttggggccgctcgcttccctcacccgcgtggacgcttgtaacccccctactgcaagcgcacccgacctgggcgcgggacgaacacgaaggccgcgggacttccacctctctcacgctcgactccggccacctcgcctctccccccttcgcgctcgcccacgcgctcgacccatctgggctggggcacgcagcacactcactcgtcgggttagggacctacgccgtgagaggaggctctcttgctgtcccgggatgggacgtgagcctggctgacgacgtgaccgctgcgcccgcccgcctgccaccgctattactgccggcccactttcggttgctttga

SEQ ID NO: 4081 - DNA, 1158 bp, Zea mays
  Peptide Sequence Number=SeqID_47456
atgtcgggagatcacgccaagaagatggtgatcggcagtgagaagtccgctacaagccacgggaaggctccatcaagggagtccgccaacaagaagaaggatggatcctgtcggcgtttcgagacaggggggcgacgtgggggttcctccgaagccgaggtcgagtccgtcttctgttgccgtggccgagcccgagccatgggtcgggcgaggcggaagtcgttcggccgaggccagggcgaagtccgagccctggggtcgggcgaggcggagtttcgtcgtcttccggcccgagtccgagccctggggtcgggcggagcggagttcgtcgtcttccgggtctcagcccgagtccgagccctggggtcgggcggagcggagttcgccgtcttccgggtcttagcccgagtccgagccctggggtcgggcggagcggagttcgccgtcttccgggtcttagcccgagtccaagccctggggtcgggcagagcggagttcgccgtcttccgggtcttagcccgagtccgagccctggggtcgggcggagcggagttcgccgtcttccgggtcttagcccgagtccgagccctggggtcgggcggagcggagttcgccgtcttccgggtcttagcccgagtccgagccctggggtcgggcggagcggagttcgccgtggcgcctttgtcaagacctgactgccggtcagactcactctgtcgagtggtgctgcagtcggagtggcgcaggcggcgctgtccctctgtcagactgctttatgctgatgggggttaccagctgagaattaggcgtcttgaggcccccgagcctccgcacagggcgagaggacgatcagggacagactcgactttttacatacgcccctacgtcgcctttccgcaaggaggaggggggagtgcgccatgttaccctcgatgggcaccgaacatggtgtctccggtgagctgcaagcgggtaatccgagtggacgtccgtgccccgttcgttgggggtcggctaggggcccagaggcacgcccaaaagtacctgcgggtgatttgccggacccggtcccctggcgacggggtccgagggctcgatgcctccctccgatgggattccgttacaagatcgttcccgctggtctcggaaatgtcctag

SEQ ID NO: 4082 - DNA, 459 bp, Zea mays
  Peptide Sequence Number=SeqID_47457
atgacgcacttctccgactggtgctcggcctgcccactcctgcccgatgttctgccggagctgcacaagtttccctgcttcctcgtcgagcctagcctgcatctcgcggatttgctcgagctgtacgaggctaacgcccagcaagttcttcgtgagcgtgctggcgtcgtccgtctgcttggggttggcgtgttgcggggaaacaacgctcgtcttcgtctcaaacgcgaggtcaacgcccgacgtgtcccccgctggggtgccggcaccgtcgactcgctcgacagccaacaaggtgccgcctcctgcttggccatggttgccccgcctcctccttcatcggcggggaaggtgacggaacagacccggatgctgttcttccatcacgcgggaaagacatcgtcgattccgccgccggtgggcgggctggcggctgccattgtcgttgtcgcgcggtga

SEQ ID NO: 4083 - DNA, 643 bp, Zea mays
  Peptide Sequence Number=SeqID_47458
gacctggctgctcttcgtttggaatcggagcattccaggagataggcccgttccgcgtggacacggacagcaagaccctctgcaatttcaaatacgcctgaaacacagatatcatgatgtagtggcgaacgtgctatacctagagagccccgtgggcgtgggcttctcgtacgccgccaacacggacgtgtacaaggtgatgggcgacaacatgaccgcagacgactcgctccagttcctgctcaagtggctggaccgcttcccggagtacaagggccgcgacttcttcatcgccggcgagagctacgctggccactacgtcctggagcttgccgcctccatcctcgctgccaagaacgcgcggcccaaggacatggcctccgtcaacctcaagggaatcgcgatcgggaacgcaatcctggagttcgcggcggagcagagcgcgctgtacgagtacttgtggcagcacgcgttcctgtcagacacggcgcacacgctcatcggccagcgctgcaagaacgccgaggacaactcgccgctctgctcggggaccaaggacgtcgcctacaaccagctcggcaacatcgacgcgtacaacatctacgcgatgacctgccatgacaagaaagtcaagcccacatga

SEQ ID NO: 4084 - DNA, 1137 bp, Zea mays
  Peptide Sequence Number=SeqID_47459
atggaggtggacgccgggctccacggcttccgcctcggcctcactcccttcgccgacctcacgctggaggagttccacgcgggcgccttgggttctgccgcacccgtaacggcacgacggaggtggagaagatcagggaggggcaccaacgagacgatcgcgctcaagaagatccgtctcgagcaggaggatgagggtgtcccgtccaccgccatccgcgagatctcgctcctcaaggagatgaaccaccccaacatcgtcaggttgcacgatgttgtccacagtgagaagcgcatatatcttgtgttcgagtacctggatctggacctcgagaagttcatggattcatgtcccgagtttgcaaagaacccctcaatgattaagaatctattgatagatcggcgtactaatgcactgaagcttgcaaactttggtttagccagggtatttggaattcctgtccgtacatttactcatgaggtggtgacattatggtacagagctccagaaattcttctgggagaaagacagtattccatgccagttgatgtatgggtacttggtacaccaaatgaacaaagttggccaggagtcacctctttgcctgatttcaagtcggctttcccgaagtgccagtctcaggatcttgcagcagttgtcccaaatcttgaacccactggtttggaccttctctctccaatttacgtatttattgctcatggtcagaaaatgcttcggtacgagccaagcaaaagaatcacagccaggcaggctcttgaacatgactacttcaaggaccttgagatggaaaatatgacaacgacctccaaaaaaatcgttgaaacagtcatatcgcctcttgcgaaggaactcaacgagggggacgtagacaaaattgttcctcagaatgtcgacgtaaacatcaaaaaggaagcaaaggttgacaccaatgttaaagggccaactatttcaaagaaaattcatcagcgaatcgccactgatgatgtcaagaaaccgttagaatcagtgtcacgctacctgcataaattgcggagagttatgacaaatcaatcaaaagcagaatcagcatctcatggagtaggcacacagtcccaaatagacaatttcgaagtatga

SEQ ID NO: 4085 - DNA, 1263 bp, Zea mays
  Peptide Sequence Number=SeqID_47460
atgtcttcgcgctcccttatgcatcgtgtctttccaccttccgagcccccggatgggggacacccgctatccttccgccttgtcgttggaggaacgcaacttcgtggaagttggtacctttcagccatcgttcggcttcaaggattttcatcagtcagcccggctgcatcccctcgccggtggtcacccaagacggtgaccaccagcccctgggtggggagaagcaagccaggctgcgatcttggtcccgccctcagcttcaaggatgttcatcatcctcgctggggtggaggccgggctgagccggagctctacctcccgcgcgggttcgtgggtcagcctctccttcagcattcgagggagagggcgctcactggccctacgagaggggcggacttcgacaatgcagggctggtcgacggcgggcgtcgtcagcttcagcgtgttgggctcgccggtttggctcccggtgccccctcctgccgcaagggcggttgtcgcgccgcgcgcacgggaggaccgcccaagacgtcacgcgctgctagggcggcgttcgtgttctggggctgtcctgcctttgcatcggtacggcgcctccgcgcggaggagtccctcggctcggtcgaccctgatgtccgaggcttctcttgcttagttaaaggaacccctcggccgctcttcgatgagccgaagccgggggtagcggcgtcagcacggacagaggcagagttggctcaaaaagaagacttggtcggccagagcctggccgggtcgtccactagcgggaccgatgccggaattgagttgccgaggcctcgggccgggctgatgtctttgggggacagctggccgaggcctcggggtgaccggccgagccgtctgctcgagccggattcctggagaagaccctggcggcgatggcctgggcgtggtgatgatgtcgtccttcagagtggagatcctcggaccgtgtcgtcgtccgaggctgggtcggacctcgccgaaggtgtagttgacgctgagggtgctgctgctcccttcaactgtcaagatccgagcctaattgtctgtgcgagcgagagttgcttttcacggaaggcgatgagtgagggttctgtcaccgacacagtcgagaaggcccgaagaatcgcttcggcagaggagctttcgagtgtgaagacttgttcggtccgcggaatcacttatccgaacgcgagttacttgtcgcagaaggtgatgagtgaggatccactttcgaagtag

SEQ ID NO: 4086 - DNA, 369 bp, Zea mays
  Peptide Sequence Number=SeqID_47461
atgcctctggagtataatgtgtggacatggatcttcgaacgagaacccacggtgaacagtgctcccgtactgttcacgctgactgggcattcgcttttgcatcacgcttgtacccttactttctttcgagccgaaggtaccttcggacttaggtcaaaaccacagtgtgaagaagcacaaagaatacgaaggatggcgcagagccgaagctatgcgcaggggagcttcggcgtgatagcagaaaaggaaaccgacttaaaggggaaaaggctatttagaccccgatggattactatagagttattagcaaatgtaaaggacatgggtgtaattttacatgggttgcgtcccgtgcctataaatagatga

SEQ ID NO: 4087 - DNA, 288 bp, Zea mays
  Peptide Sequence Number=SeqID_47462
atgaccgggaaaaagaccacgacttcctctgacggcggcactccaaagaaagccaaggtggtggtggaggatgaggaagaggtggggttggaggatgaggaagaggcgactgtgacactatccgtagagaaggacgcgctggagtgcgacatctgctgcctacccttccagtccgaagttttcatggcaagtcagattaccatgcattgcaagaacgggcattctggatgtgcaaagtgctgcatccgcacggacgaaagtcgtgtaaaattacatgacatgtcctaa

SEQ ID NO: 4088 - DNA, 201 bp, Zea mays
  Peptide Sequence Number=SeqID_47463
atgtcgggagaacacgccaagagggagatggtcaccagcgacaagcccgaagcctcgcgaaggaagaacgacgaagaaactccgtcaaaggaggccgacgacaaatacaaggaagaatccaccggctccatcaagtcacataggaaggcgcatgcaccacaagttggcgacgaggactatgactccgatgaggccgcctag

SEQ ID NO: 4089 - DNA, 525 bp, Zea mays
  Peptide Sequence Number=SeqID_47464
atggtgggcaataaggcaagagttgaaggatgtattgcggaacaatttaaactgaaggagacaaacgacaaagccgttggtccacccaaggcatatcacctcagtatggaagaactgaaggtgtcaaacggtgataccgaggatgaggtgctcatcagtacctgggacgagtacaggtttaaaaaggaacgaaaccacaccgacagacagggacttcttcgatatcggttgcctgacgaagaggattacatggggcacgctgaacatgtcttccaaaacaatgcaaagaagctggtgaaggatgccatatactatgcgagaattcaggctacaaacctgtattttcaaaagcatccggaagaagcaggccccttgaataaaaaggaagggtcctcaaagatatatttgactgaggatcaatatcgtgaggaagctatgagtggccaaaagcctagtgacattgaggtctaccaggagggccacaaaggaccagaccctaacaaccctgaccagctctgcagctag

SEQ ID NO: 4090 - DNA, 525 bp, Zea mays
  Peptide Sequence Number=SeqID_47465
atgatgaccgcgtcaaaaaaggtgtgccacgtcgttcgatttcatatccttttccacttcctctttctctctcttgctatagggaccgggaaaggggatactccgaaagggatccttctccgcgaaggaagcgggccccgagcccccctactgatcagaggttcgaaggctggcccctcggaagggttcaacagccgcctcagagcactcgggctccgcgcccactactggtcagaggttcgaaggctggcccctcggaagggttcaacagccgcctcaggccactcgggctccgcgcccactactgatcaggggttcgtaggctggcccccgaagggttctgacagccgcctcagagcacgcagagcgagggatgaccctggagaccgacgagaacgattttgtaatggaatcccaccagagggaggcatcgagccctcggaccccgtcaaaaggggaccgggtccggcaaatcacccgcaggtgcttatggagcgcgcctccgggtcactagccgacccctaa

SEQ ID NO: 4091 - DNA, 132 bp, Zea mays
  Peptide Sequence Number=SeqID_47466
atggctcacaggcgagcgccaccaccatgggggagggaggtgggggctgcggtcctgcgaagcgagccagcgggcaaggccaccggactggacactgctcctcttattacatgtaccacattgtttcagtga

SEQ ID NO: 4092 - DNA, 1221 bp, Zea mays
  Peptide Sequence Number=SeqID_47467
atgacgagcgtcgcaaggcacgacaaatgggaaggaggcgacgcacgaatttcagagcatggagctcacggcggcttgagggagacagccgtgggagggacttcggcgagctggagcgggatacggcctgggcgcgacgaagggagctgcgcgtccagagcgagcagggagagcgccgagcggaacagggagctccgggcagagggccagggcgcgaaggccagggaatccagggcgcggcgagccgaaaacttcgcgcgcggccatgggaaagcaggcgcggctggactgaacgagctgcgccagggagcagcagccggctgtgaagaacgcggctgggcgcgatgcaggaagcgcgggcctaggcgaactcctaacaggaccatggacgcggcggggaaactccacggcatccacgggagagagagagctccgcgagctgaagactgggcgcgacgcgagcagagagtcgcggcgccagaggaacagcgatggtcggccgacgaactggagcaggcgctggggaagggaccgagcagggagaagacttggcagccagcgcgcatccgcggcgagcagaaggccaagcgccggccatgggagcaggcacggctgccaggggcgattgcgcccgatgcctgggcgggctgggagacgaccagggcgcgcggcgagctagagcaaagggcagggcgttcaggcgctgcagcagggagagcgagcgtggagcatcccggcgagctacagaggccgagcagaggaagaacgagcagccgccatgggagagggaaatccgatcagaggagatcgcagaggaggggaatgaacctggccgaacgctatggcatcctcaagcaagcgatggcgaatcctagaggtgaggtggcggttccacgagtggaggtcaaggctcagtccactcaagggacacgatctcgcctcgcccgagcccagcctcgggcaagggcagccgaccccggaggattcacgtctcgcccgagggccccctcaagcaacgaacacaccttcggctcgcccgaggcccagtcttcgccgagaagcaaccttggccagatcgccacgccgaccgaccgtatctgtcggcgtttcgagaccggggggtccctcgggccgacgagtgagtgtcgccgcgtgccccagcccagatgggtcgagcgcatgggcgagcgcgaaggggggaaaggagcgaggcggccgtag

SEQ ID NO: 4093 - DNA, 1431 bp, Zea mays
  Peptide Sequence Number=SeqID_47468
atggcggcggcaggcgagcggaagcagcagtcaagtcgtctgcaggctcgcgtcccctcctgggatagcgagagagacctctcccacggcgtgaagacgacgcgcccgtgttccgttcctcaaacggctcgcgcacgcacaacggctgccccgccaaccactcgtcccgtcgcattaactctgcggcagaacaggcgacacctttggcaggcgacgcttcacctccgccataatgaccgcgtcaaaaaagggaccgggaaaggggatactccgaaagggatccttctccgcgaaggaagcgggccccgagccctcctactgattagaggttcgaaggctggcccctcggaagggttcgacagccgcctcagagcacccgggctccgcgcccactactggtcagaggttcgaaggctggcccctcggaagggttcgacagccgcctcaggccactcgggctccgcgcccactactgatcagaggttcgtaggttggcccccgaagggttcgacagtcgcctcagagcacgcagagcgagggatgactctgggtacgtccgatacatggccgaggctcgggctacgctcccgaggctcgggggctgctctcgcacacccggctccggccaaaccgttgacagcgtcaacataccagcccgagaacttggaacctgactatgcacccgggcaacgaccagaaaacaacgccgcctgccctgctccgactgctgtgccacccgccagggtgaggctgacagcagccaagtccagcctcgggcgccataggaagctccgcctcgctcaaccccagagctcggactcaacatcgacgccggacgacggtctccgcctcgcccgaccccagggctcggacgcaacctcgaccacggacgacggtctccgcctcgcccgaccccagggctcggacacaacctcgacaccggacgacggtctccgcctcgctcgaccccagggctcggactcaacctcgacgccggacgacggtctctgcctcgcccgaccccagggctcggactcaacctcgacgccggacgacggtctccgcctcgcccgaccccagggctcgagctcaacctcgacctcagaggagtcaccgcctcgcctgacctcgggcttggaccgaccacgtcacagggggggcatcattatcctacccctagctagctcaggctacggggaacaagacccgcgtcccatctggctcgccccggtaaaacatgtaatgatgacaccccgcgtgctccatgacgtggcggttctcagccccttacggaagcaaggagacgtcagcaaggacccgacagctccgacagctgtgctcctacagggctcaagcgctcctccgacggccacgacatcacatgaacagggcagcaatacctctccaacagccacgtcggcatgtacttag

SEQ ID NO: 4094 - DNA, 1647 bp, Zea mays
  Peptide Sequence Number=SeqID_47469
atggcggccgtaataaggagccgccgccgcgtgtccgttttcttctacgtcgtcctcgccgcagctgcagctgcagccgcggcgcaggcatccaataacgtcacctccgacgaggagtactgggcggagcgcgccgaggtggctcggtcgcgcaacctcgccgcctacgtcagcgaccccgtggccgccacgaaccgcttcaacgcggacgtgctgagggccacgacgcggcgggcgctggcgaggtacgatggcccgtgcatggcgaccaaccccatcgaccggtgctggcgctgccgcgccgactgggcgacggaccggaagcggctggcgcagtgcgcgcgcgggttcggccacaggaccgtcggcggcgcggccggcaagctgtacgtggtgagggacccgagcgacgacgagatgatcatcccgcggaagggcacgctgcggcacgccgtgatccaggaccggccgctgtggatcgtgttcgcgcgcgacatggtgatcgagctgcggcaggagctgatcgtgaaccacaacaagacgatcgacgggcggggcgcgcaggtgcacatcatgttcgcgcagatcacgctgcagaacgtgcagaacgtgatcctgcacaacctgcacatccacgactccaaggcgcactcgggcggcatgatccgcgactcgaagcggcactacgggctgcgcacgcggagcgacggcgacggcgtctccgtgctgtcgtccagcaacgtgtggatcgaccacgtgtccatgtccagctgctccgacgggctgatcgacgtggtgaacgggtcgacggccatcaccgtgtccaacagccacttcaccgaccacgaccacgtgatgctgttcggcgccagcaacgacagcccgcaggacgcggtgatgcaggtcacggtggcgttcaaccacttcggccgcgggctggtgcagcggatgccgcgctgccgctacggcttcttccacgtggtgaacaacgactacacgcactggatcatgtacgccatcggcggcaacatgaaccccaccatcatcagccagggcaaccgcttcatcgcccccgacgaccccaacgccaaggaggtgaccaagcgggagtacacgccgtacaaggactacaaggagtgggtgtggaagtcgcagggcgacgtcatgatgaacggcgccttcttcaacgagtccggcggccagaacgagcgcaagtacgacaggttcgacttcatcccggccaagcacggccgctacgtcggtcagctcacgcgcttcgccggaccactcaagtgcatcgtcggccagccgtgctacggcggtgacggattcttcgggcgtgcgagcggcatcggcgattctctcgggtgtgagcggcggcaaatcccgatggctagcggcagtgccgccccgaggcgagtaaccggcggcggcactcacccaggatcgagcgacgatgacgctcccgaggtgggtaggcaagcggcgacggtgcaccctaggcccggtggcgacgacggttgcgttataggcttcggcagtggtggccacttgaggcatgggtcgctccagcggttgcgcgaggcgcggtcgtctccggcgatggctgccacgcgaggcgtgggtggctctggcgtccttcgatga

SEQ ID NO: 4095 - DNA, 1569 bp, Zea mays
  Peptide Sequence Number=SeqID_47470
atgttctacaggcacattactgcatctcaggactcagatatgccaagatatttgcttaatctgattgatacaccaggccatgtggatttcagctatgaggtatccaggtcccttgcggcttgccagggtgctcttttagtagttgacgcagcacaaggagtacaagctcaaacaatagcgaacttttaccttgcatttgaatcaaatttgagcatcattcctgtgattaacaagattgatcaaccgactgctgatccagataatgtaaaggatcaattgaagaggttatttgatattgatccaagtgaagctctgcttacttctgccaagactggtagaggccttgaacaggtattgcctgctgttattgaacgcataccttccccgcccgggaaatgtgatgcacctgtacggatgttgcttttggattcctactatgatgaatacagaggagtgatttgccatgttgctgttgttgatggtgctctgcgtaaaggtgataagattgcttcggctgcaactagccgtgcatatgaagttcttgacgttggcattatgcaccctgagcttacacctactggagttctctacactggacaagttggatatgttattagtggaatgcgttcaactaaagaagcacgcatcggtgatacccttcaccaggcaaagagtactgttgagccacttcctggtttcaagcctgtaaaacacatggtcttctctggtctctatcctgccgatggttccgactttgaagctcttagccatgcgattgagaaactaacatgtaatgatgccagtgtctctgttacaaaggagacaagtaatgcacttggcatgggattcagatgtggcttcctaggattgctacacatggatgtgttccatcaacggcttgagcaagaatatggagctcaagtcatatcgaccataccaaccgtaccttatatttttgaatacggtgatggaagcaaggtgcaagttgagaaccctgctgctttggcttcgaatcctggaaagcgtgtagcagcctgttgggagcccacagttattgcaacaatcattattcctagtgaccaaagggctctgttgaagtaccgattaccattgaaggagataattgtggacttctacaatgagttgaagggcattacgtctggctatgctacttttgactacgaagattcagaataccaacaagctgatctagttaagatggatatccttctcaatggtcaacctgttgatgctatggcaactatagtgcataaccagaaggctcagcgggttggaaaggatttagtggagaagctcaagaaatttatagaaaggcaaatgtttgagatcaccatacaagcagcaattggttcaaaagttattgcaagggaaaccctgtccgcaatgaggaagaatgtcctggccaagtgctatggcggtgatattactcggaagaagaagttgctagagaagcaaaaggaaggcaagaagcgcatgaaacgtgtgggatctgtcgacattcctcaggaagccttccatgagctactgaaggtctccaattcaaaatag

SEQ ID NO: 4096 - DNA, 372 bp, Zea mays
  Peptide Sequence Number=SeqID_47471
atgaactccgcctcgcccgaccccagggctcggactcagcctcggccccggaagacgacgtactccgcctcgcccgaccctagggctcggactcagccttggcctcggacgacggtctccacctcgcccgacccggggctcggactcagcctcggccccggaagacgacgaactccgcctcgcccgaccccagggctcggactcagccttggcctcggacgacggtctccgcctcgcccgacccggggctcggactcgacctcgacctcggaagacagactcgacctcgacctcggaggagcctccgcctcgcccgacccagggctcggaccgaccacgtcacagggggggccatcattaccctacccctag

SEQ ID NO: 4097 - DNA, 426 bp, Zea mays
  Peptide Sequence Number=SeqID_47472
atgggcaagagcaagaagggtggtagttcttcgcaccactccggcgacaaacgcaagcgtgagccaactcctccctcagaggacttcagcgactcagagtactcggaggaggagttctcctccaagtccgagggttcatcggctcctgcctctcccccggcgtcgtctgatgactcagacgactccgaggggatcgccgcagagggctcggataagtcggagtactcctcggacgaggagaactcctcggactcgtccgaggagggcggcgacggcgatggcggtgacagcgacgacgacggaggcgatggtgatggcggcggaggcgacggcaagagcggtgacggcggcggcaaaggtggcagcggcgacggcggtggcggcagcaagggcagcagcaggggcagcaacaaggccagtggctag

SEQ ID NO: 4098 - DNA, 2766 bp, Zea mays
  Peptide Sequence Number=SeqID_47473
atgccgctgaggggtcgatcacgccgccaaggtgacttcccacaaaatatgaatactttccatgctcggccatccgtcccttgctcgtatgaccggaacacccaagaagtagcaggccagagaattagatctggtgataggcctgatcatcatccaagccagactatcagcccctctgcacaccagcgtcatgatccttccatgaataccagacgtgtcattaccagtgtacattcacggaatatgagccccggcgagcgcacattttatactttatttagtgggcctgcagaacaagcaccgccagaggaagaagaagagatatatctctggcgcaaagattttgatttctttgcagatgcaaactcagtaatgcatcatgcaggggacgtcgacgacgcgaaagcagaaaatcctgatgattttatgactttggtggctaattgtttaggccttggacgaggttatcagcttgttactgaaccaggacatgaaattattgaaaaagaacgaaaaaatcggaaacgatgtcgtgttccaacttcgtcgaggaccctctcgaccaccaccccggataatattccctttggcattcaaaagaacccacaagaaccgcctgtgtcagattacgctggtcgtgcacacattcttcacccggtactggactcatccaagaggtcactcgacattcctagctcgacctccacactagcccaaaaaatggtcaagcatccctcatcaaggtggttcaacgactgtcggccgcaacttcgattggatgtgcctgtatgtcggaagatgttaatatgggcccgtatgatgctggtgaaccacgaagaccgaagtatgctacaaaaatctgatatctatcgcggtgtactagcttcactttattgttttcaagctgacccatcattggtagctgccttcttgacatattggaatgttgacggacatacattggttaccagtcaaggggagatgggatatccactacataccatctctgatgcgatggggatccctatctcaggtcgtctttatgaagaatttattcctccttgctctgacgtccatggtcacttggagactctttatgctatttatgctagcttatgcccatcagagctgcagccaggcccaggattagtgagccttaccgcttggttagaccacttttttgatgataaagctgattcttttggcagttctttattggatggctttgctgaccccaaagatccgctacttcagaagcttcgtttccatgtcgcggttcaaggtgaccgtcctgcagccattcttggtgccgagacattatcttaccgatctatgtatccttcaacggtttaccgtgctgcatttataacagcttggctatgtacttattgcattcccgtcgaagctggccaatacattcgtcctgaggtatttcatatggccgttcagatatcagaaggcgttcgcagagcaattggtgtcgcaagcttggcttttctatataattgtttggataatattcatgataatataattagtgggacacggtccgcgagcgagtgttccctttttcttccgggtcatttcatcatgggctggttcgcctctttttggaagcaagctcggaaatcagcgaccttacattgtccagttaaatttcctccttttgtcatagatttgacgaagttggaacaacccatgcctataacagaggcacatcatatattttgggattttgatggcgatggtcggggactgcgctcgctagattttttgggccgatcctcgctgcgattcccaggcggtcaccgaccggtatttattcgagatggtcgtacgaagaatgagaaacaaccatttgccatatcagtttctgcaatggagctacttatgagcagcctctttggtggtattactcataggcgtggcgaacgttctgacaacctggtgtattgtccgcatcgcttcgcacgcatgtttaactatgaccaactcatcccatattttgattatcgtgctgctgataatgtaactgatagtttgaactttcgaagttactctccctcgagccgaaaggaaacacttcaaatttgtgttcgacggcatctttcttattatgatcaacctgagggacatgctctcgtggtgcaaccttctaatcttggaactagacgttcgtataattatattatctggtgtaacaatgcttttcggtttcttcgagatccttcattcttttgtgataggatttttatgtcagctgcaatcaaaacaacagtcgctgcccctgcagagggtgacattgatcaacctgctaaagaaacagcagtcatcaaatattctcttctccctggtgatagtgaacatgaccgggaagatacgacccccgcaactgtgtccagacttggtcaaggaaaaaacattggcataatacaagctcgtttgcaagacaaggcatctgctctaacctcttcacccgaattacctttgccagtagactcaagccaatctacgcacaccagcaaagggtcgcgtgcaaacactgatctacttaatgatacattatcagatggcggtttggcatgtcctccggatgatccagattttctgaatgacttcgtcttcactggagcgctggagccctttacagacttattcacagacctcccaaatgaggtcagggagatgcaggcctcgcatactcaggttccaacatcaggcgacttagaacagactgatatggtgcatgtttcgcaacccggttag

SEQ ID NO: 4099 - DNA, 1812 bp, Zea mays
  Peptide Sequence Number=SeqID_47474
atggcgtacgcaacgacggcggcgctggtggataggggggccagggcgagggcggcggtggtgctggggggtaggggcgccgcgtcggggggtggggggtgggatgtcggcagcggaccctacgggccagggcgccgctccggggagagctgcgccggcaccggccacgccaagccgggggcccgtgcaggggagggccggcggctgaggagtggggtgggggcagcggctgggtgggaggagggaagagttgtatctccagaatttacattctatgacagttcaaagttatcaatggatgattcgttgcacattgagaagcttcttcgggccaagatggatttcagtttcatgtatgcttcaaaagaaaaagatatatgggctcgatctgtcattaaagaccttacaattgaagctggttctggtcttcttgttcttgaacctgtagatgtttcatggaaatatacttcagtcaatgaaaagacaaacatagtgttggtgtcgacagatgtttgcatccatctttctctgagtgttgcttctcttatgcttaaactgcaaaaccaaactcttgcagcattgcagtttggtaatattagcccactaatttcttgcacaaactttaagcgaatttggagctcaccaaaaggtgacctacctggttacaacctaacgttctggcggccacaagctccctccaattatgtcatattgggtgattgtgtgtcctcaaggtttgaaccacccactcttggcattcttttcaagtgtgacacagttgtttctgagaagcctgtacagtttactaaagtgacacaaattgacagaaaaggccttgaggaaatattcttctggtatccagtgccacctcccggttacgcttctcttggatgtatcgtaacaaaaacagatgaaatgccaagcaaggattccatttgctgccctaaactgagtctagtgagccaagcgaatatgtcagaggatcctatctccatgtcttctagctcaaaaggtccttgctgctggagcatctggaaagttgaaaatcagggctgtactttcctggccagaccagatgtcaagaagccctcagctcaactggcataccgtattgctgaccatgcgaagccgaaggcacgtgaaaacattactgctgagctgaagctgggttgtttgtcggttggcattcttgacagctcttgtggaatggtcacaccactttttgacacaacaatcgctaatataaatcttgcaacacatggaagatttgagacattgaatgctgtattgatctgttcaattgctgcatccacattcaatagacacttggaggcatgggaaccctttgttgagccatttgatggaatattcaagtttgaaacatatgataccagtgaacaccctccttccaaagttggtaagaggattcgtgttgctgcaacaagtcctctaaatgctaacctgagctctgcaaatcttgagctgcttatagaaacgttagtttcatggagaagacagattgatcttgaaaataaatcgtcaacaaaaagcgagggcttgcctatcatagatgacggcaatggtcacagctacttctgtgctttacgcttacttattggaagccatgcttctgatcagcacaaagcatcagctaatttagagattgaagtaacaaatcttgcatcaaaagctgggaaagccctacccacggtggctaactcccctgtgatcgccgccggccgcttctccaagcggccatcttccccggcgcaggcgctcaagttgccagggccccgctcgcgctcgctctga

SEQ ID NO: 4100 - DNA, 729 bp, Zea mays
  Peptide Sequence Number=SeqID_47475
atgcaggcggcgtgcgactacaccacagagacatgccccttcaacttcgacgcatccagcgtggaggcccaggcccacacgtcatgcgggcgaaggcagcagtcaaatcgtctgcaggctcatgtcccctcctggggcaataggggagccctctcccacgacggcaggcgacacctttggcaggcgaagcgggcgacgcttcacctccgccatgatgaccgcgtcaaaaaagctgccttagagcactcgggctccgcgcccactactgatcagaggttcgaaggcttgcccctcggaagggttcgacagccgcctcaggccactcgggctctgcgcccactactgatcaggggttcaaaggctggccccccgaagggttcgacagccgcctcagaacacgcagagcgagggatgactctgggtatgtccgatacatggccgaggctcgagctacgctcccgaggtaccctaggacatttccgagaccagcaggagcgattctgtaatggaatcccatcagagggaggcatcgagccctcggaccctatcaaacaggaccgggaaaacagcatcgcctgccctgctccgactgttgtgccacctgccagggtgaggccgacagcagccgagtccagcctcaggcgccataggaagctctgcctcgcccgaccccggggctcggcccccgcctcgacctcagaagacggtctccgcctcgcccaaccctag

SEQ ID NO: 4101 - DNA, 816 bp, Zea mays
  Peptide Sequence Number=SeqID_47476
atgccttcgcactctcctcatgcattgcgtccttccgccttcccgagcccccggatggggagcacccgcgttgccttcgtctcgttgtgggaggagcgcaacctcgtggaggttggcacctttcagccatcgctcggcttcaaggattttcatcaggcagcccggctgcatcccctcactaatgggcgaggcgagccggggcctgccttcgcgtgggctggcgtcccgcctcttcctccggcatctgggggtggaaaccatcctccagctctgcggaggaggcgtcctccagccatgccggggaaggcgaactgctgctgcctagccagggtgcagcattccgtcctctgtccgggcgacggtggccagccgcaccggggggtctcacaacacgtcgtacgccgcgagggcggtactcgtgttctgggacggtcccattctcgttttcgtggcgaggacaggagtgaggacctgccggtgcgctttggggcggccggcgctcgctggtgcggtagtggtgggcaggtggacgccgccgtcggtgctgagatggtggcagctggagaaagcttctccaccgacgagatcgttggcgccatctgcgttccgggcctccggctctttggctttaatatctggttctcgtcccttgagtggggacgcgaacgagagccttccagcggtagcgtccgccctgggaccatcgctgctgttgtagaggccgccggcgagtcacccggagcttgtcgtcccgcaggccctccgatgtggaggttgttcatacccgcgggagtggtaccggagttccatttgtaa

SEQ ID NO: 4102 - DNA, 432 bp, Zea mays
  Peptide Sequence Number=SeqID_47477
atggacagggcggagttggctcgagaagaaacttcatcggcccaggagcaggacttgtttgtcggtagcagaatcgtttatccgagcgagagttacttatcgcggaaggtgatgagtgaggtatccgtatctcggaggcgtaggagtccctcggctcggtcggcctcgccgcttacgtgtactcttactcgtccgcaggattccgttaccgatatagtcgagaaggcacgaaaaattgtttcggcagaaaagttttcgagcgttaagacttgttcggtcagcggaatcgcttatccaagcgtgagttacttatcgcagaaggtgatgagtgaggatcccactatcgaagtagtcgaaaagcgcgaaagatgttctggcagaaagactttttccgaggaaaattttgacgcagagggggttccccccttctag

SEQ ID NO: 4103 - DNA, 609 bp, Zea mays
  Peptide Sequence Number=SeqID_47478
atgaacaaaaacactggcattcaaagtgccattacaaacggaactccggttccacctccgcaggtacgaacaaccccactcgatggggggcctgcggagcaacagaagaccgacgaacggcgcgccgtcgcccgctccagcagcggcgacgacgacgacttctgctccggggggccgaacagcggcagcgatgacctcagggcggatgctgctgccaggaggcccccgcccgtgcccaaactcgtgaggcaaggatgggcagaaggccgtagagttggaggtcggcccgtgggcagccctggctatcccgtcggcggaagaacctcttccagctgccgtggcggaagccggcgccgagaacggctccgaagccactcgggtcggagagccaggcacgctgcagctgccggcgccacggacgacagccgcccttccccccgatcactgagggaaggagcgggccaccacccacgcaggggccgatcccaactcggcacactcccctccccagccctggtgatgaaaatccttgaggctgagggaggggcagaggccgcagcccggctcgctttcccccaccatcaaactggaggtcaccgtcttgggtga

SEQ ID NO: 4104 - DNA, 972 bp, Zea mays
  Peptide Sequence Number=SeqID_47479
atggctgaaaggtaccaactcccacggagttgcgttcctccaacgacgaggcggaaagacggcgggtatcccccatccgggggcttggaaggtggaaagacacgatgcataagggagcgcgaagacgtggtcgtcttccaagggggtcaccctccttttaaaggcaactctccctgcttgcgtccccagccgtcgcgggctgagtcttctccaacacgctccaaggtcctccccctacggcgcgggggctgggtcccacacgtcatgcaagccggctcagagcagaagaagccaaaccgctgcgcgcggtgcatacaaccgcccagcggttacaagcgactcttcgcttttgcccagaccaacgggcgaaaggggcgggcagccatgcaggcggcatgcaaccgcgccaagtgggcgcacttctccgactcccaacacgcccagcatggaggcccaggcccacgcgtcatgcaacaggcgcgtcgaatgcttcgtgcatgcaacagcaccgccacttgcgccactgccgcgcctcctcgactgcggaaccaataccgcgactcgaggcgacccagcgcacgacccagcagcgccagcctggcgcagcggtcaatgcggccaaaaatgggccggagaagcgggcgacgcttcgccttcgccataatgaccgcgtcgaaaaagggaccgggaaagggggataccccgaaaaggatccttccccgagaaggaaccaggctccgagcccccctacttatcagaggttcgaaggctggcccctcggaagggttcgacagccgcctcagatcgcgtgggccctacacccgctactggtcagaggttcgaaggccggcccctcggaagggttccacggccgcctcaggctactcgggctccgcgcccattactgatcaggggttcgaaggctggcccccgaagggttcacagccgcctcagacgccgagcgagggatga

SEQ ID NO: 4105 - DNA, 894 bp, Zea mays
  Peptide Sequence Number=SeqID_47480
atgtggaagctcctccgaagccgaggtcgagtctgtctcccgtggccgaggtcgagtccgagcccccgggtcgggcgaggcagagaccgtcggctgaggtcggggcgtagtccgagccctggggtcaggcggagcggagttcgtcgtcttctggggctgagcccaagtccgagccctgggtcgggcggagcggagttcgccgtcttccgggactttagcccgagtccgagccctgggtcgggcggagttcgtcgtcttccgggacttagcccgagtccgagccctgggtcgggcgaagttcgtcgtcttccgggacttagcccgagtccgagccctgggtcgggcggagcggagttcgccgtcttctgggactttagcccgagtccgagccctgggtcgggcggagttcgtcgtcttccgggacttagcccgagtccgagccctgggtcgggcggagcggagcttccgatggcgcctttggctgggcctgactgcctgtcagtctccctctgtcaagtagcactgcagtcggagtggcgcaggcagcgctgtccttctgtcaggccgctttgtgctgatgggggttaccagctgagaattaggagccttgagggtcttaatgcctcgcgtaatgcttcggctggtctggtcgttccctcatgcgagctggccgtagcccggggcgagagggcgatcagggacagactcggcttttttacatacgcccctgcgtcgcctttccgcaaggaggagggggaaagcgccatgttgccctcgatgggcgccgaacatggtgtctccggggcccagaggcacgcccaaaagtacctgcgggtgatctgccggacccggtcccctggcgacggggtccgagggctcgatgcctccctctga

SEQ ID NO: 4106 - DNA, 993 bp, Zea mays
  Peptide Sequence Number=SeqID_47481
atggccgcctcaatgcgtgcgccattgcaaagaggtcctcgcccccgtcctcctatggggggcgacaatgagaccattaaagccaaagagttggaggctcggcggcaggtggcgctggtggtctcgccagcggaggcaaccacctctgcaatgggcagcctcaccagcggtggcaaccacctcagcaccgaagaaagcgtccacctctgcaccggtggcttaccggcgatggcggccgcctcaccgcgtgcagaaaggtcctcgcccccgtcctcctacgggggtgaggacaagaccatccaagaatgcgaccgccacctctacggcatgaccactgacgggagattgcagctgagctgcatgatgaaaatccttgaagccgaacaatggcagaagagcgccaacccccgtgaggtcgcgctcctccaacagcagcaagaagaagacaagatcgacaacaccaccgcgcaggaaacaaaaagcgcaagctccctggcggtagatatccccgatcgtgcctcgaagcgtcacgggcaaggtctcccccgacgtgcgccagggttcccattctatgacatggggctaggcctcacatgtcgtacaagaaacctgaaagagcgaagaaggcgaatcgtcgcacagggagcgtgcaaccgccctgcggttacacacccattcaccttcgccgtagccagtggtcaagaaggcgaaccgccgcacaaggagcgtgcaaccgtcctgcggttattcgcccttccatcttcaccacaatcagcggtcaaggaggcgaaccgccgcacaaggagcatgcaaccacaccgcagttgcgcgccccctcagcttcgctgcaaccggtggtccaacctctggcatggggcccaggcccacatgtcatacatccggcgcgccggttcctgggtgcagcaaagtcgcgccgccgctcgcgccaataccgcgccttctcgaggccgtcgcagaaggctaaggagataa

SEQ ID NO: 4107 - DNA, 468 bp, Zea mays
  Peptide Sequence Number=SeqID_47482
atgggcaagagcaacaagcgcaagcgcgaaccgactcctccatcagaggatttcggtgactcggaatactcggaggaggagttctcctccgagtccgaggggtctccggctcccgtctctcccccggcgtcgtctgatgattcagacgactcccaggggattgccgcggaggtctggacgtacatccgggctgtcgagcgatccgggcttgagggctcggatgagtctgagttctcctcggacgaggaggactcggacggcggcgaggacgaagatgacgatgacgacgacggcgacgacgacgatggtggcgacggcgacggtgacagcagcaacggcggcgggggcagcggcggcaagggcggcaccagaggcggcagcagcacgggcagcaccagaggcggcaacagcaagggtagcaccaggggcggcggcggcaagggcagcagcagcaaggccagtggctaa

SEQ ID NO: 4108 - DNA, 1170 bp, Zea mays
  Peptide Sequence Number=SeqID_47483
atgaacaagacaccggcactcaaggtgccattacaaacggaactccggttccgtccccgcgggtatgaacaacctccacaccggggagcctgcggggcgacaagctccgggcgactcgccagcgacctctgcagcagcagccatggacccaggacggacgcggccaccggaaggctctcctgccaccgcgtcagcaccgacggcggcgtccgcctctccaccaacgccgcactagcgaacgcgggccgctccaaagcgcaccgcaacagttcgccttcctcggcatggctggaggacgcctcctccgcagagctggaggatggtttccaccaccagaagctggaagaggaggtggtcagccgacccgtgcgggaggtagagcccctgctcacctcgctctccgccccagcgaggatgatgaacatccttgaagctgagggcgggaccaagatcgcagcccgacttgcttctccccacccaggagctggtggtcaccgtcttgggggctgggtccccacgcgtcatgcaagctgggcccagggcagaagaaagccaaaccgccgcgcacgggtgcatgcaactgcccagcgattacaagcattcctccactttcgcccagaccagcgggtgaaagggcggacagccatgcagtctgcatgcaaccgtgccaagtgggtgcaccccttcgactccaacgcgcccagcatggaggccctggcccacacatcatgcaaccggcgcgccggatgctacgtgcgagcaactgcaccgtccctcgcgccactaccgcgcctcctcgactgcggaaccagtaccgcgactcgaggcaaccctgtgtatgacccaacagtgccagccaggcgcattggtcacgggccaggaccgggaaagggggataccccgaaagggatccttctccgcgaaggaaacgggccccgagcccccctactgatcagaggttcgaaggctggcccctcggaggggttcaacagccgcctcagagcgctcgggctccgcgcccactactggtcagaggttcgagggtcggcccctcggaagggttcaacggccgcctcaggccactcgggctccgcgcccactactgatcaggggttcgtaggctggccctcgaagggttcacagccgcctcagacgcagagcgagggatga

SEQ ID NO: 4109 - DNA, 858 bp, Zea mays
  Peptide Sequence Number=SeqID_47484
atgaccggggataaacaaaggcaaaagctcaagcaaaagccatcaagcaaaatctccaacacctacatcaaaaaggtgaacaaaaaggatgctacaccatatttgatcaagaagaaaaagaacggaaaggtgatagcaatcaaggccaacaagcaagccaacaaaggaaagggggccaaacacatctgggtgccaaaggagataatttcaaccatgaaaagcaccaagaagggtaatgatggcgcctcctgtgacgtggtcggtccgagccctgggttgggcgaggtggaggctcctccgaggtcgaggttgagtctgtcttccaaggccgaggtcgagtctgagcccctgggtcgggcgaggcagagaccgtcggccgaggccagggctgagtccgagccctggggtcgtgcgaagcggagttcgtcgtcttccggggctgagcccgagtccgagccctgggtcgggcgaagcggagttcgtcgtcttccggggctgagcccgagtccgagccctagggtcgggcgaagcggagttcgtcgtcttccggggctgagcccgagtccgagccctggggtcgggcgaagcggagtttgtcgtcttccggggctgagcccgagtccgagccctggggtcgggcgaagcggagttcgtcgtcttccggggctgagcccgagtctgagccctgggtcgggcgaggcggagtttcctatggcgcccgaggccggactaggctgctgtcagcctcactctgtcgagtggcacaacagtcggagcggcgcaggcgacactgtcttcttgtcaggccagtcagtggagcggcgaagtgattgcggtcacttcggctctatcgactga

SEQ ID NO: 4110 - DNA, 147 bp, Zea mays
  Peptide Sequence Number=SeqID_47485
atggcgagagttgcacgtaccctcctggcaaaggaccgcctaaaaggggtgggcgagaggctccaagttgtggagattcctcgcaaacgggagaaagacaaaggaaggaaaaaccatggtattcaagttgatcatcggatcacttga

SEQ ID NO: 4111 - DNA, 1257 bp, Zea mays
  Peptide Sequence Number=SeqID_47486
atgcgcctttccgtttcactctcctcgagaggcggcgctgctgaggacactaggcccgaccgcccgaggaaggaagagaaacccgcagagggcgatagaggtcagcgcgattcggagatgggcatgggcgacgaactgtgggacgactcggcgctggtcgtcgccttcgaccgcgccatttccacgttcaatgaaatgcattgcaagagcaggcgagcaacgccaagtaaggatgcgaagaaggaacacgctgctgctcctgcagcagaagaagagcccattactgctggagcagtggatgagtgcagagaggaagatgacaactgtgacaacgcacagacagttgagcaacagcagccctctgacgacaggcagacagttgagcaagcttctcttcaggaaactgatccaggcaaagagacacatgtttcagaggctaaaacgctcacagcagatgctgatggaaatttgagttcaagccagcaaactggggagtacaatgaattgctgagacaatactatgagcttgaggagaagagtcggaacattcttgagcaacttcaacaaacaaactcttggaattatcaggcaccaggatatgcttctacaacccaacagcagcaagttcctgtctatagtgccacagcaccagaccttcactcttccaccactcaatcatcatgctgcaattggaatgttcccctggtatctgtctactgctgttcaactggccaaccaagtggaggttctgcttatatgccacctactgctggctgcagcgcaacattgacttgtgatcaatgcccagatgcaaacagtgcataccctagcgtttcaaacttcatgcaggtcccaacaaatgtatctatcaatgatgatcaagttgctaaggctgcaatgaagactgctgaaggtgccttcaattttatgagaagtacgatatctggacagcctggcgcccaaagaaatgaatctgatactgggaaggaggaaagcactgatatgggcacaaacctgaatcttgatagtgatcttgctgctctcttaaattcatggtatgctgctgggttctacacttgcagattgcagcgataccttgttcttgttggtctctgcattaatttctttatttctttgctaacaatcattcacacgtctcagcacttgtacttgtccctacattttgggtgggtacctcacgctgcaatctacgagaaattccagaccgtagagtgctttggccgtcttgagttttag

SEQ ID NO: 4112 - DNA, 618 bp, Zea mays
  Peptide Sequence Number=SeqID_47487
atgaccgtgagcacggctagtataccagttttacactctgcagaggttgcgcatctttacccacaagtcgtgttacccatttgccacggagttgatcagaccccatacacctctaccaaggaagcgaggcagggtaccactacgaggcctttacaaagttccactagcttcagaaaacccgctacagttataggaagctccagtgcagaaatccctcgcctgaccgtcatcgcagcaaaatcaacccaaggacctctctacactgaccactcccctactgcccttgcccctttcaggggccttggcgccaaagtaatcgagacacaggcgacactgtctaaggactgcgggttgattttagtatttggcgggggttctttgataattctaccagtgccgaaagtagggctctcttaccggtgtttatcgaagcacggcaccgaccacagcaagagcggctccgcggcggcgaggaagtccgatgagcaattccctccaccccgactccggattcgccccaacaagaccacgaagagcttcaccacccgccctcgatgcaccacggcccgaccacgcgtccagaacggcaaggaaaaacgttttccccaggcggcgtag

(The sequence listing continues in the following parts.)
